United States Patent Application Publication US 2022/0096574 A1 - sequence listing, part 13

SEQ ID NO: 60257 - protein, 384 aa, Rickettsiella grylli
  misc_feature (1)..(384): tr|A8PK89|A8PK89_9COXI Queuine tRNA-ribosyltransferase OS=Rickettsiella grylli OX=59196 GN=tgt PE=3 SV=1
MNNPLHCQLIKSSKNSYGRVMQLTTAHGHVLTPAFMPVGTRAFVNHMTPYDLKTAGSQIILGGNTYHMLLNPGLDVILASGGMHRLMGWDRPLLTDSGGFQVLSLSKNAKICRIDAEGAHFKHPVTGKVIHLTPQSSIEAQRIIGADIIMAFDECTPEKGGREAALAAMDRTHRWLLASREAYTRSDSRYGYPQALFGIIQGGSFRDLREFSTQFIVEADLAGIALGGEVIGFDMQKTQEVIDWIRPLLPEDKIRYTMGVGLNPQDLIDVAAKGIDLFDCVAPTRNARHGALYHGHVIKRNNRLAFVSEEKKSRILIKKAMYAKDETPLLADCLCYTCRHFTRAYLHFLFKQSASLYYQLACIHNIHTMHQVCEQIRRFILNEC

SEQ ID NO: 60258 - protein, 378 aa, Riemerella anatipestifer
  misc_feature (1)..(378): tr|A0A315A3I5|A0A315A3I5_RIEAN Queuine tRNA-ribosyltran sferase OS=Riemerella anatipestifer OX=34085 GN=tgt PE= 3 SV=1
MSKPFFSIEKTTKSKARAGVISTAHGEIQTPIFMPVGTVASVKTLHQREIRDDVKAQIILGNTYHLYLRPGMEVMEKAGGLHRFMNWERPILTDSGGYQVFSLSKSRKMTEEGVKFKSHIDGSYHFISPEKSMEIQRQIGADIFMAFDECTPYPCEYNQAKASMELTHRWLKRCIEWTENNAELYGHKQRLFPIVQGSTYSDLRKISAEVISEAGAEGNAIGGLSVGEPEEEMYRITNEVTDILPKEKPRYLMGVGTPWNILESIGLGVDMMDCVMPTRNARNGMLFTWQGVMNMKNQKWKEDFSPLDEMGTSFVDKEYSKAYVRHLFVAKEYLGKQIASIHNLAFYLDLVKVAREHILAGDFYEWKEQIVPVLKQRL

SEQ ID NO: 60259 - protein, 378 aa, Riemerella anatipestifer
  misc_feature (1)..(378): tr|A0A1A5HHQ4|A0A1A5HHQ4_RIEAN Queuine tRNA-ribosyltran sferase OS=Riemerella anatipestifer OX=34085 GN=tgt PE= 3 SV=1
MSKPFFSIEKTTESKARAGVISTAHGEIQTPIFMPVGTVASVKTLHQREIRDDVKAQIILGNTYHLYLRPGMEVMEKAGGLHRFMNWERPILTDSGGYQVFSLSKSRKMTEEGVKFKSHIDGSYHFISPEKSMEIQRQIGADIFMAFDECTPYPCEYNQAKASMELTHRWLKRCIEWTENNAELYGHKQRLFPIVQGSTYSDLRKISAEVISEAGAEGNAIGGLSVGEPEEEMYRITNEVTDILPKEKPRYLMGVGTPWNILESIGLGVDMMDCVMPTRNARNGMLFTWQGVMNMKNQKWKDDFSPLDEMGTSFVDKEYSKAYVRHLFVAKEYLGKQIASIHNLAFYLDLVKVAREHILVGDFYEWKEQIVPVLKQRL

SEQ ID NO: 60260 - protein, 378 aa, Riemerella columbipharyngis
  misc_feature (1)..(378): tr|A0A1G7CYS8|A0A1G7CYS8_9FLAO Queuine tRNA-ribosyltran sferase OS=Riemerella columbipharyngis OX=1071918 GN=tg t PE=3 SV=1
MNRRFFSVEKQSESKARAGVISTDHGTIKTPIFMPVGTMASVKTVHQRELKDDIKAQIILGNTYHLYLRPGMEVMQNAGGLHKFMNWDRPILTDSGGYQVFSLSSSRKMSEEGVRFKSHIDGSYHHISPEKSMEIQRQIGGDIFMAFDECTPFPCEYNQAKASMELTHRWLKRCIQWTKENLELYGHRQRLFPIVQGSTYSDLRKISAEVVAESEAEGNAIGGLSVGEPEEEMYRITNEVTDILPKERPCYLMGVGTPWNILESIGLGVDMMDCVMPTRNARNGMLFTWQGVMNIKNEKWKQDFSPLDETGVSFVDREYSKAYVRHLFIAKEYLGKQIASIHNLAFYLDLVRVAREHILAGDFYEWKKSIVPVLKQRL

SEQ ID NO: 60261 - protein, 377 aa, Riemerella sp.
  misc_feature (1)..(377): tr|A0A496P6I0|A0A496P6I0_9FLAO Queuine tRNA-ribosyltran sferase OS=Riemerella sp. OX=2382126 GN=tgt PE=3 SV=1
MKNFFEVEKNTTGKARAGKITTDHGEIQTPIFMPVGTVASVKTVHQHELKEDIKAQIILGNTYHLYLRPGMEIMQKAGGLHQFMNWDRPILTDSGGYQVFSLAASRKMTEEGVKFKSHIDGSYHFISPEKSMEIQRQIGADIFMAFDECTPYPCEYNQAKESMELTHRWLKRCIDWTSANKELYGHQQNLFPIVQGSVYHNLRKISAEVISEAGAAGNAIGGLSVGEPEEIMYEITDIVTDILPKEKPRYLMGVGTPWNILESIGLGIDMMDCVMPTRNARNAMLFTWNGVMNMKNQKWKDDFSPLDEFGTSFVDREYSKAYVRHLFVAKEYLAKQIASIHNLAFYLDLVRTAREHILAGDFYEWKDQIIPQLKQRL

SEQ ID NO: 60262 - protein, 376 aa, Rikenella microfusus
  misc_feature (1)..(376): tr|A0A379MT26|A0A379MT26_9BACT Queuine tRNA-ribosyltran sferase OS=Rikenella microfusus OX=28139 GN=tgt PE=3 SV =1
MRFTLEHTDPRSSARAGVFRTDHGEIRTPIFMPVGTVGSVKGVFHRDLVEEVGAQIILGNTYHLYLRPGTETLYKAGGLHRFAGWDRPILTDSGGFQVFSLTGIRKLTEEGCRFQSHIDGSRHLFTPENVIDTQRLIGADIMMAFDECPPGTAEYGYAAQSWARTSRWLERCFDRYRRTECPYGHHQSLFPIVQGCTYADLRRQSAEFVQQFDADGYAIGGLAVGEPAPVMYEMIETVNAVLPQDRPRYLMGVGTPVNILEAIERGVDMFDCVMPTRNGRNGMLFTSEGIVNIRNRKWAEDFSPIDPMGHTFVDTHYSKAYLRHLTVAGEMMAAQIASLHNLGFYLWLVREARGHIVAGDFAAWKTEMVEKLGRRL

SEQ ID NO: 60263 - protein, 376 aa, Rikenellaceae bacterium
  misc_feature (1)..(376): tr|A0A3D0FQR5|A0A3D0FQR5_9BACT Queuine tRNA-ribosyltran sferase OS=Rikenellaceae bacterium OX=2049048 GN=tgt PE =3 SV=1
MRYERTVRDTETSASCGLLYTDHGVIETPIFMPVGTVGSVKAVFHRDLIDDIGAQIILGNTYHLYLRPGTDIINRAGGIHKFISWNKPVLTDSGGYQVFSLAENRKLTNEGCIFRSHIDGSKHFFTPENVVDIQRLIGADIIMALDECPPGSSDHHYAKESLKLTKQWLERGAVHFDATEPLYNYSQAFFPIIQGCVYPDLRVEAAEHAVSLEREGYAIGGLSVGEPTDIMYQILELLDPILPRDKPRYLMGVGTPVNILEGISRGVDMFDCVMPTRNARNGMLFTSEGVINIRNRKWADDFSLLDENGTSFVDKMYSKAYLRHLFVSSEILGAQIASEHNLAFYLNLINDARLHIKKGDFKMWKEVTIKKLENRL

SEQ ID NO: 60264 - protein, 376 aa, Rikenellaceae bacterium
  misc_feature (1)..(376): tr|A0A3D4XEC3|A0A3D4XEC3_9BACT Queuine tRNA-ribosyltran sferase OS=Rikenellaceae bacterium OX=2049048 GN=tgt PE =3 SV=1
MRFEKTAQDAESSARCGLLYTDHGVVETPIFMPVGTVGSVKAVYHRDLKEDIKAQIILGNTYHLYLRPGLEIIKNAGGLHKFISWDRPILTDSGGYQVFSLAENRKLTDEGCMFRSHIDGSKHFFSPEGVVDIQRIIGADIIMALDECPPGDSDHAYAKKSLKLTMQWLERGIKHFDSTDPLYGYSQTFFPIVQGCVYPDLRRESAEHAVSLNREGYAIGGLSVGEPAEVMYEMIEVLDPILPKDKPRYLMGVGTPANLLEAIERGIDMFDCVMPTRNARNGMLFTSEGMINIRNKKWADDHTPIDVNGTSFVDKTYSKAYLRHLFISGEILGAQIASEHNLAFYLNLMKEAQKHIREGSFKKWKTIAVKKLETKL

SEQ ID NO: 60265 - protein, 366 aa, Rippkaea orientalis
  misc_feature (1)..(366): tr|B7K5R2|B7K5R2_RIPO1 Queuine tRNA-ribosyltransferase OS=Rippkaea orientalis (strain PCC 8801) OX=41431 GN=tg t PE=3 SV=1
MGFSFQTHKKCSQTQARVGVWHTPHGLVETPRFMPVGTLATVKGLTPDQLQTTGAQMILANTYHLHLQPGETLIEKAGGLHPFMGWKGPILTDSGGFQVFSLSELRQIREIGVTFRSPRDGRIIELTPERSIQIQNALGADVIMAFDECPPGQADYATVKAATERTYRWLERCINAHQRPQDQALFGIVQGGIYPELRQSAVNGLIEFDLPGYAIGGVSVGEDPALVREIVQFTAPLLPPNKPRYLMGVGTYREMAMAIASGVDLFDCVIPTRFGRHGTALIRGERKNLKNAQFKEDFTPLDPECPCYTCQTFTRAYLNHLVRSQEMLGYILLSLHNVTELVRFTQRIREAIIGDRFVEEFGHWLS

SEQ ID NO: 60266 - protein, 382 aa, Rivibacter subsaxonicus
  misc_feature (1)..(382): tr|A0A4Q7VVT7|A0A4Q7VVT7_9BURK Queuine tRNA-ribosyltran sferase OS=Rivibacter subsaxonicus OX=457575 GN=tgt PE= 3 SV=1
MLRFDLLKTEGHARRGRLTLNHGIVETPIFMPVGTYGTVKGVMPRSLEEMGAQIILGNTFHLWLRPGLEVLQTFGGLHRFEAWDKPILTDSGGFQVWSLGEMRKISEEGVKFASPVNGDKLFLTPEVSMQIQTVLNSDIVMQFDECTPYESKGKLTSEAEARASMELSLRWAARCKTEFQKLQNPNALFGIVQGGMFESLREESLAKLVEMDLPGYAVGGVSVGEPKNEMLRIMAHTPHRLPANKPRYLMGVGTPEDLVEGVAQGVDMFDCVMPTRNARNGHLFTRFGDLRIRNARYKSDERPIDESCSCYSCAGHAGHAGGFSRAYLHHLDRCGEMLGGMLTSIHNLHYYLNLMREMREALDEGRFETFRKQFHADRARGV

SEQ ID NO: 60267 - protein, 371 aa, Rivicola pingtungensis
  misc_feature (1)..(371): tr|A0A318KXF0|A0A318KXF0_9NEIS Queuine tRNA-ribosyltran sferase OS=Rivicola pingtungensis OX=1054498 GN=tgt PE= 3 SV=1
MLQFTLHSTSAGARRGTLTLNHGQIETPTFMPVGTYGSVKAMSPLELNEIGAQIILGNTFHLWLRPGLDVIRQFGGLHQFIGWDKPILTDSGGFQVFSLGDLRKITEEGVTFQSPINGDKLFLSPEKSMEIQHVLNSDIVMIFDECTPYPADEKTAADSMRMSLRWAERSRKAFDDLHNPNALFGIVQGSMYPALREESLRELMAIGFDGIAIGGLSVGEPKHEMQRMLQVMQPMLPAEKPHYLMGVGTPEDLVYGVAHGIDMFDCVMPTRNARNGWIFTRFGDVKIKNAKYRSDTRPLDETCGCYACRNFSRAYLHHLHRAGEILGARLNTIHNLYYYQQLMADMRAAIEADRFNDFVAQFHADRQRGVD

SEQ ID NO: 60268 - protein, 367 aa, Rivularia sp.
  misc_feature (1)..(367): tr|K9RFJ1|K9RFJ1_9CYAN Queuine tRNA-ribosyltransferase OS=Rivularia sp. PCC 7116 OX=373994 GN=tgt PE=3 SV=1
MSVNFSFQCLAKCSNTSARAGIFSTPHGVVETPRFMPVGTLANVKTITPAQLQETGAQMVLSNTYHLHLQPGEAIVAGGGGLHKFMGWDKPMLTDSGGFQVFSLSEMRSITEEGVSFRSPHDGQIINLTPEKSIEIQNTLGADVIMAFDECPPATANRTEVEAATERTYRWLLRCIEAHNRNEQALFGIVQGGIYADLRSSAANALTQLDLPGYAIGGVSVGEEPELIHEIVQKTAPLLPAHKPRYLMGVGTHQEMVMAIASGVDLFDCVIPTRWARHGTAMVKGERWNIKNAKFREDFTPLDETCPCYTCRNFTRAYLSHLIRAQEILAYTLLSIHNITELIRFTQKIRASILNDTFTTEFGHWLK

SEQ ID NO: 60269 - protein, 376 aa, Robbsia andropogonis
  misc_feature (1)..(376): tr|A0A0F5JZF8|A0A0F5JZF8_9BURK Queuine tRNA-ribosyltran sferase OS=Robbsia andropogonis OX=28092 GN=tgt PE=3 SV =1
MLKFELLGHDGHARRGRITVNHGVIETPIFMPVGTYGTVKAMTPRDLHEINAQIVLGNTFHLWLRPGLDTIAQHGGLHGFMGWNKPILTDSGGFQVFSLGDLRKISEDGVRFASPINGDKLFLSPEISMQIQRVLNSDIVMQFDECTPYQVNGVPTSQELAAESMRMSARWARRSRDEFDREGNPNALFGIVQGGMFEDLRDESLERLRDIPFDGLAIGGLSVGEPKADMMRILAYTGPKLPADKPHYLMGVGTPEDLVNGVANGIDMFDCVMPTRNARNGWLFTRFGDLKIKNASFKNDLRPLDETCGCYTCKNFTRGYLHHLHRTGEILGAQLNTIHNLHYYLALMQEIRDAIDARQFDAFVKRFQTDRARGVT

SEQ ID NO: 60270 - protein, 376 aa, Robbsia sp.
  misc_feature (1)..(376): tr|A0A494XM32|A0A494XM32_9BURK Queuine tRNA-ribosyltran sferase OS=Robbsia sp. DHC34 OX=2419776 GN=tgt PE=3 SV= 1
MLKFDLLTTDGHARRGRLTLNHGVIETPIFMPVGTYGTVKAMTPRDLDEIGAQIILGNTFHLWLRPGNEIMAAHGGLHGFMGWNKPILTDSGGFQVFSLGELRKISEEGVTFASPINGDRLFLSPEVSMQIQRVLNSDIVMQFDECTPYATDGVPTNHKDAADSMRMSMRWAKRSIDEFRRLENPNALFGIVQGGMYEDLRDESLAGLADIGFDGLAIGGLSVGEPKEDMMRVLSHIGPKLPAQKPHYLMGVGTPEDLVESVALGVDMLDCVMPTRNARNGWLFTRFGDVKIKNASHKASLRPLDESCACYTCRNFTRSYLHHLHRVGEILGAQLNTIHNLHYYLELMSEVRKAIEDHAFEAFRVKFHAERARGAT

SEQ ID NO: 60271 - protein, 376 aa, Robertkochia marina
  misc_feature (1)..(376): tr|A0A4S3M011|A0A4S3M011_9FLAO Queuine tRNA-ribosyltran sferase OS=Robertkochia marina OX=1227945 GN=tgt PE=3 S V=1
MQFKRIANDPGSRARAGELTTDHGTIETPIFMPVGTAGTVKGVHQRELTDDINPDIILGNTYHLYLRPKTDILEKAGGLHKFMNWDRNILTDSGGYQVYSLSNNRKIKEEGVKFKSHIDGSYHVFTPENVMDIQRTIGADIIMAFDECTPYPCDYHYAKRSMYMTHRWLDRCIKRFNDTPSKYGYEQTLFPIVQGSTYKDLRKQSAEYIANAGAFGNAIGGLSVGEPAEEMYAMTEVVCEILPEEKPRYLMGVGTPINILENIALGVDMFDCVMPTRNARNGMLFTAHGTINIKNKKWEDDFSPIDEMGITYVDTYYSKAYLRHLFAANEYLGKQIATIHNLGFYLWLVREARKHILAGDFAEWKNTMVKQMDKRL

SEQ ID NO: 60272 - protein, 419 aa, Robiginitalea biformata
  misc_feature (1)..(419): tr|A4CN78|A4CN78_ROBBH Queuine tRNA-ribosyltransferase OS=Robiginitalea biformata (strain ATCC BAA-864 / HTCC2 501 / KCTC 12146) OX=313596 GN=tgt PE=3 SV=1
MREAHANAGIARQNFIFLLRGKAAGVVYFWPQRIQGDSQNTKPVAFTLKHTDPGSKARAGVLQTAHGEIGTPIFMPVGTAGTVKGVHQRELRNDVDPDVILGNTYHLFLRPGMEILEAAGGLHPFMGWDRPILTDSGGYQVYSLSGTRKIKEEGVKFQSHIDGSRHLFTPERVMELQRSIGADIIMAFDECTPYPCDYRYAKRSMDMTHRWLDRCMAHLEEAPPLYGFDQLFFPIVQGSVYKDLRKASAEYIANAGAPGNAIGGLSVGEPAEELYGMAEVVCDILPAEKPRYLMGVGTPANLLECIALGVDMFDCVMPTRNARNGMLFTSEGTINIKNKKWEADFSPLDPMGHTFVDTEYTRAYLRHLFAANEYLGKQIATLHNLGFYLWLVREARRRILDGTFAGWKSEMVQKLDKRL

SEQ ID NO: 60273 - protein, 376 aa, Robiginitalea myxolifaciens
  misc_feature (1)..(376): tr|A0A1I6H5R4|A0A1I6H5R4_9FLAO Queuine tRNA-ribosyltran sferase OS=Robiginitalea myxolifaciens OX=400055 GN=tgt PE=3 SV=1
MNFTLKHTDPGSKARAGLLKTAHGTIETPIFMPVGTVASVKGVHQRELRDEIDPDIILGNTYHLYLRPGTEILKSAGGLHKFMGWDRPILTDSGGYQVYSLSGRRKIKEEGVKFKSHIDGSLHEFTPESVVDLQREIGADIIMAFDECTPYPCEYDYARRSMHLTHRWLDRCIKHFEESEPLYGYQQLFFPIVQGSVYTDLRKQSAEYIAGTDAVGNAIGGLSVGEPAEEMYEMAEAVCDILPTGKPRYLMGVGTPINILENIALGVDMFDCVMPTRNARNGMLFTSEGTINIKNKKWEDDFSPLDPMGHTFVDQEYSKAYLRHLFAANEYLGKQIATIHNLGFYLWLVRESRRRILDGSFRPWKDQMVKQMDKRL

SEQ ID NO: 60274 - protein, 373 aa, Robiginitomaculum sp.
  misc_feature (1)..(373): tr|A0A2G2GMD0|A0A2G2GMD0_9RHOB Queuine tRNA-ribosyltran sferase OS=Robiginitomaculum sp. OX=2030823 GN=tgt PE=3 SV=1
MAEFPFEINAVDGKARTGVLRTSRGPIRTPAFMPVGTAGTVKALTMDQVKGAGSDIILGNTYHLMLRPGAERVRDLGGLHKFSTWAGPILTDSGGFQVFSLSQLAKKSENGMIFQSHIDGSRYELTPERSIEIQADLLGADISMQFDECTEHPVSHADAKTSMELSLRWGARSKAAFGERETQNLFGIVQGSTYRDLREQSAAGLIEQGFDGYAIGGLAVGEGFEKMCEVLDYTPDFLPADRPRYLMGVGRPLDIIEAVARGVDMFDCVMPTRAGRHGQAWSDYGSFNLKNARFRDDAEPLLAEIDCPASQDYSRAYIHHLVKCGETLGAILLSWHNIAYYQSLMMRIRSAIADGSFEDLRRELHEKTAAGLP

SEQ ID NO: 60275 - protein, 377 aa, Robiginitomaculum sp.
  misc_feature (1)..(377): tr|A0A2G2J0I7|A0A2G2J0I7_9RHOB Queuine tRNA-ribosyltran sferase OS=Robiginitomaculum sp. OX=2030823 GN=tgt PE=3 SV=1
MTGFSFDIAATDGAARTGVLKTARGDIRTPAFMPVGTAGTVKGLYMDQVAGAGADIILGNTYHLMLRPGAERVARLGGLHALGGWKGPILTDSGGFQVWSLSKLRKMSEKGVEFQSHLDGSKHMLSPERSIEIQADLLGADICMQLDECTNFPSTHAEAAKSMELSLRWGKRSLEAFGDREIQTLFAIVQGSTFPDLRQISAESSVEARVNGAGYGGFAIGGLAVGEGHEAMLEVLENVMPHLPAARPRYLMGVGKPIDLVESVARGVDMFDCVIPTRSGRHGQVWTDTGPYNIKSARFAEDLSPLDASIDCPASCDYSKAYIHHLIRCGELLGGMLLSWHNIAYYQNLMQRIRASIVAGRFNEFADNFRKNLIIKT

SEQ ID NO: 60276 - protein, 380 aa, Robinsoniella peoriensis
  misc_feature (1)..(380): tr|A0A4U8Q3C1|A0A4U8Q3C1_9FIRM Queuine tRNA-ribosyltran sferase OS=Robinsoniella peoriensis OX=180332 GN=tgt PE =3 SV=1
MYKLIKQDGKAKRGELHTVHGVIQTPVFMNVGTAAAIKGAVATTDLQEIGTQVELSNTYHLHVRPGDDVVRKMGGLHKFMVWDKPILTDSGGFQVFSLAGLRKIKEEGVYFSSHIDGRKIFMGPEESMQIQSNLASTIAMAFDECPSSVASREYVQNSVDRTTRWLARCKEEMARLNSLEDTINKDQLLFAINQGAIYEDIRIEHAKTIAQMDLDGYAIGGLAVGETHEEMYRILDAVVPHLPLEKPTYLMGVGTPANILEAVDRGVDFFDCVYPSRNGRHGHVYTNQGKLNLFNAKFELDDKPIEEGCQCPACRHYSRAYIRHLLKAKEMLGMRLCVLHNLYFYNHMMEEIREAIEQGRYAEYKKAKLEGFEQGNIKIR

SEQ ID NO: 60277 - protein, 375 aa, Robinsoniella sp.
  misc_feature (1)..(375): tr|A0A371AUV8|A0A371AUV8_9FIRM Queuine tRNA-ribosyltran sferase OS=Robinsoniella sp. MCWD5 OX=1812858 GN=tgt PE =3 SV=1
MYRIIKQDGKAKRGELKTVHGTIQTPVFMNVGTAAAIKGAVSTQDLQTLKTQVQLSNTYHLHVRPGDQVVRQLGGLHKFMVWDKPILTDSGGFQVFSLASLRKIKEEGVYFQSHVDGRKIFMGPEESMRIQSNLASTIAMAFDECPSSKAPKEYVESSVERTTRWLERCKNELNRLNQLEDTINKKQLLFGINQGAIFDEIRIEHAKRIAEMDLDGYAVGGLAVGETHEEMYHILDATVEHLPINKPTYLMGVGTPFNILEAVDRGVDFFDCVYPTRNGRHGHLYTNNGKINLFNQKFELDDRPIEEGCQCPACQAYSRAYIRHLLKAKEMLGMRLCVMHNLYFYNTMMEEIREAIEQGNYKKYKTEKIRRMTQI

SEQ ID NO: 60278 - protein, 380 aa, Robinsoniella sp.; identical to SEQ ID NO: 60276
  misc_feature (1)..(380): tr|A0A0J1J0X9|A0A0J1J0X9_9FIRM Queuine tRNA-ribosyltran sferase OS=Robinsoniella sp. RHS OX=1504536 GN=tgt PE=3 SV=1

SEQ ID NO: 60279 - protein, 379 aa, Rodentibacter genomosp.
  misc_feature (1)..(379): tr|A0A1V3J380|A0A1V3J380_9PAST Queuine tRNA-ribosyltran sferase OS=Rodentibacter genomosp. 1 OX=1908264 GN=tgt PE=3 SV=1
MKYELDKTSGNARRGRLVFERPQGTFKVETPAFMPVGTYGTVKGMTPEEVRATGAEILLGNTFHLSLRPGQEIMRKHGDLHDFMQWHRPILTDSGGFQVFSLGKLRKITEEGVKFQNPINGERIFLSPEKSMEIQYDLGSDIVMIFDECTPYPATFDYAKKSMEMSLRWAKRSRDRFDELGNKNALFGIIQGGVFEELRKISLEGLVNIGFDGYAVGGLAVGEPKEDMHRILEYICPQIPADKPRYLMGVGKPEDLVEGVRRGIDMFDCVMPTRNARNGHLFVTDGIVKIRNAKYRDDTSPLDPHCDCYTCKNYTKAYLYHLDKCGEILGARLNTIHNLRYYQHLMAEIRQAIEEDRFDDFVVEFYARIGKPVPPLQKG

SEQ ID NO: 60280 - protein, 387 aa, Rodentibacter genomosp.
  misc_feature (1)..(387): tr|A0A1V3JQ17|A0A1V3JQ17_9PAST Queuine tRNA-ribosyltran sferase OS=Rodentibacter genomosp. 2 OX=1908266 GN=tgt PE=3 SV=1
MKYELDKTSGNARRGRLVFERPQGTFKVETPAFMPVGTYGTVKGMTPEEVRATGAEILLGNTFHLWLRPGQEVMRKHGDLHDFMQWHRPILTDSGGFQVFSLGKLRKITEEGVQFQNPINGERIFLSPEKSMEIQYDLGSDIVMIFDECTPYPATFDYAKKSMEMSLRWAKRSRDRFDELSNKNALFGIIQGGIFEELRKISLEGLVNIGFDGYAVGGLAVGEPKEDMHRILEYICPKIPADKPRYLMGVGKPEDLVEGVRRGIDMFDCVMPTRNARNGHLFVTDGIVKIRNAKYRDDTSPLDPHCDCYTCKNYTKAYLYHLDKCGEILGARLNTIHNLRYYQRLMAEIRQAIEDDRFDDFVVAFYARIGKPVPPLQLDTTSLPLSE

SEQ ID NO: 60281 - protein, 379 aa, Rodentibacter heidelbergensis
  misc_feature (1)..(379): tr|A0A1V3IAS5|A0A1V3IAS5_9PAST Queuine tRNA-ribosyltran sferase OS=Rodentibacter heidelbergensis OX=1908258 GN= tgt PE=3 SV=1
MKYELDKTSGNARRGRLVFERPQGTFSVETPAFMPVGTYGTVKGMTPEEVRATGADILLGNTFHLWLRPGQEVMCKHGDLHDFMQWHRPILTDSGGFQVFSLGKLRKITEEGVKFQNPINGERIFLSPEKSMEIQYDLGSDIVMIFDECTPYPATFDYAKKSMEMSLRWAKRSRDRFDELGNKNALFGIIQGGVFEELRKISLEGLVNIGFDGYAVGGLAVGEPKEDMHRILEYICPQIPADKPRYLMGVGKPEDLVEGVRRGIDMFDCVMPTRNARNGHLFVTDGIVKIRNAKYRDDTSPLDPHCDCYTCKNYTKAYLYHLDKCGEILGARLNTIHNLRYYQRLMAEIRQAIEEDRFDDFVVEFYARIGKPVPPLQLG

SEQ ID NO: 60282 - protein, 387 aa, Rodentibacter heylii
  misc_feature (1)..(387): tr|A0A1V3KN05|A0A1V3KN05_9PAST Queuine tRNA-ribosyltran sferase OS=Rodentibacter heylii OX=1906744 GN=tgt PE=3 SV=1
MKYELDKTSGNARRGRLVFERPQGTFKVETPAFMPVGTYGTVKGMTPEEVRATGAEILLGNTFHLWLRPGPEVMRKHGDLHDFMQWHRPILTDSGGFQVFSLGKLRKITEEGVKFQNPINGERIFLSPEKSMEIQYDLGSDIVMIFDECTPYPATFDYAKKSMEMSLRWAKRSRDRFDELGNKNALFGIIQGGVFEELRKISLEGLVNIGFDGYAVGGLAVGEPKEDMHRILEYICPQIPADKPRYLMGVGKPEDLVEGVRRGIDMFDCVMPTRNARNGHLFVTDGIVKIRNAKYRDDTTPLDPHCDCYTCKNYTKAYLYHLDKCGEILGARLNTIHNLRYYQRLMAEIRQAIEEDRFDDFVTEFYTRMGKPIPPLQLDTTPSPQSE

SEQ ID NO: 60283 - protein, 383 aa, Rodentibacter heylii
  misc_feature (1)..(383): tr|A0A1V3K9R6|A0A1V3K9R6_9PAST Queuine tRNA-ribosyltran sferase OS=Rodentibacter heylii OX=1906744 GN=tgt PE=3 SV=1
MKFKLHKTDGTARRGTMTFQRPQGEFSVETPAFMPVGTYGTVKGMTPEEVRQTGAEILLGNTFHLWLRPGQEIMRKHGDLHDFMQWHRPILTDSGGFQVFSLGKLRKITEEGVKFQNPINGEHIFLSPEKSMEIQYDLGSDIVMIFDECTPYPATFDYAKKSMEMSLRWAKRSRDRFDQLENKNALFGIVQGGIYEELRKISVEGLVKIGFDGYAVGGLAVGEPKEDMHRILEYVCPQLPQDKPRYLMGVGKPEDLVEGVRRGIDMFDCVMPTRNARNGHLFVSNGIVKIRNAKYRDDTTTLDPECDCYTCKHYTKSYLYHLDKCGEILGARLNTIHNLRYYQRLMDQIRQAIEEDSFEQFVIDFYAKIGKPVPPLQSTPKNL

SEQ ID NO: 60284 - protein, 387 aa, Rodentibacter mrazii
  misc_feature (1)..(387): tr|A0A1V3IG01|A0A1V3IG01_9PAST Queuine tRNA-ribosyltran sferase OS=Rodentibacter mrazii OX=1908257 GN=tgt PE=3 SV=1
MKYELDKTSGNARRGRLVFERPQGTFKVETPAFMPVGTYGTVKGMTPEEVRATGAEILLGNTFHLWLRPGQEVMRKHGDLHDFMQWHRPILTDSGGFQVFSLGKLRKITEEGVQFQNPINGERIFLSPEKSMEIQYDLGSDIVMIFDECTPYPATFDYAKKSMEMSLRWAKRSRDRFDELSNKNALFGIIQGGIFEELRKISLEGLVNIGFDGYAVGGLAVGEPKEDMHRILEYICPQIPADKPRYLMGVGKPEDLVEGVRRGIDMFDCVMPTRNARNGHLFVTDGIVKIRNAKYRDDTSPLDPHCDCYTCKNYTKAYLYHLDKCGEILGARLNTIHNLRYYQRLMAEIRQAIEDDRFDDFVVAFYARIGKPVPPLQLDTTSLPLSE

SEQ ID NO: 60285 - protein, 390 aa, Rodentibacter myodis
  misc_feature (1)..(390): tr|A0A1V3JM07|A0A1V3JM07_9PAST Queuine tRNA-ribosyltran sferase OS=Rodentibacter myodis OX=1907939 GN=tgt PE=3 SV=1
MKYELDKTSGNARRGRLVFERPQGTFSVETPAFMPVGTYGTVKGMTPEEVRATGAEILLGNTFHLWLRPGQAVMRKHGDLHDFMQWHRPILTDSGGFQVFSLGKLRKITEEGVKFQNPINGERIFLSPEKSMEIQYDLGSDIVMIFDECTPYPATFDYAKKSMEMSLRWAKRSRDRFDELGNKNALFGIIQGGVFEELRKASLEGLVNIGFDGYAVGGLAVGEPKEDMHRILEYICPQIPADKPRYLMGVGKPEDLVEGVRRGIDMFDCVMPTRNARNGHLFVTDGIVKIRNAKYRDDTGPLDPHCDCYTCKNYTKAYLYHLDKCGEILGARLNTIHNLRYYQRLMAEIRQAIEEDRFDDFVVEFYARMGKPVPPLQLELSQSTETQLSA

SEQ ID NO: 60286 - protein, 387 aa, Rodentibacter pneumotropicus
  misc_feature (1)..(387): tr|A0A4S2QRL8|A0A4S2QRL8_9PAST Queuine tRNA-ribosyltran sferase OS=Rodentibacter pneumotropicus OX=758 GN=tgt P E=3 SV=1
MKYELDKTSGNARRGRLVFERPQGTFKVETPAFMPVGTYGTVKGMTPEEVRATGADILLGNTFHLWLRPGQEVMRKHGDLHDFMQWHRPILTDSGGFQVFSLGKLRKITEESVQFQNPINGERIFLSPEKSMEIQYDLGSDIVMIFDECTPYPATFDYAKKSMEMSLRWAKRSRDRFDELDNKNALFGIIQGGVFEELRKISLEGLVNIGFDGYAVGGLAVGEPKEDMHRILEYICPQIPADKPRYLMGVGKPEDLVEGVRRGIDMFDCVMPTRNARNGHLFVTDGIVKIRNAKYRDDTSPLDPHCDCYTCKNYTKAYLYHLDKCGEILGARLNTIHNLRYYQRLMAEIRQAIEDDRFDDFVVEFYARIGKPVPPLQLDTTPSSLSE

SEQ ID NO: 60287 - protein, 387 aa, Rodentibacter pneumotropicus
  misc_feature (1)..(387): tr|A0A1V3K6B2|A0A1V3K6B2_9PAST Queuine tRNA-ribosyltran sferase OS=Rodentibacter pneumotropicus OX=758 GN=tgt P E=3 SV=1
MKYELDKTSGNARRGRLVFERPQGTFKVETPAFMPVGTYGTVKGMTPEEVRATGADILLGNTFHLWLRPGQEVMRKHGDLHDFMQWHRPILTDSGGFQVFSLGKLRKITEEGVQFQNPINGERIFLSPEKSMEIQYDLGSDIVMIFDECTPYPATFDYAKKSMEMSLRWAKRSRDRFDELDNKNALFGIIQGGVFEELRKISLEGLVNIGFDGYAVGGLAVGEPKEDMHRILEYICPQIPADKPRYLMGVGKPEDLVEGVRRGIDMFDCVMPTRNARNGHLFVTDGIVKIRNAKYRDDTSPLDPHCDCYTCKNYTKAYLYHLDKCGEILGARLNTIHNLRYYQRLMAEIRQAIEEDRFDDFVVEFYARIGKPVPPLQLDTTPSSLSE

SEQ ID NO: 60288 - protein, 386 aa, Rodentibacter rarus
  misc_feature (1)..(386): tr|A0A1V3ISR0|A0A1V3ISR0_9PAST Queuine tRNA-ribosyltran sferase OS=Rodentibacter rarus OX=1908260 GN=tgt PE=3 S V=1
MKYELDKTSGNARRGRLVFERPQGTFSVETPAFMPVGTYGTVKGMTPEEVRATGADILLGNTFHLWLRPGQEVMRKHGDLHDFMQWHRPILTDSGGFQVFSLGKLRKITEEGVKFQNPINGERIFLSPEKSMEIQYDLGSDIVMIFDECTPYPATFDYAKKSMEMSLRWAKRSRDRFDELGNKNALFGIIQGGVFEELRKISLEGLVNIGFDGYAVGGLAVGEPKEDMHRILEYICPQIPADKPRYLMGVGKPEDLVEGVRRGIDMFDCVMPTRNARNGHLFVTEGIVKIRNAKYRDDTSPLDPHCDCYTCKNYTKAYLYHLDKCGEILGARLNTIHNLRYYQRLMAEIRQAIEEDRFDDFVVEFYARMGRAGLPLRLDTTSPLSE

SEQ ID NO: 60289 - protein, 387 aa, Rodentibacter ratti
  misc_feature (1)..(387): tr|A0A1V3L8M6|A0A1V3L8M6_9PAST Queuine tRNA-ribosyltran sferase OS=Rodentibacter ratti OX=1906745 GN=tgt PE=3 S V=1
MKYELDKTSGNARRGRLVFERPQGTFSVETPAFMPVGTYGTVKGMTPEEVRATGAEILLGNTFHLWLRPGQEVMRKHGDLHDFMQWHRPILTDSGGFQVFSLGKLRKITEEGVKFQNPINGERIFLSPEKSMEIQYDLGSDIVMIFDECTPYPATFDYAKKSMEMSLRWAKRSRDRFDELGNKNALFGIIQGGVFEELRKISLEGLVNIGFDGYAVGGLAVGEPKEDMHRILEYICPQIPANKPRYLMGVGKPEDLVEGVRRGIDMFDCVMPTRNARNGHLFVTDGIVKIRNAKYRDDTSPLDPHCDCYTCKNYTKAYLYHLDKCGEILGARLNTIHNLRYYQRLMAEIRQAIEDDRFDDFVVEFYARIGKPVPPLQLDTTSSPLSE

SEQ ID NO: 60290 - protein, 387 aa, Rodentibacter ratti
  misc_feature (1)..(387): tr|A0A1V3L2K5|A0A1V3L2K5_9PAST Queuine tRNA-ribosyltran sferase OS=Rodentibacter ratti OX=1906745 GN=tgt PE=3 S V=1
MKYELDKTSGNARRGRLVFERPQGTFSVETPAFMPVGTYGTVKGMTPEEVRATGAEILLGNTFHLWLRPGQEVMRKHGDLHDFMQWHRPILTDSGGFQVFSLGKLRKITEEGVKFQNPINGERIFLSPEKSMEIQYDLGSDIVMIFDECTPYPATFDYAKKSMEMSLRWAKRSRDRFDELGNKNALFGIIQGGIFEELRKISLEGLVNIGFDGYAVGGLAVGEPKEDMHRILEYICPQIPADKPRYLMGVGKPEDLVEGVRRGIDMFDCVMPTRNARNGHLFVTDGIVKIRNAKYRDDTSPLDPHCDCYTCKNYTKAYLYHLDKCGEILGARLNTIHNLRYYQRLMAEIRQAIEDDRFDDFVVEFYARIGKPVPPLQLDTPSSPLSE

SEQ ID NO: 60291 - protein, 387 aa, Rodentibacter sp.
  misc_feature (1)..(387): tr|A0A1V3K291|A0A1V3K291_9PAST Queuine tRNA-ribosyltran sferase OS=Rodentibacter sp. Ppn85 OX=1908525 GN=tgt PE =3 SV=1
MKYELDKTSGNARRGRLIFERPQGTFKVETPAFMPVGTYGTVKGMTPEEVRATGAEILLGNTFHLWLRPGQEVMRKHGDLHDFMQWHRPILTDSGGFQVFSLGKLRKITEEGVKFQNPINGERIFLSPEKSMEIQYDLGSDIVMIFDECTPYPATFDYAKKSMEMSLRWAKRSRDRFDELGNKNALFGIIQGGVFEELRKISLEGLVNIGFDGYAVGGLAVGEPKEDMHRILEYICPQIPADKPRYLMGVGKPEDLVEGVRRGIDMFDCVMPTRNARNGHLFVTDGIVKIRNAKYRDDTTPLDPHCDCYTCKNYTKAYLYHLDKCGEILGARLNTIHNLRYYQRLMAEIRQAIEDNRFDDFMTEFYTRMGKPVPPLQLNTTPSPLSE

SEQ ID NO: 60292 - protein, 387 aa, Rodentibacter trehalosifermentans
  misc_feature (1)..(387): tr|A0A1V3IM62|A0A1V3IM62_9PAST Queuine tRNA-ribosyltran sferase OS=Rodentibacter trehalosifermentans OX=1908263 GN=tgt PE=3 SV=1
MKYELDKTSGNARRGRLVFERPQGTFSVETPAFMPVGTYGTVKGMTPEEVRATGAEILLGNTFHLWLRPGQEVMRKHGDLHDFMQWHRPILTDSGGFQVFSLGKLRKITEEGVKFQNPINGERIFLSPEKSMEIQYDLGSDIVMIFDECTPYPATFDYAKKSMEMSLRWAKRSRDRFDELGNKNALFGIIQGGVFEELRKISLEGLVDIGFDGYAVGGLAVGEPKEDMHRILEYICPQIPADKPRYLMGVGKPEDLVEGVRRGIDMFDCVMPTRNARNGHLFVTDGIVKIRNAKYRDDTSPLDPHCDCYTCKHYTKAYLYHLDKCGEILGARLNTIHNLRYYQRLMAEIRQAIEKDRFDDFVVEFYARIGKPVPPLQLSTAQSALSE

SEQ ID NO: 60293 - protein, 387 aa, Rodentibacter trehalosifermentans
  misc_feature (1)..(387): tr|A0A1V3IZD3|A0A1V3IZD3_9PAST Queuine tRNA-ribosyltran sferase OS=Rodentibacter trehalosifermentans OX=1908263 GN=tgt PE=3 SV=1
MKYELDKTSGNARRGRLVFERPQGTFSVETPAFMPVGTYGTVKGMTPEEVRATGAEILLGNTFHLWLRPGQEVMRKHGDLHDFMQWHRPILTDSGGFQVFSLGKLRKITEEGVKFQNPINGERIFLSPEKSMEIQYDLGSDIVMIFDECTPYPATFDYAKKSMEMSLRWAKRSRDRFDELGNKNALFGIIQGGVFEELRKISLEGLVNIGFDGYAVGGLAVGEPKEDMHRILEYICPQIPADKPRYLMGVGKPEDLVEGVRRGIDMFDCVMPTRNARNGHLFVTDGIVKIRNAKYRDDTSPLDPHCDCYTCKHYTKAYLYHLDKCGEILGARLNTIHNLRYYQRLMAEIRQAIEKDRFDDFVVEFYARIGKPVPPLQLSTAQSALSE

SEQ ID NO: 60294 - protein, 373 aa, Romboutsia hominis
  misc_feature (1)..(373): tr|A0A2P2BUB8|A0A2P2BUB8_9FIRM Queuine tRNA-ribosyltran sferase OS=Romboutsia hominis OX=1507512 GN=tgt PE=3 SV =1
MSAIRYELIKTCKQSGARLGRLHTPHGVIETPIFMPVGTQATVKSMTPEELKEIGSQIILSNTYHLYMRPGHELVKEAGGLHKFMNWDKPILTDSGGFQVFSLGPLRKITEEGVHFRSHIDGSKHFISPEKAMEIQNALGSDIMMAFDECAPYPADREYVKNSLERTTRWLKRCKEAHKNTEKQALFGIIQGGMYKDLREQSAKEILELDLPGYAVGGLSVGEPKELMYEVLDYTVPLMPEDKPRYLMGVGSPDDLLEGVIRGIDMFDCVLPTRIARNGTAMTSVGKIVVRNAKYAKDFTPLDPNCDCYCCKNYTRAYIRHLVKANEILAARLITTHNLHFLLNLMKQVRQAIMEDRLLDFKEEFFKQYGYKL

SEQ ID NO: 60295 - protein, 373 aa, Romboutsia ilealis
  misc_feature (1)..(373): tr|A0A1V1I3B3|A0A1V1I3B3_9FIRM Queuine tRNA-ribosyltran sferase OS=Romboutsia ilealis OX=1115758 GN=tgt PE=3 SV =1
MSAIRYELIKTCKQSGARLGRLHTPHGVIETPIFMPVGTQATVKSMTPEELKEIGSQIILSNTYHLYMRPGHDLVKEAGGLHKFMNWDRPILTDSGGFQVFSLGPLRKITEEGVHFRSHIDGSKHFISPEKAMEIQNALGSDIMMAFDECAPYPADREYVKNSLERTTRWLKRCKEAHKNTENQALFGIIQGGMYKDLREQSAKEILELDLPGYAVGGLSVGEPKELMYEVLDYTVPLMPEDKPRYLMGVGSPDDLLEGVIRGIDMFDCVLPTRIARNGTAMTSVGKVVVRNAKYARDFSPLDPNCDCYCCRNYTRAYIRHLVKANEILASRLITTHNLYFLLNLMKQVREAIMEDRLLDFKEEFFKAYGYTK

SEQ ID NO: 60296 - protein, 373 aa, Romboutsia lituseburensis
  misc_feature (1)..(373): tr|A0A1G9RA49|A0A1G9RA49_9FIRM Queuine tRNA-ribosyltran sferase OS=Romboutsia lituseburensis DSM 797 OX=1121325 GN=tgt PE=3 SV=1
MSAIRYELIKTCKQSGARLGRLHTPHGVIETPIFMPVGTQATVKSMTPEELKEIGSQIILSNTYHLYMRPGHDLVKEAGGLHKFMNWDKPILTDSGGFQVFSLGPLRKITEEGVHFRSHIDGSKHFISPEKAMEIQNALGSDIMMAFDECAPYPADREYVKNSLERTTRWLKRCKEAHTNTEKQALFGIIQGGMYKDLREQSAKEILELDLPGYAVGGLSVGEPKELMYEVLDYTVPLMPENKPRYLMGVGSPDDLLEGVIRGIDMFDCVLPTRIARNGTAMTSVGKIVVRNASYARDFGPLDPNCDCYCCRNYSRAYIRHLVKANEILASRLITTHNLHFLLNLMKQVREAIMEDRLLDFKEEFFKAYGYTK

SEQ ID NO: 60297 - protein, 373 aa, Romboutsia maritimum
  misc_feature (1)..(373): tr|A0A371IRE4|A0A371IRE4_9FIRM Queuine tRNA-ribosyltran sferase OS=Romboutsia maritimum OX=2020948 GN=tgt PE=3 SV=1
MYAVRYELIKTCKQSGARLGRLHTPHGVIETPIFMPVGTQATVKAMTPEELKEIGSQIILSNTYHLYMRPGHDLVKEAGGLHKFMNWDKPILTDSGGFQVFSLGPLRKITEEGVNFRSHIDGSKHFISPEKAMEIQNALGSDIMMAFDECAPYPADREYVKNSLERTTRWLKRCKEAHKNTENQALFGIIQGGMYKDLREQSAKEVLAVDLPGYAIGGLSVGEPKKLMYEVLEYTTPLMPVDKPRYLMGVGSPDDLIEGVIRGVDMFDCVLPTRIARNGTAMTSEGKVVVRNAKYARDFTPLDPECDCYCCKNYTRAYIRHLVKANEILASRLISTHNLHFLLKLMEQVRQAIMEDRLLDFRAEFFQKYGYEL

SEQ ID NO: 60298 - protein, 373 aa, Romboutsia weinsteinii
  misc_feature (1)..(373): tr|A0A371J8X2|A0A371J8X2_9FIRM Queuine tRNA-ribosyltran sferase OS=Romboutsia weinsteinii OX=2020949 GN=tgt PE= 3 SV=1
MSAVRYELIKTCKQSGARLGRLHTPHGVIETPIFMPVGTQATVKSMTPEELKEIGSQIILSNTYHLYMRPGHDLVKEAGGLHKFMNWDKPILTDSGGFQVFSLGPLRKITEEGVNFRSHIDGSKHFISPEKAMEIQNALGSDIMMAFDECAPYPADRDYVKKSLERTTRWLHRCKEAHKNTENQALFGIIQGGMYKDLREQSAKEILELDLPGYAVGGLSVGEPKDLMYEVLDYTVPLMPENKPRYLMGVGSPDDLLEGVIRGIDMFDCVLPTRIARNGTAMTSEGKVVVRNAKYARDFSPLDPECDCYCCKNYTRGYIRHLVKANEILASRLITTHNLHFLLKLMEQVREAIREDRLLDFKDEFFKKYGYEL

SEQ ID NO: 60299 - protein, 375 aa, Roseateles aquatilis
  misc_feature (1)..(375): tr|A0A246IU23|A0A246IU23_9BURK Queuine tRNA-ribosyltran sferase OS=Roseateles aquatilis OX=431061 GN=tgt PE=3 S V=1
MLKFELLKTEGRARRGTMTLNHGVVQTPIFMPVGTYGTVKGVMPRSLEEMGAQIILGNTFHLWMRPGLDIMKQFGGLHRFESWNKPILTDSGGFQVWSLGEMRKISEEGVKFASPVNGDKLFLTPEISMQIQTVLNSDIVMQFDECTPYESKGQLTTEKEARLSMEMSLRWARRCQDEFGRLENPNALFGIVQGGMFEHLRDESLAGLKALDLPGYAIGGLSVGEPKADMLRVLDHIGHQLPADKPRYLMGVGTPEDLVEGVRQGIDMFDCVMPTRNARNGHLFTRFGDLRLRNARYKADERPVDETCTCYCCQNFSRAYLHHLDRCGEMLGPMLTSVHNLHYYLNLMKEVRESLDAGDFEGFRARFAADRARGI

SEQ ID NO: 60300 - protein, 375 aa, Roseateles depolymerans
  misc_feature (1)..(375): tr|A0A2W5DU92|A0A2W5DU92_9BURK Queuine tRNA-ribosyltran sferase OS=Roseateles depolymerans OX=76731 GN=tgt PE=3 SV=1
MLQFELHKTEGRARRGTLTLNHGVVQTPIFMPVGTYGTVKGVMPRSLEEMGAQIILGNTFHLWMRPGLDIIKQFGGLHRFESWHKPILTDSGGFQVWSLGEMRKISEEGVKFASPVNGDKLFLTPEISMQIQTILNSDIVMQFDECTPYETKGKLTTEREAKASMEMSLRWAKRCQAEFARLENPNALFGIVQGGMFEHLRDHSLAGLVDLDLPGYAIGGLSVGEPKADMQRVLAHTGHQLPANKPRYLMGVGTPEDLVEGVAQGIDMFDCVMPTRNARNGHLFTRFGDLRLRNARYKADESPVDPTCSCYTCRNFSRAYLHHLDRCGEMLGPMLTSIHNLHYYLNLMQEVRDALDAGDFEGFRRRFAADRARGV

SEQ ID NO: 60301 - protein, 375 aa, Roseateles depolymerans
  misc_feature (1)..(375): tr|A0A0U3M7V6|A0A0U3M7V6_9BURK Queuine tRNA-ribosyltran sferase OS=Roseateles depolymerans OX=76731 GN=tgt PE=3 SV=1
MLKFELLKTEGRARRGRMTLNHGVVQTPIFMPVGTYGTVKGVMPRSLEEMGAQIILGNTFHLWMRPGLDIMKQFGGLHRFESWNKPILTDSGGFQVWSLGEMRKISEEGVKFASPVNGDKLFLTPEISMQIQTVLNSDIVMQFDECTPYETKGHITTEKEARLSMEMSLRWAKRCQDEFARLENPNALFGIVQGGMFENLRDESLNGLKALDLPGYAIGGLSVGEPKADMLRVLDHIAHQLPEHKPRYLMGVGTPEDLVEGVRQGVDMFDCVMPTRNARNGHLFTRFGDLRLRNARYKADERPVDETCTCYCCQNFSRAYLHHLDRCGEMLGPMLTSIHNLHYYLNLMKEVREALDADDFEGFRQRFQADRARGI

SEQ ID NO: 60302 - protein, 375 aa, Roseateles sp.
  misc_feature (1)..(375): tr|A0A1H7KCL5|A0A1H7KCL5_9BURK Queuine tRNA-ribosyltran sferase OS=Roseateles sp. YR242 OX=1855305 GN=tgt PE=3 SV=1
MLKFELLKTEGRARRGRMTLNHGVVQTPIFMPVGTYGTVKGVMPRSLEEMGAQIILGNTFHLWMRPGLDIMKQFGGLHRFESWDKPILTDSGGFQVWSLGEMRKISEEGVKFASPVNGDKLFLTPEISMQIQTVLNSDIVMQFDECTPYETKGHITTEKEARLSMEMSLRWAKRCQDEFARLENPNALFGIVQGGMFENLRDESLAGLKALDLPGYAIGGLSVGEPKADMLRVLDHLAHQLPDQKPRYLMGVGTPEDLVEGVRQGVDMFDCVMPTRNARNGHLFTRFGDLRLRNARYKADERPVDETCSCYCCQNFSRAYLHHLDRCGEMLGPMLTSVHNLHYYLNLMKEVREALDGGDFAGFQVRFKADRARGI

SEQ ID NO: 60303 - protein, 382 aa, Roseburia faecis
  misc_feature (1)..(382): tr|A0A173TDH9|A0A173TDH9_9FIRM Queuine tRNA-ribosyltran sferase OS=Roseburia faecis OX=301302 GN=tgt PE=3 SV=1
MATYELLKQEGSAKRAVFHTVHGDIQTPVFMNVGTVAAIKGAVSTMDLKEIKCQVELSNTYHLHVRPGDKLIKEMGGLHKFMVWDRPILTDSGGFQVFSLAGLRKIKEEGVYFHSHVDGAKIFMGPEESMQIQSNLGSTIAMAFDECPSSVAERRYVEDSVARTTRWLERCKKEMQRLNSLEDTINKEQLLFGINQGAIFSDIRTDHAKRISELDLDGYAIGGLAVGETHEQMYQIIEETVPYLPKNKPTYLMGVGTPANILEGVARGIDFFDCVYPSRNGRHGHVYTNEGKLNLFNQKYEKDMRPIEEGCQCPACRHYSRAYIRHLLKAKEMLGMRLCVLHNLYFYNTMMEEIRNALDAGNFASYKEEKLYRMGQSSIKNV

SEQ ID NO: 60304 - protein, 382 aa, Roseburia faecis
  misc_feature (1)..(382): tr|A0A0M6WS06|A0A0M6WS06_9FIRM Queuine tRNA-ribosyltran sferase OS=Roseburia faecis OX=301302 GN=tgt PE=3 SV=1
MATYELLKQEGSAKRAVFHTVHGDIQTPVFMNVGTVAAIKGAVSTMDLKEIKCQVELSNTYHLHVRPGDKLIKEMGGLHKFMVWDRPILTDSGGFQVFSLAGLRKIKEEGVYFHSHVDGAKIFMGPEESMQIQSNLGSTIAMAFDECPSSVAERRYVEDSVARTARWLERCKKEMQRLNSLEDTINKEQLLFGINQGAIFSDIRTDHAKRISELDLDGYAIGGLAVGETHEQMYQIIEETVPYLPKNKPTYLMGVGTPANILEGVARGIDFFDCVYPSRNGRHGHVYTNEGKLNLFNQKYEKDMRPIEEGCQCPACRHYSRAYIRHLLKAKEMLGMRLCVLHNLYFYNTMMEEIRDALDAGNFASYKEEKLYRMGQSSIKNV

SEQ ID NO: 60305 - protein, 383 aa, Roseburia hominis
  misc_feature (1)..(383): tr|G2T1C9|G2T1C9_ROSHA Queuine tRNA-ribosyltransferase OS=Roseburia hominis (strain DSM 16839 / NCIMB 14029 / A2-183) OX=585394 GN=tgt PE=3 SV=1
MYELLKQEGRAKRGVFHTVHGDIQTPVFMNVGTVAAIKGAVSTEDLEQIKCQVELSNTYHLHVRTGDKLIREVGGLHKFMSWNRPILTDSGGFQVFSLAGLRKIKEEGVYFHSHIDGAKIFMGPEESMQIQSNLGSTIAMAFDECPPALAERKYVEDSVARTTRWLERCKNEMQRLNGLEDTVNRHQMLFGINQGAIYTDIRIDHAKRISELDLDGYAVGGLAVGETHEEMYHVLDETVPYLPVNKPIYLMGVGTPANILEGVERGIDFFDCVYPSRNGRHGHVYTNQGKINLFNQKYEKDMRPIEEGCGCPTCRRYSRAYIRHLLKAKEMLGMRLCVLHNLYFYNTMMEEIRDALDAGNFASYKEEKLYSMGQINREKEMEK

SEQ ID NO: 60306 - protein, 383 aa, Roseburia hominis
  misc_feature (1)..(383): tr|A0A395VAN0|A0A395VAN0_9FIRM Queuine tRNA-ribosyltran sferase OS=Roseburia hominis OX=301301 GN=tgt PE=3 SV=1
MYELLKQEGRAKRGVFHTVHGDIQTPVFMNVGTVAAIKGAVSTEDLEQIKCQVELSNTYHLHVRTGDKLIKEVGGLHKFMSWNRPILTDSGGFQVFSLAGLRKIKEEGVYFHSHIDGAKIFMGPEESMQIQSNLGSTIAMAFDECPPALAERKYVEDSVARTTRWLERCKNEMQRLNGLEDTVNRHQMLFGINQGAIYTDIRIDHAKRISELDLDGYAVGGLAVGETHEEMYHVLDETVPYLPVNKPTYLMGVGTPANILEGVERGIDFFDCVYPSRNGRHGHVYTNQGKINLFNQKYEKDMRPIEEGCGCPTCRRYSRAYIRHLLKAKEMLGMRLCVLHNLYFYNTMMEEIRDALDAGNFASYKEEKLYGMGQINREKEMAK

SEQ ID NO: 60307 - protein, 384 aa, Roseburia intestinalis
  misc_feature (1)..(384): tr|D4KNK7|D4KNK7_9FIRM Queuine tRNA-ribosyltransferase OS=Roseburia intestinalis M50/1 OX=657315 GN=tgt PE=3 S V=1
MYELLKQEGRAKRGILHTVHGDIQTPVFMNVGTVAAIKGAVSTEDLEQIKCQVELSNTYHLHVRTGDKLIREVGGLHKFMSWNRPILTDSGGFQVFSLAGLRKIKEEGVYFHSHIDGAKIFMGPEESMQIQSNLGSTIAMAFDECAPALADRSYVEASVARTTRWLERCKTKMQQLNAEEGTVNRHQMLFGINQGAIYSDIRIDHAKRISELDLDGYAVGGLAVGETHEEMYHILDETVPYLPLHKPTYLMGVGTPANILEGVERGVDFFDCVYPTRNGRHGHVYTNQGKINLFNQKYEKDMRPIEEGCGCPTCRRYSRAYVRHLLKAKEMLGMRLCVLHNLYFYNTMMEEIRDAIDEGRFHSYKEEKLYGMGQINREKEKQNG

SEQ ID NO: 60308 - protein, 384 aa, Roseburia intestinalis
  misc_feature (1)..(384): tr|A0A3R6AT71|A0A3R6AT71_9FIRM Queuine tRNA-ribosyltran sferase OS=Roseburia intestinalis OX=166486 GN=tgt PE=3 SV=1
MYELLKQEGRAKRGILHTVHGDIQTPVFMNVGTVAAIKGAVSTEDLEQIKCQVELSNTYHLHVRTGDKLIREVGGLHKFMSWNRPILTDSGGFQVFSLAGLRKIKEEGVYFHSHIDGAKIFMGPEESMQIQSNLGSTIAMAFDECAPALADRSYVEASVARTTRWLERCKTKMQQLNSEEGTVNCHQMLFGINQGAIYSDIRIDHAKRISELDLDGYAVGGLAVGETHEEMYHILDETVPYLPLHKPTYLMGVGTPANILEGVERGVDFFDCVYPTRNGRHGHVYTNQGKINLFNQKYEKDMRPIEEGCGCPTCRRYSRAYVRHLLKAKEMLGMRLCVLHNLYFYNTMMEEIRDAIDEGRFHSYKEEKLYGMGQINREKEKQNG

SEQ ID NO: 60309 - protein, 401 aa, Roseburia inulinivorans
  misc_feature (1)..(401): tr|A0A3R6DQH5|A0A3R6DQH5_9FIRM Queuine tRNA-ribosyltran sferase OS=Roseburia inulinivorans OX=360807 GN=tgt PE= 3 SV=1
MPKYNGNRKGVQKLYELLKEEGRAKRGVFHTVHGDIQTPVFMNVGTVAAIKGAVSTEDLEQIKCQVELSNTYHLHVRTGDKLIKEMGGLHKFMSWNRPILTDSGGFQVFSLAGLRKIKEEGVYFHSHIDGAKIFMGPEESMQIQSNLGSTIAMGFDECAPALAERPYVEASVARTTRWLERCKKEMNRLNSLEDTVNKNQMLFGINQGAIYADIRIDHAKRISELDLDGYAVGGLAVGETHEEMYYILDETVPYLPRKKPTYLMGVGTPANILEGVDRGIDFFDCVYPSRNGRHGHVYTNQGKINLFNQKYEKDMRPIEEGCQCPACRRYSRAYIRHLLKAKEMLGMRLCVLHNLYFYNTMMEEIRDALDAGNFRSYKEEKLYNMGQIDREKEMSGQKKFY

SEQ ID NO: 60310 - protein, 388 aa, Roseburia inulinivorans
  misc_feature (1)..(388): tr|A0A0M6WX43|A0A0M6WX43_9FIRM Queuine tRNA-ribosyltran sferase OS=Roseburia inulinivorans OX=360807 GN=tgt PE= 3 SV=1
MYELLKEEGRAKRGVFHTVHGDIQTPVFMNVGTVAAIKGAVSTEDLEQIKCQVELSNTYHLHVRTGDKLIKEMGGLHKFMSWNRPILTDSGGFQVFSLAGLRKIKEEGVYFHSHIDGAKIFMGPEESMQIQSNLGSTIAMGFDECAPALAERPYVEASVARTTRWLERCKKEMNRLNSLEDTVNKNQMLFGINQGAIYADIRIDHAKRISELDLDGYAVGGLAVGETHEEMYYILDETVPYLPRKKPTYLMGVGTPANILEGVDRGIDFFDCVYPSRNGRHGHVYTNQGKINLFNQKYEKDMRPIEEGCQCPACRRYSRAYIRHLLKAKEMLGMRLCVLHNLYFYNTMMEEIRDALDAGNFRSYKEEKLYNMGQIDREKEMSGQKKFY

SEQ ID NO: 60311 - protein, 372 aa, Roseburia sp.
  misc_feature (1)..(372): tr|A0A1Q6TRM2|A0A1Q6TRM2_9FIRM Queuine tRNA-ribosyltran sferase OS=Roseburia sp. CAG:197_41_10 OX=1897018 GN=tg t PE=3 SV=1
MASYELLKQEGRAKRGIFHTVHGDIQTPVFMNVGTIGAIKGAVSTEDLKEIHCQVELSNTYHLHVRPGDKLIKEIGGLHKFMVWDRPILTDSGGFQVFSLAGLRKIKEEGVYFHSHVDGAKIFMGPEESMQIQSNLGSTIAMAFDECPSSVADRRYVEDSVNRTARWLERCKKEMQRLNALPDTINKEQLLFGINQGAIYEDIRIDHAKRIAEMDLDGYAVGGLAVGETHEEMYHILDETVPHLPVNKPTYLMGVGTPANILEGVARGVDFFDCVYPSRNGRHGHVYTNQGKLNLFNQKFEEGCQCPACRTYSRAYIRHLLKAKEMLGMRLCVLHNLYFYNTMMEEIRDALDEGRFHSYKEEKLYGMQQGEH

SEQ ID NO: 60312 - protein, 376 aa, Roseburia sp.
  misc_feature (1)..(376): tr|R5TGM9|R5TGM9_9FIRM Queuine tRNA-ribosyltransferase OS=Roseburia sp. CAG:50 OX=1262949 GN=tgt PE=3 SV=1
MYKLLKKDGRAKRAEVTTVHGTIQTPVFMNVGTAAAIKGAVSTDDLQQIKTQVELSNTYHLHVRPGDKLIKELGGLHKFMVWDKPILTDSGGFQVFSLAGLRKIKEEGVQFHSHVDGRKIFMGPEESMQIQSNLGSTIAMAFDECPPALADRNYVQPSVDRTTRWLERCKKEMQRLNSLEDTINKNQMLFGINQGAIFDDIRIDHAKRISEMDLDGYAVGGLAVGESHEEMYHILDVTVPHLPEDKPTYLMGVGTPANILEAVDRGVDFFDCVYPSRNGRHGHVYTNFGKLNLFNQKFERDMRPIEVGCQCPACRTYSRAYIRHLLKAKEMLGMRLCVLHNLYFYNTMMEEIRDAIDMGNYQNYKAEKLYRMEHGE

SEQ ID NO: 60313 - protein, 377 aa, Roseiarcus fermentans
  misc_feature (1)..(377): tr|A0A366F7L3|A0A366F7L3_9RHIZ Queuine tRNA-ribosyltran sferase OS=Roseiarcus fermentans OX=1473586 GN=tgt PE=3 SV=1
MTDAIALTIHARDGAARTGALLTPRGDIRTPAFMPVGTAATVKAMRPEDVRATGADIVLSNTYHLMLAPGAERIARLGGLHRFMNWPRPILTDSGGFQVMSLAKLRKINGNGVIFQSHIDGSRHELTPERSMEIQRLLGADIQMQMDECVKLPCPPEEAERAMRLSLRWAERSKAAFGDDQPGRALFGIVQGGVERTLRIESARALVGMDFHGYAIGGLAVGEPQADMLATIEAVIPHLPDTKPRYLMGVGTPDDLLQSLRRGVDMFDCVMPTRAGRHGMVFTRAGRLNLRNARFADDSRPVDPLSTSAMARDYSRAYFRHLVKAGEILAMMALTEINLAYYQDLMAGARSAIGEGRLDAYIEETRRGWAEGEAEET

SEQ ID NO: 60314 - protein, 374 aa, Roseibaca calidilacus
  misc_feature (1)..(374): tr|A0A0N8K780|A0A0N8K780_9RHOB Queuine tRNA-ribosyltran sferase OS=Roseibaca calidilacus OX=1666912 GN=tgt PE=3 SV=1
MKFAFQIEARDGRARQGRIDTPRGEIRTPAFMPVGTAATVKGMMPEQVRQTGADILLGNTYHLMLRPSAERIAALGGLHRFMNWDRPILTDSGGFQVMSLANLRKLTEEGVQFSSHVDGSRHMLTPERSMEIQRLLGSDIVMAFDECTPFPADELVARQSMELSMRWAKRSREAFGDRPGYALFGIQQGSVYPDLRAESAEALRGIGFDGYAIGGLAVGEGQELMFDVLDYAPGQLHDDKPRYLMGVGKPDDIVGAVQRGVDMFDCVLPTRSGRTGQAWTARGSVNLRNARHRDDGRPLEEGCDCPACTKYSRAYLHHVVRLDEMIAGMLLTWHNLRYYQRLMAGLRAAIAETRLEAFVADFHALRAQGDIDPI

SEQ ID NO: 60315 - protein, 374 aa, Roseibaca ekhonensis
  misc_feature (1)..(374): tr|A0A3B0M6G1|A0A3B0M6G1_9RHOB Queuine tRNA-ribosyltran sferase OS=Roseibaca ekhonensis OX=254356 GN=tgt PE=3 S V=1
MRFAFQIEARDGRARQGRIDTPRGEIRTPAFMPVGTAATVKGMLPEQVRETGADILLGNTYHLMLRPSAERIADLGGLHKFMNWDRPILTDSGGFQVMSLANLRKLTEEGVRFASHVDGSRHMLTPERSMEIQRLLGSDIVMAFDECTPFPADEALARASMELSMRWAQRSREAFGDRPGYALFGIQQGSVYKDLRAESAEALTAIGFDGYAIGGLAVGEGQELMFDVLDYAPGQLPDDKPRYLMGVGKPDDIVGAVQRGVDMFDCVLPTRSGRTGQAWTARGSVNLRNARHRDDPRPLEEGCDCPACTKYSRAYLHHVVRLDEMIAGMLLTWHNLRYYQRLMAGLRGAIATARLDAFVAEFHALRAQGDIDPI

SEQ ID NO: 60316 - protein, 391 aa, Roseibacillus sp.
  misc_feature (1)..(391): tr|A0A2E3IJR2|A0A2E3IJR2_9BACT Queuine tRNA-ribosyltran sferase OS=Roseibacillus sp. OX=2024856 GN=tgt PE=3 SV= 1
MFELLATDSSSKARYGRLTTAHGTVETPIFMPVGTQGSVKTLHPDELRLLGSEIILGNTYHLWLRPGQETIRELGGLHRFTSWDRPILTDSGGFQVWSLAKTRKITEEGVHFQNHLDGSPALLTPEKSMEIQATLGSDIAMVFDECPPYPCERSYAEESTALTTRWAERCRIWHADYSSDFFPDAPTNTNEGENSRPSTRRQLCFGIVQGSSYEDLRAASARDLAMLDFDGYAVGGVSVGEPEEEMFRAVEHSEPFLPPEKPRYAMGLGTPPQMLEMIARGVDMFDCVHPTRSARHGLAFTNDGPIHIKNARFERDKSPLTEDCHPHLADFSRAYLRHLFKAGEMLALRLLSFHNLDFYLRLVRNARKAISEDQFEEFRSSFCERYNHKRT

SEQ ID NO: 60317 - protein, 391 aa, Roseibacillus sp.
  misc_feature (1)..(391): tr|A0A2E7AKD4|A0A2E7AKD4_9BACT Queuine tRNA-ribosyltran sferase OS=Roseibacillus sp. OX=2024856 GN=tgt PE=3 SV= 1
  misc_feature (320)..(320): Xaa can be any naturally occurring amino acid
  misc_feature (326)..(326): Xaa can be any naturally occurring amino acid
MFELLATDSFSKARCGRLTTAHGPIETPIFMPVGTQGSVKTLHPDELKLLGSEIILGNTYHLWLRPGHNVIRDLGGLHHFTNWDRPILTDSGGFQVWSLAKTRKITEEGVHFQNHLDGSPALLTPEKSMEIQASLGSDIAMVFDECPPYPCERSYAEQSTALTSRWAERCRTWHSEKSSLYYPETISPGLGEDSSTASAKRQLCFGIVQGSSYADLRATSARDLSQLDFDGYAVGGVSVGEPEEEMLRAVEHSEPFLPPHKPRYAMGLGTPPQMLEMIARGVDMFDCVHPTRSARHGLAFTNDGPIHIKNAQFERDPSPXTEDCHXHLAGFSRAYLRHLFKAGEMLALRLLSFHNLDFYLTLMRKAREAIKEGHFEEFHSSFSERYNQQRK

SEQ ID NO: 60318 - protein, 368 aa, Roseibacterium elongatum
  misc_feature (1)..(368): tr|W8RUS3|W8RUS3_9RHOB Queuine tRNA-ribosyltransferase OS=Roseibacterium elongatum DSM 19469 OX=1294273 GN=tgt PE=3 SV=1
MTATDGRARSGVIDTPRGQIRTPAFMPVGTAATVKAMMPESVAATGADILLGNTYHLMLRPTAERIAALGGLHKFMNWSGPILTDSGGFQVMSLAELRKLTEEGVTFRSHIDGSRHMLSPERSMEIQTLLGSDIVMCFDECPALPADRDRIAESMRLSMRWAERSKEAFGDRPGHALFGIQQGGLDEDLRGESAEALQAIGFDGYAVGGLAVGEGQAAMFGCLDYAPQMLPADKPRYLMGVGKPDDIVGAVARGIDMMDCVLPSRSGRTGQAWTRRGQVNIKNARHADDPRPLDEHCTCPACRNYSRAYLHHVFRSGEIISSMLLTWHNLHYYQELMAGMRAAIAQGRFAAFEATFHAQRAEGDIAPL

SEQ ID NO: 60319 - protein, 384 aa, Roseibium hamelinense
  misc_feature (1)..(384): tr|A0A562THC9|A0A562THC9_9RHOB Queuine tRNA-ribosyltran sferase OS=Roseibium hamelinense OX=150831 GN=tgt PE=3 SV=1
MTNQTQKPFSFKLLKTDGLARRGEITTPHGTVRTPTFMPVGTQATVKAMYPGQVRETGADVVLGNTYHLMLRPTAERVDRLGGLHTFMNWPHTILTDSGGFQVMSLAQLRKLDEDGVRFQSHIDGQKYHLTPERSVEIQGLLGSDIQMQLDECIKLPSPEEEVQRAMELSLRWAERSRVQFEKMGGPAKGQGLYGIVQGGDVPHLRVRSAEELAKMPFEGYSVGGLAVGEPQDVMLKMLEVTTPVMPADKPRYLMGVGTPDDLLESVARGIDQFDCVMPTRAGRHGLAYTRFGKVNLKNARHMDDPRPLDAESACPAASSYSRAYLHHLVRANEALAAMLLTWNNLAYYQFLMQGMRDAIDEGRFEYFRLKTKADWAKGDIAAL

SEQ ID NO: 60320 - protein, 383 aa, Roseibium sp.
  misc_feature (1)..(383): tr|E2CRA1|E2CRA1_9RHOB Queuine tRNA-ribosyltransferase OS=Roseibium sp. TrichSKD4 OX=744980 GN=tgt PE=3 SV=1
MSSETPKFSFKLTKTDGMARRGEITTPHGVVQTPAFMPVGTQGTVKAMYPEQVRELGSDVVLGNTYHLMLRPGAERVARLGGLHSFMNWPHTILTDSGGFQVMSLAQLRKLDEDGVRFQSHIDGQKYHLTPERSIEIQGLLGSDIQMQLDECIKLPSPPKEVQRAMGLSLRWAERSRVQFENMGGPAKGQGLYGIVQGGDVPDLRIKSAESLRDMPFEGYSVGGLAVGEPQDVMLRMLEVTTPVMPTGKPRYLMGVGTPDDLLESVARGIDQFDCVMPTRAGRHGLAYTRFGKVNLKNARHAEDLRPLDEESDCPATSQYSRAYLHHLVRAGEGLAGMLLTWNNLAYYQTLMRGMREAIEAGTFEEFRLKTKADWAKGDIDPL

SEQ ID NO: 60321 - protein, 377 aa, Roseicitreum antarcticum
  misc_feature (1)..(377): tr|A0A1H2WH76|A0A1H2WH76_9RHOB Queuine tRNA-ribosyltran sferase OS=Roseicitreum antarcticum OX=564137 GN=tgt PE =3 SV=1
MTSATFGFAVQATCGKARAGTITTPRGDIRTPAFMPVGTAATVKAMLPGSVRATGADILLGNTYHLMLRPTAERIAALGGLHKFMNWDRPILTDSGGFQVMSLASLRKMTEKGVTFRSHIDGSRHEITPERSMEIQRLLGSDIVMAFDECTPYPADEGTARASMELSMRWAQRSRDAFGDRPGHALFGIQQGSVYADQRAESASKLRTIGFDGYAVGGLAVGEGQEKMFEVLDYAPDMLPEDKPRYLMGVGKPSDIVGAVARGIDMMDCVLPSRSGRTGQGWTARGQVNLRNARHRDDPRPLEEGCTCPACTGYSRAYLHHVIKSDEIIGSMLLTWHNLHYYQSLMQGLRDAISAGALADFTAAFHANVALGDVDLR

SEQ ID NO: 60322 - protein, 376 aa, Roseicyclus mahoneyensis
  misc_feature (1)..(376): tr|A0A316GQ45|A0A316GQ45_9RHOB Queuine tRNA-ribosyltran sferase OS=Roseicyclus mahoneyensis OX=164332 GN=tgt PE =3 SV=1
MGDLFEFHVTATDGAARTGAISTPRGQIRTPAFMPVGTAATVKAMLPESVAATGADILLGNTYHLMLRPTAERIARLGGLHAFMNWTGPILTDSGGFQVMSLADLRKLTEEGVTFRSHVDGSKHVLSPERSMEIQKLLGSDIVMCFDECPALPATRDRIAESMRLSMRWADRSKTAFGDRPGHALFGIQQGGLERDFREESADALKAIGFDGYAVGGLAVGEGQEAMFACLDYAPAMLPQDKPRYLMGVGKPDDIVGAVKRGIDMMDCVLPSRSGRTGQAWTRMGQINIKNARHADDPRPLDADCSCPACRSYSRAYLHHVFRAGEMISGMLLTWHNLHYYQELMAGMRAAIAEGRFAGFEADFHARRADGDIEPL

SEQ ID NO: 60323 - protein, 385 aa, Roseiflexus castenholzii
  misc_feature (1)..(385): tr|A7NP22|A7NP22_ROSCS tRNA-guanine transglycosylase, v arious specificities OS=Roseiflexus castenholzii (strai n DSM 13941 / HLO8) OX=383372 GN=Rcas_3266 PE=4 SV=1
MRIVSPARGILPSMPAHLNALATRHGVLPLPAFLPDATFGTVRAADADDVRTAGVRALVMNTFHLMQKPGSSTVQALGGLHAMTGWNGPIMTDSGGFQAYSLIRRNAKQGRITDQGIVFQPEGAGRKFQLTPEKCIQLQLAYGADIVVCLDDCTHVDDSLAEQHASVRRTIRWALRCKQEFARQLAMRRLDDERPLLFAVVQGGGIPELRRECAEALLEIGFDGYGYGGWPLDTQGTLLTEMLALTRELIPLHLPLHALGVGHPEYVATCARMGYRLFDSALPTRDARHGRLYAFTADPRDPGFRLADRWFHYVYVEDDRYIKADTPISPGCDCYTCTRYSLGYLHHLQAIGETLFYRLATIHNLRFMSTLMGLIAAETTVASAS

SEQ ID NO: 60324 - protein, 405 aa, Roseiflexus castenholzii
  misc_feature (1)..(405): tr|A7NJT0|A7NJT0_ROSCS Queuine tRNA-ribosyltransferase OS=Roseiflexus castenholzii (strain DSM 13941 / HLO8) O X=383372 GN=tgt PE=3 SV=1
MTLIFEIEARDTHSRARIGRITTAHGVIETPVFMPVGTRGSIKSLTPDEVRDHGAQIILGNTYHLYLQPGHELIARMGGLHRFMGWEGPILTDSGGFQVFSLVYGGIADEIKGRRPTQQVQPGMVRVTDDAVIFKSYIDGSTHVFTPERSIEIQKGIGADIILCFDELPPFHAGYDYTARSLERTHEWERRCLIFHQETRAGGLPFAPPNPDQALFGIVHGGVFPDLRRASAEYLRELSFDGLCIGGSLGGDKEQMRAVVDMTVPHLPDHLPRHLLGIGDVDDLIECVARGIDMFDCVSPTRLGRHGTALVRDMSTLPAQRRWKLNVTNASLRDDQEPLDSWCDCYTCQRYSRAYIHHLFRAQELLGIRLVSLHNVAFLLKLMREIRQSIREGRFAQLRAEWLGD

SEQ ID NO: 60325 - protein, 400 aa, Roseiflexus sp.
  misc_feature (1)..(400): sp|A5USV3|TGT_ROSS1 Queuine tRNA-ribosyltransferase OS= Roseiflexus sp. (strain RS-1) OX=357808 GN=tgt PE=3 SV= 1
MTLAFDIEARDPHSRARAGRITTAHGVIETPVFMPVGTRGSIKSLTPDEVRNHGAQIILGNTYHLYLQPGHELIARMGGLHHFMGWDGPILTDSGGFQVFSLVYGGIADEIKGRRPTQQVQPGMVKVTDDAVIFKSYIDGSMHVFTPERSIEIQKGIGADIILCFDELPPFHAGYDYTARSLERTHAWERRCLMFHRATQEGGLPFVPPNPYQALFGIVHGGVFPDLRRASAEYLRELPFDGLCIGGSLGENKQQMREVVDMTVPHMPDHLPRHLLGIGDVDDLIECVARGIDMFDCVSPTRLGRHGTALVRDAERRWKLNVANAALRDDPTPLDAWCDCYTCRRYSRAYIHHLFRAQELLGIRLVSLHNVAFLLKLMRTIRQSIIEGRFAHLRAEWLGI

SEQ ID NO: 60326 - protein, 373 aa, Roseiflexus sp.
  misc_feature (1)..(373): tr|A5UUS2|A5UUS2_ROSS1 tRNA-guanine transglycosylase, v arious specificities OS=Roseiflexus sp. (strain RS-1) O X=357808 GN=RoseRS_1988 PE=4 SV=1
MSAHSDELPTRRGRLPLPAFLPDATFGTVRAADAGDVRAAGVHALVMNTFHLMQKPGSSTIQALGGLHAMAGWDGPIMTDSGGFQAYSLIRQNPKQGRLSDQGIVFQPEGAGRKFQLTPEKCIQLQLAYGADIVVCLDDCTHVDDTPTEQRASVRRTIRWAARCKQEFERQLAMRRMDDERPLLFAVVQGGGIAELRRECAEALLEIGFDGYGYGGWPLDSAGNLLTDMLALTRELIPAHLPLHALGVGHPEYVAACARMGYQMFDSALPTRDARNGRLYAFAADPHTPAFRLVDRWFHSIYIQDDRYIKSTLPIFPGCDCYTCTHYSLGYLHHLHAIGETLFYRLATIHNLRFMSILTDLLRAEWQGKRGER

SEQ ID NO: 60327 - protein, 399 aa, Roseimaritima ulvae
  misc_feature (1)..(399): tr|A0A5B9QTJ5|A0A5B9QTJ5_9PLAN Queuine tRNA-ribosyltran sferase OS=Roseimaritima ulvae OX=980254 GN=tgt PE=3 SV =1
MTEPADPPAAASTDAASTAPFQYQCLARDVGTDARRGVFTTPHGDIQTPTFMPVGTQATVKGVTGDLLRQTTATLPDVTAQIILGNTYHLALRPGHELIRQMGGLHRFMNWDGPILTDSGGFQVFSLSALTKIDEHAAVFRSHIDGRKIELTPEHSIEIQESLGSDIAMVLDHVIALPASTEAVIDATERSVRWAQRCLNAASRPDQARFAIVQGGLDETIRAQCARDLAQHAFEGFAIGGLSVGEPPPEMYRVLSATCPHLPEEKPRYLMGVGRPIDMLEGIARGVDLFDCVMPTRNGRNGFAFTDEGPLKLRNAVHRDDPRPLEANCPCPACRHSRAYLRHLFVAGEMLGPILLTLHNLTYYQRIMHQARQAILAGTFSELLQRHRQLAGADKPEAV

SEQ ID NO: 60328 - protein, 377 aa, Roseimicrobium gellanilyticum
  misc_feature (1)..(377): tr|A0A366HK07|A0A366HK07_9BACT Queuine tRNA-ribosyltran sferase OS=Roseimicrobium gellanilyticum OX=748857 GN=t gt PE=3 SV=1
MFTLLATDSQTLARRGRLVTPHGAIETPVFMPVGTQGSVKTVHPVELEAIGAQIILGNTYHLAVRPGVDIVKEAGGLHAFANWSKPILTDSGGFQVFSLGKLRKIKEEGVHFQNHVDGSPMFLGPETAMEIQAGLGSDIAMLFDECPPHPCEASYASKSLDLTLRWARRCREWVDKNQPMTGGGRQLHFGIVQGSSYAELRARSARELVAMGFDGYAVGGVSVGEPEPEMMAGVENSVPHLPMDKPRYAMGLGTPPQMIEMVARGIDMFDCVLPTRLARHSTAFTDEGSMNLKNNCFARDFRPISEDTHPLCQGFTRAYIRHLIKAGEILGLRLISLHNLHFYLSLLSRARTAIEGGYFSEFRREFTSKYKNHTSEA

SEQ ID NO: 60329 - protein, 374 aa, Roseinatronobacter monicus
  misc_feature (1)..(374): tr|A0A543KHV6|A0A543KHV6_9RHOB Queuine tRNA-ribosyltran sferase OS=Roseinatronobacter monicus OX=393481 GN=tgt PE=3 SV=1
MGFKFDISARDGRARTGVIATPRGEIRTPAFMPVGTAATVKAMMPESVRETGADILLGNTYHLMLRPTAERIANLGGLHKFMNWDRPILTDSGGFQVMSLASLRNMTEEGVRFASHIDGARHMLTPERSMEIQRLLGSDIVMSFDECTPWPADEKTARASMELSMRWARRSRDAFGDIPGHALFGIQQGSVYPDQRAESAEKLRAIGFDGYAIGGLAVGEGQELMFQVLDYAPDQLPEDKPRYLMGVGKPDDIVGAVQRGVDMFDCVLPSRSGRTGQGWTARGPVNLRNARHRDDPRPLEAGCTCPACRNYSRAYLHHVIKSDEIIGSMLLTWHNLTYYQRLMQGLRDAISLGKLDQFVARFHADRAQGDIDPL

SEQ ID NO: 60330 - protein, 374 aa, Roseinatronobacter thiooxidans
  misc_feature (1)..(374): tr|A0A2W7R5D9|A0A2W7R5D9_9RHOB Queuine tRNA-ribosyltran sferase OS=Roseinatronobacter thiooxidans OX=121821 GN= tgt PE=3 SV=1
MGFSFDISARDGRARTGVISTPRGEIRTPAFMPVGTAATVKAMMPESVRETGADILLGNTYHLMLRPTAERIADLGGLHRFMNWDRPILTDSGGFQVMSLASLRKLTEEGVQFSSHIDGSRHMLTPERSMEIQRLLGSDIVMAFDECPALPADRAAIDASMQLSMRWAQRSRDAFGDRPGHALFGIQQGGLEPDLRARSAEALRAIGFDGYAIGGLAVGEGQEAMFGVLEYAPGQLPEDKPRYLMGVGKPDDIVGAVQRGVDMFDCVLPSRSGRTGQGWTARGPVNLRNARHRDDPRPLEEGCPCPACRNYSRAYLHHVIKSDEIIGAMLLTWHNLAYYQRLMQGLRDAISAGRLELFAARFHEDRAQGDIGLI

SEQ ID NO: 60331 - protein, 375 aa, Roseisalinus antarcticus
  misc_feature (1)..(375): tr|A0A1Y5T6X4|A0A1Y5T6X4_9RHOB Queuine tRNA-ribosyltran sferase OS=Roseisalinus antarcticus OX=254357 GN=tgt PE =3 SV=1
MTRITFDLQATDGSARTGVISTARGEIRTPAFMPVGTAATVKAMLPESVAATGADILLGNTYHLMLRPTAERIDRLGGLHRFMNWHKPILTDSGGFQVMSLADLRKLTERGVTFRSHVDGSKHELTPERSMEIQRLLGSDIVMAFDECPALPAPRERIEESMRLSMRWAARSREAFGDRPGHALFGIQQGGLEPDLRAESGKALTEIGFDGYAIGGLAVGEGQEAMFACLDHAPASLPVDRPRYLMGVGKPDDIVGAVKRGVDMMDCVLPSRSGRTGQAWTRRGQVNLKNARHADDPRPLDAACTCPTCRGYSRAYLHHVFRAGEMISGMLLTWHNLHYYQALMAGMREAIAEGRFAAFESAFHAARAEGDIERV

SEQ ID NO: 60332 - protein, 375 aa, Roseitalea porphyridii
  misc_feature (1)..(375): tr|A0A4P6V276|A0A4P6V276_9RHIZ Queuine tRNA-ribosyltran sferase OS=Roseitalea porphyridii OX=1852022 GN=tgt PE= 3 SV=1
MAEFGFALHATDGGARRGTVTTGRGAIATPAFMPVGTAGTVKGLYLDQVKDAGADIILGNTYHLMLRPGAERIDRLGGLHRFIGWDRPILTDSGGFQVMSLSALRQMSEEGVTFKSHVDGAIHEMSPERSIEIQGLLGSDIQMQLDECVALPADADTMKAAMELSLRWAERCRVAFGDQPGKAMFGIVQGGDDESLREQSARALTAMDLKGYSIGGLAVGEPQEVMLAMLDVVCPILPAEKPRYLMGVGTPQDLLRSVARGVDMFDCVMPTRSGRHGLAFTRRGRVNLKNARHAEDHRPLDDQMACPASRDYSRAYLHHLIRSGEMLGMMLLSWHNTFYYQWLMREMRSAIEQGRFAAFAAETEAVWEQGDIEAL

SEQ ID NO: 60333 - protein, 376 aa, Roseivirga echinicomitans
  misc_feature (1)..(376): tr|A0A150X2H4|A0A150X2H4_9BACT Queuine tRNA-ribosyltran sferase OS=Roseivirga echinicomitans OX=296218 GN=tgt P E=3 SV=1
MKFNLVGVDKQSKARAGEVITDHGVIETPIFMPVGTAGSVKAVHQRELKDDVQAQIILGNTYHLYLRPGLEVIEAAGGLHKFNGWDKPILTDSGGYQVYSLSGTRKIKEEGVTFKSHIDGSKHVFSPEAVMDIQRTIGADIMMAFDECTPYPCDYEYARKSMEMTHRWLKRCCDRFDATEGKYGYSQTLFPIVQGSTYKDLRVKSAETIASFEREGNAIGGLSVGEPAEMMYEHTEIVCDILPKDKPRYLMGVGTPENILEGIALGVDMFDCVMPTRNARNGMLFTSEGILNMRNEKWKNDHSPIDPNLGGYNSTFYSKAYLRHLITSKEILGAQIASIHNLTFYLWLVKEARKQILAGTFVDWKNQMVKKVTQRL

SEQ ID NO: 60334 - protein, 376 aa, Roseivirga ehrenbergii
  misc_feature (1)..(376): tr|A0A150X7L0|A0A150X7L0_9BACT Queuine tRNA-ribosyltran sferase OS=Roseivirga ehrenbergii OX=279360 GN=tgt PE=3 SV=1
MKFNLAGVDKQSKARAGEIITDHGAIETPIFMPVGTAGSVKAVHQRELKDDVQAQIILGNTYHLYLRPGLDVIEAAGGLHKFNGWDKPILTDSGGYQVYSLSGTRKIKEEGVTFKSHIDGSKHIFSPEGVMDIQRTIGADIMMAFDECTPYPCDYEYARKSMEMTHRWLKRCCDRFDATEGKYGYSQTLFPIVQGSTYKDLRVKSAETIASYEREGNAIGGLSVGEPAEMMYEHTEIVCDILPKDKPRYLMGVGTPENILEGIALGVDMFDCVMPTRNARNGMLFTSEGILNMRNEKWKNDHSPIDRNLGGYNSTFYSKAYLRHLITSKEILGAQIASIHNLTFYLWLVKEARKQILAGTFVDWKNRMVKKVTQRL

SEQ ID NO: 60335 - protein, 376 aa, Roseivirga seohaensis
  misc_feature (1)..(376): tr|A0A150XRA7|A0A150XRA7_9BACT Queuine tRNA-ribosyltran sferase OS=Roseivirga seohaensis OX=1914963 GN=tgt PE=3 SV=1
MKFNLAGVDKQSKARAGEITTDHGVIETPIFMPVGTAGSVKAVHQRELKDDVQAQIILGNTYHLYLRPGLEVIEAAGGLHKFNGWDKPILTDSGGYQVYSLSGTRKIKEEGVTFKSHIDGSKHIFSPEGVMDIQRTIGADIMMAFDECTPYPCDYEYARKSMEMTHRWLKRCCDRFDATEGKYGYSQTLFPIVQGSTYKDLRVKSAETIASYEREGNAIGGLSVGEPAEMMYEHTEIVCDILPKDKPRYLMGVGTPENILEGIALGVDMFDCVMPTRNARNGMLFTSEGILNMRNEKWKNDHSPIDSNLGGYNSTFYSKAYLRHLITSKEILGAQIASIHNLTFYLWLVKEARKQILAGTFVDWKNRMVKKVTQRL

SEQ ID NO: 60336 - protein, 376 aa, Roseivirga seohaensis
  misc_feature (1)..(376): tr|A0A0L8ANJ1|A0A0L8ANJ1_9BACT Queuine tRNA-ribosyltran sferase OS=Roseivirga seohaensis subsp. aquiponti OX=15 66026 GN=tgt PE=3 SV=1
MKFNLAGVDKQSKARAGEITTDHGVIETPIFMPVGTAGSVKAVHQRELKDDVQAQIILGNTYHLYLRPGLEVIEAAGGLHKFNGWDKPILTDSGGYQVYSLSGTRKIKEEGVTFKSHIDGSKHIFSPEGVMDIQRTIGADIMMAFDECTPYPCDYEYARKSMEMTHRWLKRCCDRFDATEGKYGYSQTLFPIVQGSTYKDLRVKSAETIASYEREGNAIGGLSVGEPAEMMYEHTEIVCDILPKDKPRYLMGVGTPENILEGIALGVDMFDCVMPTRNARNGMLFTSEGILNMRNEKWKNDHSPIDPNLGGYNSTFYSKAYLRHLITSKEILGAQIASIHNLTFYLWLVKEARKQILAGTFVDWKNRMVKKVTQRL

SEQ ID NO: 60337 - protein, 376 aa, Roseivirga sp.
  misc_feature (1)..(376): tr|A0A316JUG1|A0A316JUG1_9BACT Queuine tRNA-ribosyltran sferase OS=Roseivirga sp. XM-24bin3 OX=2133949 GN=tgt P E=3 SV=1
MDFKLVAEDKGSKARAGVVTTAHGEIQTPIFMPVGTAGTVKAVHQRELHDDVKAQIILGNTYHLYLRPGLDIIEAAGGLHKFNGWEKPILTDSGGYQVYSLSGTRKIKEEGVTFKSHIDGSKHVFTPENVMDIQRTIGADIIMAFDECTPYPCEYGYARESMEMTHRWLKRCCDRFDETEGKYGYDQTLFPIVQGSTFKDLRIKSAETIASFGREGNAIGGLSVGEPHEMMYEQTEVVCDILPHDKPRYLMGVGTPENILECIALGVDMFDCVMPTRNARNGMLFTSEGIINIRNEKWKDDFSPIDPNLGGYVDTFYSKAYLRHLVISKEILAAQIASIHNLSFYLWLVKEAREQIQKGTFVDWKNKMVKKVTTRL

SEQ ID NO: 60338 - protein, 376 aa, Roseivirga spongicola
  misc_feature (1)..(376): tr|A0A150X404|A0A150X404_9BACT Queuine tRNA-ribosyltran sferase OS=Roseivirga spongicola OX=333140 GN=tgt PE=3 SV=1
MDFKLVAEDKGSKARAGVVTTAHGEILTPIFMPVGTAGTVKAVHQRELHDDVKAQIILGNTYHLYLRPGLDIIEAAGGLHKFNGWEKPILTDSGGYQVYSLSGTRKIKEEGVTFKSHIDGSKHVFTPENVMDIQRTIGADIIMAFDECTPYPCEYGYARESMEMTHRWLKRCCDRFDETEGKYGYDQTLFPIVQGSTFKDLRIKSAETIASFGREGNAIGGLSVGEPHEMMYEQTEVVCDILPHDKPRYLMGVGTPENILECIALGVDMFDCVMPTRNARNGMLFTSEGIINIRNEKWKDDFSPIDPNLGGYVDTFYSKAYLRHLVISKEILAAQIASIHNLSFYLWLVKEAREQIQKGTFVDWKNKMVKKVTTRL

SEQ ID NO: 60339 - protein, 374 aa, Roseivivax halodurans
  misc_feature (1)..(374): tr|X7EKA6|X7EKA6_9RHOB Queuine tRNA-ribosyltransferase OS=Roseivivax halodurans JCM 10272 OX=1449350 GN=tgt PE =3 SV=1
MTFRFTLSGTDGAARTGAIDTPRGSIRTPAFMPVGTAATVKGMFPESVAETGADILLGNTYHLMLRPGAERIAHLGGLHEFMNWQKPILTDSGGFQVMSLSGLRKLTEEGVTFKSHIDGSKHFLSPERSMEIQQLLGSDIVMAFDECPALPADRDRIAESMRLSMRWAQRSREAFGDRLGHALFGIQQGGLERDFREESANALREIGFEGYAVGGLAVGEGQEAMFGCLDFATDMLPQDKPRYLMGVGKPDDIVGAVKRGIDMMDCVLPSRSGRTGQGWTRRGMVNVKNARHADDPRPLDEACTCPCCRSYSRAYLHHVQRSHEMISGMLLTWHNLHYYQELMQAMREAIAAGAFAAFEADFHAQRAEGDIEPL

SEQ ID NO: 60340 - protein, 375 aa, Roseivivax halotolerans
  misc_feature (1)..(375): tr|A0A1I5ZKR9|A0A1I5ZKR9_9RHOB Queuine tRNA-ribosyltran sferase OS=Roseivivax halotolerans OX=93684 GN=tgt PE=3 SV=1
MTQFSFSLAARSGKARTGTISTPRGQIRTPAFMPVGTAATVKGMMPESVAETGADILLGNTYHLMLRPGAERIDRLGGLHHFMNWEKPILTDSGGFQVMSLAGLRKLTEDGVTFKSHIDGSRHELTPERSMEIQRLLGSDIVMAFDECPALPAPKERIAASMQLSMRWAARSREAFGDRPGHALFGIQQGGLEPDLREESAKALTDIGFEGYAIGGLAVGEGQEAMFGCLDTAPDMLPEDKPRYLMGVGKPDDIVGAVKRGVDMMDCVLPSRSGRTGQAWTRRGQVNLKNARHQDDPRPLEEGCSCPACRNYSRAYLHHVFRSNEMISGMLLTWHNLHYYQLLMSEMRAAIADDTFAAFEEKFHATRALGDIERI

SEQ ID NO: 60341 - protein, 375 aa, Roseivivax isoporae
  misc_feature (1)..(375): tr|X7F384|X7F384_9RHOB Queuine tRNA-ribosyltransferase OS=Roseivivax isoporae LMG 25204 OX=1449351 GN=tgt PE=3 SV=1
MSGFSFTLDATCGKARTGRISTPRGEIRTPAFMPVGTAGTVKAMLPDSVAATGADILLGNTYHLMLRPGAERVARLGGLHAFMNWDRPILTDSGGFQVMSLSDLRKLTEDGVTFKSHIDGSRHMFSPEKSMEIQKLLGSDIVMAFDECPALPAPRDRIEASMRLSMRWAQRSRDAFGDRPGHALFGIQQGGLEPDLRAESAKALKAIGFDGYAVGGLAVGEGQEAMFACLDTACDMLPEDRPRYLMGVGKPDDIVGAVARGIDMMDCVLPSRSGRTGQAWTRRGQVNLRNARHADDPRPLDEACTCPACRSYSRAYLHHVVRSGEMIAGMLLTWHNLHYYQELMAGIRAAVAAGTFAGFEAGFHAARAEGDIPPR

SEQ ID NO: 60342 - protein, 375 aa, Roseivivax jejudonensis
  misc_feature (1)..(375): tr|A0A1X6Z497|A0A1X6Z497_9RHOB Queuine tRNA-ribosyltran sferase OS=Roseivivax jejudonensis OX=1529041 GN=tgt PE =3 SV=1
MSRFSFILQATDGAARTGRIDTPRGAIRTPAFMPVGTAATVKAMLPESVASTGADILLGNTYHLMLRPGAERVHALGGLHRFMNWDKPILTDSGGFQVMSLADLRKLDESGVTFRSHIDGSKHALSPERSMEIQRLLGSDIVMAFDECPALPADRDRLASSMHLSMRWARRSREAFGDRPGHALFGIQQGGLEHDLREESAAALREIGFEGYAIGGLAVGEGQEAMFGCLDHAPAMLPEDKPRYLMGVGKPDDIVGAVARGVDMMDCVLPSRSGRTGQAWTRRGQVNLRNARHADDPRPLDEACGCPACRGYSRAYLHHVTRSQEMIAGMLLTWHNLHYYQELMQGMRDAIAEGRFSEFEAAFHAARAEGDIERL

SEQ ID NO: 60343 - protein, 375 aa, Roseivivax lentus
  misc_feature (1)..(375): tr|A0A1N7LBV1|A0A1N7LBV1_9RHOB Queuine tRNA-ribosyltran sferase OS=Roseivivax lentus OX=633194 GN=tgt PE=3 SV=1
MTPFSFTLEARSGGARLGRIDTARGAIRTPAFMPVGTAATVKAMLPESVAATGADILLGNTYHLMLRPTAERIDRLGGLHRFMNWSKPILTDSGGFQVMSLAGLRKLTEKGVTFKSHIDGSKHELTPERSMEIQRLLGSDIVMAFDECPALPASRDRIAESMQLSMRWAARSRDAFGDRPGHALFGIMQGGLEKDLREESARALTEIGFEGYAIGGLAVGEGQEAMFDCLDYAPGFLPEDRPRYLMGVGKPDDIVGAVKRGVDMMDCVLPSRSGRTGQAWTRRGQVNIKNARHMDDSRPLDEACSCPACRHYSRAYLHHVYRAGEMISGMLLTWHNLHYYQELMQAMRDAIAADAFDAFESAFHAQRAEGDIPPL

SEQ ID NO: 60344 - protein, 375 aa, Roseivivax marinus
  misc_feature (1)..(375): tr|W4HIF5|W4HIF5_9RHOB Queuine tRNA-ribosyltransferase OS=Roseivivax marinus OX=1379903 GN=tgt PE=3 SV=1
MTRFFFRLDATDGRARTGAIDTPRGTIRTPAFMPVGTAATVKGMMPESVAETGADILLGNTYHLMLRPGAERIERLGGLHRFMNWDGPILTDSGGFQVMSLSDLRKLTEDGVTFKSHIDGSKHFLSPERSMEIQRQLGSDIVMAFDECPALPAPRERVAASMRMSMRWAARSREAFGDRPGHALFGIQQGGLEADLREESAAALKEIGFDGYAVGGLAVGEGQEAMFACLDHAPETLPREAPRYLMGVGKPDDIVGAVKRGIDMMDCVLPSRSGRTGQAWTRRGQVNLKNARHMDDPRPLDEACTCPCCRNYSRAYLHHVHRAGEMIAGMLLTWHNLHYYQELMSGLRAAIAGGRFAAFEAAFHAERAEGDIERL

SEQ ID NO: 60345 - protein, 375 aa, Roseivivax pacificus
  misc_feature (1)..(375): tr|A0A2T6ARP9|A0A2T6ARP9_9RHOB Queuine tRNA-ribosyltran sferase OS=Roseivivax pacificus OX=1267769 GN=tgt PE=3 SV=1
MTETGFELKAQDGKARTGLLRTPRGDIRTPAFMPVGTAATVKGMLPESVRETGADILLGNTYHLMLRPGAERIARLGGLHQFMNWQRPILTDSGGFQVMSLADLRKLTEEGVTFRSHVDGSKHHLTPEHSMEIQRLLGSDIVMAFDECPALPADRARIEESMRLSMRWALRSREAFGDRPGHMLFGIQQGGLERDLREESARALRDIGFEGYAVGGLAVGEGQEAMFSCLDYAPDMLPEDKPRYLMGVGKPDDIVGAVKRGIDLMDCVLPSRSGRTGQAWTRRGQVNIKNARHADDPRPLDEDCGCPACRSYSRAYLHHVFRSGEMISGMLLTWHNLHYYQELMAGLRTAIFEGTFESFEAAFHEARAERDIPRL

SEQ ID NO: 60346 - protein, 376 aa, Roseivivax roseus
  misc_feature (1)..(376): tr|A0A1H9TLH0|A0A1H9TLH0_9RHOB Queuine tRNA-ribosyltran sferase OS=Roseivivax roseus OX=641238 GN=tgt PE=3 SV=1
MTNRFSFSLKATDGRARTGTISTPRGEVRTPAFMPVGTAATVKAMLPESVRDTGADILLGNTYHLMLRPTAERIARLGGLHDFMNWQRPILTDSGGFQVMSLADLRKLDERGVTFKSHIDGSRHELTPERSMEIQRLLGSDIVMCFDECPSLPADESRVADSMRLSMRWAERSRAAFGDRPGHALFGIQQGGVTPELREESAKALTDIGFDGYAVGGLAVGEGQEAMFGVLDYAPEMLPHDKPRYLMGVGKPDDIVGAVARGIDMMDCVLPSRSGRTGQAWTRRGQVNIKNARHQDDPRPLDESCGCPACRSYSRAYLHHVFRAGEMISGMLLTWHNLHYYQDLMQGLRDAIAAGRLEAFTDEFHALRAEGDIERL

SEQ ID NO: 60347 - protein, 375 aa, Roseivivax sediminis
  misc_feature (1)..(375): tr|A0A1I2CDC5|A0A1I2CDC5_9RHOB Queuine tRNA-ribosyltran sferase OS=Roseivivax sediminis OX=936889 GN=tgt PE=3 S V=1
MPAFSFTLAARDGAARTGRIDTPRGSIRTPAFMPVGTAATVKAMLPESVAATGADILLGNTYHLMLRPGAERVAALGGLHRFMNWDRPILTDSGGFQVMSLADLRKLDENGVTFRSHIDGSRHALSPERSMEIQRLLGSDIVMAFDECPALPADRDRIEQSMRLSMRWAARSREAFGDRPGHALFGIQQGGLEPDLREESATALREIGFEGYAIGGLAVGEGQEAMFGCLDHAVGWLPEDRPRYLMGVGKPDDIVGAVARGVDMMDCVLPSRSGRTGQAWTRRGQVNLRNARHADDPRPLDETCTCPACRGYSRAYLHHVVRAREMIAGMLLTWHNLHYYQELMQDLRDAVAEGRFAAFESAFHAARAEGDIERL

SEQ ID NO: 60348 - protein, 374 aa, Rosenbergiella nectarea
  misc_feature (1)..(374): tr|A0A1H9DZR2|A0A1H9DZR2_9ENTR Queuine tRNA-ribosyltran sferase OS=Rosenbergiella nectarea OX=988801 GN=tgt PE= 3 SV=1
MKFEYIKRDGRARRGRLVFDRGVVETPAFMPVGTYGTVKGMTPEEVKETGAQILLGNTFHLWLRPGQEIMKLHGDLHDFMQWQGPILTDSGGFQVFSLGDIRKITEKGVHFRNPINGDPIFLDPEKSMEIQHDLGSDIVMIFDECTPYPADWDYAKRSMEMSLRWAQRSRDRFDELGNKNALFGIIQGGVYEDLRDISVKGLVDIGFDGYAVGGLAVGEPKADMHRILEHVCPQLPEEKPRYLMGVGKPEDLVEGVRRGIDMFDCVMPTRNARNGHLFVTDGVVKIRNAKHKSDTSPLDAECDCYTCKHYTRAYLYHLDRCNEILGARLNTIHNLRYYQRLMAGLRQAIEDDRLEEFVADFYTKIGKEVPALPF

SEQ ID NO: 60349 - protein, 394 aa, Roseobacter denitrificans
  misc_feature (1)..(394): tr|Q164X0|Q164X0_ROSDO Queuine tRNA-ribosyltransferase OS=Roseobacter denitrificans (strain ATCC 33942 / OCh 1 14) OX=375451 GN=tgt PE=3 SV=1
MGAAINQGLGTKGNLRQTDRMRFSFDLQATDGRARTGVISTPRGDIRTPAFMPVGTAATVKAMLPASVRQTGADILLGNTYHLMLRPTAERIDRLGGLHRFMDWDGPILTDSGGFQVMSLAALRKLTEEGVSFKSHIDGSRHMLTPERSMEIQRLLGSDIVMCFDECPALPADRAAIEKSMQLSMRWAARSKDAFGDRPGHALFGIQQGGLEEDLRAESAAALREIEFDGYAVGGLAVGEGQAAMFGCLDYAPEQLPRDKPRYLMGVGKPDDIVGAVARGIDMMDCVLPSRSGRTGQVFTRRGVVNIKNARHADDPRPLDEQCSCPACRSYSRAYLHHVFRSQEIISSMLLTWHNLHYYQELMAGMRSAIAQGTFDQWTSGFMAERALGDIEPI

SEQ ID NO: 60350 - protein, 374 aa, Roseobacter litoralis
  misc_feature (1)..(374): tr|F7ZF50|F7ZF50_ROSLO Queuine tRNA-ribosyltransferase OS=Roseobacter litoralis (strain ATCC 49566 / DSM 6996 / JCM 21268 / NBRC 15278 / OCh 149) OX=391595 GN=tgt PE =3 SV=1
MRFNFDLQATDGRARTGVISTPRGDIRTPAFMPVGTAATVKAMLPGSVRQTGADILLGNTYHLMLRPTAERIERLGGLHKFMDWDRPILTDSGGFQVMSLAALRKLTEEGVSFKSHIDGSRHMLTPERSMEIQRLLGSDIVMCFDECPALPADRAAIEKSMHLSMRWAARSRDAFGDRPGHALFGIQQGGLEEDLRAQSAAALRDIEFDGYAVGGLAVGEGQEAMFGCLDYAPEQLPHEKPRYLMGVGKPDDIVGAVARGIDMMDCVLPSRSGRTGQVFTRRGVVNIKNARHADDPRPLDEHCTCPACRSYSRAYLHHVFRSQEIISSMLLTWHNLHYYQELMSDMRAAISQGTFVEWTAAFATERAQGDIEPV

SEQ ID NO: 60351 - protein, 377 aa, Roseobacter sp.
  misc_feature (1)..(377): tr|A4EK89|A4EK89_9RHOB Queuine tRNA-ribosyltransferase OS=Roseobacter sp. CCS2 OX=391593 GN=tgt PE=3 SV=1
MTQRFSFALNATDGKARTGVISTPRGDIRTPAFMPVGTAATVKAMMPESVAATGADILLGNTYHLMLRPTAERIDRLGGLHKFMNWDKPILTDSGGFQVMSLADLRKMTETGVTFKSHIDGSKHELTPERSMEIQKLLGSDIVMCFDECPALPADRARIAESMQLSMRWAQRSRDAFGDRPGHALFGIQQGGLEEDLRAQSAEALKAVEFDGYAVGGLAVGEGQEAMFGVLDFAPDQLPVDKPRYLMGVGKPDDIVGAVKRGIDMMDCVLPSRSGRTGQLFTRRGVINIKNARHADDPRPLDEHCTCPACSNYSRAYLHHVFRAQEMISGMLLTWHNLHYFQEIMQGMRDAIAAGAFADWEADFHAMRALGDIAPLS

SEQ ID NO: 60352 - protein, 362 aa, Roseobacter sp.
  misc_feature (1)..(362): tr|A6FNP1|A6FNP1_9RHOB Queuine tRNA-ribosyltransferase OS=Roseobacter sp. AzwK-3b OX=351016 GN=tgt PE=3 SV=1
MARTGVIDTPRGEVRTPAFMPVGTAATVKAMLPGSVRETGADILLGNTYHLMLRPGAERIANLGGLHRFMNWERPILTDSGGFQVMSLAGLRKLTEEGVTFKSHIDGSRHELTPERSMEIQRLLGSDIVMCFDECPALPASDDEVARAMRLSMRWAERSKDAFGDRPGHALFGIMQGGVTQELREESARALVDIGFDGYAVGGLAVGEGQEAMFGVLDYAPGYLPTDKPRYLMGVGKPDDIVGAVKRGIDMMDCVLPSRSGRTGQVFTRHGVLNIKNARHQDDPRPLDDQCGCPACRGYSRAYLHHVFRSQEIISSMLLTWHNLHYYQDIMAGMREAIAEGRFADWEAAFHKGREAGDIEPL

SEQ ID NO: 60353 - protein, 372 aa, Roseococcus sp.
  misc_feature (1)..(372): tr|A0A4V2NKJ6|A0A4V2NKJ6_9PROT Queuine tRNA-ribosyltran sferase OS=Roseococcus sp. SYP-B2431 OX=2496640 GN=tgt PE=3 SV=1
MTLQWSHQQSDGRARAGTLHTAHGTVPTPVFMPVGTAGTVKAMTADAVRSTGARMVLGNTYHLMLRPGGERIARLGGLHRFMDWKGPILTDSGGFQVMSLSGLRKMDADGVTFQSHVDGSKHRLTPERSVEIQRLLGADVTMCFDECTPFPATHDEAAKSMRLSMRWAARCRSCFEARDGHGLFGIVQGSTYEDLRAESAAALTSVGFEGYAIGGLAVGEGQEAMFSTLDFTVPMLPETQPRYLMGVGKPADLLGAVRRGVDMFDCVIPTRSGRMGRAYTARGQLNLRNARHAEDDRPLDPDCACPACRGHSRAYLHHLLKCDEMLGPILLTWHNIQYYQDLMARMRGAILEGRFEAEAAAIERGLAGEEQT

SEQ ID NO: 60354 - protein, 378 aa, Roseofilum reptotaenium
  misc_feature (1)..(378): tr|A0A1L9QVU8|A0A1L9QVU8_9CYAN Queuine tRNA-ribosyltran sferase OS=Roseofilum reptotaenium AO1-A OX=1925591 GN= tgt PE=3 SV=1
MHQPFQFSIQAQCSQTQARAATFLTPHGKVETPRFMPVGTLATVKALTPAQLKGTGAQMVLANTYHLHLQPGEDLIARAGGLHRFMGWDGPMLTDSGGFQVFSLASLRTIQEEGVKFRSPRDGRIINLTPEKAIAIQNQLGADVIMAFDECPPYPASKEAVIAATERTYRWLKRCIAAHDRSEQALFGIVQGGVYADLRTAAAEQLVDLNLPGYAIGGVSVGEPGDLINQIVKVTVPLLATEKPRYLMGVGTYQEMVQAIAAGIDLFDCVIPTRLARHGAVFVRGERWNIKNAQFREDFAPLDAECPCYTCQNFSRAYLGHLWRCRELLVYTLLSIHNITELVRFTARIREAILGDRFLSEFGHYLAPPESHQYHEKR

SEQ ID NO: 60355 - protein, 374 aa, Roseomonas aestuarii
  misc_feature (1)..(374): tr|A0A2U1V918|A0A2U1V918_9PROT Queuine tRNA-ribosyltran sferase OS=Roseomonas aestuarii OX=568898 GN=tgt PE=3 S V=1
MTLHWSCQCQDGKARAGTLHTAHGDVATPVFMPVGTAGTVKGMTADAVRATGANIVLGNTYHLMLRPGAERVGRLGGLHKMMDWHGPILTDSGGFQVMSLSQLRKLDKDGVTFQSHINGEKFRLTPERSIEIQHLLDADITMCFDECTPFPATHEVAGKSMRLSMDWAARSRAAFVARPGYGLFGIQQGSVFEDLRAESARALTEIGFEGYAIGGLAVGEGQAEMFRTLDFSVPMLPETHPRYLMGVGTPSDLIGAVMRGVDMFDCVIPTRSGRTGRAYTSHGVVNIRNARHAEDTGSLDPECDCPACTRHSLGYLQHLFKAGEMLGPILLTWHNIRYYQRLMARLRQAILDGRLAEEAAALEAGWRKPEETPV

SEQ ID NO: 60356 - protein, 375 aa, Roseomonas cervicalis
  misc_feature (1)..(375): tr|D5RRV8|D5RRV8_9PROT Queuine tRNA-ribosyltransferase OS=Roseomonas cervicalis ATCC 49957 OX=525371 GN=tgt PE =3 SV=1
MTLSWSCQCQDGKARAGTLHTAHGDVPTPVFMPVGTAGTVKGMTADAVRSTGAQIVLGNTYHLMLRPGAERVARLGGLHTMMDWHGPILTDSGGFQVMSLSQLRKLDKDGVTFQSHINGQKFRLTPERSIEIQHLLDADITMCFDECTPFPATHEVAAQSMRLSMAWAARSRAAFVERPGYGLFGIQQGSVYEDLRAESAKALREIGFEGYAIGGLAVGEGQEEMFRVLDFCVPMLPETHPRYLMGVGTPSDLIGAVRRGVDMFDCVMPTRSGRTGRAYTSRGVLNIRNARHAEDVSPLDPECDCPACTRHSRGYLHHLFKADEMLGPILLSWHNIRYYQRLMQRLRQAILENRFEQEAAAIEAGWAPQAEETTA

SEQ ID NO: 60357 - protein, 374 aa, Roseomonas deserti
  misc_feature (1)..(374): tr|A0A1V2GWR2|A0A1V2GWR2_9PROT Queuine tRNA-ribosyltran sferase OS=Roseomonas deserti OX=1817963 GN=tgt PE=3 SV =1
MTLSWSCQCHDGKARAGTLHTAHGEVQTPVFMPVGTAGTVKGMTADAVRSTGASIVLGNTYHLMLRPGAERVAKLGGLHRMMDWHGPILTDSGGFQVMSLSQLRKLDKDGVTFQSHINGERFRVTPERSIEIQHLLDADITMCFDECTPFPATHEVAAKSMRLSMDWAARSRAAFVERPGYGLFGIQQGSVFEDLRAESARALREIGFEGYALGGLAVGEGQEEMFRVLDFAVPMLPEEKPRYLMGVGTPSDLIGAVSRGVDMFDCVIPTRSGRTGRAYTSRGVINIRNARHAESLAPLDPDCDCPACTKHSIGYLHHLFKAGEMLGPILLTWHNIRYYQALMARLRQAILENRFAAEAEAIQAGWAKTEEVPA

SEQ ID NO: 60358 - protein, 426 aa, Roseomonas gilardii
  misc_feature (1)..(426): tr|A0A379NB09|A0A379NB09_9PROT Queuine tRNA-ribosyltran sferase OS=Roseomonas gilardii subsp. rosea OX=243956 G N=tgt PE=3 SV=1
MTLSFTLSTTDGGARAGMLHTAHGEVPTPVFMPVGTAGTVKAMTADAVRATGARMILGNTYHLMLRPGAERVGRLGGLHRMVDWSGPILTDSGGFQVMSLSKLRKMDADGVTFHSHIDGSKHRLTPERSIGIQNLLDADVTMCLDECTPFPATEEEAARSMRQSMLWAARCREAFVPRPGYGLFGIVQGSVYAGLRAESVRALTGIGFEGYAVGGLAVGEGQEMMFSTLDVTTPLLPRDKPRYLMGVGTPSDIIGAVRRGIDMFDCVIPTRSGRTARAYTSRGVMNLRNAKFAEDTRPLDPECDCPACTRHSRAYLNHLFKAEEMLGPMLLTWHNIRYYQVLMARLREAILASRFEDEAARIEAGWAGGAAETAAAPTGQASRPSAGRASAVPGADPMPDPAGGVPISGVNEEPWGETSPAKSAAP

SEQ ID NO: 60359 - protein, 418 aa, Roseomonas mucosa
  misc_feature (1)..(418): tr|A0A1S8D6F6|A0A1S8D6F6_9PROT Queuine tRNA-ribosyltran sferase OS=Roseomonas mucosa OX=207340 GN=tgt PE=3 SV=1
MTLSFTLQTTDGGARAGTLHTAHGEVPTPVFMPVGTAGTVKAMTADAVRATGARMILGNTYHLMLRPGAERVGRLGGLHRMVDWSGPILTDSGGFQVMSLSKLRKMDADGVTFHSHIDGSKHRLTPERSIEIQNLLDADVTMCLDECTPFPATEEEAARSMRQSMLWAARCREAFVPRPGYGLFGIVQGSVYAGLRAESVRALTGIGFEGYAVGGLAVGEGQEMMFSTLDVTTPLLPRDKPRYLMGVGTPSDIIGAVRRGIDMFDCVIPTRSGRTARAYTSRGVMNLRNAKFAEDTRPLDPECDCPACTRHTRAYLNHLFKAEEMLGPMLLTWHNIRYYQTLMARLRGAILEGRFEDEAARIEAGWVEGAAASAAAATGQPNAPSAGRAPADPMADPVGDPVGGDSPREPGPAASADP

SEQ ID NO: 60360 - protein, 418 aa, Roseomonas mucosa
  misc_feature (1)..(418): tr|A0A4Y1MXL2|A0A4Y1MXL2_9PROT Queuine tRNA-ribosyltran sferase OS=Roseomonas mucosa OX=207340 GN=tgt PE=3 SV=1
MTLSFTLQTTDGGARAGTLHTAHGEVPTPVFMPVGTAGTVKAMTADAVRATGARMILGNTYHLMLRPGAERVGRLGGLHRMVDWSGPILTDSGGFQVMSLSKLRKMDADGVTFHSHIDGSKHRLTPERSIEIQNLLDADVTMCLDECTPFPATEEEAARSMRQSMLWAARCREAFVPRPGYGLFGIVQGSVYADLRAESVRTLTGIGFEGYAVGGLAVGEGQEMMFSTLDVTTPLLPRDKPRYLMGVGTPSDIIGAVRRGIDMFDCVIPTRSGRTARAYTSRGVMNLRNAKFAEDTRPLDPECDCPACTRHTRAYLNHLFKAEEMLGPMLLTWHNIRYYQTLMARLRGAILEGRFEDEAARIEAGWAEGAAASAAAPTGQPNAPSAGRAPADPMADPVGDPVGGDSPREPGPAASADP

SEQ ID NO: 60361 - protein, 380 aa, Roseomonas nepalensis
  misc_feature (1)..(380): tr|A0A502FR38|A0A502FR38_9PROT Queuine tRNA-ribosyltran sferase OS=Roseomonas nepalensis OX=1854500 GN=tgt PE=3 SV=1
MGFTLQGRDGAARAGTLHTAHGEVPTPVFMPVGTAGTVKAMTADAVRATGARMVLGNTYHLMLRPGAERVGRLGGLHRLMDWQGPILTDSGGFQVMSLAGLRKMDADGVTFQSHIDGSKHRLTPERSIEIQHLLDADVTMCFDECTPFPATEAAAARSMRLSMRWAARSRAAFTPRDGYGLFGIQQGSTFEGLRAESARALTDIGFEGYAIGGLAVGEGQEAMFRTLDFSVPMLPTEKPRYLMGVGTPADIIGAVARGVDMFDCVIPTRSGRTGRAYTSRGVLNMRNARHADDASALDPECDCPACTRHSRAYIQHLVRAEEMLGPMLLTWHNIRYYQTLTARLRAAILEGRFEAEAAAIAAKWETPAPAEPPLKEETTS

SEQ ID NO: 60362 - protein, 374 aa, Roseomonas oryzae
  misc_feature (1)..(374): tr|A0A5B2TE48|A0A5B2TE48_9PROT Queuine tRNA-ribosyltran sferase OS=Roseomonas oryzae OX=1608942 GN=tgt PE=3 SV= 1
MTLSWTCHCHDGKARAGMLHTAHGDVPTPVFMPVGTAGTVKGMTADAVRATGASIVLGNTYHLMLRPGAERVGRLGGLHRMMDWQGPILTDSGGFQVMSLSKLRKLDKDGVTFQSHINGERFRVTPERSIEIQHLLDSDITMCFDECIEYPAAHPEAARAMRLSMDWAARSRAAFTPREGYGLFGIQQGSTFADLRAESSKALTEIGFEGYAIGGLAVGEGQEEMFRTLDFCADMLPETHPRYLMGVGTPSDIIGAVRRGVDMFDCVIPTRSGRTGRAYTSQGVLNMRNARHADDTAPLDPECDCPACTRHSRGYLQHLFKAGEMLGPILLTWHNIRYYQQLMQRLREAILAGRLDAEAAIIEAGWNRAQETAA

SEQ ID NO: 60363 - protein, 374 aa, Roseomonas rhizosphaerae
  misc_feature (1)..(374): tr|A0A2C7AGP6|A0A2C7AGP6_9PROT Queuine tRNA-ribosyltran sferase OS=Roseomonas rhizosphaerae OX=1335062 GN=tgt P E=3 SV=1
MTLSWSCQCHDGKARAGMLRTAHGDVPTPVFMPVGTAGTVKGMTADAVRATGARIVLGNTYHLMLRPGAERVGRLGGLHRMMDWHGPILTDSGGFQVMSLSKLRKLDKDGVTFQSHINGERFRVTPERSIEIQHLLDSDITMCFDECIEYPAAHAEAARAMRLSMDWAARSRAAFTPREGYGLFGIQQGSTFEDLRAESSKALTGIGFEGYAIGGLAVGEGQEEMFRTLDFCADMLPETHPRYLMGVGTPSDLLGAVARGVDMFDCVIPTRSGRTGRAYTSRGVLNIRNARHAEDTGPLDPECDCPACTRHSRGYLLHLFKAGEMLGPMLLTWHNIRYYQNLMARIRAAIVAGRFAQEAEIIQAGWTTAQETAA

SEQ ID NO: 60364 - protein, 384 aa, Roseomonas rosea
  misc_feature (1)..(384): tr|A0A1M6LVP9|A0A1M6LVP9_9PROT Queuine tRNA-ribosyltran sferase OS=Roseomonas rosea OX=198092 GN=tgt PE=3 SV=1
MNGPLNFTLQAKDGAARAGTLHTAHGEVQTPVFMPVGTAGTVKAMTADAVRSTGARMVLGNTYHLMLRPGAERVGRLGGLHRLMDWHGPILTDSGGFQVMSLAGLRKMDADGVTFQSHIDGSKHRLTPERSIEIQHLLDADVTMCFDECTPFPATHEVAAKSMRLSMKWAARSREAFTPRPGYGLFGIQQGSIFEDLRAESAKALTEIGFEGYAIGGLAVGEGQAEMFRTLDFSVPMLPQDKPRYLMGVGTPSDIIGAVGRGVDMFDCVIPTRSGRTGRAYTSRGVLNMRNARHADDASTLDPECDCPACTRHSRAYIQHLIRAEEMLGPMLLTWHNIRYYQTLTARLRAAILEGRFEAEAAAIMAKWETTPPPEPPSPEETTS

SEQ ID NO: 60365 - protein, 418 aa, Roseomonas sp.; identical to SEQ ID NO: 60359
  misc_feature (1)..(418): tr|A0A2D2H446|A0A2D2H446_9PROT Queuine tRNA-ribosyltran sferase OS=Roseomonas sp. FDAARGOS_362 OX=2018065 GN=tg t PE=3 SV=1

SEQ ID NO: 60366 - protein, 376 aa, Roseomonas sp.
  misc_feature (1)..(376): tr|A0A317F9X4|A0A317F9X4_9PROT Queuine tRNA-ribosyltran sferase OS=Roseomonas sp. CQN31 OX=2184016 GN=tgt PE=3 SV=1
MTLRWSLTTTDGAARAGTLHTAHGEVPTPVFMPVGTAGTVKAMTADAVRSTGARMVLGNTYHLMLRPGAERVARLGGLHRLMDWRGPILTDSGGFQVMSLTDLRKMDADGVTFRSHVDGSYHRLTPERSVEIQHLLGADVTMCFDECTPFPATHAQAADSMRLSMRWAARCREAFVPRDGHGLFGIVQGSTFDDLRAESVAALSGIGFEGYAIGGLAVGEGQSEMFRVLDATTPLLPEDAPRYLMGVGTPADLIGAVRRGVDMFDCVIPTRSGRTGRAYTSRGVLNLRNARHAEDPSPLDPDCDCPACTRHSRAYLHHLIKAEEMLGPMLLTWHNIRYYQTLMARLRRAIVEGRFEAEAAAIEAVWAEGEAERKAA

SEQ ID NO: 60367 - protein, 395 aa, Roseomonas stagni
  misc_feature (1)..(395): tr|A0A1I4C8V1|A0A1I4C8V1_9PROT Queuine tRNA-ribosyltran sferase OS=Roseomonas stagni DSM 19981 OX=1123062 GN=tg t PE=3 SV=1
MTLHWTMAARDGAARAGTLMTAHGEVPTPVFMPVGTAGTVKAMTADAVRSTGARMVLGNTYHLMLRPGAERVARLGGLHRLMDWHGPILTDSGGYQVMSLAGLRKLDADGVTFQSHIDGSKHRITPERSVEIQHLLGADVTMCFDECTPYPATHEQAAESMRLSMRWAARSRAAFKPRPGHGLFGIVQGSTFEDLRSESIQALTAIGFEGYAIGGLAVGEGQAEMLRVLDFTTPQLPQDAPRYLMGVGTPSDLIESIRRGVDMFDCVIPTRSGRTGRAYTSRGVLNMRNAKHAEDTGPVDPDCDCPACRNHSRAYIHHLIKAEEMLGPMLLTWHNIQYYQRLTARLRAAILAGRFEEEAAVIEAGWGGAGEAGDGALPPPQTPSPPRGSGPLDPM

SEQ ID NO: 60368 - protein, 380 aa, Roseospirillum parvum
  misc_feature (1)..(380): tr|A0A1G7UJT3|A0A1G7UJT3_9RHIZ Queuine tRNA-ribosyltran sferase OS=Roseospirillum parvum OX=83401 GN=tgt PE=3 S V=1
MPSPLPDGLGFRVLATDGAARRGRLLTAHGTVETPAFMPVGTAATVKAMMPETVAATGAEILLANTYHLMLRPGAEAVAALGGLHRMMDWPRPILTDSGGFQVMSLGDLCRIDPDGVTFKSHLDGSTHRLTPVRAIDIQHKLDATISMVFDECTPFPAEHEVAAASMRRSMDWAARCREAFVPRPGYGLFGIVQGGVYPDLRAESAARLIDIGFEGYAIGGLAVGEGQAAMFETLSATVPHLPTDRPRYLMGVGKPEDLLGAVARGVDMFDCVLPTRSGRTAQAFTRRGPLNLRNARHKADPRPLDEACGCPACRRFSRAYLHHLIRAGEILGLMLLTTHNVTLYQDLMADLRQAIAEGRLKAELEAWRNGLARGDVSPM

SEQ ID NO: 60369 - protein, 376 aa, Roseovarius aestuarii
  misc_feature (1)..(376): tr|A0A1X7BNH4|A0A1X7BNH4_9RHOB Queuine tRNA-ribosyltran sferase OS=Roseovarius aestuarii OX=475083 GN=tgt PE=3 SV=1
MVKKFQFELLATDGAARHGLISTPRGDIRTPAFMPVGTAATVKAMMPESVRDTGADILLGNTYHLMLRPGAERIDRLGGLHRFMNWARPILTDSGGFQVMSLAGLRKLTEAGVTFKSHIDGSKHELTPERSMEIQRLLGSNIVMCFDECPALPASDEAVAESMRLSMRWAARSKEAFGDRPGHALFGIMQGGVTPELREESAAALRDIGFDGYAIGGLAVGEGQEAMFGVLDYACGFLPEDRPRYLMGVGKPDDIVGAVKRGVDMMDCVLPSRSGRTGQVFTRRGVVNIKNARHSEDPRPLDEQCRCPACRNYSRAYLHHVFRAQEMISGMLLTWHNLQYYQDLMAGMRDAIAEKQFAAWEAAFHQTRVEGDIEPI

SEQ ID NO: 60370 - protein, 397 aa, Roseovarius albus
  misc_feature (1)..(397): tr|A0A1X6Z8U2|A0A1X6Z8U2_9RHOB Queuine tRNA-ribosyltran sferase OS=Roseovarius albus OX=1247867 GN=tgt PE=3 SV= 1
MYGPGVQPGGLAIATIRCMWAGMNSFSFSLHAESGQARTGVISTPRGEIRTPAFMPVGTAATVKAMLPESVRETGADILLGNTYHLMLRPTAERIAKLGGLHKFMNWERPILTDSGGFQVMSLAGLRKLNEQGVTFKSHIDGSKHELTPERSMEIQKLLGSDIVMCFDECPALPATDKEVAESMRLSMRWAARSKEAFGDRPGHALFGIMQGGVTPELREESAKALQEIGFDGYAVGGLAVGEGQEAMFGVLDYAPGYLPKDRPRYLMGVGKPDDIVGAVKRGIDMMDCVLPSRSGRTGQVWTRYGFLNIKNARHQDDPRPIDENCTCPTCRNYSRAYLHHVFRSQEIISSMLLTWHNLHYYQEIMAGMREAIAAGRFDTWETEFHAQRAQGDIEQL

SEQ ID NO: 60371 - protein, 376 aa, Roseovarius atlanticus
  misc_feature (1)..(376): tr|A0A0T5NT98|A0A0T5NT98_9RHOB Queuine tRNA-ribosyltran sferase OS=Roseovarius atlanticus OX=1641875 GN=tgt PE= 3 SV=1
MTQGFAFELGATDGQARTGVIRTPRGDVRTPAFMPVGTAATVKAMMPESVHETGADILLGNTYHLMLRPTAERIDALGGLHRFMNWERPILTDSGGFQVMSLAGLRKLTEAGVTFKSHIDGSKHELTPERSMEIQRLLGSDIVMCFDECPALPASDDEVARAMRLSMRWAARSKDAFGDRPGHALFGIMQGGVTQELREESASALVEIGFDGYAIGGLAVGEGQAAMFGVLDYATGYLPEDKPRYLMGVGKPDDIVGAVKRGVDMMDCVLPSRSGRTGQVFTRRGVLNIKNARHQDDPRPLDAACTCPACRKYSRAYLHHVFRSQEIISSMLLTWHNLHYYQEIMAGMRAAIAAGRFDAWEAAFHAQRAEGDIAAI

SEQ ID NO: 60372 - protein, 379 aa, Roseovarius azorensis
  misc_feature (1)..(379): tr|A0A1H7M218|A0A1H7M218_9RHOB Queuine tRNA-ribosyltran sferase OS=Roseovarius azorensis OX=1287727 GN=tgt PE=3 SV=1
MGSASMRFGFGKVAQDGAARAGVIRTPRGEIRTPAFMPVGTAATVKAMLPESVAATGADILLGNTYHLMLRPGAERVARLGGLHRFMNWQRPILTDSGGFQVMSLAGLRKLTEEGVTFRSHIDGSKHHLTPERSMEIQALLGSDIVMCFDECPALPASDKAVAESMRLSMRWAARSKEAFGDRPGHALFGIMQGGVTRALREESAEALKEIGFDGYAVGGLAVGEGQEAMFGVLDYAPGSLPEDRPRYLMGVGKPDDIVGAVKRGIDMMDCVLPSRSGRTGQVFTRHGVVNIKNARHQDDPRPLDEDCTCPACCGYSRAYLHHVFRAGEMISGMLLTWHNLHYFQQIMAEMRAAIVEGRFTEWEAGFHAGRAQGDIEPL

SEQ ID NO: 60373 - protein, 376 aa, Roseovarius gaetbuli
  misc_feature (1)..(376): tr|A0A1X6Z9U5|A0A1X6Z9U5_9RHOB Queuine tRNA-ribosyltran sferase OS=Roseovarius gaetbuli OX=1356575 GN=tgt PE=3 SV=1
MTARISFEMQASDGLARTGVISTPRGEIRTPAFMPVGTAATVKAMMPESVRATGADILLGNTYHLMLRPGAERIDRLGGLHKFMNWDRPILTDSGGFQVMSLAGLRKLTEKGVTFKSHIDGSKHELTPERSMEIQKLLGSDIVMCFDECPALPATDKAVAESMRLSMRWAERSKEAFGDRPGHALFGIMQGGVTPELREESAEALKAIGFDGYAVGGLAVGEGQEAMFGVLDYAPGFLPEDKPRYLMGVGKPDDIVGAVKRGIDMMDCVLPSRSGRTGQVFTRRGVLNIKNARHQDDPRPIDEACSCPACSHYSRAYLHHVFRSQEIISSMLLTWHNLHYFQDIMAGMREAIAQGTFAQWEAGFHAGRAEGDIELL

SEQ ID NO: 60374 - protein, 374 aa, Roseovarius halotolerans
  misc_feature (1)..(374): tr|A0A1X6YJS8|A0A1X6YJS8_9RHOB Queuine tRNA-ribosyltran sferase OS=Roseovarius halotolerans OX=505353 GN=tgt PE =3 SV=1
MTVSFELTARDGAARTGVIRTTRGDVRTPAFMPVGTAATVKAMMPNSVRQTGADILLGNTYHLMLRPGAERIARLGGLHRFMNWERPILTDSGGFQVMSLAGLRKLSEHGVTFKSHVDGSRHELTPERSMEIQRLLGSDIVMCFDECPALPASDDEVARAMRLSMRWAARSKEAFGDRPGHALFGIMQGGVNRDLREESAEALVNIGFDGYAVGGLAVGEGQAAMFDVLDYAPGFLPEDKPRYLMGVGKPDDIVGAVKRGIDMMDCVLPSRSGRTGQVFTRRGQINIKNARHQDDPRPLDEDCTCPACRNYSRAYLHHVFRSQEIISSMLLTWHNLHYYQEIMEAMRQAIAEGRFDAWEAAFHEMRAEGDIAPL

SEQ ID NO: 60375 - protein, 379 aa, Roseovarius indicus
  misc_feature (1)..(379): tr|A0A0T5P5G1|A0A0T5P5G1_9RHOB Queuine tRNA-ribosyltran sferase OS=Roseovarius indicus OX=540747 GN=tgt PE=3 SV =1
MRGRPVRVSYQKTGQDGQARTGVISTPRGEIRTPAFMPVGTAGTVKAMMPESVRETGADILLGNTYHLMLRPGAERVARLGGLHGFMNWDRPILTDSGGFQVMSLAGLRKLTEEGVTFKSHIDGSKHELTPERSMEIQRLLGSDIVMCFDECPALPASDEAVAESMRLSMRWAARSKEAFGDRPGHALFGIQQGGVTRDLRAESAEKLVEIGFDGYAVGGLAVGEGQEAMFGVLDYAPGMLPEDKPRYLMGVGKPDDIVGAVKRGIDMMDCVLPSRSGRTGQAWTRRGQVNIKNARHMDDPRPLDEDCTCPACRNYSRAYLHHVFRSQEIISSMLLTWHNLHYYQQIMEGMRGAIAAGTFAAWEDEFHAGRAEGDIEPV

SEQ ID NO: 60376 - protein, 374 aa, Roseovarius litoreus
  misc_feature (1)..(374): tr|A0A1M7ISX9|A0A1M7ISX9_9RHOB Queuine tRNA-ribosyltran sferase OS=Roseovarius litoreus OX=1155722 GN=tgt PE=3 SV=1
MTFRFRLQATDGMARTGVIDTPRGEVRTPAFMPVGTAATVKAMLPGSVRETGADIVLGNTYHLMLRPTAERIAGLGGLHRFMNWERPILTDSGGFQVMSLAGLRKLTEEGVTFKSHIDGSRHELTPERSMEIQRLLGSDIVMCFDECPALPASDDEVARAMRLSMRWAERSKDAFGDRPGHALFGIMQGGVTQELREESARALVDIGFDGYAVGGLAVGEGQEAMFGVLDYAPGYLPTDKPRYLMGVGKPDDIVGAVKRGIDMMDCVLPSRSGRTGQVFTRHGVLNIKNARHQDDPRPLDDQCSCPACRGYSRAYLHHVFRSQEIISSMLLTWHNLHYYQQIMAGMRGAIAEGRFADWEAAFHKEREAGDIAPL

SEQ ID NO: 60377 - protein, 376 aa, Roseovarius lutimaris
  misc_feature (1)..(376): tr|A0A1I5CMW6|A0A1I5CMW6_9RHOB Queuine tRNA-ribosyltran sferase OS=Roseovarius lutimaris OX=1005928 GN=tgt PE=3 SV=1
MTAQIRFEMQARDGLARSGVISTPRGDIRTPAFMPVGTAATVKAMMPESVRATGADILLGNTYHLMLRPGAERIDRLGGLHEFMNWDRPILTDSGGFQVMSLAGLRKLTEAGVTFRSHIDGSKHELTPERSMEIQRLLGSDIVMCFDECPALPATDKAVAESMRLSMRWAARSKDAFGDRPGHALFGIMQGGVTPELREESAEALKAIGFDGYAVGGLAVGEGQEAMFGVLDYAPGFLPEDKPRYLMGVGKPDDIVGAVKRGIDMMDCVLPSRSGRTGQVFTRRGVLNIKNARHQDDPRPLDEACSCPACSNYSRAYLHHVFRSQEIISSMLLTWHNLHYFQDIMAGMREAIAQGRFAEWEAGFHAGRAQGDIEPL

SEQ ID NO: 60378 - protein, 376 aa, Roseovarius marisflavi
  misc_feature (1)..(376): tr|A0A1M7BCX4|A0A1M7BCX4_9RHOB Queuine tRNA-ribosyltran sferase OS=Roseovarius marisflavi OX=1054996 GN=tgt PE= 3 SV=1
MTAQISFEMQARDGLARTGVISTPRGEIRTPAFMPVGTAATVKAMMPESVRATGADILLGNTYHLMLRPGAERIDRLGGLHKFMNWDRPILTDSGGFQVMSLAGLRKLTEKGVTFKSHIDGSKHELTPERSMEIQKLLGSDIVMCFDECPALPATDKAVAESMRLSMRWAERSKEAFGDRPGHALFGIMQGGVTPELREESAEALKAIGFDGYAVGGLAVGEGQEAMFGVLDYAPGLLPEDKPRYLMGVGKPDDIVGAVKRGIDMMDCVLPSRSGRTGQVFTRCGVLNIKNARHQDDPRPLDEACTCPACRHYSRAYLHHVFRSQEIISSMLLTWHNLHYFQDIMAGMREAIAAGRFAEWEAGFHAGRAAGDIEPL

SEQ ID NO: 60379 - protein, 379 aa, Roseovarius mucosus
  misc_feature (1)..(379): tr|A0A0A0HL13|A0A0A0HL13_9RHOB Queuine tRNA-ribosyltran sferase OS=Roseovarius mucosus DSM 17069 OX=1288298 GN= tgt PE=3 SV=1
MGHEGMRFGFEKLAQDGAARAGVIHTPRGDIRTPAFMPVGTAATVKAMMPESVRATGADILLGNTYHLMLRPGAERIDRLGGLHRFMNWERPILTDSGGFQVMSLAGLRKLTEQGVTFKSHIDGSKHELTPERSMEIQRLLGSDIVMCFDECPALPASDKAVAESMRLSMRWAARSKEAFGDRPGHALFGIMQGGVTPELREESAEALKAIGFDGYAVGGLAVGEGQEAMFGVLDYATGFLPEDRPRYLMGVGKPDDIVGAVKRGIDMMDCVLPSRSGRTGQVFTRHGVVNIKNARHQDDPRPLDEACTCPACRNYSRAYLHHVFRSQEIISSMLLTWHNLHYFQQIMGEMRAAIAEARFDAWEAAFHAGRAEGDIEPL

SEQ ID NO: 60380 - protein, 374 aa, Roseovarius mucosus
  misc_feature (1)..(374): tr|A0A1V0RJF7|A0A1V0RJF7_9RHOB Queuine tRNA-ribosyltran sferase OS=Roseovarius mucosus OX=215743 GN=tgt PE=3 SV =1
MRFGFEKLAQDGAARAGVIRTPRGDIRTPAFMPVGTAATVKAMMPESVRATGADILLGNTYHLMLRPGAERIDRLGGLHRFMNWERPILTDSGGFQVMSLAGLRKLTEQGVTFKSHIDGSKHELTPERSMEIQRLLGSDIVMCFDECPALPATDKAVAESMRLSMRWAARSKEAFGDRPGHALFGIMQGGVTPELREESAEALKAIGFDGYAVGGLAVGEGQEAMFGVLDYAPGFLPEDRPRYLMGVGKPDDIVGAVKRGIDMMDCVLPSRSGRTGQVFTRHGVVNIKNARHQDDPRPLDEACICPACRNYSRAYLHHVFRSQEIISSMLLTWHNLHYFQQIMSEMRAAIADGQFEAWEAAFHAGRAEGDIDPL

SEQ ID NO: 60381 - protein, 376 aa, Roseovarius nanhaiticus
  misc_feature (1)..(376): tr|A0A1N7GFQ2|A0A1N7GFQ2_9RHOB Queuine tRNA-ribosyltran sferase OS=Roseovarius nanhaiticus OX=573024 GN=tgt PE= 3 SV=1
MTKRIEFQLAATDGAARTGTIRTTRGDIRTPAFMPVGTAATVKAMMPESVAATGADILLGNTYHLMLRPTAERIARLGGLHDFMNWQGPILTDSGGFQVMSLADLRKLTEEGVAFRSHIDGSKHMLTPERSMEIQKLLGSDIVMCFDECPALPATDKAVAESMELSMRWARRSKEAFGDRPGHALFGIMQGGVTQELRGISAEKLKEIGFDGYAIGGLAVGEGQEAMFGVLDYAPAMLPEDKPRYLMGVGKPDDIVGAVARGVDMMDCVLPSRSGRTGQAWTRQGQVNIKNARHADDPRPLDEHCTCPACRNYSRAYLHHVFRAQEMISGMLLTWHNLHYYQEIMSGMRQAIAAQRFDAWQQGFHSTRAMGDIEPL

SEQ ID NO: 60382 - protein, 376 aa, Roseovarius nubinhibens
  misc_feature (1)..(376): tr|A3SP95|A3SP95_ROSNI Queuine tRNA-ribosyltransferase OS=Roseovarius nubinhibens (strain ATCC BAA-591 / DSM 1 5170 / ISM) OX=89187 GN=tgt PE=3 SV=1
MTRSFGFTLSATDGRARTGRIDTPRGEIRTPAFMPVGTAATVKAMMPENVRATGADILLGNTYHLMLRPGSDRVARLGGLHKFMNWERPILTDSGGFQVMSLAGLRKLTEEGVKFKSHIDGSVHNLTPERSMEIQAELGSDIVMCFDECPALPADEKRVAESMRLSMRWAQRSRDAFGDRPGHALFGIMQGGLSPELREESAEALRGIGFDGYAIGGLAVGEGQEAMFDVLDYAPGLLPEDQPRYLMGVGKPDDLVGGVKRGVDMFDCVLPSRSGRTGQAFTRRGVVNIKNARHQDDPRPLDESCDCPCCRNYSRAYLHHVMRAKEIISSMLMTWHNLHYYQVLMSEMREAISAGRFDTWEAGFHAERAQGDIEPL

SEQ ID NO: 60383 - protein, 379 aa, Roseovarius pacificus
  misc_feature (1)..(379): tr|A0A1M6WX18|A0A1M6WX18_9RHOB Queuine tRNA-ribosyltran sferase OS=Roseovarius pacificus OX=337701 GN=tgt PE=3 SV=1
MRDDAVKFSFQLQATDRAARTGVIETPRGEVRTPAFMPVGTAATVKAMLPESVRATGADILLGNTYHLMLRPTAERIDRLGGLHRFMNWERPILTDSGGFQVMSLAGLRKLTEEGVTFKSHIDGSRHELTPERSMEIQRLLGSDIVMCFDECPALPATEAQVAESMRLSMRWAARSKAAFGDRPGHALFGIMQGGVTPELREESAKALCEIGFDGYAVGGLAVGEGQEAMFGVLDYAPGFLPPDKPRYLMGVGKPDDIVGAVKRGIDMMDCVLPSRSGRTGQVFTRHGQLNIKNARHQDDPRPIDDQCTCPACRNYSRAYLHHVFRSQEIISSMLLTWHNLHYYQDIMQGMRDAIAAGRFADWEAAFHAGREQGDIERL

SEQ ID NO: 60384 - protein, 376 aa, Roseovarius sp.
  misc_feature (1)..(376): tr|A0A365TWG0|A0A365TWG0_9RHOB Queuine tRNA-ribosyltran sferase OS=Roseovarius sp. TE539 OX=2249812 GN=tgt PE=3 SV=1
MTASFSFELKAIDGAARAGVIATPRGEIRTPAFMPVGTAGTVKAMLPDSVRETGADILLGNTYHLMLRPGPERVARLGGLHRFMNWDRPILTDSGGFQVMSLAGLRKLTEQGVTFKSHIDGSRHELTPERSMEIQRLLGSDIVMCFDECPALPATDDEVARAMHLSMRWAERSKVAFGNRPGHALFGIMQGGVAPDLRAESAEALTAIGFDGYAIGGLAVGEGQAAMFGVLDYAPGLLPRDRPRYLMGVGKPDDIVGAVKRGVDMMDCVLPSRSGRTGQAFTRRGVVNIKNARHADDPRPLDDACGCPACRGYSRAYLHHVFRAGEMISGMLLTWHNLHYFQEIMAGMRLAIAEARFAQWEAAFHAGRADGDIDPL

SEQ ID NO: 60385 - protein, 376 aa, Roseovarius sp.
  misc_feature (1)..(376): tr|A0A246QR64|A0A246QR64_9RHOB Queuine tRNA-ribosyltran sferase OS=Roseovarius sp. 22II1-1F6A OX=1317112 GN=tgt PE=3 SV=1
MSQKFSYAVHATDGSARLGTISTPRGDIRTPAFMPVGTAATVKAMRPESVRETGADILLGNTYHLMLRPTAERIDRLGGLHRFMNWDRPILTDSGGFQVMSLADLRKLTEEGVTFRSHVDGSRHHLTPERSMEIQKLLGSDIVMCFDECPALPADEMRVAESMRLSMRWAQRSRDAFGDRTGHALFGIQQGGVTQHLRAESAEKLRAIGFDGYAVGGLAVGEGQEAMFGVLDYACDMLPEDRPRYLMGVGKPDDIVGAVKRGIDMMDCVLPSRSGRTGQAFTRRGVVNIKNARHQDDPRPLDEDCTCPACRSYSRAYLHHVFRSQEIISSMLLTWHNLHYYQELMGDMRAAIGQGRFAAFEAQFHADRADGDIERL

SEQ ID NO: 60386 - protein, 376 aa, Roseovarius tolerans
  misc_feature (1)..(376): tr|A0A0L6CVY3|A0A0L6CVY3_9RHOB Queuine tRNA-ribosyltran sferase OS=Roseovarius tolerans OX=74031 GN=tgt PE=3 SV =1
MTALFNYKLKGTDGLARTGVISTPRGEIRTPAFMPVGTAATVKAMMPESVAATGADILLGNTYHLMLRPGAERVANLGGLHRFMNWQKPILTDSGGFQVMSLAGLRKLTEAGVTFRSHIDGSKHELTPERSMEIQRLLGSDIVMCFDECPALPASDKAVAESMQLSMRWAARSKEAFGDRPGHALFGIMQGGVAPELREESAAALTGIGFDGYAVGGLAVGEGQEAMFGVLDYAPGFLPEDKPRYLMGVGKPDDIVGAVKRGIDMMDCVLPSRSGRTGQAWTRRGQVNIKNARHQDDPRPLDEACSCPACRNYSRAYLHHVFRSQEMISGMLLTWHNLHYYQEIMAGMRAAIAARQFAAWEAAFHALRAEGDIEPV

SEQ ID NO: 60387 - protein, 376 aa, Roseovarius tolerans
  misc_feature (1)..(376): tr|A0A1H7UYQ9|A0A1H7UYQ9_9RHOB Queuine tRNA-ribosyltran sferase OS=Roseovarius tolerans OX=74031 GN=tgt PE=3 SV =1
MTALFNYKLKGTDGLARTGVISTPRGEIRTPAFMPVGTAATVKAMMPESVAATGADILLGNTYHLMLRPGAERVANLGGLHRFMNWEKPILTDSGGFQVMSLAGLRKLTEAGVTFRSHIDGSKHELTPERSMEIQRLLGSDIVMCFDECPALPASDTAVADSMQLSMRWAARSKEAFGDRPGHALFGIMQGGVTPELREESAAALSGIGFDGYAVGGLAVGEGQAAMFGVLDYAPGFLPEDKPRYLMGVGKPDDIVGAVKRGIDMMDCVLPSRSGRTGQAWTRRGQVNIKNARHQDDPRPLDEACGCPACRNYSRAYLHHVFRSQEMISGMLLTWHNLHYYQEIMAGMRAAISEWRFAAWETAFHALRAEGDIEPL

SEQ ID NO: 60388 - protein, 436 aa, Rothia aeria
  misc_feature (1)..(436): tr|I0UUN6|I0UUN6_9MICC Queuine tRNA-ribosyltransferase OS=Rothia aeria F0474 OX=1125724 GN=tgt PE=3 SV=1
MSSSNSEFPNPGFGFTVTSRLAETASPSAERVEANGGQFLGRTGVIRTPHGDIETPAFTPVGTKATVKAVLPEAMKELGAQALLANAYHLYLQPGPEILDAAGGLGRFMNWDGPTFTDSGGFQVMSLGSGFKKVIDMGTVADAKGADGRPIGDDDVAHGKERLAHIDDDGVNFKSHINGSIHRFTPEVSMQVQHQIGADIMFAFDELTTLYNSRGYQEEALERTRLWALRCIAEHERLTDERTGKPYQALFGVIQGAQYEDLRRKACRDLGAMPFDGFGIGGALEKENLGTIVRWCAEELPEAKPRHLLGISEPDDIFVGLENGVDTFDCVSPTRVARNAALYSPTGRFNVTNARFKADFSPIYEGCDCYTCAHYTRAYLRHLFKADERLAATLASIHNERFIVRMVDDARAAIADGTYFEYRDEFLGNYYSGKKP

SEQ ID NO: 60389 - protein, 436 aa, Rothia aeria
  misc_feature (1)..(436): tr|U7UXK7|U7UXK7_9MICC Queuine tRNA-ribosyltransferase OS=Rothia aeria F0184 OX=888019 GN=tgt PE=3 SV=1
MSSSNSEFPNPGFGFTVTSRLAETASPSAERVEANGGQFLGRTGVIRTPHGDIETPAFTPVGTKATVKAVLPEAMKDLGAQALLANAYHLYLQPGPEILDAAGGLGRFMNWDGPTFTDSGGFQVMSLGSGFKKVIDMGTVADAKGADGRPIGDDDVAHGKERLAHIDDDGVNFKSHINGSIHRFTPEVSMQVQHQIGADIMFAFDELTTLYNSRGYQEEALERTRLWALRCIAEHERLTDERTGKPYQALFGVIQGAQYEDLRRKACRDLGAMPFDGFGIGGALEKENLGTIVRWCAEELPEARPRHLLGISEPDDIFVGLENGVDTFDCVSPTRVARNAALYSPTGRFNVTNARFKADFSPIYEGCDCYTCTHYTRAYLRHLFKADERLAATLASIHNERFIVRMVDDARTAIADGTYFEYRDEFLGNYYSGKKP

SEQ ID NO: 60390 - protein, 433 aa, Rothia dentocariosa
  misc_feature (1)..(433): tr|E3H4Q8|E3H4Q8_ROTDC Queuine tRNA-ribosyltransferase OS=Rothia dentocariosa (strain ATCC 17931 / CDC X599 / XDIA) OX=762948 GN=tgt PE=3 SV=1
MNNEFPNPDFGFTVTSRLAETASPSAERVEANGGQFLGRTGVIRTPHGNIETPAFTPVGTKATVKAVLPEAMKELGAQALLANAYHLYLQPGPEILDAAGGLGRFMNWDGPTFTDSGGFQVMSLGSGFKKVIDMGTVADAKGADGRPIGDDDVAHGKERLAHIDDDGVNFKSHINGSIHRFTPEVSMQVQHQIGADIMFAFDELTTLYNSRGYQEEALERTRLWALRCIAEHERLTDERTGNPYQALFGVIQGAQYEDLRRKACRDLGDMPFDGFGIGGALEKENLGIIVRWCAEELPEAKPRHLLGISEPDDIFVGLENGVDTFDCVSPTRVARNAALYSPTGRFNVTNARFKADFSPIYEGCDCYTCAHYTRAYLRHLFKADERLAATLASIHNERFIVRMVDDARAAIADGTYFEYRDEFLGNYYSGKKP

SEQ ID NO: 60391 - protein, 436 aa, Rothia dentocariosa
  misc_feature (1)..(436): tr|A0A448PVQ1|A0A448PVQ1_9MICC Queuine tRNA-ribosyltran sferase OS=Rothia dentocariosa OX=2047 GN=tgt PE=3 SV=1
MSSSNSEFPNPGFGFTVTSRLAETASPSAERVEANGGQFLGRTGVIRTPHGDIETPAFTPVGTKATVKAVLPEAMKDLGAQALLANAYHLYLQPGPEILDAAGGLGRFMNWDGPTFTDSGGFQVMSLGSGFKKVIDMGTVADAKGADGRPIGDDDVAHGKERLAHIDDDGVNFKSHINGSIHRFTPEVSMQVQHQIGADIMFAFDELTTLYNSRGYQEEALERTRLWALRCIAEHERLTDERTGKPYQALFGVIQGAQYEDLRRKACRDLGDMPFDGFGIGGALEKENLGTIVRWCAEELPETKPRHLLGISEPDDIFVGLENGVDTFDCVSPTRVARNAALYSPTGRFNVTNARFKADFSPIYEGCDCYTCTHYTRAYLRHLFKADERLAATLASIHNERFIVRMVDDARAAIADGTYFEYRDEFLGNYYSGKKP

SEQ ID NO: 60392 - protein, 483 aa, Rothia kristinae
  misc_feature (1)..(483): tr|A0A2X3ERP5|A0A2X3ERP5_9MICC Queuine tRNA-ribosyltran sferase OS=Rothia kristinae OX=37923 GN=tgt PE=3 SV=1
MPTAESPQRPTPGVAASNPGAEPAENTAPPSGTAAFGFAVGARLAETDDARGTRSARERNDGGQFLGRTGVITTPHGSIATPAFIPVGTQATVKAVLPESMAELGAQALLANAYHLYLQPGPEVLDAAGGLGAFMNWPGPTFTDSGGFQVMSLGSGFKKVIDMGTVTGAVGADGRPVGDDDVAAGKERMAYVDDDGVTFRSHLNGDRHRFTPEVSMRVQHQLGADIMFAFDELTTLYNSRGYQELALERTRLWALRCVAEHRRLTEQRAGKPYQALFGVIQGAQYEDLRRKACRDLGAMGFNGFGLGGALEKENLGTIVRWCSEELPEAKPRHLLGISEPDDIFVAIENGADTFDCVSPTRVARTSAVYSPDGRFNVSNARFKTDFSPIVDGCDCYTCTHYTRAYLHHLFKAKERLAATLASIHNERFIVRMVDTARQTIASGDYFAYRDEFLGRYYAARTTPGPASGAAPSDDAASAGKGRA

SEQ ID NO: 60393 - protein, 436 aa, Rothia kristinae
  misc_feature (1)..(436): tr|A0A1S2MZX8|A0A1S2MZX8_9MICC Queuine tRNA-ribosyltran sferase OS=Rothia kristinae OX=37923 GN=tgt PE=3 SV=1
MAETDDARGTRDARERNDGGEFLGRTGVITTPHGSIATPAFIPVGTQATVKAVLPESMAELGAQALLANAYHLYLQPGPEVLDAAGGLGAFMNWPGPTFTDSGGFQVMSLGSGFKKVIDMGTVTDAVGADGRPVGDDDVAAGKERMADVDDDGVTFKSHLNGDLHRFTPEVSMRVQHQLGADIMFAFDELTTLYNSRGYQERALERTRLWALRCVEEHRRLTEQRAGKPYQALFGVIQGAQYEDLRRKACRDLGAMGFDGFGLGGALEKENLGTIVRWCAEELPEAKPRHLLGISEPDDIFVAIENGADTFDCVSPTRVARTSAVYSPDGRFNVSNARFKTDFSPLVDGCDCYTCAHYTRAYLHHLFKAKERLAATLASIHNERFIVRMVDTARETIASGDYFAYRDEFLGRYYAARTPSGPAVSAGAASAGKGRA

SEQ ID NO: 60394 - protein, 436 aa, Rothia mucilaginosa
  misc_feature (1)..(436): tr|A0A2I1Z3D4|A0A2I1Z3D4_9MICC Queuine tRNA-ribosyltran sferase OS=Rothia mucilaginosa OX=43675 GN=tgt PE=3 SV= 1
MSVLDNSFPTEDFGFTITSRLADTASPSAERVEANGGQFRGRTGVITTPHGQIQTPAFTPVGTKATVKAVLPESMKELGAQALLSNAYHLYLQPGPEILDAAGGLGAFMNWDGPTFTDSGGFQVMSLGSGFKKVIDMGTVADAKGADGRPLGDDDVAKGKERLAHIDDDGVNFKSHIDGSIHRFTPEVSMQVQHQIGADVMFAFDELTTLYNSRGYQEEALERTRLWALRCIAEHQRLTTERVGKPYQALFGVIQGAQYEDLRRKACQDLGSMPFDGFGIGGALEKENLGTIVRWCAEELPESKPRHLLGISEPDDIFVGIENGVDTFDCVSPTRVARNAAVYSPTGRYNITNARFKADFSPIYEGCDCYTCTHYTRAYLRHLFKADERLAATLASIHNERFIVRMVDDAREAIKDGTYFEYRDEFLGNYYSGKKP

SEQ ID NO: 60395 - protein, 436 aa, Rothia mucilaginosa
  misc_feature (1)..(436): tr|G5ETI2|G5ETI2_9MICC Queuine tRNA-ribosyltransferase OS=Rothia mucilaginosa M508 OX=563033 GN=tgt PE=3 SV=1
MSVLDNSFPTEDFGFTITSRLADTASSSAERVEANGGQFRGRTGVITTPHGQIQTPAFTPVGTKATVKAVLPESMKELGTQALLSNAYHLYLQPGPEILDAAGGLGAFMNWDGPTFTDSGGFQVMSLGSGFKKVIDMGTVADAKGADGRPLGDDDVAKGKERLAHIDDDGVNFKSHIDGSIHRFTPEVSMQVQHQIGADVMFAFDELTTLYNSRGYQEEALERTRLWALRCIAEHQRLTTERVGKPYQALFGVIQGAQYEDLRRKACQDLGSMPFDGFGIGGALEKENLGTIVRWCAEELPESKPRHLLGISEPDDIFVGIENGVDTFDCVSPTRVARNAAVYSPTGRYNITNARFKADFSPIYEGCDCYTCTHYTRAYLRHLFKADERLAATLASIHNERFIVRMVDDAREAIKDGTYFEYRDEFLGNYYSGKKP

SEQ ID NO: 60396 - protein, 436 aa, Rothia sp.; identical to SEQ ID NO: 60394
  misc_feature (1)..(436): tr|A0A1E9GD68|A0A1E9GD68_9MICC Queuine tRNA-ribosyltran sferase OS=Rothia sp. HMSC062H08 OX=1739269 GN=tgt PE=3 SV=1

SEQ ID NO: 60397 - protein, 436 aa, Rothia sp.
  misc_feature (1)..(436): tr|A0A1E9Z6M2|A0A1E9Z6M2_9MICC Queuine tRNA-ribosyltran sferase OS=Rothia sp. HMSC071B01 OX=1715007 GN=tgt PE=3 SV=1
MSVLDNSFPTEDFGFTITSRLADTASPSAERVEANGGQFRGRTGVITTPHGQIQTPAFTPVGTKATVKAVLPESMKELGAQALLSNAYHLYLQPGPEILDAAGGLGAFMNWDGPTFTDSGGFQVMSLGSGFKKVIDMGTVAGAKGADGRPLGDDDVAKGKERLAHIDDDGVNFKSHIDGSIHRFTPEVSMQVQHQIGADVMFAFDELTTLYNSRGYQEEALERTRLWALRCIAEHQRLTTERVGKPYQALFGVIQGAQYEDLRRKACQDLGSMPFDGFGIGGALEKENLGTIVRWCAEELPESKPRHLLGISEPDDIFVGIENGVDTFDCVSPTRVARNAAVYSPTGRYNITNARFKADFSPIYEGCDCYTCTHYTRAYLRHLFKADERLAATLASIHNERFIVRMVDDAREAIKDGTYFEYRDEFLGNYYSGKKP

SEQ ID NO: 60398 - protein, 374 aa, Rouxiella badensis
  misc_feature (1)..(374): tr|A0A1X0WJG3|A0A1X0WJG3_9GAMM Queuine tRNA-ribosyltran sferase OS=Rouxiella badensis OX=1646377 GN=tgt PE=3 SV =1
MKYELQTTDGRARRGRLVFERGVVETPAFMPVGTYGTVKGMTPEEVKDTGAQILLGNTFHLWLRPGQEIMKLHGDLHDFMNWHGPILTDSGGFQVFSLGAMRKIKEEGVHFRNPINGDPVFLSPEKSMEIQNDLGSDIVMIFDECTPYPADWDYAKRSMEMSLRWAKRSRDRHDELKNNNALFGIIQGSVYEDLRDVSIKGLVDIGFDGYAVGGLAVGEPKEDMHRILEHVCPQIPEDKPRYLMGVGKPQDLVEGVRRGVDMFDCVMPTRNARNGHLFVTDGVVKIRNAKHKDDTSTLDEHCDCYTCRNYSRAYLHHLDRCNEILGARLNTIHNLRYYQRLMAGLRQAIEEGKLEQFVTEFYERQGKPVPPLNF

SEQ ID NO: 60399 - protein, 374 aa, Rouxiella silvae
  misc_feature (1)..(374): tr|A0A1X0W6H4|A0A1X0W6H4_9GAMM Queuine tRNA-ribosyltran sferase OS=Rouxiella silvae OX=1646373 GN=tgt PE=3 SV=1
MKYELSTTDGRARRGRLVFERGVVETPAFMPVGTYGTVKGMTPEEVKETGAQILLGNTFHLWLRPGQEIMKLHGDLHDFMNWHGPILTDSGGFQVFSLGAMRKIKEEGVHFRNPINGDPVFLSPEKSMEIQNDLGSDIVMIFDECTPYPADWDYAKRSMEMSLRWAKRSRDRHDELKNNNALFGIIQGSVYEDLRDVSIKGLVDIGFDGYAVGGLAVGEPKEDMHRILEHVCPQIPEDKPRYLMGVGKPQDLVEGVRRGVDMFDCVMPTRNARNGHLFVTDGVVKIRNAKHKDDTSTLDEHCDCYTCRNYSRAYLHHLDRCNEILGARLNTIHNLRYYQRLMAGLRQAIEEGKLELFVADFYARQGKEVPPLNF

SEQ ID NO: 60400 - protein, 401 aa, Ruaniaceae bacterium
  misc_feature (1)..(401): tr|A0A239QT73|A0A239QT73_9MICO Queuine tRNA-ribosyltran sferase OS=Ruaniaceae bacterium KH17 OX=1945888 GN=tgt PE=3 SV=1
MPFRFEPRSHLAGAAGRTGTIHTPHGSIQTPAFIPVATKAAIKAVLPEAMRAAGAQALLANAYHLYLQPGAEIVEEGGGVGQFMGWDGPTFTDSGGFQVLSLGAGFKKVLAMATEGLGNDEIVAESKERLAQVDDDGVTFKSHLDGSLHRFTPEVSMQIQHQLGADIIFSFDELTTLVNTRRYQEESLERTRLWAERCVAEHRRLTEARGERPYQALFGVLQGANYEDLRRKAARDLSTMGFDGYGLGGAIEKPRLGEIVGWMTAELQEDRPRHLLGISEPDDLFAAVAAGADTFDCVSPTRVARNSAIYSRFGRYNVTGARYRRDFSPLDEGCDCYTCTHVTRAYLHHLFKAKEMNAATLASIHNERFILRLMDEIRESIDGGYFSELRTERMHDYYGRT

SEQ ID NO: 60401 - protein, 376 aa, Rubellimicrobium mesophilum
  misc_feature (1)..(376): tr|A0A017HN84|A0A017HN84_9RHOB Queuine tRNA-ribosyltran sferase OS=Rubellimicrobium mesophilum DSM 19309 OX=442 562 GN=tgt PE=3 SV=1
MGSGFSFTLNATDGRARTGVISTPRGEIRTPAFMPVGTAGTVKAMLPESVRATGADILLGNTYHLMLRPGAERLARLGGLHRFMNWERPILTDSGGFQVMSLSTLRKLTEEGVTFSSHVDGSKHHLTPERSMEIQRLLGSDIVMAFDECPALPAAEDTVAKSMRLSMRWAARSREAFGDRPGHALFGIMQGGVTRELREESAEALKGIGFEGYAVGGLAVGEGQEAMFGVLDYAPGLLPEDKPRYLMGVGKPDDIVGAVKRGIDMMDCVLPTRSGRTGQAWTRRGQVNLRNARHAEDPRPLDEACTCPACRSYSRAYLHHVVRAGEMIAGMLLTWHNLHYFQEIMAGMREAIAGGRFEAWESGFHASRAEGDVEPL

SEQ ID NO: 60402 - protein, 376 aa, Rubellimicrobium roseum
  misc_feature (1)..(376): tr|A0A5C4NK78|A0A5C4NK78_9RHOB Queuine tRNA-ribosyltran sferase OS=Rubellimicrobium roseum OX=687525 GN=tgt PE= 3 SV=1
MATGFSFTLNATDGRARTGVISTPRGEIRTPAFMPVGTAATVKAMLPESVRATGADILLGNTYHLMLRPGAERVARLGGLHKFMNWERPILTDSGGFQVMSLSSLRKMTEEGVTFSSHIDGSKHALTPERSMEIQKLLGSDIVMAFDECTPFPATGEVSLASMQRSMRWAQRSRDAFGDRPGHALFGIQQGSVFPEQRAESAEALKAIGFDGYAVGGLAVGEGQEKMFEVLDYAPGMLPEDRPRYLMGVGKPDDIVGAVKRGIDMMDCVLPTRSGRTGQAWTRRGQVNLRNARHAEDTRPLDEACTCPACRSYSRAYLHHVVRADEMIAGMLLTWHNLHYFQEIMAGMRAAIAAGRFAEWETGFHTLRAEGDIEPV

SEQ ID NO: 60403 - protein, 376 aa, Rubellimicrobium sp.
  misc_feature (1)..(376): tr|A0A5C4MZ66|A0A5C4MZ66_9RHOB Queuine tRNA-ribosyltran sferase OS=Rubellimicrobium sp. YIM 131921 OX=2585369 G N=tgt PE=3 SV=1
MATGFSFTLAATDGRARTGVITTPRGEIRTPAFMPVGTAGTVKAMLPDSVRATGADILLGNTYHLMLRPGAERVARLGGLHKFMNWERPILTDSGGFQVMSLSSLRKMTEEGVTFSSHIDGSKHVLTPERSMEIQRLLGSDIVMAFDECTPFPAAQDVSLESMRRSMRWARRSRDAFGDRLGHALFGIQQGSVFREQREESAEALKAVGFDGYAVGGLAVGEGQGQMFDVLNYAPGMLPDDKPRYLMGVGKPDDIVGAVKRGIDMMDCVLPSRSGRTGQAWTRRGQVNLRNARHADDPRPVDEACSCPACRNYSRAYLHHVVRANEMIAGMLLTWHNLHYFQEIMAGMREAISKGRFASWENDFQSRRSEGDIEPL

SEQ ID NO: 60404 - protein, 376 aa, Rubellimicrobium thermophilum
  misc_feature (1)..(376): tr|S9QMN1|S9QMN1_9RHOB Queuine tRNA-ribosyltransferase OS=Rubellimicrobium thermophilum DSM 16684 OX=1123069 G N=tgt PE=3 SV=1
MASGIIFTVAATDGRARTGVLKTPRGEIRTPAFMPVGTAATVKAMLPQSVRATGADILLGNTYHLMLRPGAERIARLGGLHRFMNWDGPILTDSGGFQVMSLAALRRLDEDGVTFASHIDGSRHRLTPERSMEIQRLLGSDIVMAFDECPALPAPEEAVAASMRLSMRWAARSREAFGDRPGHALFGIMQGGVTRELREESAAALRAIGFDGYAIGGLAVGEGQAAMFEVLDYAPGLLPQDRPRYLMGVGKPDDIVGAVARGVDMMDCVLPTRSGRTGQAWTRRGPVNLRNARHAEDPRPLDEACTCPACRGYSRAYLHHVVRAGEMIAGMLLTWHNLHYFQQLMQEMRTAIAAGRFAAWEAEFHRLRAEGDIEPL

SEQ ID NO: 60405 - protein, 372 aa, Rubidibacter lacunae
  misc_feature (1)..(372): tr|U5DPM6|U5DPM6_9CHRO Queuine tRNA-ribosyltransferase OS=Rubidibacter lacunae KORDI 51-2 OX=582515 GN=tgt PE= 3 SV=1
MGEQTRSQFEFECLATCSVTGARAGRFFTPHGIVDTPRFMPVGTLADVKGVTPAQLADCQAQMVLANTYHLHLQPGEAIVEQAGGLHAFMGWSGPMLTDSGGFQVFSLSELRQVSERGVVFRSPRDGDIIDLTPERAIAIQNILGADVIMAFDECPPYPAERAAVEAATARTYRWLERCMTAHERTDQALFGIVQGGVHLDLRTQAARELVALDLPGYAIGGVSVGEPVEAMHAIVRATAPLLPADRPRYLMGVGTYREMAIAIAAGVDLFDCVIPTRLGRHGTALVRSGERLNLKNAQFREDFTPLDPLCECYTCQTFSRGYLHHLVRSREILAATLLSIHNITELIRFTRSIRAAIFGDRFARDFSRFLN

SEQ ID NO: 60406 - protein, 372 aa, Rubinisphaera brasiliensis
  misc_feature (1)..(372): tr|F0SG11|F0SG11_RUBBR Queuine tRNA-ribosyltransferase OS=Rubinisphaera brasiliensis (strain ATCC 49424 / DSM 5305 / JCM 21570 / NBRC 103401 / IFAM 1448) OX=756272 G N=tgt PE=3 SV=1
MSQFRFELEHVDRHTGARAGKWHTPHGVVQTPTFMPVGTLGTVKGLLPEQLREAGAEMILANTYHLALRPGADVVADLGGLHEFSKWDGPILTDSGGFQVFSLAKLSKLTDDKVVFRSHIDGSVLELSPEKAIDIQEKLGADCIMCLDECPPHDVGKPRLRKAIERTTAWAKRCRDAQKRDDQALFGIVQGGIDQELRETSAAGLLPLDFPGYAIGGLSVGEDPQDMYRTLDFTTPLLPKEKPRYLMGVGKPVDLVEGILRGVDMFDCVMPTRNGRNAMAFTSNGPVKIRNAKYQRDEQPLDAEGASRVGREYSRGYLRHLFMAGEMLGPILLSWHNIAFYEQLVRDMRTAILNDESAEFRSRQLARWGMEP

SEQ ID NO: 60407 - protein, 372 aa, Rubinisphaera sp.
  misc_feature (1)..(372): tr|A0A2E9VM35|A0A2E9VM35_9PLAN Queuine tRNA-ribosyltran sferase OS=Rubinisphaera sp. OX=2024857 GN=tgt PE=3 SV= 1
MASFRFELQHTDPNTGARAGQWHTPHGIVDTPAFMPVGTLGTVKGLLPEQLKAAGAQMVLANTYHLALRPGADVVEELGGLHQFMNWSGPILTDSGGFQVFSLAKLSKLTDDQVVFRSHIDGSLLELSPEKAIRIQEQLGADCIMCLDECPPHDVGQDRLRAAVQRTTAWAARCRDAQKRGDQALFGIVQGGIDPHLREESAEGLLPLDFPGYAVGGLSVGEDPNDMYKTLDFTTPFLPVEKPRYLMGVGKPVDLLESIIRGIDLFDCVMPTRNGRNAMAFTSNGPVKIRNAKYQRDVTPLDPEGPSEVGRIYSKGYLRHLFVAKEMLGAILLSWHNIAFYENLVREMRQAIFENRSAEFRADQLARWGSDP

SEQ ID NO: 60408 - protein, 381 aa, Rubneribacter badeniensis
  misc_feature (1)..(381): tr|A0A2K2U7T4|A0A2K2U7T4_9ACTN Queuine tRNA-ribosyltran sferase OS=Rubneribacter badeniensis OX=2070688 GN=tgt PE=3 SV=1
MALFDCVCEAESGHARALAYETAHGTFRTPMFMPVGTSATVKGVTAGQLRDLQSQVVLANTYHLSLRPGADVVEAAGGVHTFMNYDGPMLTDSGGFQVFSLADTVKLDADGLTFRSIYDGAKVRWTPEDNMRIQQQLGADIAMQLDQCAPYPAERAFVARAVDLSASWARRCLAAHTRPDQTLFGIVQGGMHLDLRLRSVEALCEIEKESLAAGGRRFGGFGIGGYSVGESHEVMFETLGQVARALPKDRPRYLMGVGNPTTLVRAVREGVDMFDCVLPTRTARMGTAFSSTGRMNLRNAKYTRDFGPLDPACTCPTCQNHSRAYLRHLVKQNEMLGGILLSLHNLHYLLDLMRRAREAVLAGAYEDFYEEWMASPAARDY

SEQ ID NO: 60409 - protein, 378 aa, Rubricoccus marinus
  misc_feature (1)..(378): tr|A0A259U1Q0|A0A259U1Q0_9BACT Queuine tRNA-ribosyltran sferase OS=Rubricoccus marinus OX=716817 GN=tgt PE=3 SV =1
MPLRYTLQAECPETGARAGTIETDHGTIETPIFMPVGTAGSVKALSPRALTEDIGAQIILGNTYHLHLRPGREVLHELGGLHKFMSWDGPILTDSGGFQVFSLAELRKMSEEGVRFRNHLDGAYLHFTPENVIDTQRDIGSDIMMVLDECPPATVDIATARKSNELTVRWAKRAFEHYHNTTPHYGHHQALFPIVQGAVYPEVRRESADALLQLDAEGYAIGGLSVGETADVMYEIVEVVNEVLPHDRPRYLMGVGTPQNLIENVARGVDMFDCVMPTRNGRNGSLFTTEGLVNIKNKRWERSPEAIDPGLDLYASQNFSKAYLRHLIKSNEPLAMELASMQNVGFYLWLMREMRAAILEGRFPAFRAEWSERVAQKV

SEQ ID NO: 60410 - protein, 376 aa, Rubrimonas cliftonensis
  misc_feature (1)..(376): tr|A0A1H3YIP4|A0A1H3YIP4_9RHOB Queuine tRNA-ribosyltran sferase OS=Rubrimonas cliftonensis OX=89524 GN=tgt PE=3 SV=1
MASGVSFSVSATDGRARTGALVTPRGAIRTPAFMPVGTAATVKAMLPENVRETGADILLGNTYHLMLRPGAERVARLGGLHRFMNWDGPILTDSGGFQVMSLADLRKLTEEGVTFRSHVDGSKHMLSPESSMEIQRLLGSDIVMCFDECPALPAPRERVADSMRLSMRWAARSRDAFGDRPGHALFGIQQGGLEQDLRAESAEALTAIGFDGYAIGGLAVGEGQDAMFGVLDHAPQMLPADRPRYLMGVGKPDDIVGAVRRGVDMFDCVLPSRSGRTGQALTRRGAVNIKNARHADDPRPLDPDCPCPCCRSYSRAYLHHVFKAGEIISSMLMTWHNLHYYQELMQGLRDAIAEERLDAFAQGFERRRAGGDLDPL

SEQ ID NO: 60411 - protein, 371 aa, Rubripirellula obstinata
  misc_feature (1)..(371): tr|A0A5B1CHB5|A0A5B1CHB5_9PLAN Queuine tRNA-ribosyltran sferase OS=Rubripirellula obstinata OX=406547 GN=tgt PE =3 SV=1
MTHFSFELTHRDAGSLARRGVFVTPHGPVQTPGFMPVGTQGTVKGVTIDQVAATGAHMILGNTYHLALRPGHETVRKLGGLHGMTRWEGPILTDSGGFQVFSLDAINHVDEEAATFRSHLDGSIVRLTPEHSIEIQESLGSDVAMVLDHVVALPAEKDIVQDAMERSIRWARRCLESATRDDQAKFAIVQGGLDVELRIQCARELAAMDFEGFAVGGLSVGEPPTEMYRITEATTPELPENKPRYLMGVGTPVDLIESVARGIDLFDCVMPTRNGRNGLAFTDSGSIKLRNAVHREDTSPLQESCPCIACRHSRGYLRHLFHAKEMLGPILLSIHNLTYYQQVMAETRAAIEQNRFNQYVAEKKQGWGIDA

SEQ ID NO: 60412 - protein, 391 aa, Rubritalea profundi
  misc_feature (1)..(391): tr|A0A2S7U021|A0A2S7U021_9BACT Queuine tRNA-ribosyltran sferase OS=Rubritalea profundi OX=1658618 GN=tgt PE=3 S V=1
MFKLLKTDEKTKARRGELTTAHGVIQTPIFMPVGTQGTVKTLHPDDLVDLGSQIILGNTYHLNLRPGLEVIRAAQGLHKFSSWDEPILTDSGGFQVWSLAKLRKISEKGVEFANHLDGSKMMMTPENSMEIQATLGSDIAMLFDECPPYPCDEKYAEESLALTTRWAKRCKIWHDENIDTVVPWQVDPSQIDDDKKTPVKRQLAFGIVQGSTFAHLRERSAKELIEIGFDGYAVGGISVGEPEHEMIRAIDNAVPHLPEDKPRYAMGLGTPPQMLEMIARGVDMFDCVMPTRVARHGLAFTHDGPIHIKNKEFELDQRPLTETTHPSVRRFTRSYIRHLWRAKEMLALRLLSYHNLHFYLQLMEQAREAIEAGTFSEFKDAFIGRYTANSK

SEQ ID NO: 60413 - protein, 391 aa, Rubritalea squalenifaciens
  misc_feature (1)..(391): tr|A0A1M6KTX3|A0A1M6KTX3_9BACT Queuine tRNA-ribosyltran sferase OS=Rubritalea squalenifaciens DSM 18772 OX=1123 071 GN=tgt PE=3 SV=1
MFELIQTDKETKARRGRLTTAHGVIETPIFMPVGTQGTVKTLHPDDLLDLGSQIILGNTYHLNLRPGLDVIRAAKGLHQFSTWDKPILTDSGGFQVWSLAKLRKISEEGVQFANHLDGSKMMLSPETSMEIQATLGSDIAMLFDECPPYPCEEKYAADSLALTTRWAKRCKEWHEENASKIVPWMTEPSLLGESPMPQPRQLAFGIVQGSSYAELREQSAKELIEIGFDGYAVGGISVGEPEHEMIRAIDNAVPHLPADKPRYAMGLGTPPQMLEMIARGVDMFDCVMPTRVARHGLAFTEDGPIHIKNKEFEFDQRPLTEYTHPSVARFSRSYIRHLWRAKEMLALRLLSFHNLHFYLRLMQQSREAIEAGTFAEFKDAFITRYNSHKEQ

SEQ ID NO: 60414 - protein, 376 aa, Rubrivirga marina
  misc_feature (1)..(376): tr|A0A271J6E1|A0A271J6E1_9BACT Queuine tRNA-ribosyltran sferase OS=Rubrivirga marina OX=1196024 GN=tgt PE=3 SV= 1
MTFELQAECPETGARAGLLHTDHGTVETPMFMPVGTVGSVKAVAPRTLRDDLGVQILLGNTYHLALRPGRDVLRTVGGLHPFMQWDGPILTDSGGFQVFSLADLRKVTEEGVRFRNHLDGQYLTFTPESVVDTQRDIGSDIMMVLDELTPATVDEAEARRANARTVRWAERAFAHYRATEPHYGHHQALFPIVQGAVFPDVRRESAEALLQLDAEGYAIGGLAVGEEAEVMYDTVALTNEVLPQDRPRYLMGVGTPQNLIENVARGVDLFDCVMPTRNARTGTLFTTDGTVNIKNARFKTDTSAIDEALDVYHSRTFSKAYLRHLTKANEPLYMEIASVQNLALYLWTMRSMRAAILEGRFPAFRREWSDRLVQKA

SEQ ID NO: 60415 - protein, 375 aa, Rubrivirga sp.
  misc_feature (1)..(375): tr|A0A271JFJ5|A0A271JFJ5_9BACT Queuine tRNA-ribosyltran sferase OS=Rubrivirga sp. SAORIC476 OX=1961794 GN=tgt P E=3 SV=1
MTFELQAECPETGARAGLLHTDHGTVETPTFQPVGTVGSVKGVAPRTLREIGVQQILANTYHLALRPGREVLRAMGGLHRFMQWDGPILTDSGGFQVFSLAELRKVTEEGVRFQSHLDGTPLHFTPETVVDTQRDIGSDIMMVLDELTPATVDETEARRANGRTLRWAERAFAHYRATEPLYGHHQALFPIVQGATFPAIRRESADALMQLGAEGYAIGGLSVGEAAPVMYEMVEIVNAVLPADRPRYLMGVGTPQNLIENVARGVDLFDCVMPTRNARTGTLFTTDGMVNIKNARWKTEQAPVDAGLDVYHSQTFSKGYLRHLTKANEPLFIEIASVQNLALYLWTMRQMRTAILEGRFPAWRREWADRLARKA

SEQ ID NO: 60416 - protein, 406 aa, Rubrivirga sp.
  misc_feature (1)..(406): tr|A0A2E8PA43|A0A2E8PA43_9BACT Queuine tRNA-ribosyltran sferase OS=Rubrivirga sp. OX=1885344 GN=tgt PE=3 SV=1
MGEDRSLPGSQLGRSGVITTPHGQIRTPAFIPVGTKATVKTVLPESMRDLGAQAVLANAYHLYLQPGADIVEAAGGLGAFMNWPGPTFTDSGGFQVLSLGVGFKKVLAMDVSDRTVDDVVAPGKDRLAHVDDDGVTFTSHLDGSRHRFTAEVSMQVQHALGADIIFAFDECTTLMNSRDYQQVAMRRTLEWAKRCIAEHRRITTDRPGRAYQALFGVIQGAQYEDLRRQAASDIAALPFDGFGIGGAIEKERMADIVRWVCEELPEDKPRHLLGIGEPQDFFTAIASGADTFDCVSPARVARNSALYTSRGRFNVTASINRRTFAPIEEGCTCYTCKNYTRAYLHHAFKAKESIAATLATIHNQHFIVNLVDNIRVAIEAGDFHAYREAFVGGYANDGQAGSQAGG

SEQ ID NO: 60417 - protein, 376 aa, Rubrivivax benzoatilyticus
  misc_feature (1)..(376): tr|F3LMZ2|F3LMZ2_9BURK Queuine tRNA-ribosyltransferase OS=Rubrivivax benzoatilyticus JA2 = ATCC BAA-35 OX=9870 59 GN=tgt PE=3 SV=1
MLRYELLKTEGHARRGRLTLNHGVVETPIFMPVGTYGTVKGVLPRSLEEAGAQIILGNTFHLWMRPGLDVLQSFGGLHRFEGWNKPILTDSGGFQVWSLGEMRKISEEGVKFASPVNGDKLFLTPEVSMQIQTVLNSDIVMQFDECTPYETKGQLTTEAQARASMELSRRWAKRCIAEFERLENPNALFGIVQGGMFEHLRQESLDALVEMDLPGYAIGGVSVGEPKDEMLRIMAHTPHRLPAHKPRYLMGVGTPEDLVDGVACGVDMFDCVMPTRNARNGHLFTRFGDLKIRNAKHRASDRPVDETCSCYCCRNFSRAYLHHLDRCGEMLGPMLASIHNIHYYLNLMREVREALDEGRFEAFRQQFKADRSRGIG

SEQ ID NO: 60418 - protein, 376 aa, Rubrivivax gelatinosus
  misc_feature (1)..(376): tr|A0A4R2M8E4|A0A4R2M8E4_RUBGE Queuine tRNA-ribosyltran sferase OS=Rubrivivax gelatinosus OX=28068 GN=tgt PE=3 SV=1
MLRYELLKTEGHARRGRLTLNHGVVETPIFMPVGTYGTVKGVLPRSLEEAGAQIILGNTFHPWMRPGLDVLQSFGGLHRFEGWNKPILTDSGGFQVWSLGEMRKISEEGVKFASPVNGDKLFLTPEVSMQIQTVLNSDIVMQFDECTPYETKGVLTTEAQARASMELSRRWAKRCVAEFNRLENPNALFGIVQGGMFEHLRQESLDALVEMDLPGYAIGGVSVGEPKDEMLRIMAHTPHRLPAHKPRYLMGVGTPEDLVEGVACGVDMFDCVMPTRNARNGHLFTRFGDLKIRNAKHRASERPVDETCSCYCCRNFSRAYLHHLDRCGEMLGPMLASIHNIHYYLNLMREVREALDEGRFEAFRQQFKADRARGIG

SEQ ID NO: 60419 - protein, 376 aa, Rubrivivax gelatinosus
  misc_feature (1)..(376): tr|I0HKA8|I0HKA8_RUBGI Queuine tRNA-ribosyltransferase OS=Rubrivivax gelatinosus (strain NBRC 100245 / IL144) OX=983917 GN=tgt PE=3 SV=1
MLRYELLKTEGHARRGRLTLNHGVVETPIFMPVGTYGTVKGVLPRSLEEAGAQIILGNTFHLWMRPGLDVLQSFGGLHRFEGWDKPILTDSGGFQVWSLGEMRKISEEGVKFASPVNGDKLFLTPEVSMQIQTVLNSDIVMQFDECTPYETKGRITTEAEARASMELSRRWAKRCIAEFARLENPNALFGIVQGGMFEHLRQESLEALVEMDLPGYAIGGVSVGEPKDEMLRIMAHTPHRLPAHKPRYLMGVGTPEDLVEGVACGVDMFDCVMPTRNARNGHLFTRFGDLKIRNAKHRASDRPVDETCSCYCCRNFSRAYLHHLDRCGEMLGPMLASIHNLHYYLNLMREVREALDEGRFEAFRQQFRADRARGVG

SEQ ID NO: 60420 - protein, 402 aa, Rubrivivax sp.
  misc_feature (1)..(402): tr|A0A519ZT09|A0A519ZT09_9BURK Queuine tRNA-ribosyltran sferase OS=Rubrivivax sp. OX=50259 GN=tgt PE=3 SV=1
MLSFDLLKTEGQARRGRLTLNHGVVETPIFMPVGTYGTVKGVMPQSLEDMGAQIILGNTFHLWMRPGQDVMTQFGGLHRFENWHKPILTDSGGFQVWSLGEMRKISEEGVRFASPVNGDKLFLTPEVSMQIQTTLNSDIVMQFDECTPYWKGDKSLGHITTEKEARYSMELSLRWARRCIAEFDKLQNPNALFGIVQGGMFNHLREESLAGLVDLNLPGYAIGGVSVGEPKDEMMRIMDFISPKLPAHKPRYLMGVGTPEDLVAGVAAGVDMFDCVMPTRNARNGHLFTRFGDLRLRNARNKTDERPIDETCTCYTCKGLPAAYGGGTAGNAAVPSGAVSGGFSRAYLHHLDRCNEMLGPMLTTIHNLHYYLNLMREVREALDAGRFGEFRQQFAADRARGV

SEQ ID NO: 60421 - protein, 375 aa, Rubrivivax sp.
  misc_feature (1)..(375): tr|A0A519IKF1|A0A519IKF1_9BURK Queuine tRNA-ribosyltran sferase OS=Rubrivivax sp. OX=50259 GN=tgt PE=3 SV=1
MLKFDLLKTEGRARRGTLTLNHGVVQTPIFMPVGTYGTVKGVTPRSLEEMGAQIILGNTFHLWMRPGLDVVTQFGGLHRFESWSKPILTDSGGFQVWSLGAMRKISEEGVKFASPVNGDKLFLTPEVSMQIQTVLNSDIVMQFDECTPYESKGVLTTEREAKQSMELSLRWARRCIAEFSRLENPNALFGIVQGGMFTNLRDASLAGLVDLDLPGYAIGGLSVGEPKAEMQRILEHTGHQLPANKPRYLMGVGTPEDLVEGVSQGIDMFDCVMPTRNARNGHLFTRFGDLRLRNARYKADEKPVDQTCGCECCKGFSRAYLHHLDRCGEMLGPMLTSVHNLHYYLNLMQEMRDALDAGRFETWRAQFAADRSRGV

SEQ ID NO: 60422 - protein, 386 aa, Rubrobacter radiotolerans
  misc_feature (1)..(386): tr|A0A023X3N6|A0A023X3N6_9ACTN Queuine tRNA-ribosyltran sferase OS=Rubrobacter radiotolerans OX=42256 GN=tgt PE =3 SV=1
MKTPAQPTVEPPVGISIEGRDGEARAGTLRTPHGSVPTPTFMPVGTKGTVKGLDRGELREIGAGVVLGNTYHLYFRPGAQIVREAGGLHGFTGWDGPMLTDSGGYQVFSLAKTREIGERGVRFASVYDGSKHEFTPERATRVQEDLGADIAMVLDECPPANASREYHAASLERTARWAERCRETHGRSDQALFGIVQGGLFPDLRKRSLRLTTELDFPGYAVGGLSVGESREEMLGTLGLTAPLLPPEKPRYFMGIGDPVGILEVIGLGVDMFDCVLPTRLARHGSALTVNGRVNLRNARFRRDFGPIDEECDCRTCAGYSRAYLAHLVREDELLGHRLVTLHNVRFVTKLCEEARRHILDRDFYGWAGWWTERYTGGSAGKVEKG

SEQ ID NO: 60423 - protein, 364 aa, Rubrobacter taiwanensis
  misc_feature (1)..(364): tr|A0A4R1BHE8|A0A4R1BHE8_9ACTN Queuine tRNA-ribosyltran sferase OS=Rubrobacter taiwanensis OX=185139 GN=tgt PE= 3 SV=1
MEVVATDGEARAGVLRTPRGEVETPTFMPVGTKATVKGLTMEEVRRTGAGIVLGNTYHLYFRPGVEVVQEAGGLHAFSGWKGPMLTDSGGFQVFSLAKTRRISEEGVAFASIYDGSPHFFTPELVVEVQEALGADIAMVLDECPPHDADYGYHAESLRRTARWAERCRTAHTREDQALFGIVQGGLHRELRLESLKRTVELDFPGYAIGGLSVGEERGAMLEALAYVASGLPADRPRYFMGIGDPVGVVEVIGLGVDMFDCVLPTRLARHGSALTAAGRLNLKNARFRRDFLPLDPECGCEVCAEYTRAYLAHLVREDELLGHRLVTFHNVYFMEELCRRARAAILEGRYARWAAEWRGRYAGS

SEQ ID NO: 60424 - protein, 365 aa, Rubrobacter xylanophilus
  misc_feature (1)..(365): tr|Q1AWD4|Q1AWD4_RUBXD Queuine tRNA-ribosyltransferase OS=Rubrobacter xylanophilus (strain DSM 9941 / NBRC 161 29) OX=266117 GN=tgt PE=3 SV=1
MEAVCGAARAGLLRTPHGAVETPTFMPVGTKGAVKGLSPRDLAEIGAGIVLGNTYHLYLRPGAEVVREAGGLHEFTGWSGPMLTDSGGYQVFSLARIRRLSEEGVRFTSVYDGSVHAFTPELAVRVQEALGADVAMVLDECPPAEADRAYHVSSLRRTARWAARCKKAHSRPDQALFGIVQGGLYPDLREESLRRTLELDFDGYAVGGLSVGEPRERMLEILSLLTPRLPEDRPRYFMGIGDPVGILEVIALGVDMFDCVLPTRLARHGTALTSEGRLNLKNARYRRDFGPLDPGCPCEACAGFSRAYLAHLLRENELLGHRLVSLHNVRFVTELCRSARREILAGTYAAWMRGWISRYTAARSG

SEQ ID NO: 60425 - protein, 332 aa, Rubrobacter xylanophilus
  misc_feature (1)..(332): tr|A0A510HFS7|A0A510HFS7_9ACTN Queuine tRNA-ribosyltran sferase OS=Rubrobacter xylanophilus OX=49319 GN=tgt PE= 3 SV=1
MKGLSPRDLAEVGVGIVLGNTYHLYLRPGPEIVREAGGLHGFTGWRGPMLTDSGGYQVFSLAGIRRLSEEGVEFTSVYDGSVHAFTPELAVRVQEALGADVAMVLDECPPAEADRAYHAASLRRTARWAARCKKAHSRPDQALFGIVQGGLYPELREESLQRTLELDFDGYAVGGLSVGEPRERMLEVLSMISPRLPQDRPRYFMGIGDPVGILEVISLGVDMFDCVLPTRLARHGTALTSEGRLNLKNARYRRDLGPLDPECPCEACTGFSRAYLSHLMRENELLGHRLVSLHNVCFVTRLCREARRRILSGTYGEWMRDWISRYTAARSG

SEQ ID NO: 60426 - protein, 376 aa, Ruegeria arenilitoris
  misc_feature (1)..(376): tr|A0A238JUC1|A0A238JUC1_9RHOB Queuine tRNA-ribosyltran sferase OS=Ruegeria arenilitoris OX=1173585 GN=tgt PE=3 SV=1
MTQRFSFELKATDGKARTGVIHTPRGEVRTPAFMPVGTAATVKAMMPESVRATGADILLGNTYHLMLRPTAERIDRLGGLHKFMNWERPILTDSGGFQVMSLAGLRKLTEKGVTFKSHIDGSKHELTPERSMEIQRLLGSDIVMCFDECPALPADRDRIAESMRLSMRWAERSREAFGDRPGHALFGIMQGGLERDLREESAEALKAIGFEGYAVGGLAVGEGQEAMFDCLNYAPDFLPTDKPRYLMGVGKPDDIVGAVARGIDMMDCVLPSRSGRTGQVFTRRGVVNIKNARHADDPRPLDEQCTCPACSNYSRAYLHHVFRANEMISGMLLTWHNLHYFQEIMQGMRDAIAAGAFEAWQAEFHAQRAQGDNEPL

SEQ ID NO: 60427 - protein, 376 aa, Ruegeria atlantica
  misc_feature (1)..(376): tr|A0A0P1E130|A0A0P1E130_9RHOB Queuine tRNA-ribosyltran sferase OS=Ruegeria atlantica OX=81569 GN=tgt PE=3 SV=1
MTDRFSFDLKATDGKARTGVINTPRGEVRTPAFMPVGTAATVKAMMPESVRATGADILLGNTYHLMLRPTAERIDRLGGLHKFMNWERPILTDSGGFQVMSLAGLRKLTEKGVTFKSHIDGSRHELTPERSMEIQRLLGSDIVMCFDECPALPADRNRIAESMRLSMRWAERSRDTFGDRPGHALFGIQQGGLEQDFREESAEALKEIGFEGYAVGGLAVGEGQQAMFDVLDFAPDMLPVDKPRYLMGVGKPDDIVGAVARGIDMMDCVLPSRSGRTGQVFTRYGVVNIKNARHSDDPRPLDEHCTCPACSNYSRAYLHHVFRSNEMISGMLLTWHNLHYFQEIMQGMRDAIAAGTFDAWQVEFHAQRAQGDIEPV

SEQ ID NO: 60428 - protein, 376 aa, Ruegeria atlantica
  misc_feature (1)..(376): tr|A0A0P1F4Q0|A0A0P1F4Q0_9RHOB Queuine tRNA-ribosyltran sferase OS=Ruegeria atlantica OX=81569 GN=tgt PE=3 SV=1
MTDRFSFDLKATDGKARTGVIHTPRGEVRTPAFMPVGTAATVKAMMPESVRATGADILLGNTYHLMLRPTAERIDRLGGLHKFMNWERPILTDSGGFQVMSLAGLRKLTEKGVTFKSHIDGSRHELTPERSMEIQRLLGSDIVMCFDECPALPADRDRIAESMRLSMRWAERSRDAFGDRPGHALFGIQQGGLEQDFREESAEALKEIGFEGYAVGGLAVGEGQEAMFDVLDFAPDMLPVDKPRYLMGVGKPDDIVGAVARGIDMMDCVLPSRSGRTGQVFTRYGVVNIKNARHSDDPRPLDEHCTCPACTNYSRAYLHHVFRSNEMISGMLLTWHNLHYFQEIMQGMRDAIAAGTFEAWQVEFHAQRAQGDIEPV

SEQ ID NO: 60429 - protein, 376 aa, Ruegeria conchae
  misc_feature (1)..(376): tr|A0A497ZM16|A0A497ZM16_9RHOB Queuine tRNA-ribosyltran sferase OS=Ruegeria conchae OX=981384 GN=tgt PE=3 SV=1
MTDRFSFDLKATDGKARTGVINTPRGEVRTPAFMPVGTAATVKAMMPESVRATGADILLGNTYHLMLRPTAERIDRLGGLHKFMNWKRPILTDSGGFQVMSLAGLRKLTEKGVTFKSHIDGSKHELTPERSMEIQRLLGSDIVMCFDECPALPSDRDRIAESMRLSMRWAERSRDAFGDRPGHALFGIMQGGLEPDLREESAEALKQIGFEGYAVGGLAVGEGQEAMFSCLDYAPEFLPKDKPRYLMGVGKPDDIVGAVARGIDMMDCVLPSRSGRTGQVFTRYSVVNIKNARHADDPRPLDEHCTCPACSNYSRAYLHHVFRSNEMISGMLLTWHNLHYFQEIMQGMREAISKGTFAQWQAQFHAQREQGDIEPL

SEQ ID NO: 60430 - protein, 376 aa, Ruegeria denitrificans
  misc_feature (1)..(376): tr|A0A0N7M9A6|A0A0N7M9A6_9RHOB Queuine tRNA-ribosyltran sferase OS=Ruegeria denitrificans OX=1715692 GN=tgt PE= 3 SV=1
MTERFSFDLKATDGKARTGVISTPRGEVRTPAFMPVGTAATVKAMMPESVRATGADILLGNTYHLMLRPTAERIDRLGGLHKFMNWDRPILTDSGGFQVMSLAGLRKLTEKGVTFKSHVDGSKHELTPERSMEIQRLLGSDIVMCFDECPALPADRDRIAESMRLSMRWAERSREAFGDRPGHALFGIMQGGLEQDLREESAEALKAIGFEGYAVGGLAVGEGQEAMFDCLDYAPDFLPTDTPRYLMGVGKPDDIVGAVARGIDMMDCVLPSRSGRTGQVFTRYGVVNIKNARHADDPRPLDEACSCPACLNYSRAYLHHVFRSNEMISGMLLTWHNLHYFQEIMQGMRDAIAAGTFAAWQAEFHAQRAQGDIEPL

SEQ ID NO: 60431 - protein, 376 aa, Ruegeria faecimaris
  misc_feature (1)..(376): tr|A0A521BAT6|A0A521BAT6_9RHOB Queuine tRNA-ribosyltran sferase OS=Ruegeria faecimaris OX=686389 GN=tgt PE=3 SV =1
MTDRFSFDLKATDGKARAGVIHTPRGEVRTPAFMPVGTAATVKAMMPESVRATGADILLGNTYHLMLRPTAERIDRLGGLHKFMNWDRPILTDSGGFQVMSLAGLRKLTEKGVTFKSHVDGSKHELTPERSMEIQRLLGSDIVMCFDECPALPADRDRIAESMRLSMRWADRSRQAFGDRPGHALFGIMQGGLEQDLREESAEALKAIGFEGYAVGGLAVGEGQEAMFGCLDYAPDFLPADRPRYLMGVGKPDDIVGAVARGIDMMDCVLPSRSGRTGQVFTRYGVVNIKNARHADDPRPLDEACSCPACSNYSRAYLHHVFRSNEMISGMLLTWHNLHYFQEIMQGMRDAIAAGTFDAWQATFHAQRAQGDIEQI

SEQ ID NO: 60432 - protein, 376 aa, Ruegeria halocynthiae
  misc_feature (1)..(376): tr|A0A1H2TS84|A0A1H2TS84_9RHOB Queuine tRNA-ribosyltran sferase OS=Ruegeria halocynthiae OX=985054 GN=tgt PE=3 SV=1
MTDRFSFDLKATDGKARTGVINTPRGEVRTPAFMPVGTAATVKAMMPESVRATGADILLGNTYHLMLRPTAERIDRLGGLHKFMNWERPILTDSGGFQVMSLAGLRKLTEKGVTFKSHIDGSRHELTPERSMEIQRLLGSDIVMCFDECPALPADRERIAESMRLSMRWADRSRDAFGDRPGHALFGIMQGGLEQDLREESAEALKQIGFEGYAVGGLAVGEGQEAMLDCLDYAPDFLPEDKPRYLMGVGKPDDIVGAVARGIDMMDCVLPSRSGRTGQVFTRYGVINIKNARHADDPRPLDEQCSCPACSSYSRAYLHHVFRSNEMISGMLLTWHNLHYFQEIMHGMRDAIAGGAFAQWQARFQAQREQGDIEPL

SEQ ID NO: 60433 - protein, 376 aa, Ruegeria intermedia
  misc_feature (1)..(376): tr|A0A1M4VKY3|A0A1M4VKY3_9RHOB Queuine tRNA-ribosyltran sferase OS=Ruegeria intermedia OX=996115 GN=tgt PE=3 SV =1
MTQRFSFELKATDGKARTGVIHTPRGEVRTPAFMPVGTAATVKAMMPESVRATGADILLGNTYHLMLRPTAERIDRLGGLHKFMNWERPILTDSGGFQVMSLAGLRKLTEKGVTFKSHIDGSKHELTPERSMEIQRLLGSDIVMCFDECPALPADRDRIAESMRLSMRWAERSREAFGDRPGHALFGIMQGGLERDLREESAEALKAIGFDGYAVGGLAVGEGQEAMFDCLDYAPDFLPTDKPRYLMGVGKPDDIVGAVARGIDMMDCVLPSRSGRTGQVFTRRGVVNIKNARHADDPRPLDEQCSCPACSNYSRAYLHHVFRANEMISGMLLTWHNLHYFQEIMQGMRDAIAAGTFEAWQAEFHAQRAQGDIEPL

SEQ ID NO: 60434 - protein, 394 aa, Ruegeria lacuscaerulensis
  misc_feature (1)..(394): tr|D0CRL1|D0CRL1_RUELI Queuine tRNA-ribosyltransferase OS=Ruegeria lacuscaerulensis (strain DSM 11314 / KCTC 2 953 / ITI-1157) OX=644107 GN=tgt PE=3 SV=1
MRAPIGQSLPGSATRGDDMTERFSFELKATDGKARTGVIHTPRGEVRTPAFMPVGTAATVKAMMPESVRATGADILLGNTYHLMLRPTAERIDRLGGLHKFMNWDRPILTDSGGFQVMSLAGLRKLTEKGVTFKSHIDGSKHELTPERSMEIQRLLGSDIVMCFDECPALPADRDRIAESMRLSMRWAERSREAFGDRPGHALFGIMQGGLERDLREESAEALKAIGFDGYAVGGLAVGEGQEAMFGCLDYAPDFLPTDKPRYLMGVGKPDDIVGAVARGIDMMDCVLPSRSGRTGQVFTRRGVVNIKNARHADDPRPLDEQCTCPACSNYSRAYLHHVFRANEMISGMLLTWHNLHYFQEIMQGMRDAIAAGTFEAWQAEFHAQRAQGDIDPI

SEQ ID NO: 60435 - protein, 376 aa, Ruegeria litorea
  misc_feature (1)..(376): tr|A0A1Y5S905|A0A1Y5S905_9RHOB Queuine tRNA-ribosyltran sferase OS=Ruegeria litorea R37 OX=1200284 GN=tgt PE=3 SV=1
MTERFSFDLKATDGKARTGVINTPRGEIRTPAFMPVGTAATVKAMMPESVRATGADILLGNTYHLMLRPTAERIDRLGGLHKFMNWDRPILTDSGGFQVMSLAGLRKLTEKGVTFKSHVDGSKHELTPERSMEIQRLLGSDIVMCFDECPALPADRDRIAESMRLSMRWAARSKEAFGDRPGYALFGIQQGGLETDFREESSEALKEIGFDGYAVGGLAVGEGQEAMFGCLDHAPDHLPQDKPRYLMGVGKPDDIVGAVARGIDMMDCVLPSRSGRTGQVFTRHGVVNIKNARHADDPRPLDEQCTCPACANYSRAYLHHVYRSNEMISGMLLTWHNLHYFQEIMAGMRDAIAAGTFEAWQAEFHAQRAQGDIEPL

SEQ ID NO: 60436 - protein, 376 aa, Ruegeria marina
  misc_feature (1)..(376): tr|A0A1G6QD84|A0A1G6QD84_9RHOB Queuine tRNA-ribosyltran sferase OS=Ruegeria marina OX=639004 GN=tgt PE=3 SV=1
MTERFSFDLQATDGKARTGLIHTPRGAVRTPAFMPVGTAATVKAMMPESVRATGADILLGNTYHLMLRPTAERIDRLGGLHKFMNWDRPILTDSGGFQVMSLAGLRKLTEKGVTFKSHIDGSKHELTPERSMEIQRLLGSDIVMCFDECPALPADRDRIAESMRLSMRWAERSRDAFGDRPGHALFGIMQGGLEQDLREESAAALKAIGFEGYAVGGLAVGEGQAAMFDCLDYAPGFLPEDKPRYLMGVGKPDDIVGAVKRGIDMMDCVLPSRSGRTGQVFTRHGVLNIKNARHMDDPRPLDEECTCPACRGYSRAYLHHVFRSQEIISSMLLTWHNLHYFQEIMAGMRDAIAAGRFVEWEADFHARRAVGDIEPL

SEQ ID NO: 60437 - protein, 376 aa, Ruegeria marisrubri
  misc_feature (1)..(376): tr|A0A0X3U5S2|A0A0X3U5S2_9RHOB Queuine tRNA-ribosyltran sferase OS=Ruegeria marisrubri OX=1685379 GN=tgt PE=3 S V=1
MTQRFSFELKATDGKARTGVINTPRGEVRTPAFMPVGTAGTVKAMMPESVRATGADILLGNTYHLMLRPTAERIHRLGGLHKFMNWHRPILTDSGGFQVMSLASLRKLTEKGVTFKSHIDGSKHELTPERSMEIQRLLGSDIVMCFDECPALPADRDRIATSMRLSMRWAARSRDAFGDRPGHALFGIQQGGLERDFREESAEALKQIGFDGYAVGGLAVGEGQEAMFGVLDFAPDMLPVDKPRYLMGVGKPDDIVGAVARGIDMMDCVLPSRSGRTGQAFTRRGVVNIKNARHADDPRPLDEHCTCPACSNYCRAYLHHVFRANEMISGMLLTWHNLHYFQEIMQGMRDAISAGTFETWQAEFHAQRAQGDIEPL

SEQ ID NO: 60438 - protein, 376 aa, Ruegeria mediterranea
  misc_feature (1)..(376): tr|A0A2R8C421|A0A2R8C421_9RHOB Queuine tRNA-ribosyltran sferase OS=Ruegeria mediterranea M17 OX=1200281 GN=tgt PE=3 SV=1
MTERFSFELKATDGKARTGVINTPRGEIRTPAFMPVGTAATVKAMMPESVRATGADILLGNTYHLMLRPTAERIDRLGGLHKFMNWDRPILTDSGGFQVMSLAGLRKLTEKGVTFKSHIDGSKHELTPERSMEIQKLLGSDIVMCFDECPALPADRDRIAESMRLSMRWAARSKEAFGDRPGHALFGIQQGGLEADFREESAEALKEIGFDGYAVGGLAVGEGQEAMFGCLDHAPDHLPKDKPRYLMGVGKPDDIVGAVARGIDMMDCVLPSRSGRTGQVFTRRGVVNIKNARHADDPRPLDEACSCPACSNYSRAYLHHVYRSNEMISGMLLTWHNLHYFQEIMQGMRDAIGAGTFEDWQAEFHAQRAQGDIEPL

SEQ ID NO: 60439 - protein, 376 aa, Ruegeria meonggei
  misc_feature (1)..(376): tr|A0A1X7A1P1|A0A1X7A1P1_9RHOB Queuine tRNA-ribosyltran sferase OS=Ruegeria meonggei OX=1446476 GN=tgt PE=3 SV= 1
MTNRFSFDLKATDGKARTGVINTPRGEVRTPAFMPVGTAATVKAMMPESVRATGADILLGNTYHLMLRPTAERIDRLGGLHKFMNWDRPILTDSGGFQVMSLAGLRKLTEKGVTFKSHIDGSKHELTPERSMEIQRLLGSDIVMCFDECPALPADRDRIAESMRLSMRWADRSRQAFGDRPGYALFGIMQGGLEQDLREESAQALTQIGFEGYAVGGLAVGEGQEAMFGCLDYAPDFLPVDKPRYLMGVGKPDDIVGAVARGIDMMDCVLPSRSGRTGQVFTRNGVVNIKNARHADDPRPLDESCSCPACTKYSRAYLHHVFRANEMISGMLLTWHNLHYFQEIMQGMRDAIATGTFQSWQSEFHAQRAQGDIEPI

SEQ ID NO: 60440 - protein, 376 aa, Ruegeria pomeroyi
  misc_feature (1)..(376): sp|Q5LQ80|TGT_RUEPO Queuine tRNA-ribosyltransferase OS= Ruegeria pomeroyi (strain ATCC 700808 / DSM 15171 / DSS -3) OX=246200 GN=tgt PE=3 SV=1
MSERFSFDLHASDGKARTGVIHTPRGGVRTPAFMPVGTAATVKAMMPESVRATGADILLGNTYHLMLRPTAERIDRLGGLHRFMNWDRPILTDSGGFQVMSLAGLRKLTEKGVTFKSHIDGSKHELTPERSMEIQRLLGSDIVMCFDECPALPADRDRIAESMRLSMRWAERSREAFGDRPGHALFGIMQGGLEQDLREESAQALRSVGFDGYAVGGLAVGEGQAAMFDCLDYAPGFLPEDKPRYLMGVGKPDDIVGAVKRGIDMMDCVLPSRSGRTGQVFTRHGVLNIKNARHMDDPRPLDEACTCPACRNYSRAYLHHVFRSQEIISSMLLTWHNLHYFQEIMQGMREAIAGGTFEAWEAAFHAGRAQGDIEPL

SEQ ID NO: 60441 - protein, 376 aa, Ruegeria profundi
  misc_feature (1)..(376): tr|A0A0X3U1U4|A0A0X3U1U4_9RHOB Queuine tRNA-ribosyltran sferase OS=Ruegeria profundi OX=1685378 GN=tgt PE=3 SV= 1
MTKRFSFDLKATDGKARTGVINTPRGEVRTPAFMPVGTAATVKAMMPESVRATGADILLGNTYHLMLRPTAERIDRLGGLHKFMNWERPILTDSGGFQVMSLAGLRKLTEKGVTFKSHIDGSKHELTPERSIEIQRLLGSDIVMCFDECPALPADRERIAESMRLSMRWAERSREAFGDRPGHALFGIMQGGLEQDLREESAEALRKIGFEGYAVGGLAVGEGQEAMFGCLDYAPDFLPVDKPRYLMGVGKPDDIVGAVARGIDMMDCVLPSRSGRTGQAFTRHGVVNIKNARHADDPRPLDENCSCPACSNYSRAYLHHVFRSNEMISGMLLTWHNLHYFQEIMQGMRDAIAAGTFEAWQAEFHAQRAQGDIEPL

SEQ ID NO: 60442 - protein, 376 aa, Ruegeria sp.
  misc_feature (1)..(376): tr|A0A366X8R5|A0A366X8R5_9RHOB Queuine tRNA-ribosyltran sferase OS=Ruegeria sp. A3M17 OX=2267229 GN=tgt PE=3 SV =1
MTDRFSFDLKATDGKARTGVINTPRGEVRTPAFMPVGTAATVKAMMPESVRATGADILLGNTYHLMLRPTAERIDRLGGLHKFMNWERPILTDSGGFQVMSLAGLRKLTEKGVTFKSHIDGSRHELTPERSMEIQRLLGSDIVMCFDECPALPADRDRIAESMRLSMRWAERSRDAFGDRPGHALFGIQQGGLEQDFREESAEALKEIGFEGYAVGGLAVGEGQEAMFDVLDFAPDMLPVDKPRYLMGVGKPDDIVGAVARGIDMMDCVLPSRSGRTGQVFTRYGVVNIKNARHSDDPRPLDEHCTCPACSNYSRAYLHHVFRSNEMISGMLLTWHNLHYFQEIMQGMRDAIAAGTFDAWQVEFHAQRAQGDIEPV

SEQ ID NO: 60443 - protein, 376 aa, Ruegeria sp.
  misc_feature (1)..(376): sp|Q1GIL3|TGT_RUEST Queuine tRNA-ribosyltransferase OS= Ruegeria sp. (strain TM1040) OX=292414 GN=tgt PE=3 SV=1
MAELFNFEMTATDGKARTGVIHTPRGEIRTPAFMPVGTAATVKAMMPESVRATGADILLGNTYHLMLRPTAERIDRLGGLHKFMNWDRPILTDSGGFQVMSLAGLRKLTEKGVTFKSHIDGSRHELTPERSMEIQRLLGSDIVMCFDECPALPADRDRIAESMRLSMRWAERSREAFGDRPGHALFGIQQGGLEQDFREESAEALTKIGFDGYAVGGLAVGEGQEAMFGCLDYAPDMLPVDKPRYLMGVGKPDDIVGAVSRGIDMMDCVLPSRSGRTGQAFTRHGVVNIKNARHQDDPRPLDENCSCPACSNYSRAYLHHVFRSNEMISGMLLTWHNLHYFQDIMAGMRESIAAGTFEAWQKTFHETRAQGDIEPL

SEQ ID NO: 60444 - protein, 376 aa, Rufibacter immobilis
  misc_feature (1)..(376): tr|A0A3M9MW74|A0A3M9MW74_9BACT Queuine tRNA-ribosyltran sferase OS=Rufibacter immobilis OX=1348778 GN=tgt PE=3 SV=1
MTFDLVAQDPASKARAGVLTTAHGTIQTPIFMPVGTAGTVKAVHQRELKEDIKAQIILGNTYHLYLRPGLDVLEKAGGLHKFNGWDRPILTDSGGYQVFSLSGTRKIVEEGVKFRSHIDGSRHLFTPENVMDTQRVIGADIIMAFDECTPYPCDYHYAKNSMERTHRWLQRCIDRFDSTEGKYGYEQTLFPIVQGSTYKDLRTQSAETIASKNRPGNAIGGLSVGEPAEMMYEMTELVCDILPSDKPRYLMGVGTPANILENIALGVDMFDCVLPTRNARNGMLFTTQGIINIRNERWKEDYSPIDAELGGYVSTFYSKAYLRHLMHATEMLGAQIASVHNLTFYLWLVGQAREQILAGTFRPWKDQMVKKLMTRL

SEQ ID NO: 60445 - protein, 376 aa, Rufibacter sp.
  misc_feature (1)..(376): tr|A0A0H4VRQ1|A0A0H4VRQ1_9BACT Queuine tRNA-ribosyltran sferase OS=Rufibacter sp. DG31D OX=1379910 GN=tgt PE=3 SV=1
MTFDLVAKDPASKARAGVLTTAHGNIQTPIFMPVGTAGTVKAVHQRELKEDVKAQIILGNTYHLYLRPGLGVLEKAGGLHKFNGWDFPILTDSGGYQVFSLSGTRKIIEEGVKFRSHIDGSTHLFTPENVMDTQRTIGADIIMAFDECTPYPCDYHYAKNSMDRTHRWLQRCIDRFDTTEGKYGYEQTLFPIVQGSTYKDLRIQSAEMIASKNRPGNAIGGLSVGEPAEMMYEMTELVCDILPADKPRYLMGVGTPANILENIALGVDMFDCVLPTRNARNGMLFTTQGIINIRNERWKEDFSPIDSELGGYASTFYSKAYLRHLMHATEMLGAQIASVHNITFYLWLVGQAREQIIAGTFATWKDQMVKKLMTRL

SEQ ID NO: 60446 - protein, 376 aa, Rufibacter sp.
  misc_feature (1)..(376): tr|A0A127AZB6|A0A127AZB6_9BACT Queuine tRNA-ribosyltran sferase OS=Rufibacter sp. DG15C OX=1379909 GN=tgt PE=3 SV=1
MTFDLVAKDPASKARAGELTTAHGTIQTPIFMPVGTAGTVKAVHQRELKEDVKAQIILGNTYHLYLRPGLNVLEKAGGLHKFNGWDRPILTDSGGYQVFSLSGTRKIIEDGVKFRSHIDGSSHLFTPENVMDTQRTIGADIIMAFDECTPYPCDYNYAKNSMDRTHRWLQRCIDRFDSTEPKYGYEQTLFPIVQGSTYKDLRIQSAEMIASKNRPGNAIGGLSVGEPAEMMYEMTELVCDILPADKPRYLMGVGTPANILENIALGVDMFDCVLPTRNARNGMLFTTQGIINIRNERWKEDFSPIDAELGGYASTFYSKAYLRHLMHATEMLGAQIASVHNLTFYLWLVGQAREQIIAGTFASWKDVMVKKLMTRL

SEQ ID NO: 60447 - protein, 376 aa, Rufibacter tibetensis
  misc_feature (1)..(376): tr|A0A0P0CV98|A0A0P0CV98_9BACT Queuine tRNA-ribosyltran sferase OS=Rufibacter tibetensis OX=512763 GN=tgt PE=3 SV=1
MTFDLVANDPASKARAGVLTTAHGTIQTPIFMPVGTAGTVKAVHQRELKEDVKAQIILGNTYHLYLRPGLNVLEKAGGLHKFNGWDKPILTDSGGYQVFSLSGTRKIIEDGVKFRSHIDGSSHLFTPENVMDTQRTIGADIIMAFDECTPYPCDYNYARNSMERTHRWLQRCIDRFDSTEGKYSYEQTLFPIVQGSTYKDLRIQSAETIASKNRPGNAIGGLSVGEPAEMMYEMTELVCDILPTDKPRYLMGVGTPANILENIALGVDMFDCVLPTRNARNGMLFTTQGIINIRNERWKEDYSPIDAELGGYVSTFHSKAYLRHLMHATEMLGAQIASVHNLTFYLWLVSQAREQILAGTFRTWKDQMVKKLMTRL

SEQ ID NO: 60448 - protein, 379 aa, Rugamonas rubra
  misc_feature (1)..(379): tr|A0A1I4PXA3|A0A1I4PXA3_9GAMM Queuine tRNA-ribosyltran sferase OS=Rugamonas rubra OX=758825 GN=tgt PE=3 SV=1
MLEFKLIKTDSSGLTKARRGTVKLNHGEVQTPIFMPVGTYGSVKAMSPLELKEIKAEIILGNTFHLWLRPGNDVIAKFGGLHDFMGWDKPILTDSGGFQVFSLGAMRKITEEGVHFNSPINGDKLFLSPEVSMQIQRVLNSDIVMQFDECTPYEIDGRPATLDEAAKSMRMSLRWAQRSHDEFHRGGNPNALFGIVQGGMFENLRDESLAQLEEIDFPGLAIGGLSVGEPKEDMMRMLAHVGPRLPANKPHYLMGVGTPEDLVAGVSNGIDMFDCVMPTRNARNGWIFTRYGDIKIKNARYKEEKAPLDESCACYACRNFSRAYLHHLNRTQEILGARLNTIHNLHYYLDIMRQMREALDEDRFHAWTLQFHADRARGV

SEQ ID NO: 60449 - protein, 370 aa, Rugosibacter aromaticivorans
  misc_feature (1)..(370): tr|A0A0C5JAK0|A0A0C5JAK0_9RHOO Queuine tRNA-ribosyltran sferase OS=Rugosibacter aromaticivorans OX=1565605 GN=t gt PE=3 SV=1
MNFELLAQDGAARRGRLTLAHGVVETPVFMPVGTYGTVKAMAPDELVGMGATVVLGNTFHLWLRPGLEVIMAHRGLHRFMAWDRPILTDSGGFQVFSLGELRKISEEGVRFASPINGDRLFLTPEISMQIQHVLNSDIVMIFDECTPYPATLEQAAQSMRLSLRWARRSRDEHDRLNNANALFGIVQGGMHEALREESLAGLTEINFDGFAIGGLSVGEPKEEFSRILVHTTPQLPHDKPRYLMGVGTPEDLVFAVGQGIDMFDCVMPTRNARNGWLFTRRGDIRIKNAQYRADTQPLDEACGCYTCRHFTRAYLHHLHRTGEILGARLNTVHNLFYYQVLMAEMRAAIAQGAFAEFVRRFHRVRAGEQV

SEQ ID NO: 60450 - protein, 370 aa, Rugosibacter sp.; identical to SEQ ID NO: 60449
  misc_feature (1)..(370): tr|A0A522Y4X3|A0A522Y4X3_9RHOO Queuine tRNA-ribosyltran sferase OS=Rugosibacter sp. OX=1914450 GN=tgt PE=3 SV=1

SEQ ID NO: 60451 - protein, 370 aa, Rugosibacter sp.
  misc_feature (1)..(370): tr|A0A522XSD8|A0A522XSD8_9RHOO Queuine tRNA-ribosyltran sferase OS=Rugosibacter sp. OX=1914450 GN=tgt PE=3 SV=1
MNFELLAQDGAARRGQLTLAHGVVETPVFMPVGTYGTVKAMAPNELVEMGATVVLGNTFHLWLRPGLEVIAAHGGLHRFMAWERPILTDSGGFQVFSLGELRKISEEGVYFSSPINGDRLFLTPEISMQIQQVLNSDIVMIFDECTPYPATVDQAAQSMRLSLRWARRSRDEHDRLGNANALFGIVQGGMHGSLRDESLAGLTEIDFDGFAIGGLSVGEPKEEFSRILAHTAPQLPRDKPRYLMGVGTPEDLVFAVSQGIDMFDCVMPTRNARNGWLFTRRGDIKIKNAQYKADTRPLDEACACYTCCNFTRAYLHHLHRSREILGARLNTIHNLFYYQVLMAEMRDAITTRTFTEFVRGFHRMRAGEQV

SEQ ID NO: 60452 - protein, 374 aa, Ruminiclostridium cellobioparum
  misc_feature (1)..(374): tr|S0FN08|S0FN08_RUMCE Queuine tRNA-ribosyltransferase OS=Ruminiclostridium cellobioparum subsp. termitidis CT 1112 OX=1195236 GN=tgt PE=3 SV=1
MAAVTYELIKTCKQTGARLGKVHTPHGSFDTPVFMPVGTLATVKGMSPEELKEIDAKIILSNTYHCYLRPGQDIVKQAGGLHGFMNWDRAILTDSGGFQVFSLSGLRKISEEGVIFRSHLDGSKHIFTPESVMGIENDLGADIIMAFDECAPYPAEYDYVKKSMERTTRWAKRCKDAHANTEKQSLFGIVQGGMYRDLRIESAKQLNELEFPGYAIGGLSVGEPAELMYEVLDYTAPLLPAHKPRYLMGVGSPDYLIEGTIRGIDMFDCVLPTRIGRNGTVMTSQGRVIIRDAKYARDFSRLDPGCDCYVCRNYSRAYIRHLLKCGEVLGLRLTTWHNLYFLINLMKQVRQAIIDDRLGSFRDEFYYKYGYSKN

SEQ ID NO: 60453 - protein, 373 aa, Ruminiclostridium cellulolyticum
  misc_feature (1)..(373): sp|B8I6M0|TGT_RUMCH Queuine tRNA-ribosyltransferase OS= Ruminiclostridium cellulolyticum (strain ATCC 35319 / D SM 5812 / JCM 6584 / H10) OX=394503 GN=tgt PE=3 SV=1
MAAVTYELIKTCKQTGARLGKVHTPHGSFDTPVFMPVGTLATVKGMSPEELKEIDARIILSNTYHCYLRPGQDIVKQAGGLHGFMNWDRPILTDSGGFQVFSLSGLRKITEEGVTFRSHLDGSKHVFTPESVMDIENDLGADIIMAFDECAPYPAEYDYVKKSMERTTRWAKRCKEAHTNTEKQSLFGIIQGGMYKELRIESANQLKELDFPGYAIGGLSVGEPAEIMYEVLDYTAPLMPADKPRYLMGVGTPDYLIEGAIRGIDMFDCVLPTRIGRNGTVLTSNGRVIIRDAKYSRDFSKLDPECDCYVCRNYSRAYIRHLIKCGELLGLRLTTWHNLYFLINLMKQVRQAIMDDKLASFRDEFYLKYGYTK

SEQ ID NO: 60454 - protein, 374 aa, Ruminiclostridium hungatei
  misc_feature (1)..(374): tr|A0A1V4SIS2|A0A1V4SIS2_RUMHU Queuine tRNA-ribosyltran sferase OS=Ruminiclostridium hungatei OX=48256 GN=tgt P E=3 SV=1
MAAVTYELIKTCKQTGARLGRVHTPHGSIDTPVFMPVGTLATVKGMSPEELKEIDARIILSNTYHCYLRPGQDIVRQAGGLHGFMNWDRPILTDSGGFQVFSLSGLRKITEEGVTFRSHLDGSKHVFTPEAVMKIENDLGADIIMAFDECAPYPAEYDYVKKSMERTTRWAKRCRDAHENTEQQSLFGIIQGGMYKDLRIESAKQLKELEFPGYAIGGLSVGEPAELMYEVLDYTAPLMPEDKPRYLMGVGSPDYLIEGAIRGIDMFDCVLPTRIGRNGTVMTSQGRVIIRDAKYAKDFSKLDPECDCYVCRNYSRAYIRHLLKCGELLGLRLTTWHNLYFLINLMKQVRQAIIDDRLGSFRDEFYYKYGYSKK

SEQ ID NO: 60455 - protein, 373 aa, Ruminiclostridium papyrosolvens
  misc_feature (1)..(373): tr|U4R670|U4R670_9FIRM Queuine tRNA-ribosyltransferase OS=Ruminiclostridium papyrosolvens C7 OX=1330534 GN=tgt PE=3 SV=1
MAAVTYELIKTCKQTGARLGKVHTPHGSFDTPVFMPVGTLATVKGMSPEELKEIDARIILSNTYHCYLRPGQEIVKQAGGLHGFMNWDRPILTDSGGFQVFSLSGLRKITEEGVTFRSHLDGSKHVFTPESVMGIENDLGADIIMAFDECAPYPAEYDYVKKSMERTTRWAKRCKEAHTNTEKQSLFGIIQGGMYKDLRIESANQLKELDFPGYAIGGLSVGEPAEIMYEVLDYTAPLMPADKPRYLMGVGTPDYLIEGAIRGIDMFDCVLPTRIGRNGTVLTSRGRVIIRDAKYSRDFSKLDPECDCYVCRNYSRAYIRHLLKCGEVLGLRLTTWHNLYFLINLMKQVRQAIMDGRLASFRDEFYLKYGYTK

SEQ ID NO: 60456 - protein, 373 aa, Ruminiclostridium papyrosolvens
  misc_feature (1)..(373): tr|F1THA7|F1THA7_9FIRM Queuine tRNA-ribosyltransferase OS=Ruminiclostridium papyrosolvens DSM 2782 OX=588581 G N=tgt PE=3 SV=1
MAAVTYELIKTCKQTGARLGKVHTPHGSFDTPVFMPVGTLATVKGMSPEELKEIDARIILSNTYHCYLRPGQDIVKQAGGLHGFMNWDRPILTDSGGFQVFSLSGLRKITEEGVTFKSHLDGSKHVFTPESVMGIENDLGADIIMAFDECAPYPAEYDYVKKSMERTTRWAKRCKEAHIDTEKQSLFGIIQGGMYKELRIESANQLKELDFPGYAIGGLSVGEPAELMYEVLDYTAPLMPADKPRYLMGVGTPDYLIEGAMRGIDMFDCVLPTRIGRNGTVLTNRGRVIIRDAKYSRDFSRLDPECDCYVCRNYSRAYIRHLVKCGELLGLRLTTWHNLYFLINLMKQVRQAIMDDRLASFRDEFYLKYGYTK

SEQ ID NO: 60457 - protein, 378 aa, Ruminiclostridium sp.
  misc_feature (1)..(378): tr|A0A4U7JM96|A0A4U7JM96_9FIRM Queuine tRNA-ribosyltran sferase OS=Ruminiclostridium sp. MA18 OX=2488810 GN=tgt PE=3 SV=1
MAAVTYELIKTCKQTGARLGRVHTPHGSFETPIFMPVGTLATVKGMSPEELKEIDAEIILSNTYHCYLRPGQDIVKEAGGLHGFMNWDRPILTDSGGFQVFSLSDLRKITEEGVTFRSHLDGSKHIFTPESVMGIENDLGADIIMAFDECAPYPAEYNYVKKSMERTTRWAKRCKDAHKNTEKQSLFGIIQGGMYKDLRIESAHQLKDLDFPGYAIGGLSVGEPAEIMYEVLDYTVPLMPADKPRYLMGVGSPDYLIEGSIRGLDMFDCVLPTRIGRNGTVMTSNGRIIIRDAKYARDFSRLDPECDCYVCRNYSRAYIRHLIKCGELLGLRLTTWHNLYFLINLMKQVRQAIMNDSLGSFRDEFYYKYGYKNKSNNE

SEQ ID NO: 60458 - protein, 381 aa, Ruminiclostridium sp.
  misc_feature (1)..(381): tr|A0A3B8J715|A0A3B8J715_9FIRM Queuine tRNA-ribosyltran sferase OS=Ruminiclostridium sp. OX=2053608 GN=tgt PE=3 SV=1
MAAVKYELIHKCKQTGARLGRVHTPHGNFDTPVFMPVGTQASVKGMSPDEVKSIGAEIILGNTYHLYLRPGCEIIKEAGGLHAFMNWDLPILTDSGGFQVFSLADLRDIKEEGVTFRSHIDGSKHFISPEKSIEIQNILGADIIMAFDECVPYPCEYEYAKKSMEMTTRWAIRCMEAHKNTETQALFGIIQGSVYEDLRRESAKQITALDLPGYAIGGLSVGEPAEIMNDILEKTVQFIPEDKPRYLMGVGSPDYLIDGSIRGIDMFDCVLPTRIGRNGTVFTSKGRIIVRDAKYAKDFSPIDPECDCYACQNFSRAYIRHLFKSGEMFGLRLATWHNLRFLTKLMENIRDAIKNDRLADFRKEFFDKFGYTAKTDSAPKC

SEQ ID NO: 60459 - protein, 374 aa, Ruminiclostridium sufflavum
  misc_feature (1)..(374): tr|A0A318XIK1|A0A318XIK1_9FIRM Queuine tRNA-ribosyltran sferase OS=Ruminiclostridium sufflavum DSM 19573 OX=112 1337 GN=tgt PE=3 SV=1
MTAVTYELIKTCKQTGARLGRVHTPHGSFETPVFMPVGTLATVKGMSPEELKEIDANIILSNTYHCYLRPGQDIVREAGGLHGFMNWDRPILTDSGGFQVFSLSGLRKITEEGVTFRSHIDGSKHVFTPESVIGIENDLGADIIMAFDECAPYPAEYNYVKKSMERTTRWAKRCKEAHQDTERQSLFGIIQGGMYRDLRMESAHQLKELDFPGYAIGGLSVGEPADIMYEVLDYTVPLMPAGKPRYLMGVGSPDYLIEGALRGIDMFDCVLPTRIGRNGTVMTSNGRIIIRDAKYARDFSRLDPECDCYVCRNYSRAYIRHLIKCGELLGLRLTTWHNLYFLINLMKQVRQAIMDDRLGGFRDEFYYKYGYKKG

SEQ ID NO: 60460 - protein, 376 aa, Ruminococcaceae bacterium
  misc_feature (1)..(376): tr|A0A1G4V2N2|A0A1G4V2N2_9FIRM Queuine tRNA-ribosyltran sferase OS=Ruminococcaceae bacterium P7 OX=1200751 GN=t gt PE=3 SV=1
MFQLIKAEGSARRGEFVTPHGTVQTPAFMNVATCGAIKGAVSALDLKNIKCQVQLCNTYHLHLRPGDDKVRQLGGLHRFTRWDGPILTDSGGFQVFSLAKLRNIKEEGVYFNSHIDGRKIFMGPEESMNIQSNLGSTIAMAFDECVENPSPYEYTRDSVARTTRWLKRCIERMAYLNSLEETINREQMLFGINQGGTYRDLRINHMKEIAELNLDGYAIGGLAVGEPTEVMYEIIEAVELFAPKDKIRYLMGVGTPVNILEAVYRGVDLFDCVMPSRNARHGQLFTWEGVRNLNNAKYELDERPIDEHCDCPTCRSFSRAYIRHLLKSGEMLGMRLAVLHNLYFYNNLMEVIRSELDKGTFSDFYQTYRNVLGVRI

SEQ ID NO: 60461 - protein, 371 aa, Ruminococcaceae bacterium
  misc_feature (1)..(371): tr|A0A1H3FD99|A0A1H3FD99_9FIRM Queuine tRNA-ribosyltran sferase OS=Ruminococcaceae bacterium YAD3003 OX=1520816 GN=tgt PE=3 SV=1
MSYPVWYEHIHTCAQTGARLGKVHTPHGTFMTPAFMPVGTQASVKGMSPEEVYGMGAGIMLSNTYHLWLRPGSDIVAKAGGLHKFMNWKGAILTDSGGFQVFSLAKPKDVKEDGVKFSSHIDGRKLFLTPEISMQVQNDLGADIIMAFDECCPYPCEHSYADRSQAKTTRWLERCIEAHKRPDEQALFGIIQGSMYPDLRKKSAESITSFDLPGFAIGGISVGEPKNLFLDMIDCTVPLMPEDKPRYLMGVGTPDYLIEGACRGVDMFDCVLPTRMGRHGTILTDYGKKIIRDKKFAEDFGPMDPECNCYACTNFSSAYVRHLIKANEMFGLRLCTYHNIHFLLVLMERIRQAIAEDRLGDFRKEFYERLG

SEQ ID NO: 60462 - protein, 382 aa, Ruminococcus albus
  misc_feature (1)..(382): tr|E9SBQ2|E9SBQ2_RUMAL Queuine tRNA-ribosyltransferase OS=Ruminococcus albus 8 OX=246199 GN=tgt PE=3 SV=1
MFRLIKQEGCARRGEFTTVHGTIQTPVFMNVGTSAAIKGGVSSLDLKNELKTQVELCNTYHLHVRPGDEVVYKMGGLHKFMNWDKPILTDSGGFQVFSLAKLRRIKEEGVYFNSHVDGRKIFMGPEESMQIQSHLASTIAMAFDECVENPAEYNYSRKSCERTTRWLKRCIAEMKRLNSLEDTINKDQLLFAINQGCTYDDLRIEHMKVIREEEYCAGFAIGGLAVGEPTDVMYHVIEQVEPFMPKDKPRYLMGVGTPSNIIEAVARGIDFFDCVMPSRNARHGTMFTWNGIVHIANRRFETDSRPVDPQCDCPCCRNFTRAYVRHLFKSEEQLGGRLAVMHNLYFYNTLTERIREALDEGRFAEFRAEYSAKLAQRLPDEL

SEQ ID NO: 60463 - protein, 382 aa, Ruminococcus albus
  misc_feature (1)..(382): tr|A0A1I1F006|A0A1I1F006_RUMAL Queuine tRNA-ribosyltran sferase OS=Ruminococcus albus OX=1264 GN=tgt PE=3 SV=1
MFKLLKQEGAARRGEFKTVHGTIQTPVFMNVGTSAAIKGGVSSIDLKNELKTQVELCNTYHLHVRPGDDVIYKMGGLHKFMNWDKPILTDSGGFQVFSLAKLRRIKEEGVYFNSHVDGRKIFMGPEESMQIQSHLASTIAMAFDECVENPAEYNYSKRSCERTTRWLHRCIAEMKRLNSLEETINRDQMLFGINQGCTYDDLRIEHMKTIRELDYCAGFAIGGLAVGEPTEIMYHVIEQVEPYMPKDKPRYLMGVGTPSNLIEAVYRGIDFFDCVMPSRNARHGTMFTWNGIIHIENKRFETDDRPVDPQCDCPCCRNFSRAYVRHLFKSEEQLGGRLAVMHNLYFYNTLTERMREALDEGRFGAFRAEYSAKLAQRLPDGE

SEQ ID NO: 60464 - protein, 380 aa, Ruminococcus bicirculans
  misc_feature (1)..(380): tr|W0U7F8|W0U7F8_9FIRM Queuine tRNA-ribosyltransferase OS=Ruminococcus bicirculans OX=1160721 GN=tgt PE=3 SV=1
MFTLLKQEGAARRGQFETVHGTIQTPVFMNVGTSAAIKGGVSSIDLKNELKTQVELCNTYHLHVRPGDDVIYKMGGLHKFMNWDKPILTDSGGFQVFSLAKLRKIKEEGVYFNSHVDGRRIFMGPEESMQIQSHLASTIAMAFDECVENPAEHSYSKASCDRTVRWLERCVAEQKRLNGLEETINKHQMLFGINQGCTYEDLRIEHMKRIREMEYCSGFAIGGLAVGEPTEVMYNIIEKVEPFMPKDKPRYLMGVGTPTNIIEAVYRGVDFFDCVMPSRNARHGTLFTWNGIMHITNKRYETDPRPIDEHCDCPACRNHSRAYIRHLFKSEEQLGGRLAVMHNLYFYNTLTEKIREALDEGRFEQFRNQYSSLLASKCED

SEQ ID NO: 60465 - protein, 376 aa, Ruminococcus bromii
  misc_feature (1)..(376): tr|A0A1G5B1Q5|A0A1G5B1Q5_9FIRM Queuine tRNA-ribosyltran sferase OS=Ruminococcus bromii OX=40518 GN=tgt PE=3 SV= 1
MYKLIKTEGNARRAEFVTPHGTFQTPAFMNVATGGAIKGGVSALDLKNLKCQVQLCNTYHLHIRPGDTKVKELGGLHKFTRWDGPILTDSGGFQVFSLANLRNIKEEGVYFNSHIDGRKIFMGPEESMQIQSNLGSTIAMAFDECVKNPSPYDYTKKSVERTTRWLKRCVAEMKRLNSLDTTINKEQMLFGINQGGIYNDLRIEHMKEIAELDLDGYAIGGLAVGETTEKTYEIIENVEPYAPKDKIRYLMGVGTPVNILEAVARGVDLFDCVMPSRNARHGQLFTWEGVRNINNAKYETDNRPIDEHCDCPTCKNFSRAYIRHLLKSGEMLGMRLAVMHNLYFYNNLMEVIRNELDNGTFTQFYEKQRNILGVRI

SEQ ID NO: 60466 - protein, 376 aa, Ruminococcus bromii
  misc_feature (1)..(376): tr|A0A2N0UP44|A0A2N0UP44_9FIRM Queuine tRNA-ribosyltran sferase OS=Ruminococcus bromii OX=40518 GN=tgt PE=3 SV= 1
MFKVIKKEGSARRGEFVTVHGTVQTPAFMNVATCGAIKGAVSALDLKNIKCQVQLCNTYHLHLRPGDEKVKQMGGLHKFTRWNGPILTDSGGFQVFSLAKLRNIKEEGVYFNSHIDGRKIFMGPEESMRIQSNLASTIAMAFDECVENPSPYEYTKNSVERTTRWLKRCVTEMKRLNSLDDTINKNQMLFGINQGGIYDDLRVNHMKEIAELNLDGYAIGGLAVGEPAETMYHIIEEVEPFAPKDKIRYLMGVGTPVNILESVARGVDLFDCVMPSRNARHGQLFTWDGVRNINNAKYETDESPIDEHCDCPVCRNFSRAYIRHLLKSGEMLGMRLAVLHNLYFYNNLMEVIRTQLDNGTYMEFYEKYRNILGVRI

SEQ ID NO: 60467 - protein, 377 aa, Ruminococcus callidus
  misc_feature (1)..(377): tr|U2KED5|U2KED5_9FIRM Queuine tRNA-ribosyltransferase OS=Ruminococcus callidus ATCC 27760 OX=411473 GN=tgt PE =3 SV=1
MFTLLKTEGHARRGIFETVHGTIQTPFFMNVGTAAAIKGGISSIDLANELKCQVELCNTYHLHLRPGDKIVRQMGGLHQFMNWHKPILTDSGGFQVFSLAKLRRIREEGVYFQSHIDGKAIFMGPEESMQIQSNLGSTIAMAFDECVENPAPLDYVKNSCARTTRWLIRCQKEMQRLNSLEGTINPHQMLFGINQGGTYDAIRVSHMQEIAQLGLDGYAIGGLAVGEPTEIMYHIIEQVEPHMPVDKPRYLMGVGTPSNIIEGVARGVDMFDCVMPSRNARHGTIFTWDGILHITNAAYETDSQPLDPKCDCPVCRNHTRAYVRHLFKAKEQLAGRLAVMHNLYFYNTLLERIRDALDAGEFAQFRKEYSERLAQRI

SEQ ID NO: 60468 - protein, 377 aa, Ruminococcus champanellensis
  misc_feature (1)..(377): tr|D4LEM6|D4LEM6_RUMC1 Queuine tRNA-ribosyltransferase OS=Ruminococcus champanellensis (strain DSM 18848 / JCM 17042 / KCTC 15320 / 18P13) OX=213810 GN=tgt PE=3 SV=1
MYKLLKQEGLARRGTVDTVHGTFQTPCFMNVGTAGAIKGGISTMDLKELKCQVELCNTYHLHLRPTDTVIRKMGGLHKFINWDRPILTDSGGFQVFSLAKLRRIKEEGVYFQSHIDGRRIFMGPEESMRIQSNLGSTIAMAFDECVENPATYAYAKQSCARTTRWLQRCKAEMARLNSLPDTINPHQLLFGINQGCTFDDLRVEHMKQIRELDLDGYAVGGLAVGEPTEEMYHVLDVVVPHMPEHKPRYLMGVGTPSNIIEGVARGIDMFDCVMPSRNARHATVFTWNGIMHLTNQCYETDDRPIDEHCDCPACRHYSRAYIRHLFKAKEMLAGRLAVMHNLYFYNTLTERIRSAIETDTFAQFRAEYSGRLAKLIR

SEQ ID NO: 60469 - protein, 376 aa, Ruminococcus flavefaciens
  misc_feature (1)..(376): tr|A0A315XYI4|A0A315XYI4_RUMFL Queuine tRNA-ribosyltran sferase OS=Ruminococcus flavefaciens OX=1265 GN=tgt PE= 3 SV=1
MFKLLKTDNKARRGTFETVHGTFQTPCFMNVGTAAAIKGGISSVDLKGLKTQVELCNTYHLHLRPGDHVVKQMGGLHKFMNWDKPILTDSGGFQVFSLAQLRKIKEEGVYFASHIDGHRIFMGPEESMQIQSNLGSTIAMAFDECIENPSPYKYVAASIERTTRWLIRCKEEMARLNSLPDTINKHQLLFGINQGSTFDDLRIKHMEDIAKLDLDGYAIGGLAVGEATEEMYRIIDVVEPYMPVEKPRYLMGVGTPSNIIEAVARGVDMFDCVMPSRNARHATVFTWSGIMHLNNKCYETDPRPVDEQCDCPTCKNFTRAYIRHLFKANEQLAGRLAVQHNLYFYNTLTEKIREAIDEDRFEQFRGKYSQLLATRI

SEQ ID NO: 60470 - protein, 376 aa, Ruminococcus flavefaciens
  misc_feature (1)..(376): tr|A0A1H6KC49|A0A1H6KC49_RUMFL Queuine tRNA-ribosyltran sferase OS=Ruminococcus flavefaciens OX=1265 GN=tgt PE= 3 SV=1
MFKLLKTDNKARRGTFETVHGTFQTPCFMNVGTAAAIKGGISSVDLKGLKTQVELCNTYHLHLRPGDHVVKQMGGLHKFMNWDKPILTDSGGFQVFSLAQLRKIKEEGVYFASHIDGHRIFMGPEESMQIQSNLASTIAMAFDECIENPSPYKYVADSIERTTRWLIRCKEEMARLNSLPDTINKHQMLFGINQGSTFDDLRIKHMEDIAKLDLDGYAIGGLAVGEATEEMYRIIDVVEPYMPVNKPRYLMGVGTPSNIIEAVARGVDMFDCVMPSRNARHATVFTWSGIMHLTNKCYETDPRPVDEQCDCPTCRNFSRAYVRHLFKANEQLAGRLAVQHNLYFYNTLTEKIREAIDEDRFKQFRGKYSQLLATRI

SEQ ID NO: 60471 - protein, 376 aa, [Ruminococcus] gnavus
  misc_feature (1)..(376): tr|R5TKJ3|R5TKJ3_9FIRM Queuine tRNA-ribosyltransferase OS=[Ruminococcus] gnavus CAG:126 OX=1263106 GN=tgt PE=3 SV=1
MYELIKKDGRAKRGRFHTVHGTIETPVFMNVGTAAAIKGAVSTDDLRGIKTQVELSNTYHLHVRPGDEVVKKMGGLHKFMNWDKPILTDSGGFQVFSLAGLRKIKEEGVHFNSHIDGRKIFMGPEESMQIQSNLASTIAMAFDECPSSVADRVYMRDSVARTTRWLKRCKAEMDRLNTLQDTINPHQMLFGINQGGIYEDIRIEHAKQIVDLDLDGYAVGGLAVGESHEEMYRILDAVVPYLPEQKPTYLMGVGTPINILEAVDRGVDFFDCVYPSRNGRHGHVYTNHGKLNLFNAKYELDDRPIEEGCQCPACRSYSRGYIRHLLKAKEMLGMRLCVLHNLYFYNTMMEEIRAAIEAGEYQVYKKKKIEGMTSGK

SEQ ID NO: 60472 - protein, 392 aa, Ruminococcus gnavus
  misc_feature (1)..(392): tr|A7AZ77|A7AZ77_RUMGV Queuine tRNA-ribosyltransferase OS=Ruminococcus gnavus (strain ATCC 29149 / VPI C7-9) O X=411470 GN=tgt PE=3 SV=1
MRERGPLFHEDKGEEIMYELIKKDGRAKRGRFHTVHGTIETPVFMNVGTAAAIKGAVSTDDLRGIKTQVELSNTYHLHVRPGDEVVKKMGGLHKFMNWDKPILTDSGGFQVFSLAGLRKIKEEGVHFNSHIDGRKIFMGPEESMQIQSNLASTIAMAFDECPSSVADRVYMRDSVARTTRWLKRCKAEMDRLNTLQDTINPHQMLFGINQGGIYEDIRIEHAKQIVDLDLDGYAVGGLAVGESHEEMYRILDAVVPYLPEQKPTYLMGVGTPINILEAVDRGVDFFDCVYPSRNGRHGHVYTNHGKLNLFNAKYELDDRPIEEGCQCPACRSYSRGYIRHLLKAKEMLGMRLCVLHNLYFYNTMMEEIRAAIEAGEYQVYKKKKIEGMTSGK

SEQ ID NO: 60473 - protein, 376 aa, Ruminococcus gnavus
  misc_feature (1)..(376): tr|A0A2N5P6T3|A0A2N5P6T3_RUMGN Queuine tRNA-ribosyltran sferase OS=Ruminococcus gnavus OX=33038 GN=tgt PE=3 SV= 1
MYELIKKDGRAKRGRFHTVHGTIETPVFMNVGTAAAIKGAVSTDDLRGIKTQVELSNTYHLHVRPGDEVVKKMGGLHKFMNWDKPILTDSGGFQVFSLAGLRKIKEEGVHFNSHIDGRKIFMGPEESMQIQSNLASTIAMAFDECPSSVADRVYMRDSVARTTRWLKRCKAEMDRLNTLPDTINPHQMLFGINQGGIYEDIRIEHAKQIVDLDLDGYAVGGLAVGESHEEMYRILDAVVPYLPEQKPTYLMGVGTPINILEAVDRGVDFFDCVYPSRNGRHGHVYTNHGKLNLFNAKYELDDRPIEEGCQCPACRSYSRGYIRHLLKAKEMLGMRLCVLHNLYFYNTMMEEIRAAIEAGEYQAYKKKKIEGMTSGK

SEQ ID NO: 60474 - protein, 375 aa, Ruminococcus lactaris
  misc_feature (1)..(375): tr|A0A414PAF4|A0A414PAF4_9FIRM Queuine tRNA-ribosyltran sferase OS=Ruminococcus lactaris OX=46228 GN=tgt PE=3 S V=1
MYELIKRDGMAKRGRLTTVHGTIETPVFMNVGTAAAIKGGVSTDDLRQIKTQVELSNTYHLHVRPGDEVVKKLGGLHKFMNWDKPILTDSGGFQVFSLASLRKIKEEGVHFNSHIDGRKIFMGPEQSMQIQSNLASTIAMAFDECPSSVADKKYMANSVARTTRWLKRCKDEMARLNALPDTINPQQMLFGINQGGIYEDIRIEHAQQISELDLDGYAVGGLAVGESHEEMYRILDEVVPHLPTNKPTYLMGVGTPANILEAVDRGVDFFDCVYPSRNGRHGHVYTNHGKMNLFNAKYELDDRPIEEGCGCPACRSYSRAYIRHLLKAKEMLGMRLCVLHNLYFYNTMMEEIRDAIDAGEYKAYKKRKLEGMEQK

SEQ ID NO: 60475 - protein, 375 aa, Ruminococcus lactaris
  misc_feature (1)..(375): tr|V8BXZ2|V8BXZ2_9FIRM Queuine tRNA-ribosyltransferase OS=Ruminococcus lactaris CC59_002D OX=1073376 GN=tgt PE =3 SV=1
MYELIKRDGMAKRGRLTTVHGTIETPVFMNVGTAAAIKGGVSTDDLRQIKTQVELSNTYHLHVRPGDEVVKKLGGLHKFMNWDKPILTDSGGFQVFSLASLRKIKEEGVHFNSHIDGRKIFMGPEQSMQIQSNLASTIAMAFDECPSSVADKKYMANSVARTTRWLKRCKDEMARLNALPDTINPQQMLFGINQGGVYEDIRIEHAQQISELDLDGYAVGGLAVGESHEEMYRILDEVVPHLPTNKPTYLMGVGTPANILEAVDRGVDFFDCVYPSRNGRHGHVYTNHGKMNLFNAKYELDDRPIEEGCGCPACRSYSRAYIRHLLKAKEMLGMRLCVLHNLYFYNTMMEEIRDAIDAGEYKAYKKRKLEGMEQK

SEQ ID NO: 60476 - protein, 380 aa, Ruminococcus obeum
  misc_feature (1)..(380): tr|R7D9A0|R7D9A0_9FIRM Queuine tRNA-ribosyltransferase OS=Ruminococcus obeum CAG:39 OX=1263107 GN=tgt PE=3 SV= 1
MAKYTLMKTEGRAKRAQFETVHGTIQTPVFMNVGTIGAIKGAVSTQDLYDIGTQVELSNTYHLHVRPGDKVVKQLGGLHKFMNWERPILTDSGGFQVFSLAKLRKIKEEGVHFQSHIDGHKIFMGPEESMQIQSNLGSTIAMAFDECPSSVADRDYVQKSVERTTRWLARCKTEMARLNSLPDTINKEQLLFGINQGAVYEDIRIGHAKEIAKMDLDGYAVGGLAVGETHEEMYRILDAVVPYLPQDKPTYLMGVGTPANILEGVERGIDFFDCVYPSRNGRHGHVYTNHGKMNMFNAKYELDTRPIEEGCGCPACRHYSRAYIRHLLKAKEMLGMRLCVLHNLYFYNHMMEEIRDALDEGRFADYKKMRLEGFAAGEQK

SEQ ID NO: 60477 - protein, 383 aa, Ruminococcus sp.; identical to SEQ ID NO: 52651
  misc_feature (1)..(383): tr|A0A417KUK8|A0A417KUK8_9FIRM Queuine tRNA-ribosyltran sferase OS=Ruminococcus sp. TM09-4 OX=2293244 GN=tgt PE =3 SV=1

SEQ ID NO: 60478 - protein, 376 aa, Ruminococcus sp.
  misc_feature (1)..(376): tr|A0A374DMX2|A0A374DMX2_9FIRM Queuine tRNA-ribosyltran sferase OS=Ruminococcus sp. AM36-18 OX=2293209 GN=tgt P E=3 SV=1
MFKVIKKEGSARRGEFVTVHGTVQTPAFMNVATCGAIKGAVSALDLKNIKCQVQLCNTYHLHLRPGDEKVKQMGGLHKFTRWNGPILTDSGGFQVFSLAKLRNIKEEGVYFNSHIDGRKIFMGPEESMRIQSNLASTIAMAFDECVENPSPYEYTKNSVERTTRWLKRCVTEMKRLNSLDDTINKNQMLFGINQGGIYDDLRINHMKEIAELNLDGYAIGGLAVGEPAETMYHIIEEVEPFAPKDKIRYLMGVGTPVNILESVARGVDLFDCVMPSRNARHGQLFTWDGVRNINNAKYETDESPIDEHCDCPVCRNFSRAYIRHLLKSGEMLGMRLAVLHNLYFYNNLMEVIRTQLDNGTYMEFYEKYRNILGVRI

SEQ ID NO: 60479 - protein, 374 aa, [Ruminococcus] torques
  misc_feature (1)..(374): tr|A5KQ94|A5KQ94_9FIRM Queuine tRNA-ribosyltransferase OS=[Ruminococcus] torques ATCC 27756 OX=411460 GN=tgt P E=3 SV=1
MYELLKKDGMAKRGRFHTVHGTIETPVFMNVGTAAAIKGAVSTDDLRQIKTQVELSNTYHLHVRPGDEIVKKMGGLHRFMNWDKPILTDSGGFQVFSLASLRKIKEEGVHFHSHIDGRKIFMGPEESMQIQSNLASTIAMAFDECPSSVADREYMVHSVARTTRWLKRCKAEMNRLNSLEDTINHNQMLFGINQGGIYEDIRVEHARQIAELDLDGYAVGGLAVGESHEDMYRILEAVVPHLPENKPTYLMGVGTPANILEAVDRGVDFFDCVYPSRNGRHGHVYTNHGKMNLFNAKYELDDRPIEEGCGCPACRSYSRAYIRHLLKAKEMLGMRLCVLHNLYFYNTMMEEIREAIEAGEYKAYKKRKLEGMMQ

SEQ ID NO: 60480 - protein, 374 aa, [Ruminococcus] torques
  misc_feature (1)..(374): tr|A0A414U133|A0A414U133_9FIRM Queuine tRNA-ribosyltran sferase OS=[Ruminococcus] torques OX=33039 GN=tgt PE=3 SV=1
MYELLKKDGMAKRGRFHTVHGTIETPVFMNVGTAAAIKGAVSTDDLRQIKTQVELSNTYHLHVRPGDEIVKKMGGLHRFMNWDKPILTDSGGFQVFSLASLRKIKEEGVHFHSHIDGRKIFMGPEESMQIQSNLASTIAMAFDECPSSVADREYMVHSVARTTRWLKRCKAEMNRLNSLEDTINHNQMLFGINQGGIYEDIRVEHARQIAELDLDGYAVGGLAVGESHEDMYRILDAVVPHLPENKPTYLMGVGTPANILEAVDRGVDFFDCVYPSRNGRHGHVYTNHGKMNLFNAKYELDDRPIEEGCGCPACRSYSRAYIRHLLKAKEMLGMRLCVLHNLYFYNTMMEEIREAIEAGEYKAYKKRKLEGMMQ

SEQ ID NO: 60481 - protein, 380 aa, Rummeliibacillus sp.
  misc_feature (1)..(380): tr|A0A3N5ZXH7|A0A3N5ZXH7_9BACL Queuine tRNA-ribosyltran sferase OS=Rummeliibacillus sp. TYF005 OX=2058214 GN=tg t PE=3 SV=1
MSQAIRYELIKTDKQTGARLGIVHTPHGSFETPAFMPVGTQATVKTMSPEEVKGMGAGIILSNTYHLWLRPGHEIIREAGGLHKFMNWDRAILTDSGGFQVFSLSDIRRIEEEGVHFRNHLNGDKLFLSPEKSMEIQNALGSDIMMAFDECPPYPATDEYMKNSVERTSRWAERCLKAHARPEDQGLFGIVQGGEFEDLRKQSAKDLVSLDFPGYAIGGLSVGEPKDIMNRMLEYTTPLLPSNKPRYLMGVGSPDSLIDGAIRGIDMFDCVLPTRIARNGTCMTSQGRLVVKNAKYARDFGPLDPNCDCYTCKNYSRAYIRHLIKADETFGIRLTSYHNLYFLQDLMRQVRQAIREDRLGDFREEFFEQYGFNKPNAKNF

SEQ ID NO: 60482 - protein, 380 aa, Rummeliibacillus stabekisii
  misc_feature (1)..(380): tr|A0A511BXN6|A0A511BXN6_9BACL Queuine tRNA-ribosyltran sferase OS=Rummeliibacillus stabekisii OX=241244 GN=tgt PE=3 SV=1
MSQAIRYELIKTDKQTGARLGIVHTPHGSFETPAFMPVGTQASVKTMAPEEVKEMGAGIILSNTYHLWLRPGHEIIREAGGLHKFMNWDRAILTDSGGFQVFSLSDIRRIEEEGVHFRNHLNGDKLFLSPEKAMEIQNALGSDIMMAFDECPPYPATFEYMKKSVERTSRWAERCLEAHARPQDQGLFGIVQGGEFEELRKQSAKDLVSLDFPGYAIGGLSVGEPKDIMNRMLEYTTPLLPTNKPRYLMGVGSPDSLIDGAIRGIDMFDCVLPTRIARNGTCMTSQGRLVIKNAKFARDFGPLDPNCDCYTCKNYSRAYIRHLIKADETFGIRLTSYHNLYFLQDLMRQVRQAIREDRLGDFREEFFEQYGFNKPNAKNF

SEQ ID NO: 60483 - protein, 380 aa, Rummeliibacillus stabekisii
  misc_feature (1)..(380): tr|A0A143HCK3|A0A143HCK3_9BACL Queuine tRNA-ribosyltran sferase OS=Rummeliibacillus stabekisii OX=241244 GN=tgt PE=3 SV=1
MSQAIRYELIKTDKQTGARLGIVHTPHGSFETPAFMPVGTQASVKTMAPEEVKEMGAGIILSNTYHLWLRPGHEIIREAGGLHKFMNWDRAILTDSGGFQVFSLSDIRRIEEEGVHFRNHLNGDKLFLSPEKAMEIQNALGSDIMMAFDECPPYPATFEYMKKSVERTSRWAERCLEAHSRPQDQGLFGIVQGGEFEELRKQSAKDLVSLDFPGYAIGGLSVGEPKDIMNRMLEYTTPLLPTNKPRYLMGVGSPDSLIDGAIRGIDMFDCVLPTRIARNGTCMTSQGRLVIKNAKFARDFGPLDPNCDCYTCKNYSRAYIRHLIKADETFGIRLTSYHNLYFLQDLMRQVRQAIREDRLGDFREEFFEQYGFNKPNAKNF

SEQ ID NO: 60484 - protein, 377 aa, Runella sp.
  misc_feature (1)..(377): tr|A0A3C0UXC7|A0A3C0UXC7_9BACT Queuine tRNA-ribosyltran sferase OS=Runella sp. OX=1960881 GN=tgt PE=3 SV=1
MKFDLVTNDPHSKARAGVVYTDHGAIQTPIFMPVGTAGTVKAVHQRELKEDIKAQIILGNTYHLYLRPGLDILEKAGGLHKFNGWDFPILTDSGGYQVYSLAGTGRKITEEGVKFKSHIDGSLHFFTPESVMDIQRRIGADIIMAFDECTPYPCDFSYARKSMEMTHRWLQRCCERFDATESMYGYSQTLFPIVQGSTYKDLRRQSAEFIASMGREGNAIGGLSVGEPAEDMYEMTELVCDILPKDKPRYLMGVGTPENILECIALGIDMFDCVLPTRNARHGILYTTQGVINIRNEKWKDDFSPIDETLGGYVSSFYSKSYLRHLIKSEEILGSQIASVHNLTFYLWLVGQAREQILAGTFAQWKNEILKKINQRL

SEQ ID NO: 60485 - protein, 377 aa, Runella sp.
  misc_feature (1)..(377): tr|A0A344TIW9|A0A344TIW9_9BACT Queuine tRNA-ribosyltran sferase OS=Runella sp. HYN0085 OX=2259595 GN=tgt PE=3 S V=1
MKFDIIHKDSGTKARAGIIQTDHGTIQTPIFMPVGTAGTVKAVHQRELRDDIKAQIILGNTYHLYLRPGLDILEKAGGLHRFNGWDKPILTDSGGYQVYSLAKTGRKISEEGVKFKSHIDGSTHFFTPEGVMDIQRRIGADIIMAFDECTPYPCDFSYARTSMDMTHRWLKRCCDRFDNTQSIYGYQQTLFPIVQGSVYKDLRRQSAEFIASMEREGNAIGGLSVGEPAEDMYEMTELVCNILPADKPRYLMGVGTPENILESIALGIDMFDCVMPTRNARHGILYTTEGVINIKNEKWKDDFSPIDERLGGYVSTSYTKGYLRHLIKSEEILGAQIASVHNLSFYLWLVGQAREQIIAGTFPLWKAEILRKLTCRL

SEQ ID NO: 60486 - protein, 376 aa, Ruthenibacterium lactatiformans
  misc_feature (1)..(376): tr|A0A0D8J3N2|A0A0D8J3N2_9FIRM Queuine tRNA-ribosyltran sferase OS=Ruthenibacterium lactatiformans OX=1550024 G N=tgt PE=3 SV=1
MYKLLKNEGSARRGEFSTVHGTVQTPAFMNVATAAAIKGGLSAFDLKANDCQVMLCNTYHLHLRPGDKNVARLGGLHKFTRWDGPILTDSGGFQVFSLSKLRKITEEGVTFNSHLDGHRIFMGPEESMQIQANLGSTIAMAFDECMENPAEYQYAKASCDRTVRWLKRCKAELSRLKGEGLAVNPHQLLFGINQGCCYDDLRVGHMQEIAALDLDGYAIGGLAVGEPKEEMYRVISVVEEHMPKDKIRYLMGVGTPGNILEGVRRGVDLFDCVMPSRNARHGHLNTWKGIINIKNAKYELDEQPLDEACSCECCRNFSRAYLRHLFKADEMLGMRLAVMHNLHFYNNLMLRIREALDNGTFDAFYRRYVNLLDTRI

SEQ ID NO: 60487 - protein, 376 aa, Ruthenibacterium lactatiformans
  misc_feature (1)..(376): tr|A0A0W7TVF6|A0A0W7TVF6_9FIRM Queuine tRNA-ribosyltran sferase OS=Ruthenibacterium lactatiformans OX=1550024 G N=tgt PE=3 SV=1
MYKLLKNEGSARRGEFSTVHGTVQTPAFMNVATAAAIKGGLSAFDLEANDCQVMLCNTYHLHLRPGDKNVARLGGLHKFTRWDGPILTDSGGFQVFSLSKLRKITEEGVTFNSHLDGHRIFMGPEESMQIQANLGSTIAMAFDECMENPAEYQYAKASCDRTVRWLKRCKAELSRLKGEGLAVNPHQLLFGINQGCCYDDLRVGHMQEIAALDLDGYAIGGLAVGEPKEEMYRVISVVEEHMPKDKIRYLMGVGTPGNILEGVRRGVDLFDCVMPSRNARHGHLNTWKGIINIKNAKYELDEQPLDEACSCECCRNFSRAYLRHLFKADEMLGMRLAVMHNLHFYNNLMLRIREALDNGTFDAFYCRYVNLLDTRI

SEQ ID NO: 60488 - protein, 379 aa, Saccharibacillus sp.
  misc_feature (1)..(379): tr|A0A4Y6UR03|A0A4Y6UR03_9BACL Queuine tRNA-ribosyltran sferase OS=Saccharibacillus sp. ATSA2 OX=2583377 GN=tgt PE=3 SV=1
MTSAIRYEPIKTCKQSGARLGRVHTPHGIIDTPTFMPVGTLATVKTMSPEELKQMDAHIILSNTYHLFLRPGHDIIREAGGLHKFMNWDRPILTDSGGFQVFSLAEMRKITEEGVNFRSHINGDKLFLSPEVAMNIQNALGSDIMMAFDECPPYPAEHAYLKRSLERTSRWAERCLEAHARPQDQGLFAIVQGGMHEDLRRQSAADLTSMDFPGYAIGGLSVGEPKHLMYEVLEYTVPLLPANKPRYLMGVGSPDALLEGAIRGVDMFDCVLPTRIARNGTTMTSQGRVVVRNAQYARDFGPLDPNCDCYTCRNYSRAYLRHLIKADETFGLRLTTYHNLHFLLELMRGVRQAIREDRLLDFRDEFFEQYGMHANDKGF

SEQ ID NO: 60489 - protein, 379 aa, Saccharibacillus sp.
  misc_feature (1)..(379): tr|A0A254NK60|A0A254NK60_9BACL Queuine tRNA-ribosyltran sferase OS=Saccharibacillus sp. O23 OX=2009338 GN=tgt P E=3 SV=1
MTSAIRYEHIKTCKQSGARLGLVHTPHGVIETPTFMPVGTLATVKTMSPEELKQMDAQIILSNTYHLFLRPGHDIIREAGGLHKFMNWDRPILTDSGGFQVFSLAEMRKITEEGVNFRSHLNGDKLFLSPEVAMEIQNALGSDIMMAFDECPPYPAEKEYIKRSLERTSRWAERCLKAHARPQDQGLFAIIQGGMHEDLRRQSAADLTSMDFPGYAIGGLSVGEPKHLMYEVLEYTVPLLPTNKPRYLMGVGSPDALLEGAIRGVDMFDCVLPTRIARNGTTMTSQGRVVVRNAQYARDFGPLDPNCDCYTCRNYSRAYLRHLIKADETFGLRLTTYHNLHFLLDLMRGVRQAIREDRLLDFRDEFFEQYGMHANDKGF

SEQ ID NO: 60490 - protein, 397 aa, Saccharibacter sp.
  misc_feature (1)..(397): tr|A0A060Q8B6|A0A060Q8B6_9PROT Queuine tRNA-ribosyltran sferase OS=Saccharibacter sp. AM169 OX=1343158 GN=tgt P E=3 SV=1
MTTESIRPNLTPSDRMHWQKDAQCGRARAGWLHTRHGSVPTPTFMPVGTVGTVKGITMDNVRATGAGIVLGNTYHLMLRPTAERVQRLGGLHRMMDWPGPILTDSGGFQVMSLGPLRKMDEDGVTFRSHIDGSSHRLTPESSTDIQYKLDATITMAFDECPALPATKDVLEASMERSMRWAARSREAFIARPGYGQFGIVQGGTEQDLRERSALALREIGFEGYAIGGLAVGEGQELMFSTLDYTTPMLPEDQPRYLMGVGTPDDLLGAVMRGCDMFDCVMPSRAGRTARAYTERGTLNLRNARFAEDTRPISPEDDSPMAGRYSRAYLHHLFRANEMLGPMLLTLHNLAYYQRLMRQIRAAIVAGTLEQTATQLRRNWARGDWSEDEWPMPRYQQG

SEQ ID NO: 60491 - protein, 376 aa, Saccharicrinis carchari
  misc_feature (1)..(376): tr|A0A521ELV4|A0A521ELV4_9BACT Queuine tRNA-ribosyltran sferase OS=Saccharicrinis carchari OX=1168039 GN=tgt PE =3 SV=1
MEFELQITDPQSRARTGKITTDHGVIETPIFMPVGTVGSVKGVHFNDLRNDIEAQIILGNTYHLYLRPGLDIIEKAGGLHKFNGWDRPILTDSGGYQVFSLSANRKIKEDGAVFRSHIDGSKHLFTPENVVDTQRIIGADIMMAFDECAPGDAPHDYAKKSMELTHRWLQRGITQFDSTRAKYGYSQTFFPIVQGAGFKDLRTQSAEYIASFGREGNAIGGLSVGEPAEVMYEMTEVVTGILPKDKPRYLMGVGTPVNILESIALGVDMFDCVMPTRNGRNGMLFTSRGIMNMKNQKWKDDFSPVDPEGTSFVDHHYTKAYLRHLFVSKELLAAQIGSLHNLAFYLWLVKEARSHIQAGDFIPWKNQMVKQLSVRL

SEQ ID NO: 60492 - protein, 376 aa, Saccharicrinis fermentans
  misc_feature (1)..(376): tr|W7Y4N0|W7Y4N0_9BACT Queuine tRNA-ribosyltransferase OS=Saccharicrinis fermentans DSM 9555 = JCM 21142 OX=86 9213 GN=tgt PE=3 SV=1
MDFELQITDPKSRARTGKITTDHGEIETPIFMPVGTVGSVKGVHFNDLRNDTHAEIILGNTYHLYLRPGLKIIEKAGGLHKFNGWDRPILTDSGGFQVFSLSGNRKLKEEGAIFRSHIDGSKHLFTPENVVDTQRIIGADIIMAFDECAPGDADHKYAKNSMQLTHRWLQRGITQFDATQALYGHSQTFFPIVQGAGFRDLRKQSAEYIASFEREGNAIGGLAVGEPPEVMYEMIEVVTDILPQNKPRYLMGVGTPVNILESIALGVDMFDCVMPTRNGRNGMLFTSRGIMNMKNEKWKDDFSLLDPEGTSFVDHQYTKAYLRHLFVSKELLAAQIGSLHNLAFYLWLVKEARKHIQAGDFSEWKDNMVKQLSVRL

SEQ ID NO: 60493 - protein, 374 aa, Saccharophagus degradans
  misc_feature (1)..(374): sp|Q21KW1|TGT_SACD2 Queuine tRNA-ribosyltransferase OS= Saccharophagus degradans (strain 2-40 / ATCC 43961 / DS M 17024) OX=203122 GN=tgt PE=3 SV=1
MKFELTTTDGDARRGQLTFSRGTVQTPAFMPVGTYGTVKGMLPRDIVDSGAEIILGNTFHLMLRPGTEVVKAHGDLHDFIQWQGPILTDSGGFQVFSLGDMRKISEEGVKFRSPIDGSEVFLDPEKAMQVQRDLGSDIVMIFDECTPYPATVHEARVSMELSLRWAKRSKDAHGDNPSALFGIVQGGMHESLRSESLKGLTEIGFDGYAIGGLSVGEPKEDMLRILNHLKTEMPADKPRYLMGVGKPEDLVEGVCRGIDMFDCVMPTRNARNGHLFTQAGVVKIRNAKHRHDTGPLDPTCDCYTCQNFSRAYLHHLDKCGEILGAQLNTIHNLRHYQTVMSELRAAIGKGELAQYVSHFYARQGKERPAIATQS

SEQ ID NO: 60494 - protein, 378 aa, Saccharospirillum sp.
  misc_feature (1)..(378): tr|A0A2T6E3C7|A0A2T6E3C7_9GAMM Queuine tRNA-ribosyltran sferase OS=Saccharospirillum sp. MSK14-1 OX=1897632 GN= tgt PE=3 SV=1
MSRTCFMDFELKTTDGAARRGTLNFPRGQVETPAFMPVGTYGTVKGMTPQQIEEIGAHIILGNTFHLMLRPGTQVIEEHGDLHDFAGWNKPILTDSGGFQVFSLGKMRKITEQGVTFRSPVDGAKVELTPERSMEVQRSLGSDIVMIFDECTPHPATHEVAKKSMELSLRWAKRSKTAHGDSPSALFGIIQGGMYEDLRDVSLKGLTDIDFDGYAIGGLSVGEPKEDMMRMLDHVTPQMPTDKPRYLMGVGTPEDLVEGVRRGVDMFDCVMPTRNGRNGHFFTTDGVVRIRNARHRHDSAPLDAQCDCYTCQNFSRAYLHHLDKCGEMLGAQLGTLHNLRYYQRLMAGLRGAIEAGKLSAFVDDFYAARGLETPPLTP

SEQ ID NO: 60495 - protein, 375 aa, Sagittula sp.
  misc_feature (1)..(375): tr|A0A2K8WIG0|A0A2K8WIG0_9RHOB Queuine tRNA-ribosyltran sferase OS=Sagittula sp. P11 OX=2009329 GN=tgt PE=3 SV= 1
MALTSFELNARDGRARTGVIRTPRGDIRTPAFMPVGTAATVKGMMPESVRETGADILLGNTYHLMLRPGAERVAKLGGLHRFMNWERPILTDSGGFQVMSLSDLRKLTEEGVTFRSHVDGSKHMLSPETSMEIQRLLGSDIVMAFDECPALPADRARLEESMRLSMRWAARSREAFGDRPGHMLFGIQQGGLERDLREESAQALVNIGFDGYAIGGLAVGEGQEAMFGCLDFAPGMLPADKPRYLMGVGKPADIVGAVARGIDMMDCVLPSRSGRTGQAWTRRGQVNLRNARHAEDPRPLEEGCSCPCCRSYSRAYLHHVVRAKEMIAGMLLTWHNLHYYQELMAGMRAAIAEGRFAAFEAEFHEGEALGDIERL

SEQ ID NO: 60496 - protein, 375 aa, Sagittula stellata
  misc_feature (1)..(375): tr|A3K1F9|A3K1F9_9RHOB Queuine tRNA-ribosyltransferase OS=Sagittula stellata E-37 OX=388399 GN=tgt PE=3 SV=1
MALTSFDLNARDGRARTGVIRTPRGEIRTPAFMPVGTAATVKGMMPESVRETGADILLGNTYHLMLRPGAERVARLGGLHRFMNWERPILTDSGGFQVMSLSDLRKLTEEGVTFRSHVDGSKHMLSPETSMEIQRLLGSDIVMAFDECPALPADRARLEESMRLSMRWAARSREAFGDRPGHMLFGIQQGGLERDLREESAQALVNIGFDGYAIGGLAVGEGQEAMFGCLDFAPGMLPEDKPRYLMGVGKPADIVGAVARGIDMMDCVLPSRSGRTGQAWTRRGQVNLRNARHADDPRPLDEGCTCPCCQNYSRAYLHHVVRAKEMIAGMLLTWHNLHYYQELMAGMRAAIAEARFAAFEEAFHAGEALGDIERL

SEQ ID NO: 60497 - protein, 376 aa, Salegentibacter agarivorans
  misc_feature (1)..(376): tr|A0A1I2PCL0|A0A1I2PCL0_9FLAO Queuine tRNA-ribosyltran sferase OS=Salegentibacter agarivorans OX=345907 GN=tgt PE=3 SV=1
MKFDLLSTDTGSKARAGTITTDHGKIETPIFMPVGTVASVKGVHQRELKEDINPDIILGNTYHLYLRPQTEILKKAGGLHKFMNWDRNILTDSGGYQVYSLSARRKIKEEGVKFKSHIDGSYHVFTPENVMEIQRTIGADIIMAFDECTPYPCDYKYAKRSMHMTHRWLDRCVNHLQKVDPLYGFDQTLFPIVQGSTYKDLRKQSAEYIASVGAEGNAIGGLSVGEPAEEMYAMTEVVTEILPEDKPRYLMGVGTPINILENIALGVDMFDCVMPTRNARNGMLFTAHGTINIKNKKWEDDFSPLDEMGTTFVDKDYSKAYVRHLFSVNELLGKQIATIHNLGFYMWLVREARKHILAGDFARWKNMMVKQMDKRL

SEQ ID NO: 60498 - protein, 393 aa, Salegentibacter echinorum
  misc_feature (1)..(393): tr|A0A1M5KM90|A0A1M5KM90_9FLAO Queuine tRNA-ribosyltran sferase OS=Salegentibacter echinorum OX=1073325 GN=tgt PE=3 SV=1
MPLGGLFKYLCAHLNSNMKFDLLGADAGSKARAGTITTDHGKIETPIFMPVGTVASVKGVHQRELKKDINPDVILGNTYHLYLRPKIEILKKAGGLHKFMNWDRNILTDSGGYQVYSLSARRKIKEEGVRFKSHIDGSMHTFTPENVMEIQRAIGADIIMAFDECTPYPCDYKYAQRSMHMTHRWLDRCVNHLQKVDPFYGYDQTLFPIVQGSTYKDLRKQSAEYIASVGAEGNAIGGLSVGEPAEEMYEMTEVVTNILPEDKPRYLMGVGTPINILENIALGVDMFDCVMPTRNARNGMLFTAHGTINLKNKKWEDDFSPIDEMGITFVDTDYSKAYVRHLFSVNELLGKQIATIHNLGFYMWLVREARKHILAGDFTSWKNMMVKQMDKRL

SEQ ID NO: 60499 - protein, 376 aa, Salegentibacter flavus
  misc_feature (1)..(376): tr|A0A1I5D2X5|A0A1I5D2X5_9FLAO Queuine tRNA-ribosyltran sferase OS=Salegentibacter flavus OX=287099 GN=tgt PE=3 SV=1
MKFDLLATDAGSKARAGTITTNHGKIETPIFMPVGTVASVKGVHQRELKEDINPDIILGNTYHLYLRPQTEILKKAGGLHKFMNWDRNILTDSGGYQVYSLSARRKIKEEGVKFKSHIDGSSHTFTPENVMEIQRAIGADIIMAFDECTPYPCDYRYAKRSMHMTHRWLDRCVTHLDKVEPMYGFNQTLFPIVQGSTYKDLREQSAEYIASVGAEGNAIGGLSVGEPAEEMYAMTEVVTKILPEDKPRYLMGVGTPINILENIALGIDMFDCVMPTRNARNGMLFTAHGTINIKNKKWGDDFSPIDDMDITWVDSEYSKAYLRHLFTVNEMLGKQIATIHNLGFYLWLVREARKHILAGDFTPWKDKMVKQMDKRL

SEQ ID NO: 60500 - protein, 376 aa, Salegentibacter holothuriorum
  misc_feature (1)..(376): tr|A0A1T5CVA7|A0A1T5CVA7_9FLAO Queuine tRNA-ribosyltran sferase OS=Salegentibacter holothuriorum OX=241145 GN=t gt PE=3 SV=1
MKFDLLSTDAGSKARAGTITTDHGKIETPIFMPVGTVASVKGVHQRELKEEINPDIILGNTYHLYLRPKTEILKKAGGLHKFMNWDRNILTDSGGYQVYSLSARRKIKEEGVKFKSHIDGSYHTFTPENVMEIQRAIGADIIMAFDECTPYPCDYKYAKRSMHMTHRWLDRCVNHLDKVDPLYGFDQTLFPIVQGSTYKDLRKQSAEYIASVGAEGNAIGGLSVGEPAEEMYAMTEVVTEILPEDKPRYLMGVGTPINILENIALGVDMFDCVMPTRNARNGMLFTAHGTINIKNKKWEDDFSPIDEMGITFVDTEYSKAYVRHLFSVNELLGKQIATIHNLGFYMWLVREARKHILAGDFASWKSMMVKQMDKRL

SEQ ID NO: 60501 - protein, 376 aa, Salegentibacter mishustinae
  misc_feature (1)..(376): tr|A0A0Q9Z9L3|A0A0Q9Z9L3_9FLAO Queuine tRNA-ribosyltran sferase OS=Salegentibacter mishustinae OX=270918 GN=tgt PE=3 SV=1
MKFDLLSTDAGSKARAGTITTDHGKIETPIFMPVGTVASVKGVHQRELKEEINPDIILGNTYHLYLRPQTEILKKAGGLHKFMNWDRNILTDSGGYQVYSLSARRKIKEEGVKFKSHIDGSYHTFTPENVMEIQRAIGADIIMAFDECTPYPCDYKYAKRSMHMTHRWLDRCVNHLEKVDPFYGFDQTLFPIVQGSTYKDLRKQSAEYIASVGAEGNAIGGLSVGEPAEEMYAMTEVVTEILPEDKPRYLMGVGTPINILENIALGVDMFDCVMPTRNARNGMLFTAHGTINIKNKKWEDDFSPIDEMGITFVDTEYSKAYVRHLFSVNELLGKQIATIHNLGFYMWLVREARKHILAGDFTTWKNMMVKQMDKRL

SEQ ID NO: 60502 - protein, 376 aa, Salegentibacter salarius
  misc_feature (1)..(376): tr|A0A2N0TZV6|A0A2N0TZV6_9FLAO Queuine tRNA-ribosyltran sferase OS=Salegentibacter salarius OX=435906 GN=tgt PE =3 SV=1
MKFDLLSTDAGSKARAGTITTDHGKIETPIFMPVGTVASVKGVHQRELKEEINPDIILGNTYHLYLRPQTEILKKAGGLHKFMNWDRNILTDSGGYQVYSLSDRRKIKEEGVKFKSHIDGSYHTFTPENVMEIQRAIGADIIMAFDECTPYPCDYKYAKRSMHMTHRWLDRCVNHLEKVDPFYGFDQTLFPIVQGSTYKDLRKQSAEYIASVGAEGNAIGGLSVGEPAEEMYAMTEVVTEILPEDKPRYLMGVGTPINILENIALGVDMFDCVMPTRNARNGMLFTAHGTINIKNKKWEDDFSPIDEMGITFVDTEYSKAYVRHLFSVNELLGKQIATIHNLGFYMWLVREARKHILAGDFTTWKNMMVKQMDKRL

SEQ ID NO: 60503 - protein, 376 aa, Salegentibacter salegens
  misc_feature (1)..(376): tr|A0A1M7KJR1|A0A1M7KJR1_9FLAO Queuine tRNA-ribosyltran sferase OS=Salegentibacter salegens OX=143223 GN=tgt PE =3 SV=1
MKFDLLSTDAGSKARAGTITTDHGKIETPIFMPVGTVASVKGVHQRELKEDINPDIILGNTYHLYLRPQTEILRKAGGLHKFMNWDRNILTDSGGYQVYSLSARRKIKEEGVKFKSHIDGSYHVFTPENVMEIQRTIGADIIMAFDECTPYPCDYKYAKCSMHMTHRWLDRCVNHLKKVDPLYGFDQTLFPIVQGSTYKDLRKQSAEYIASVGAEGNAIGGLSVGEPAEEMYAMTEVVTAILPEDKPRYLMGVGTPINILENIALGVDMFDCVMPTRNARNGMLFTAHGTINIKNKKWEDDFSPLDEMGTTFVDKDYNKAYVRHLFSVNELLGKQIATIHNLGFYMWLVREARKHILAGDFTTWKNMMVKQMDKRL

SEQ ID NO: 60504 - protein, 376 aa, Salegentibacter salinarum
  misc_feature (1)..(376): tr|A0A2N0TSY2|A0A2N0TSY2_9FLAO Queuine tRNA-ribosyltran sferase OS=Salegentibacter salinarum OX=447422 GN=tgt P E=3 SV=1
MKFDLLSTDAGSKARAGTITTDHGKIETPIFMPVGTVASVKGVHQRELKEDINPDIILGNTYHLYLRPKTEILKKAGGLHKFMNWDRNILTDSGGYQVYSLSARRKIKEEGVKFKSHIDGSYHVFTPENVMEIQRTIGADIIMAFDECTPYPCDYKYAKRSMHMTHRWLDRCVNHLKKVDPLYGFDQTLFPIVQGSTYKDLRKQSAEYIASVGAEGNAIGGLSVGEPAEEMYAMTEVVTEILPEDKPRYLMGVGTPINILENIALGVDMFDCVMPTRNARNGMLFTAHGTINIKNKKWEDDFSPLDEMGTTFADKDYSKAYVRHLFSVNELLGKQIATIHNLGFYMWLVREARKHILAGDFTSWKNMMVKQMDKRL

SEQ ID NO: 60505 - protein, 376 aa, Salegentibacter sp.
  misc_feature (1)..(376): tr|A0A4R6FSI2|A0A4R6FSI2_9FLAO Queuine tRNA-ribosyltran sferase OS=Salegentibacter sp. 24 OX=2183986 GN=tgt PE= 3 SV=1
MKFDLLRTDAGSKARAGTITTDHGKIETPIFMPVGTVASVKGVHQRELKEEINPDIILGNTYHLYLRPKTEILEKAGGLHKFMNWDRNILTDSGGYQVYSLSARRKIKEEGVKFKSHIDGSYHVFTPENVMEIQRAIGADIIMAFDECTPYPCDYKYAKRSMHMTHRWLDRCVSHLDKLDPLYGFNQTLFPIVQGSTYKDLRKQSAEYIASVGADGNAIGGLSVGEPAEEMYAMTEVVTEILPEDKPRYLMGVGTPINILENIALGIDMFDCVMPTRNARNGMLFTAHGTINIKNKKWEDDFSVIDEMGITFVDTEYSKAYVRHLFSVNELLGKQIATIHNLGFYMWLVREARKHILAGDFSTWKNMMVKQMDKRL

SEQ ID NO: 60506 - protein, 376 aa, Salegentibacter sp.; identical to SEQ ID NO: 60497
  misc_feature (1)..(376): tr|A0A1L6R7A5|A0A1L6R7A5_9FLAO Queuine tRNA-ribosyltran sferase OS=Salegentibacter sp. T436 OX=1729720 GN=tgt P E=3 SV=1

SEQ ID NO: 60507 - protein, 379 aa, Salibacterium halotolerans
  misc_feature (1)..(379): tr|A0A1I5UGU0|A0A1I5UGU0_9BACI Queuine tRNA-ribosyltran sferase OS=Salibacterium halotolerans OX=1884432 GN=tgt PE=3 SV=1
MAAITYELKKTCKQSGARLGTIHTPHGAIDTPMFMPVGTLATVKTLSPEELEDMNAQIILSNTYHLWLRPGEDIVQEAGGLHSFMNWDRPILTDSGGFQVFSLSDFRNIKEEGVHFRNHISGEKLFLSPEKAMQIQNALGPDIMMALDECPPYPAEESYMKASVERTSRWAERCLEAHRNKDSQGLFGIIQGGEYEHLRKQSANDLISLDFPGYAIGGLSVGEPKDVMNRVLEFTSPLLPIHKPRYLMGVGSADSLIDGAIRGVDMFDCVLPTRIARNGACMTSRGRLVVRNAAYARDFSPIDSDCGCHVCRNYSRAYIRHLIKSNETFGFRLTSYHNLYFLLDLMKKVREAIMEDRLLDFRDDFFEQYGFNRPDAKNF

SEQ ID NO: 60508 - protein, 379 aa, Salibacterium qingdaonense
  misc_feature (1)..(379): tr|A0A1I4JE19|A0A1I4JE19_9BACI Queuine tRNA-ribosyltran sferase OS=Salibacterium qingdaonense OX=266892 GN=tgt PE=3 SV=1
MAAVTYELKKTCKQSGARLGTIHTPHGSIETPMFMPVGTLATVKTLSPEELEDMNAQIILSNTYHLWLRPGEDIVQEAGGLHSFMNWDRPILTDSGGFQVFSLSDFRNIKEEGVHFRNHISGEKLFLSPEKAMQIQNALGPDIMMALDECPPYPAEESYMKASVERTSRWAERCLEAHQNKDSQGLFGIIQGGEYEHLRKQSADDLISLDFPGYAIGGLSVGEPKDVMNRVLDFTTPLLPDHKPRYLMGVGSADSLIDGAIRGVDMFDCVLPTRIARNGACMTNHGRLVVRNAAYARDFSPIDRDCNCHVCRNYSRAYIRHLIKSNETFGFRLTSYHNLYFLLDLMKKVREAIMEDRLLDFREEFFEQYGFNRPDAKNF

SEQ ID NO: 60509 - protein, 381 aa, Salilacibacter sp.
  misc_feature (1)..(381): tr|A0A514LLS7|A0A514LLS7_9ACTN Queuine tRNA-ribosyltran sferase OS=Salilacibacter sp. NKC3-5 OX=2502791 GN=tgt PE=3 SV=1
MTEAIRYEHLKTCRQSGARLGRIHTPHGVIDTPIFMPVGTLATVKMMSPEELKEMDAQIILSNTYHLWLRPGEDLVEEAGGLHTFMNWDRPMLTDSGGFQVFSLSDLRDIDEEGVRFRNHISGERLFLSPEKAVHIQQSLGADIIMAFDECPPYPASYAYMRDSVARTSRWAERCLKAHDGNNGQQALFGIIQGGEYEDLRRESVEDLVSLDFPGYAIGGLSVGEPKSVMNEVLEQTTQHLPTDKPRYLMGVGSADALIDGTIRGVDMFDCVLPTRIGRNGTCMTSEGRKVIRNASFARDFRPIDEACGCYACRNYSRAYIRHLIKSKEAFGFRLTSYHNLYFLIELMRKVRQAIKEDRLLDFRASFFEQYGFNRPDAKNF

SEQ ID NO: 60510 - protein, 378 aa, Salimicrobium flavidum
  misc_feature (1)..(378): tr|A0A1N7II04|A0A1N7II04_9BACI Queuine tRNA-ribosyltran sferase OS=Salimicrobium flavidum OX=570947 GN=tgt PE=3 SV=1
MAITYEHIKTCKQTGARLGKVHTPHGTFDTPAFMPVGTLATVKTMSPEELESMGAGMILSNTYHLWLRPGSDIVEEAGGLHKFMNWKGSILTDSGGFQVFSLSDLRKIKEEGVHFRNHISGEKLFLSPEKAMHIQNQLGADIMMAFDECPPYPAEHKYMKDSVERTSRWAERCLSAHQRPHDQGLFGIVQGGEYEDLRKQSARDLTSLDFPGYAIGGLSVGEPKDVMNRVLESTTPLLPTEKPRYLMGVGSPDSLVDGAIRGIDMFDCVLPTRIARNGTCMTSNGRLVVRNAKFARDFGPIDENCDCYTCRNYSKAYIRHLVKANETFGFRLTTYHNLYFLLKLMRQVREAIKEDRLGDFREEFFEQYGFNKPDAKNF

SEQ ID NO: 60511 - protein, 378 aa, Salimicrobium halophilum
  misc_feature (1)..(378): tr|A0A1G8PLQ1|A0A1G8PLQ1_9BACI Queuine tRNA-ribosyltran sferase OS=Salimicrobium halophilum OX=86666 GN=tgt PE= 3 SV=1
MAITYEHIKTCRQTGARLGKVHTPHGTFDTPAFMPVGTLATVKTMSPEELESMGAGMILSNTYHLWLRPGSDIVEEAGGLHKFMNWNGSILTDSGGFQVFSLSDLRKIKEEGVHFRNHISGEKLFLSPEKAMHIQNQLGADIMMAFDECPPYPAEHKYMKDSVERTSRWAERCLTAHKRPHDQGLFGIVQGGEYEDLRKQSARDLTSLDFPGYAIGGLSVGEPKDVMNRVLEYTTPLLPTDKPRYLMGVGSPDSLVDGALRGVDMFDCVLPTRIARNGTCMTSNGRLVVRNAKFARDFRPLDENCDCHTCRNYSRAYIRHLVKANETFGIRLTTYHNLYFLLNLMGQVREAIKEDRLGDFREEFFEQYGFNKPDAKNF

SEQ ID NO: 60512 - protein, 378 aa, Salimicrobium jeotgali
  misc_feature (1)..(378): tr|K2FMS6|K2FMS6_9BACI Queuine tRNA-ribosyltransferase OS=Salimicrobium jeotgali OX=1230341 GN=tgt PE=3 SV=1
MAVTYEHIKTCKQTGARLGKVHTPHGTFETPAFMPVGTLATVKTMSPEELESMGAGMILSNTYHLWLRPGADIVEEAGGLHKFMNWKGSILTDSGGFQVFSLSDLRKIEEEGVHFRNHISGEKLFLSPEKAMHIQNQLGADIMMAFDECPPYPAEHKYMKDSVERTSRWAERCLSAHKRPHDQGLFGIVQGGEYEDLRKQSARDLTSLDFPGYAIGGLSVGEPKDVMNRMLESTTPLLPTDKPRYLMGVGSPDSLVDGAIRGIDMFDCVLPTRIARNGTCMTSNGRLVVRNAKFARDFGPIDENCDCHTCRNYSRAYIRHLVKSNETFGIRLTTYHNLYFLLKLMRQVREAIKEDRLGDFREEFFEQYGFNRPDAKNF

SEQ ID NO: 60513 - protein, 378 aa, Salimicrobium salexigens
  misc_feature (1)..(378): tr|A0A1N7JPC0|A0A1N7JPC0_9BACI Queuine tRNA-ribosyltran sferase OS=Salimicrobium salexigens OX=908941 GN=tgt PE =3 SV=1
MAVTYEHIKTCKQTGARLGKVHTPHGTFETPAFMPVGTLATVKTMSPEELESMGAGMILSNTYHLWLRPGADIVEEAGGLHKFMNWKGSILTDSGGFQVFSLSDLRKIEEEGVHFRNHISGEKLFLSPEKAMHIQNQLGADIMMAFDECPPYPAEHKYMKDSVERTSRWAERCLSAHKRPHDQGLFGIVQGGEYEDLRKQSARDLTSLDFPGYAIGGLSVGEPKDVMNRMLESTTPLLPSDKPRYLMGVGSPDSLVDGAIRGIDMFDCVLPTRIARNGTCMTSNGRLVVRNAKFARDFGPIDENCDCHTCRNYSRAYIRHLVKSNETFGIRLTTYHNLYFLLKLMRQVREAIKEDRLGDFREEFFEQYGFNRPDAKNF

SEQ ID NO: 60514 - protein, 378 aa, Salimicrobium sp.; identical to SEQ ID NO: 60512
  misc_feature (1)..(378): tr|A0A2A3ABH8|A0A2A3ABH8_9BACI Queuine tRNA-ribosyltran sferase OS=Salimicrobium sp. WN024 OX=2029857 GN=tgt PE =3 SV=1

SEQ ID NO: 60515 - protein, 378 aa, Salinarimonadaceae bacterium
  misc_feature (1)..(378): tr|A0A0P7X7Y4|A0A0P7X7Y4_9RHIZ Queuine tRNA-ribosyltran sferase OS=Salinarimonadaceae bacterium HL-109 OX=16533 34 GN=tgt PE=3 SV=1
MADEFMFTLTGTDGAARTGEIRMPRGVIRTPAFMPVGTAGTVKAMYPDQVKVLGADVVLGNTYHLMLRPGAERVARLGGLHAFMNWPYPILTDSGGFQVMSLAGLRKIEESGVTFQSHIDGSRHVLTPERSIEIQGLLGSDIQMQLDECVKLPASEEVVAKAMHLSLRWAERCRIAFGEQPGKAMFGIVQGGDVPHLRVESARELVGLDLKGYGIGGLAVGEPQHVMLSMIESVEPHLPREKPRYLMGVGTPDDIVEAVRRGVDMFDCVMPTRAGRHGMAYTRAGRLNLKNARYAEDLSPLDPESTCPASNGYSRAYLHHLVRANEILAMMLLTWNNLAYYQDLMAGLRKAIREERLEDFIAQTKEGWEKGERERKAG

SEQ ID NO: 60516 - protein, 385 aa, Salinarimonas sp.
  misc_feature (1)..(385): tr|A0A5B2VAK6|A0A5B2VAK6_9RHIZ Queuine tRNA-ribosyltran sferase OS=Salinarimonas sp. BN140002 OX=1638099 GN=tgt PE=3 SV=1
MTDHFSFTVNATDGAARTGEIRMPRGVIRTPAFMPVGTAATVKAMYPEQVKALGADVVLGNVYHLMLRPGAERVASLGGLHAFMNWPYPILTDSGGFQVMSLSALRKIDEEGVTFQSHIDGSTHSLTPERSIEIQGLLGSDIQMQLDECVKLPNSEEAVEKAMRLSLRWAERCRVAFGEQPGRAMFGIVQGGAVERLRVESARALVDLDLKGYAIGGLAVGEPQEVMLRMIETVEPHLPREKPRYLMGVGTPDDIVESVRRGVDMFDCVMPTRAGRHGTAYTRFGRLNLKNAKWADDPTPLDPASACEATRSYSKAYLHHLVRSQEILGMMLLTWSNLAYYQELMAGLRKAIAEKRLEDFVAETKEGWARGVRDGEAEPVGKVES

SEQ ID NO: 60517 - protein, 378 aa, Salinibacillus kushneri
  misc_feature (1)..(378): tr|A0A1I0G939|A0A1I0G939_9BACI Queuine tRNA-ribosyltran sferase OS=Salinibacillus kushneri OX=237682 GN=tgt PE= 3 SV=1
MAIQYELIKEDKQTGARLGKVTTPHGSFETPVFMPVGTLATVKTMSPEELEEMGAHIILSNTYHLWLRPGEDIIKEAGGLHSFMNWDGSILTDSGGFQVFSLSDMRDITEKGVHFRNHLNGEKLFLSPEKAIEIQNALGSDIIMAFDECPPYPAEYEYMKASVERTSRWAERCLKAHKRPDEQGLFGIVQGGEYEDLRRQSAKDLVSLDLPGYAIGGLSVGEPKHVMNEVLSYTAPLLPKHKPRYLMGVGSPDSLIDGAIRGVDMFDCVLPTRIARNGTCMTSTGRLVVRNAKYARDFSPIDEHCNCYTCRNYSRAYIRHLVKTNETFGFRLTTYHNLYFLVKLMGQVRQAIKDDCLGDFREEFFEQYGFNKPNAKNF

SEQ ID NO: 60518 - protein, 376 aa, Salinibacter sp.
  misc_feature (1)..(376): tr|A0A2P6C0D6|A0A2P6C0D6_9BACT Queuine tRNA-ribosyltran sferase OS=Salinibacter sp. 10B OX=1923971 GN=tgt PE=3 SV=1
MTFTLDHTDASSAARAGRLHTSHGTVETPIFMPVGTRGSVKAVSPRTLRQDVGAEMILGNTYHLFLRPGLDVIEGGGGLHEFMRWEGPMLTDSGGYQVFSLSDHATLSEEGVEFKNPIDGDTHLFTPENVVDTQRTLGADVMMVLDECPAADVSKAYARRSNDLTLRWAERAKDRFDETDPRYGHEQALFGIVQGVVYPEVRRASARALVDLGFPGYAIGGLSVGEPHEQMYEMVSVTTAELPADKPRYLMGVGTPANLLENVARGVDMFDCVMPTRNGRNGQLFTTEGIINIKNAQWTDDHTPIDPGLDTYVSQTFTKAYVRHLQKSREYLGLQIASQQNLAFYCWLMREARAAIREDRFSSWKEEVQPRVSRRL

SEQ ID NO: 60519 - protein, 382 aa, Salinicoccus alkaliphilus
  misc_feature (1)..(382): tr|A0A1M7BSQ4|A0A1M7BSQ4_9STAP Queuine tRNA-ribosyltran sferase OS=Salinicoccus alkaliphilus DSM 16010 OX=11232 31 GN=tgt PE=3 SV=1
MMAIRYEHIKTCKQTGARLGKLHTPHGVIDTPIFMPVGTLATVKSMTPEELADIGSQIILSNTYHLWLRPGSDLIREAGGLHKFMNWDKPILTDSGGFQVFSLSDSRKIEEEGVHFRSHLDGSKLFLSPEGAMDIQHDLGSDIMMSFDECPPIPAEHKYVKDSIERTTRWAERGLEHHIKKGRDKHQALFGIVQGGEYEDLRAQSAKDLVSMDFPGYSIGGLSVGEPKPVMYRMLEQTIPLLPENKPRYLMGIGSPDSLIEGVMRGVDMFDCVLPTRIARNGTTMTSSGRVVVKNKKFERDFTPLDPNCDCYTCKNYSKAYLRHLFKADEILGLRLTTYHNLYFLLKLMEDVRSAILNDNLLDFKEAFFDSYGLNVENPKNF

SEQ ID NO: 60520 - protein, 381 aa, Salinicoccus halodurans
  misc_feature (1)..(381): tr|A0A0F7HLY3|A0A0F7HLY3_9STAP Queuine tRNA-ribosyltran sferase OS=Salinicoccus halodurans OX=407035 GN=tgt PE= 3 SV=1
MAIRYEHIKTCKQTGARLGRLHTPHGTIDTPIFMPVGTLATVKTMTPEELADIGSQIILSNTYHLWLRPGSDIVAEAGGLHKFMNWDKPILTDSGGFQVFSLSDRRKIEEEGVHFRSHLDGSKLFLSPEKAMDIQHDLGSDIMMSFDECPPHPAEHKYVKDSIERTSRWAERGLNHHIKSGKDKTQALFGIVQGGEYADLRAQSAKDLVSMDFPGYSIGGLSVGEPKPIMYRALEETIPHLPEDKPRYLMGVGSPDALIEGVIRGVDMFDCVLPTRIARNGTTMTSKGRVVVKKKIYERDFTPLDAQCDCYTCRNYTKAYLRHLFKTDEILGLRLTTYHNLYFLLKLMEDIRTAILNDSLLDFKEAFFESYGLNVENPKNF

SEQ ID NO: 60521 - protein, 381 aa, Salinicoccus kekensis
  misc_feature (1)..(381): tr|A0A285U8W1|A0A285U8W1_9STAP Queuine tRNA-ribosyltran sferase OS=Salinicoccus kekensis OX=714307 GN=tgt PE=3 SV=1
MAIRYEHIKTCKQTGARLGKLHTPHGVIDTPIFMPVGTLATVKSMTPEELADIGSQIILSNTYHLWLRPGSDLIREAGGLHKFMNWDKPILTDSGGFQVFSLSDTRKIEEEGVHFRSHLDGSKLFLSPEGAMDIQHDLGSDIMMSFDECPPIPAEHKYVKDSIERTTRWAERGLEHHLKKGRDKHQALFGIVQGGEYEDLRAQSAKDLVSMDFPGYSIGGLSVGEPKPVMYRMLEHTIPLLPENKPRYLMGIGSPDSLIEGVIRGVDMFDCVLPTRIARNGTTMTSKGRVVVKNKKFERDFTPLDPNCDCYTCKNYTKAYIRHLFKADEILGLRLTTYHNLYFLLKLMEDVRTAILNDNLLDFKEAFFESYGLNVENPKNF

SEQ ID NO: 60522 - protein, 381 aa, Salinicoccus qingdaonensis
  misc_feature (1)..(381): tr|A0A1G9AJQ1|A0A1G9AJQ1_9STAP Queuine tRNA-ribosyltran sferase OS=Salinicoccus qingdaonensis OX=576118 GN=tgt PE=3 SV=1
MAIRYEHIKTCKQTGARLGKLHTPHGVIDTPIFMPVGTLATVKSMTPEELADIGSQIILSNTYHLWLRPGNDIIREAGGLHKFMNWDRPILTDSGGFQVFSLSDSREIKEEGVHFRSHLDGSKLFLSPEGAMDIQHDLGSDIMMSFDECPPIPAEYDYVKDSLERTSRWAERGLEHHIKKGHDKHQALFGIVQGGEYEDLRTQSAKDLVSMDFPGYSIGGLSVGEPKPVMYRMLEHTIPLLPENKPRYLMGIGSPDALIEGVIRGVDMFDCVLPTRIARNGTTMTSQGRVVVKNKKFERDFTPLDPNCDCYTCKNYSKAYLRHLIKANEILGLRLTTYHNLYFLLKLMEDVRSAILNDRLLDFKEAFFDSYGLNVNNPKNF

SEQ ID NO: 60523 - protein, 381 aa, Salinicoccus roseus
  misc_feature (1)..(381): tr|A0A0C2E6I0|A0A0C2E6I0_9STAP Queuine tRNA-ribosyltran sferase OS=Salinicoccus roseus OX=45670 GN=tgt PE=3 SV= 1
MAIRYEHIKTCKQTGARIGKLHTPHGTIDTPIFMPVGTLATVKTMTPEELADIGSQIILSNTYHLWLRPGSDIIREAGGLHKFMNWDKPILTDSGGFQVFSLSDRRKIEEEGVHFRSHLDGSKLFLSPEKAMDIQHDLGSDIMMAFDECPPFPAEKKYVKDSIERTTRWAERCLTHHVKEGHDRNQALFGIVQGGEYSDLRAQSAKDLVAMDFPGYSIGGLSVGEPKPIMYRMLEETVPFLPEDKPRYLMGVGSPDALIEGVIRGIDMFDCVLPTRIARNGTTMTSKGRVVVKNKKFERDFTPLDPGCDCYTCRNYTKAYLRHLFKTDEILGLRLTTYHNLYFLLKLMEDIRTAILNDQLMDFKEAFFESYGLNVENPKNF

SEQ ID NO: 60524 - protein, 382 aa, Salinicoccus sediminis
  misc_feature (1)..(382): tr|A0A0M2SL48|A0A0M2SL48_9STAP Queuine tRNA-ribosyltran sferase OS=Salinicoccus sediminis OX=1432562 GN=tgt PE= 3 SV=1
MMAIRYEHIKTCKQTGARLGRLHTPHGTIDTPIFMPVGTLATVKTMTPEELADIGSQIILSNTYHLWLRPGSDIVAEAGGLHKFMNWDRPILTDSGGFQVFSLSDRRQIEEAGVHFRSHLDGSKLFLSPEGAMDIQHDLGSDIMMSFDECPPHPAEHKYVKDSIERTTRWAERGLDHHIKSGRDKTQALFGIVQGGEYSDLRAQSAKDLVSMDFPGYSIGGLSVGEPKPIMYRVLEETVPHLPEDKPRYLMGVGSPDALIEGVIRGVDMFDCVLPTRIARNGTTMTSKGRVVVKKKMYERDFTPLDEQCDCYTCRNYTKAYLRHLFKTDEILGLRLTTYHNLYFLLKLMEDVRSAILNDNLMDFKEAFFESYGLNVENPKNF

SEQ ID NO: 60525 - protein, 381 aa, Salinicoccus sp.
  misc_feature (1)..(381): tr|A0A558AYJ3|A0A558AYJ3_9STAP Queuine tRNA-ribosyltran sferase OS=Salinicoccus sp. CT19 OX=2493691 GN=tgt PE=3 SV=1
MAIRYEHIKTCKQTGARIGKLHTPHGTIDTPIFMPVGTLATVKTMTPEELADIGSQIILSNTYHLWLRPGSDIIREAGGLHKFMNWDRPILTDSGGFQVFSLSDRRKIEEEGVHFRSHLDGSKLFLSPEKAMDIQHDLGSDIMMAFDECPPFPAEKQYVQDSIDRTTRWAERCLNHHVKSGNDKHQALFGIVQGGEYKDLRAQSAKELVSMDFPGYSIGGLSVGEPKPIMYRVLEETIPYLPEDKPRYLMGVGSPDALIEGVIRGVDMFDCVLPTRIARNGTTMTSQGRVVVKNKKFERDFTPLDPACDCYTCRNYTKAYLRHLFKTDEILGLRLTTYHNLYFLLKLMEDIRTAILNDELLDFKEAFFESYGLNVENPKNF

SEQ ID NO: 60526 - protein, 372 aa, Salinicola socius
  misc_feature (1)..(372): tr|A0A1Q8STQ6|A0A1Q8STQ6_9GAMM Queuine tRNA-ribosyltran sferase OS=Salinicola socius OX=404433 GN=tgt PE=3 SV=1
MKFERLAQEGRARRGRLTFPRGTVETPAFMPVGTYGTVKGMTPRDVEAIGAEIILGNTFHLWLRPGTEVIEAHGDLHDFSQWHKPILTDSGGFQVFSLGAMRKITEQGVHFRSPVDGAKVFMGPEESMAVQRSLSSDVVMIFDECTPYPATESEAQKSMELSLRWAARSRAAHGDSPSALFGIVQGGMYPELRKRSLEGLLEIGFDGLAIGGLSVGEPKEEMIRVLDYLPSWMPEDKPRYLMGVGKPEDLVEGVRRGIDMFDCVMPTRNARNGHLFTADGTVKIRNATHRHDTRPLEADCDCYTCQHFSRGYLHHLDRCGEMLGSMLNTIHNLRYYQRLMAGLRGAIEAGTLADFVAQFYQRRGLPVPPGVD

SEQ ID NO: 60527 - protein, 372 aa, Salinicola sp.
  misc_feature (1)..(372): tr|A0A2D8NWL5|A0A2D8NWL5_9GAMM Queuine tRNA-ribosyltran sferase OS=Salinicola sp. OX=1978524 GN=tgt PE=3 SV=1
MKFERLGQQGRARRGRLTFPRGTVETPAFMPVGTYGTVKGMTPKDVEAIGAEIILGNTFHLWLRPGTEVIEGHGDLHDFSQWHKPILTDSGGFQVFSLGAMRKITEQGVHFRSPVDGAKVFMGPEESMAVQRSLGSDIVMIFDECTPYPATEAEARKSMELSLRWAKRSREAHGDSPSALFGIVQGGMYPDLRKRSLEGLLEIGFDGLAIGGLSVGEPKEEMIGVLDYLPTWMPEDKPRYLMGVGKPEDLVEGVRRGIDMFDCVMPTRNARNGHLFTADGTVKIRNASHRHDTDPLEADCDCYTCQHFSRGYLHHLDRCGEMLGSMLNTIHNLRYYQRLMAGLRGAIEAGTLADFVAQFYRRRGLPVPPGVD

SEQ ID NO: 60528 - protein, 372 aa, Salinicola sp.
  misc_feature (1)..(372): tr|A0A1Q8SZE2|A0A1Q8SZE2_9GAMM Queuine tRNA-ribosyltran sferase OS=Salinicola sp. MH3R3-1 OX=1928762 GN=tgt PE= 3 SV=1
MKFERLGQQGRARRGRLTFPRGTVETPAFMPVGTYGTVKGMTPKDVEAIGAEIILGNTFHLWLRPGTEVIEAHGDLHDFSQWHKPILTDSGGFQVFSLGAMRKITEQGVHFRSPVDGAKVFMGPEESMAVQRSLGSDVVMIFDECTPYPASEAEAQKSMELSLRWAARSRAAHGDSPSALFGIVQGGMYPELRKRSLEGLLDIGFDGLAIGGLSVGEPKEEMIRVLDYLPSWMPEDKPRYLMGVGKPEDLVEGVRRGIDMFDCVMPTRNARNGHLFTADGTVKIRNAVHRHDTNPLEADCACYTCQHFSRGYLHHLDRCGEMLGSMLNTVHNLRYYQRLMAGLRGAIEAGTLADFVAQFYRRRGLSVPPEAD

SEQ ID NO: 60529 - protein, 376 aa, Salinihabitans flavidus
  misc_feature (1)..(376): tr|A0A1H8UB98|A0A1H8UB98_9RHOB Queuine tRNA-ribosyltran sferase OS=Salinihabitans flavidus OX=569882 GN=tgt PE= 3 SV=1
MVQRFRFDLKATDGRARTGVIATPRGEIRTPAFMPVGTAGTVKAMLPEQVRATGADIVLGNTYHLMLRPTAERIARLGGLHRFMNWDRPILTDSGGFQVMSLAELRKLSEKGVQFRSHIDGSRHELTPERSMEIQRLLGSDIVMCFDECPALPADEARVAESMRLSMRWAARSKEAFGDRPGHALFGIQQGGVTQELRAESAEALTAIGFDGYAIGGLAVGEGQEAMFGVLEYAPDMLPEGRPRYLMGVGKPDDIVGAVARGVDMMDCVLPTRSGRTGQAWTRRGQVNIKNARHADDPRPLDENCTCPACRHYSRAYLHHVFRAGEMISGMLLTWHNLHYFQSLMAGMRDAIAEGRFDGWQAQFHSDRAQGDIEPL

SEQ ID NO: 60530 - protein, 386 aa, Salinimicrobium catena
  misc_feature (1)..(386): tr|A0A1H5PFU4|A0A1H5PFU4_9FLAO Queuine tRNA-ribosyltran sferase OS=Salinimicrobium catena OX=390640 GN=tgt PE=3 SV=1
MVIFAALKSSMKFELAVNDPGSSARAGIITTDHGTIETPIFMPVGTVASVKGISQKELKEEVNPDIILGNTYHLYLRPQTEILKKAGGLHKFMNWDRNILTDSGGYQVYSLAERRKIKEEGVRFKSHIDGSYHNFTPENVMEIQRLIGADIIMAFDECTPYPCDYNYAKNSMHRTHRWLDRCITHLDKTPPEYGYSQALFPIVQGSTYKDLRKQSAEYIANAGAEGNAIGGLSVGEPAEEMYAMTEVVTNILPKEKPRYLMGVGTPINILENIALGVDMFDCVMPTRNARNGMLFTSHGTINIKNKKWQDDFSPLDENGTTYVDTFYTKAYLRHLFTVNEMLGKQIATMHNLGFYLWLVREARKHILAGDFASWKNMMVKQMDKRL

SEQ ID NO: 60531 - protein, 376 aa, Salinimicrobium sediminis
  misc_feature (1)..(376): tr|A0A285WZI9|A0A285WZI9_9FLAO Queuine tRNA-ribosyltran sferase OS=Salinimicrobium sediminis OX=1343891 GN=tgt PE=3 SV=1
MKFELAVTDPGSSARAGVITTDHGIIETPIFMPVGTIATVKGISQKDLKEQVDPDIILGNTYHLYLRPQTEILKKAGGLHKFMNWDRNILTDSGGYQVYSLSERRKIKEEGVRFKSHIDGSYHNFTPENVMEIQRAIGADIIMAFDECTPYPCDYRYAKNSMHRTHRWLDRCITHFEKTPPLYGYSQALFPIVQGSTYKDLRKESAEYIASAGAEGNAIGGLSVGEPAEEMYAMTEIVTNILPKEKPRYLMGVGTPINILENIALGVDMFDCVMPTRNARNGMLFTSHGTINIKNKKWEDDFSPIDEAANTYVDTYYTKAYLKHLFSVNELLGKQIATMHNLGFYLWLVREARKHILAGDFSSWKNVMVKQMNNRL

SEQ ID NO: 60532 - protein, 370 aa, Salinimonas sediminis
  misc_feature (1)..(370): tr|A0A346NP40|A0A346NP40_9ALTE Queuine tRNA-ribosyltran sferase OS=Salinimonas sediminis OX=2303538 GN=tgt PE=3 SV=1
MQFELLKTEGKARRGRLKFDRGEVETPAFMPVGTYGTVKGMTPEELKDSGAHICLGNTFHLMLRPGTSIIRQHGDLHDFMHWDKPILTDSGGFQVFSLGDLRKITEEGVTFRSPINGEKILLTPEKSMEVQRDLGSDIVMIFDECTPFPATEQEARLSMEMSLRWAERSKTAHGDNPAALFGIIQGGMYEELRDVSLAGLEDIGFDGYAIGGLSVGEPKEDMIRIIEHTAHQIPDNKPRYLMGVGKPEDIVEAVRRGVDMFDCVMPTRNARNGHLFVTEGVVKIRNAKHRTDTSALDENCDCYTCQHYSRSYLHHLDKCNEILGARLNTIHNLRYYQRVMQGLRDALDAGTLDDFVSEFYAQKEMPVPAL

SEQ ID NO: 60533 - protein, 370 aa, Salinimonas sp.
  misc_feature (1)..(370): tr|A0A5B7YCH8|A0A5B7YCH8_9ALTE Queuine tRNA-ribosyltran sferase OS=Salinimonas sp. KX18D6 OX=2572577 GN=tgt PE= 3 SV=1
MQFELLKTEGKARRGRLVFDRGVVETPAFMPVGTYGTVKGMTPEELEDSGAHICLGNTFHLMLRPGTSIIKQHGDLHDFMHWDKPILTDSGGFQVFSLGDLRKITEEGVTFRSPINGEKILLTPEKSMEVQRDLGSDIVMIFDECTPFPATEQEARLSMEMSLRWAERSKVAHGDSPAALFGIIQGGMYENLRDVSLAGLEEIGFDGYAIGGLSVGEPKEDMIRIIDHTAHQIPDDKPRYLMGVGKPEDIVEAVRRGVDMFDCVMPTRNARNGHLFVTEGVVKIRNAKHRNDTSALDENCDCYTCKNYSRSYLHHLDKCNEILGARLNTIHNLRYYQRVMQGLRDALDAGDLDSFVKEFYAQKDMPVPAL

SEQ ID NO: 60534 - protein, 380 aa, Saliniradius amylolyticus
  misc_feature (1)..(380): tr|A0A2S2E504|A0A2S2E504_9ALTE Queuine tRNA-ribosyltran sferase OS=Saliniradius amylolyticus OX=2183582 GN=tgt PE=3 SV=1
MKYELLKTDGAARRGRLVFERGVVETPAFMPVGTYGTVKGMTPEELAESGAEICLGNTFHLMLRPGTEIMKQHGDLHDFMHWDKPILTDSGGFQVFSLGDLRKITEEGVTFRSPINGEKIMLTPEKSMQVQRDLGADIVMIFDECTPYPATRQQARESMELSLRWAKRSKDAHEGNKAALFGIVQGGMYEDLRDKSLEGLCEIGFDGYAIGGLSVGEPKEDMIRVLDNTAHQIPVDKPRYLMGVGKPEDIVEAVRRGIDMFDCVMPTRNARNGHLFVTEGVIKIRNARHRTDTGPLDENCDCYTCKNYSRSYLHHLDKCNEILGARLNTIHNLRYYQRVMEGLRGAIADGKLDDFVQTFYAQKGMEVPALTAAPSSTNNE

SEQ ID NO: 60535 - protein, 377 aa, Salinisphaera halophila
  misc_feature (1)..(377): tr|A0A423Q3J5|A0A423Q3J5_9GAMM Queuine tRNA-ribosyltran sferase OS=Salinisphaera halophila YIM 95161 OX=1051139 GN=tgt PE=3 SV=1
MHLEPLCQSGDARRARLHLPHGVVDTPAFMPVGTYGTVKGMTPSEVAELGAQIVLGNTYHLMLRPGTEVIGEHGGLHDFMGWQGPILTDSGGFQVWSLAGMRKLTEDGVAFQSPLDGARWFLSPEDAVSVQHALNSDIVMCLDECTDYPVSQADAAASMQRSMRWAARCREAHGDSGNLLFGINQGSVYADLRAESMAALVDIGFDGYAIGGVSVGEGWDDKADVLAGVLPLAPRDRPRYLMGVGTPADLVASVYFGVDMFDCVMPTRNARNGYLFTSRGVVKIKNAVHRHDTGPLDPACGCPTCRGYSRAYLHHLYRCGEILAARLHTWHNLYYYQSLMARIRTAIEADDYPRFMADFFTGPEGAGTAQAAGFGHS

SEQ ID NO: 60536 - protein, 377 aa, Salinisphaera hydrothermalis
  misc_feature (1)..(377): tr|A0A084IGJ8|A0A084IGJ8_SALHC Queuine tRNA-ribosyltran sferase OS=Salinisphaera hydrothermalis (strain C41B8) OX=1304275 GN=tgt PE=3 SV=1
MIYEALGRDGNARRGRLHLPHGTVETPAFMPVGTYGTVKGMTPEELTGLGAEIVLGNTYHLMLRPGTEIVGAHGGLHGFMHWDRPILTDSGGFQVWSLAEMRKLTEDGVAFRSPLDGSRQYLSPERSIEVQHALNSDIVMCLDECTDYPVSKQDAAQSMQLSMRWAARCRAAHGDSNNKLFGINQGSVFDDLRAESMAALVDIGFDGYAIGGVSVGEGWEDKASVLAGVLPRTPADAPRYLMGVGTPADLVASVAYGIDMFDCVMPTRNARNGYLFTHDGVVKIKNAVHKHDTGPLDASCDCYTCRHYSRAYLHHLYRCGEILAARLNTWHNLAYYQRLMQRIRGAIEAGEYAAFMRDFFTGAEGRGTPQAAHGGYA

SEQ ID NO: 60537 - protein, 377 aa, Salinisphaera japonica
  misc_feature (1)..(377): tr|A0A423PEV7|A0A423PEV7_9GAMM Queuine tRNA-ribosyltran sferase OS=Salinisphaera japonica YTM-1 OX=1209778 GN=t gt PE=3 SV=1
MIYESIRASGNARRGRVHLPHGTVETPAFMPVGTYGTVKGMTPEEVAGLGAEIVLGNTYHLMLRPGTDIIDAHGGLHDFMQWHGPILTDSGGFQVWSLAEMRKLTEEGVAFASPLDGAKWFLTPERSIAVQHSLNSDIVMCLDECTDFPVAKDQAAASMQLSMRWAARCRAAHGDSGNKLFGINQGSIYPDLRAESMAALVDIGFDGYAIGGVSVGEGWDDKAAVLDNILPLTPNDAPRYLMGVGTPADLVAAVGYGIDMFDCVMPTRNARNGYLFTHAGIVKIKNAVHKFDTGPLDTACDCYTCTHYSRAYLHHLHRCGEILGARLNTWHNLAYYQRLMARIRAAIEAGDYAGFQRDFFTGAEGAGTPQAAHGGWA

SEQ ID NO: 60538 - protein, 377 aa, Salinisphaera orenii; identical to SEQ ID NO: 60535
  misc_feature (1)..(377): tr|A0A423PGW3|A0A423PGW3_9GAMM Queuine tRNA-ribosyltran sferase OS=Salinisphaera orenii MK-B5 OX=856730 GN=tgt PE=3 SV=1

SEQ ID NO: 60539 - protein, 378 aa, Salinisphaera shabanensis
  misc_feature (1)..(378): tr|U2ESP1|U2ESP1_9GAMM Queuine tRNA-ribosyltransferase OS=Salinisphaera shabanensis E1L3A OX=1033802 GN=tgt PE =3 SV=1
MHLEHISNSGDARRARLTLPHGVVDTPTFMPVGTYGTVKGMTPEELESLGAQIVLGNTYHLMLRPGTEIIGQHGGLHDFMHWHKPILTDSGGFQVWSLAEMRKLTEDGVAFRSPLDGSRQYLSPERSIEVQHALNSDIVMCLDECTDYPVPKQDAAASMQLSMRWAERCRTAHGDSQNLLFGINQGSVFADLRAESMAALVDIGFDGYAIGGVSVGEAWADKAAVLEGVLPVTPADYPRYLMGVGTPSDLVAAVSFGIDMFDCVMPTRNARNGYLFTSEGVVKIKNAVHKHDTGPLDANCGCPTCRNYSRAYLHHLYRCGEILAARLNTWHNLFYYQRLMQRIREAIETDRYSEFMREFFSGPEGAGTAQAAYFGYGV

SEQ ID NO: 60540 - protein, 377 aa, Salinisphaera sp.
  misc_feature (1)..(377): tr|A0A2E9AHE5|A0A2E9AHE5_9GAMM Queuine tRNA-ribosyltran sferase OS=Salinisphaera sp. OX=1914330 GN=tgt PE=3 SV= 1
MLNLLNQSGAARRARLTLPHGVVDTPTFMPVGTYGTVKGMTPEELESLGAQIVLGNTYHLMLRPGTEIIQQHDGLHGFMHWDKPILTDSGGFQVWSLAEMRKLTEDGVAFRSPLDGSRQYLSPERSIEVQHALNSDIVMCLDECTDYPVPKEDAAASMQLSMRWAARCRAAHGDSGNLLFGINQGSVFADLRAESMAALVDIGFDGYAIGGVSVGEAWDDKAAVLEGVLPVTPADYPRYLMGVGTPSDLVAAVSFGIDMFDCVMPTRNARNGYLFTTEGVVKIKNAVHKHDTGPLDPNCGCPTCQNYSRAYLHHLYRCGEILAARLNTWHNLYYYQQLMQRIRSAIEADRYAEFMREFFTAPEGRGSAQAAYFGYGG

SEQ ID NO: 60541 - protein, 379 aa, Salinisphaera sp.
  misc_feature (1)..(379): tr|A0A2Z3JBU3|A0A2Z3JBU3_9GAMM Queuine tRNA-ribosyltran sferase OS=Salinisphaera sp. LB1 OX=2183911 GN=tgt PE=3 SV=1
MIYEALGRDGDARRGRLHLPHGTVETPAFMPVGTYGTVKGMTPEELTALGAEIVLGNTYHLMLRPGTGIVGAHGGLHRFMHWDRPILTDSGGFQVWSLAEMRKLGEDGVAFRSPLDGSRQYLSPERSIEVQHALNSDIVMCLDECTDYPVPKADAAQSMQLSMRWAARCREAHGESGNKLFGINQGSVFADLRAESMAALVDIGFDGYAIGGVSVGEGWADKAAVLAGVLPETPADAPRYLMGVGTPADLVASVAYGIDMFDCVMPTRNARNGYLFTHEGVLKIKNAVHKHDTAPLDAACDCYTCRHYSRAYLHHLFRCGEILASRLNTWHNLAYYQRLMQRVRAAIEAGDYAAFMRDFFSGAEGRGTPQAAHGGYGGG

SEQ ID NO: 60542 - protein, 368 aa, Salinisphaeraceae bacterium
  misc_feature (1)..(368): tr|A0A2D4S9S7|A0A2D4S9S7_9GAMM Queuine tRNA-ribosyltran sferase OS=Salinisphaeraceae bacterium OX=2026789 GN=tg t PE=3 SV=1
MKFQLLRQSGDARLGRLELMHGAVETPVFMPVGTYGTVKAMTPEELWDIGARIILGNTFHLMLRPGAQRIEQLGGLQRFMNWRGPILTDSGGFQVWSLAEMRQLTETGVRFRSPVDGAACELTPESAVEIQRELGSDIVMALDECTDYPVSHAQAAESMALSMRWAARCKTAHAGNPNALFGINQGGVYPDLRADSMRQLADIGFDGYAVGGVSVGEPKADRARIFEAALPHAPTLAPRYLMGVGTPADIVNAVGYGVDMFDCVMPTRNARNGYLFTSQGVVKIKNAIHRDADEPLDPACACYTCRSYSRAYLHHLYRCGEILAARLHTWHNLYFYLDLMRRIREAIAEDRFDRFQRDFQQSALGESF

SEQ ID NO: 60543 - protein, 372 aa, Salinispira pacifica
  misc_feature (1)..(372): tr|V5WHT4|V5WHT4_9SPIO Queuine tRNA-ribosyltransferase OS=Salinispira pacifica OX=1307761 GN=tgt PE=3 SV=1
MIYRKLHKDQHCEARTGQIHLPHGNVDTPVFMPVGTNASVKAVRLEDLFSMGVQLILGNTYHLYLRPGMDVIQKFGGLHGFNNWNGNILTDSGGYQVFSLAPFRKVTNEGVEFRSHIDGSKHFLTPEKVVGIQEILNSDIQMVLDVCTEPGISHKSAREALEITTSWALRAKNSWETTTETYQGKLFGIVQGNFYEDLRARSAEELSALDLPGYAIGGLSVGEPFDQFQHYLAFTAPLLPGGKPRYLMGVGTPEYILEAIEHGIDMFDCVFPTRVARNGTLFTDHGRLVLKNQRYEYDTRPVSEHSPTAAYSRSYLRHLFKAGEMLGPMLASLHNLWFLKKLVEDSRRAIHENRFLEFKRSFLDLYSMGIPD

SEQ ID NO: 60544 - protein, 373 aa, Salinivibrio kushneri
  misc_feature (1)..(373): tr|A0A1V3GIF9|A0A1V3GIF9_9GAMM Queuine tRNA-ribosyltran sferase OS=Salinivibrio kushneri OX=1908198 GN=tgt PE=3 SV=1
MEYELKKTDGRARRGRLIFERGTVETPAFMPVGTYGTVKGMTPEEVKGTGAEILLGNTFHLWLRPGQEIMRLHGDLHDFMQWHGPILTDSGGFQVFSLGDIRKITEEGVHFRNPVNGDRIFMDAEKSMEIQYDLGSDIVMIFDECTPYPATHAEAKKSMEMSLRWAKRSRNHFDKLGNKNALFGIVQGGVYEDLRDVSVEGLTEIGFDGYAVGGLAVGEPKEDMHRILEHTCPQLPEDKPRYLMGVGKPEDLVEGVRRGVDMFDCVMPTRNARNGHLFITGGVIKIRNAKHKSDTSPLDPECDCYTCRHYSRAYLYHLDRCNEILGARLNTIHNLRYYQRVMEGLRNAIDEGRLDAFVADFYARRGKEVPPLD

SEQ ID NO: 60545 - protein, 373 aa, Salinivibrio sharmensis
  misc_feature (1)..(373): tr|A0A1V3H3D9|A0A1V3H3D9_9GAMM Queuine tRNA-ribosyltran sferase OS=Salinivibrio sharmensis OX=390883 GN=tgt PE= 3 SV=1
MEYELKKTDGRARRGRLIFERGTVETPAFMPVGTYGTVKGMTPEEVKGTGAEILLGNTFHLWLRPGQEIMRLHGDLHDFMQWHGPILTDSGGFQVFSLGDIRKITEEGVHFRNPVNGDRIFMDAEKSMEIQYDLGSDIVMIFDECTPYPATHEEAKKSMEMSLRWAKRSRNHFDKLGNKNALFGIVQGGVYEDLRDVSVEGLTEIGFDGYAVGGLAVGEPKEDMHRILEHTCPQLPEDKPRYLMGVGKPEDLVEGVRRGVDMFDCVMPTRNARNGHLFITGGVIKIRNAKHKSDTSPLDPECDCYTCRHYSRAYLYHLDRCNEILGARLNTIHNLRYYQRVMEGLRNAIDEGRLDAFVADFYARRGKEVPPLD

SEQ ID NO: 60546 - protein, 373 aa, Salinivibrio sp.
  misc_feature (1)..(373): tr|A0A1V3HXV8|A0A1V3HXV8_9GAMM Queuine tRNA-ribosyltran sferase OS=Salinivibrio sp. IB872 OX=1766123 GN=tgt PE= 3 SV=1
MEYELKKTDGRARRGRLIFERGTVETPAFMPVGTYGTVKGMTPEEVKGTGAEILLGNTFHLWLRPGQEVMRLHGDLHDFMQWQGPILTDSGGFQVFSLGDIRKITEEGVHFRNPVNGDRIFMDAEKSMEIQYDLGSDIVMIFDECTPYPATHAEAKKSMEMSLRWAKRSRNHFDKLGNKNALFGIVQGGVYEDLRDVSVKGLTEIGFDGYAVGGLAVGEPKEDMHRILEHTCPQLPEDKPRYLMGVGKPEDLVEGVRRGVDMFDCVMPTRNARNGHLFITGGVIKIRNAKHKSDTSPLDPECDCYTCRHYSRAYLHHLDRCNEILGARLNTIHNLRYYQRVMEGLRHAIDEGRLDAFVEDFYARRGKEVPPLD

SEQ ID NO: 60547 - protein, 373 aa, Salinivibrio sp.
  misc_feature (1)..(373): tr|A0A1N6DSV6|A0A1N6DSV6_9GAMM Queuine tRNA-ribosyltran sferase OS=Salinivibrio sp. ES.052 OX=1882823 GN=tgt PE =3 SV=1
MEYELKKTDGRARRGRLIFERGTVETPAFMPVGTYGTVKGMTPEEVKGTGAEILLGNTFHLWLRPGQEVMRLHGDLHDFMQWHGPILTDSGGFQVFSLGDIRKITEEGVHFRNPVNGDRIFMDAEKSMEIQYDLGSDVVMIFDECTPYPATHAEAKKSMEMSLRWAKRSRNHFDKLGNKNALFGIVQGGVYEDLRDVSVEGLTEIGFDGYAVGGLAVGEPKEDMHRILEHTCPQLPEDKPRYLMGVGKPEDLVEGVRRGVDMFDCVMPTRNARNGHLFITGGVIKIRNAKHKSDTSPLDPECDCYTCRHYSRAYLYHLDRCNEILGARLNTIHNLRYYQRVMEGLRNAIDEGRLDAFVADFYARRGKEVPPLD

SEQ ID NO: 60548 - protein, 377 aa, Salinivirga cyanobacteriivorans
  misc_feature (1)..(377): tr|A0A0S2HX63|A0A0S2HX63_9BACT Queuine tRNA-ribosyltran sferase OS=Salinivirga cyanobacteriivorans OX=1307839 G N=tgt PE=3 SV=1
MLSFNLLSTDVRGKARAGVIRTDRGEIETPIFMPVGTVGTVKGVLGPVLTDDIKAQIILGNTYHLFLRPGNDVIQKAGGLHQFMNWKRPILTDSGGFQVFSLADNRKLSEEGVTFRSHIDGGKHFFSPENVVDTQRIIGSDIMMALDECPPGDADYQYAHKSLQLTQNWLKRGHAHFKKTNPLYGKHQAWFPIVQGAGYPDLRRSAARCVTDLGAEGNAIGGLSVGEPTDLMYEMIEVTNEVLPEDKPRYLMGVGTPANILEAIDRGVDMFDCVMPTRNGRNGMLFTSEGIINIKNKKWEHDYSPVDPNGTSWVDRYYSKAYLRHLFVSRELLGPQIASIHNLAFYLWLVKTAREKIIAGNFASWKSKMVQNVAQRI

SEQ ID NO: 60549 - protein, 43 aa, Salinivirgaceae bacterium
  misc_feature (1)..(43): tr|A0A2N6A2K5|A0A2N6A2K5_9BACT tRNA guanosine(34) trans glycosylase Tgt (Fragment) OS=Salinivirgaceae bacterium OX=2053305 GN=tgt PE=4 SV=1
MLTFNLVSTDTNGKARAGVIRTDRGEIETPIFMPVGTVGTVKG

SEQ ID NO: 60550 - protein, 340 aa, Salinivirgaceae bacterium
  misc_feature (1)..(340): tr|A0A2N5ZAT9|A0A2N5ZAT9_9BACT Queuine tRNA-ribosyltran sferase (Fragment) OS=Salinivirgaceae bacterium OX=2053 305 GN=C0599_16160 PE=3 SV=1
VGTVKGVLNRELNEDIKAQIILGNTYHLFLRPGMDIMRQAGGLHQFINWDKPILTDSGGFQVFSLAENRKLSEEGVTFRSHIDGGKHFFSPENVVETQRIIGSDIMMALDECPPGDADYQYAYKSLQLTQHWLKRGIDHFKKTEPLYGKHQAWFPIVQGAGYPDLRRDAAKFVTDLGAEGNAIGGLSVGEPTDVMYEMIEVTNEVLPADKPRYLMGVGTPANILEAIDRGVDMFDCVMPTRNGRNGMLFTSNGIINIKNKKWENDFSAIDENGTSWVDSHYSKGYLRHLFVARELLGPQIASIHNLAFYLWLVKEARKQIVSGTFSTWKKEMVERVAQRI

SEQ ID NO: 60551 - protein, 379 aa, Salipaludibacillus aurantiacus
  misc_feature (1)..(379): tr|A0A1H9RKS5|A0A1H9RKS5_9BACI Queuine tRNA-ribosyltran sferase OS=Salipaludibacillus aurantiacus OX=1601833 GN =tgt PE=3 SV=1
MQAITYEHIKTCRQSGARLGIVHTPHGSFETPIFMPVGTLATVKTMSPEDLKSMNAQIILSNTYHLWLRPGEDIVEEAGGLHKFMNWDRPILTDSGGFQVFSLSDLRKITEEGVHFRNHLSGEKLFLTPERSMEIQNALGPDIMMAFDECPPYPAEHAYMKASVERTSRWAERCLEAHSRAEDQGLFGIIQGGEYEDLRRQSAKDLVSLDFPGYAIGGLSVGEPKDVMNKVLEHTAPLLPDNKPRYLMGVGSADSLIDGAIRGIDMFDCVLPTRIARNGTIMTSEGRLVVRNASYARDFSPLDKNCSCHVCQNHSRAYIRHLIKCNETLGLRLCSYHNLYFLLELMEKVRQAIRDDRLLDFREEFFEAYGFNKPNAKNF

SEQ ID NO: 60552 - protein, 379 aa, Salipaludibacillus keqinensis
  misc_feature (1)..(379): tr|A0A323TIX3|A0A323TIX3_9BACI Queuine tRNA-ribosyltran sferase OS=Salipaludibacillus keqinensis OX=2045207 GN= tgt PE=3 SV=1
MTAISYEHIKTCKQSGARLGIVHTPHGSFETPIFMPVGTLATVKTMSPEDLKSMNAQIILSNTYHLWLRPGEDIIEEAGGLHKFMNWDRPILTDSGGFQVFSLSDLRNITEEGVHFRNHLSGEKLFLTPEKSMQVQNALGPDIMMAFDECPPYPAEHKYMKASVERTSRWAERCLEAHSRKNDQGLFGIIQGGEYEDLRRQSAKDLVSLDFPGYAIGGLSVGEPKDVMNKVLDYTTPLLPHDKPRYLMGVGSADSLIDGAIRGVDMFDCVLPTRIARNGTIMTSSGRLVVRNAKYARDFKPLDENCDCNVCKNYSRAYIRHLIKCNETLGLRLCSYHNLYFLLTLMENVRQAIREDRLLDFREEFFEAYGFNKPNAKNF

SEQ ID NO: 60553 - protein, 379 aa, Salipaludibacillus neizhouensis
  misc_feature (1)..(379): tr|A0A3A9KAF1|A0A3A9KAF1_9BACI Queuine tRNA-ribosyltran sferase OS=Salipaludibacillus neizhouensis OX=885475 GN =tgt PE=3 SV=1
MPAITYEHIKTCKQSGARLGIVHTPHGSFETPVFMPVGTLGTVKTMSPEDLKSMNTNIILSNTYHLWLRPGEDIVKEAGGLHKFMNWDRPILTDSGGFQVFSLSELRNIKEEGVEFRNHLSGEKLFLTPEKSMEIQNALGPDIMMAFDECPPYPAEYKYMNDSVERTSRWAERCLEAHARPNEQGLFGIVQGGEYEDLRRKSAEDLVSLDFPGYAIGGLSVGEPKDVMKQVLEFTTPFLPEDKPRYLMGVGSADSLIDGAIRGIDMFDCVLPTRIARNGTLMTSKGRLVVRNAQYARDFRPLDENCDCHVCQNYTRAYIRHLVKCKESFGFRLTSYHNLYFLSQLMENVRQAIREDRLLDFREEFFEAYGFNKPNAKNF

SEQ ID NO: 60554 - protein, 375 aa, Salipiger aestuarii
  misc_feature (1)..(375): tr|A0A327Y6M6|A0A327Y6M6_9RHOB Queuine tRNA-ribosyltran sferase OS=Salipiger aestuarii OX=568098 GN=tgt PE=3 SV =1
MSITSFSLSATDGKARTGVIRTPRGEIRTPAFMPVGTAATVKAMLPEQVRATGADILLGNTYHLMLRPGAERIAKLGGLHRFMNWDLPILTDSGGFQVMSLASLRKLTEEGVTFASHVDGSRHMLSPERSMEIQKLLGSDIVMAFDECPALPADRARIEHSMHLSMRWAQRSRDAFGDRPGHMLFGIQQGGLEQDLRGQSAEALRAIGFDGYAIGGLAVGEGQEAMFACLDHAPDQLPTDKPRYLMGVGKPDDIVGAVKRGIDMMDCVLPTRSGRTGQAFTRHGVVNIKNARHADDPRPLDASCTCPACTGYSRAYLHHVFRAHEMISGMLLTAHNLHYFQQIMEGMRVAIAAGQFEAWETAFHAGRAEGDIPPL

SEQ ID NO: 60555 - protein, 375 aa, Salipiger bermudensis
  misc_feature (1)..(375): tr|Q0FP72|Q0FP72_SALBH Queuine tRNA-ribosyltransferase OS=Salipiger bermudensis (strain DSM 26914 / JCM 13377 / KCTC 12554 / HTCC2601) OX=314265 GN=tgt PE=3 SV=1
MSTTSFTLHATDGKARTGVISTPRGEIRTPAFMPVGTAATVKAMLPEQVRSTGADILLGNTYHLMLRPTAERIARLGGLHQFMNWDRPILTDSGGFQVMSLADLRKLTEEGVSFRSHIDGSKHMLTPERSMEIQRLLGSDIVMCFDECPALPADRKRLEESMRLSMRWAQRSRDAFGDRPGHMLFGIQQGGLEPDLREESAKALTQIGFDGYAVGGLAVGEGQEAMFGCLDHAPDTLPVDKPRYLMGVGKPDDIVGAVKRGIDMMDCVLPTRSGRTGQAFTRRGVVNIKNARHADDPRPLDEHCSCPACTGYSRAYLHHVFRSHEMISGMLLTWHNLQYFQDIMDGMRGAIAEGRFDAWEAVFHAGRAEGDIERL

SEQ ID NO: 60556 - protein, 375 aa, Salipiger marinus; identical to SEQ ID NO: 53878
  misc_feature (1)..(375): tr|A0A1G8JDK8|A0A1G8JDK8_9RHOB Queuine tRNA-ribosyltran sferase OS=Salipiger marinus OX=555512 GN=tgt PE=3 SV=1

SEQ ID NO: 60557 - protein, 375 aa, Salipiger mucosus
  misc_feature (1)..(375): tr|S9QL24|S9QL24_9RHOB Queuine tRNA-ribosyltransferase OS=Salipiger mucosus DSM 16094 OX=1123237 GN=tgt PE=3 S V=1
MSETSFTLHGTDGAARTGVIRTPRGEIRTPAFMPVGTAATVKAMLPESVRETGADVLLGNTYHLMLRPGAERVARLGGLHRFMNWDRPILTDSGGFQVMSLAGLRKLTEEGVTFRSHVDGSKHMLSPERSMEIQRLLGSDIVMAFDECPALPAERERVASSMRLSMRWAQRSRDAFGDRPGHMLFGIQQGGLDRELREESAEALRGIGFDGYAVGGLAVGEGQAAMFDCLDFAPGMLPEDKPRYLMGVGKPDDVVGAVKRGIDMMDCVLPTRSGRTGQAFTRRGVVNIKNARHADDPRPLDEHCACPACTGYSRAYLHHVYRSHEMISGMLLSWHNLQYFQDIMEGMRGAIAAGRFGEWEAAFHAGRAEGDIPPL

SEQ ID NO: 60558 - protein, 375 aa, Salipiger profundus
  misc_feature (1)..(375): tr|A0A1U7DBQ2|A0A1U7DBQ2_9RHOB Queuine tRNA-ribosyltran sferase OS=Salipiger profundus OX=1229727 GN=tgt PE=3 S V=1
MSTTSFTLNATDGAARTGVIRTPRGEIRTPAFMPVGTAGTVKAMLPENVRATGADILLGNTYHLMLRPTAERIARLGGLHAFMNWDRPILTDSGGFQVMSLADLRKLTEKGVTFRSHVDGSKHELSPERSMEIQRLLGSDIVMCFDECPALPADRKRLEESMRLSMRWAQRSRDAFGDRPGHMLFGIQQGGLERDLREESAEALRSIGFDGYAVGGLAVGEGQKAMFDCLDFAPGMLPEDKPRYLMGVGKPDDIVGAVKRGIDMMDCVLPTRSGRTGQAFTRRGVVNIKNARHADDPRPLDEHCSCPACTGYSRAYLHHVYRSHEMISGMLLTWHNLHYFQEIMQGMRDAIAEGRFAAWEAAFHAGRAEGDIEPL

SEQ ID NO: 60559 - protein, 376 aa, Salipiger sp.
  misc_feature (1)..(376): tr|A0A4Q3YVK3|A0A4Q3YVK3_9RHOB Queuine tRNA-ribosyltran sferase OS=Salipiger sp. IMCC34102 OX=2510647 GN=tgt PE =3 SV=1
MTDRFSFTLAATDGRARTGVIHTPRGEIRTPAFMPVGTAATVKAMLPESVAATGADILLGNTYHLMLRPTAERIDALGGLHRFMNWDRPILTDSGGFQVMSLADLRKLTEDGVTFRSHVDGSKHFLSPERSMEIQRLLGSDIVMAFDECPALPADRARLESSMRLSMRWAARSREAFGDRPGHALFGIQQGGLEPDLRAESAKALTDIGFEGYAVGGLAVGEGQAAMFDCLDTAPGMLPVDKPRYLMGVGKPDDIVGAVKRGIDMMDCVLPSRSGRTGQAFTRHGVVNIKNARHQDDPRPLDEACTCPACRGYSRAYLHHVFRAKEMISGMLLTWHNLHYFQAIMGEMRAAIAEARFDAWEADFHAARAEGDIEPL

SEQ ID NO: 60560 - protein, 375 aa, Salipiger thiooxidans
  misc_feature (1)..(375): tr|A0A1G7DK14|A0A1G7DK14_9RHOB Queuine tRNA-ribosyltran sferase OS=Salipiger thiooxidans OX=282683 GN=tgt PE=3 SV=1
MTRTSFTLTATDGAARTGVISTPRGEIRTPAFMPVGTAATVKAMMPENVRATGADILLGNTYHLMLRPTAERIARLGGLHKFMNWERPILTDSGGFQVMSLAALRKLTEEGVSFRSHIDGSRHMLTPERSMEIQRLLGSDIVMAFDECPALPADRTRIEESMRLSMRWAQRSRDAFGDRPGHMLFGIQQGGLEPDLREESAAALKAIGFDGYAVGGLAVGEGQEAMFGCLDHAPGFLPEDKPRYLMGVGKPDDIVGAVKRGIDMMDCVLPTRSGRTGQAWTRHGVVNIKNARHSDDPRPLDEQCSCPACTGYSRAYLHHVYRAGEMISGMLLSWHNLQYFQEIMQGMRDAIAEGRFAAWEAEFDAGRAEGDIGPL

SEQ ID NO: 60561 - protein, 379 aa, Salisediminibacterium haloalkalitolerans
  misc_feature (1)..(379): tr|A0A1H9VCV6|A0A1H9VCV6_9BACI Queuine tRNA-ribosyltran sferase OS=Salisediminibacterium haloalkalitolerans OX= 1464123 GN=tgt PE=3 SV=1
MSAITYEHIKTCKQSGARLGKIHTPHGSIDTPIFMPVGTLATVKTMSPEELKEMNAQIILSNTYHLWLRPGEDIIQEAGGLHTFMNWDRPILTDSGGFQVFSLSDLRNIKEEGVHFRNHISGEKLFLSPEKAMGIQNALGPDIMMAFDECPPYPAEHSYMKASVERTSRWAERCLEGHKRPQDQGLFGIVQGGEYEDLRRQSAKDLISLDFPGYAIGGLSVGEPKSVMNEVLEFTTPLLPQNKPRYLMGVGSADSLIDGAIRGVDMFDCVLPTRIARNGTLMTSKGRLVVRNAKFERDFRPLDENCSCYVCRNYTRAYIRHLIKANEMFGLRLCSYHNLHFLIDLMEQVREAIRTDRLLDFREEFFENYGFNRADAKNF

SEQ ID NO: 60562 - protein, 379 aa, Saliterribacillus persicus
  misc_feature (1)..(379): tr|A0A368XEN5|A0A368XEN5_9BACI Queuine tRNA-ribosyltran sferase OS=Saliterribacillus persicus OX=930114 GN=tgt PE=3 SV=1
MTAIRYELIKTCKQTGARVGKVHTPHGSFDTPIFMPVGTLATVKTMSPEELEELGAKIILSNTYHLWLRPGEDIVKTAGGLHKFMNWDKPILTDSGGFQVFSLSDLRQIEEKGVHFRNHLSGEKLFLSPEKAMEIQNALGSDIMMAFDECPPYPASEQYMKDSVERTSRWAERCLEGHKRPAEQGLFGIVQGGEYENLRKQSARDLTSLDFPGYAIGGLSVGEPKDVMNRVLEFTTPHLPENKARYLMGVGSPDSLIDGAIRGIDMFDCVLPTRIARNGTCMTSNGRLVVRNAKYAKDFSPIDPNCDCHTCKNYSRAYIRHLVKCNETFGYRLTTYHNLYFLLKLMEQVREAIMQDRLGDFKEEFFEQYGFNKPNAKNF

SEQ ID NO: 60563 - protein, 375 aa, Salmonella abony
  misc_feature (1)..(375): tr|A0A5I1FMV0|A0A5I1FMV0_SALAB tRNA guanosine(34) trans glycosylase Tgt OS=Salmonella abony OX=29482 GN=tgt PE= 4 SV=1
MKFELDTTDGRARRGRLVFDRGVVETPAFMPVGTYGTVKGMTPEEVEATGAQIILGNTFHLWLRPGQEIMKLHGDLHDFMQWKGPILTDSGGFQVFSLGDIRKITEQGVHFRNPINGDPIFLDPEKSMEIQYDLGSDIVMIFDECTPYPADWDYAKRSMEMSLRWAKRSRDRFDSLGNKNALFGIIQGSVYEDLRDISVKGLVEIGFDGYAVGGLAVGEPKADMHRILEHVCPQIPADKPRYLMGVGKPEDLVEGVRRGIDMFDCVMPTRNARNGHLFVTDGVVKIRNAKHKSDTSPLDAECDCYTCRNYSRAYLHHLDRCNEILGARLNTIHNLRYYQRLMAGLRKAIEEGKLESFVTEFYQRQGRPVPPLNVD

SEQ ID NO: 60564 - protein, 375 aa, Salmonella agona; identical to SEQ ID NO: 60563
  misc_feature (1)..(375): sp|B5EWT9|TGT_SALA4 Queuine tRNA-ribosyltransferase OS= Salmonella agona (strain SL483) OX=454166 GN=tgt PE=3 S V=1

SEQ ID NO: 60565 - protein, 375 aa, Salmonella anatum; identical to SEQ ID NO: 60563
  misc_feature (1)..(375): tr|A0A2T8MNS1|A0A2T8MNS1_SALAN Queuine tRNA-ribosyltran sferase OS=Salmonella anatum OX=58712 GN=tgt PE=3 SV=1

SEQ ID NO: 60566 - protein, 375 aa, Salmonella arizonae
  misc_feature (1)..(375): sp|A9MM57|TGT_SALAR Queuine tRNA-ribosyltransferase OS= Salmonella arizonae (strain ATCC BAA-731 / CDC346-86 / RSK2980) OX=41514 GN=tgt PE=3 SV=1
MKFELDTTDGRARRGRLVFERGVVETPAFMPVGTYGTVKGMTPEEVEATGAQIILGNTFHLWLRPGQEIMKLHGDLHDFMQWKGPILTDSGGFQVFSLGDIRKITEQGVHFRNPINGDPIFLDPEKSMEIQYDLGSDIVMIFDECTPYPADWDYAKCSMEMSLRWAKRSRDRFDGLGNKNALFGIIQGSVYEDLRDISVKGLVEIGFDGYAVGGLAVGEPKADMHRILEHVCPQIPADKPRYLMGVGKPEDLVEGVRRGIDMFDCVMPTRNARNGHLFVTDGVVKIRNAKHKSDTSPLDAECDCYTCRNYSRAYLHHLDRCNEILGARLNTIHNLRYYQRLMAGLRKAIEEGKLESFVTEFYQRQGRPVPPLNVD

SEQ ID NO: 60567 - protein, 375 aa, Salmonella berta
  misc_feature (1)..(375): tr|A0A3V6R406|A0A3V6R406_SALBE Queuine tRNA-ribosyltran sferase OS=Salmonella berta OX=28142 GN=tgt PE=3 SV=1
MKFELDTTDGRARRGRLVFDRGIVETPAFMPVGTYGTVKGMTPEEVEATGAQIILGNTFHLWLRPGQEIMKLHGDLHDFMQWKGPILTDSGGFQVFSLGDIRKITEQGVHFRNPINGDPIFLDPEKSMEIQYDLGSDIVMIFDECTPYPADWDYAKRSMEMSLRWAKRSRDRFDSLGNKNALFGIIQGSVYEDLRDISVKGLVEIGFDGYAVGGLAVGEPKADMHRILEHVCPQIPADKPRYLMGVGKPEDLVEGVRRGIDMFDCVMPTRNARNGHLFVTDGVVKIRNAKHKSDTSPLDAECDCYTCRNYSRAYLHHLDRCNEILGARLNTIHNLRYYQRLMAGLRKAIEEGKLESFVTEFYQRQGRPVPPLNVD

SEQ ID NO: 60568 - protein, 375 aa, Salmonella berta; identical to SEQ ID NO: 60563
  misc_feature (1)..(375): tr|A0A3U8PAF2|A0A3U8PAF2_SALBE Queuine tRNA-ribosyltran sferase OS=Salmonella berta OX=28142 GN=tgt PE=3 SV=1

SEQ ID NO: 60569 - protein, 375 aa, Salmonella blockley; identical to SEQ ID NO: 60563
  misc_feature (1)..(375): tr|A0A5H8HE24|A0A5H8HE24_SALBL tRNA guanosine(34) trans glycosylase Tgt OS=Salmonella blockley OX=57741 GN=E167 2_07870 PE=4 SV=1

SEQ ID NO: 60570 - protein, 375 aa, Salmonella bongori
  misc_feature (1)..(375): tr|A0A248KCD2|A0A248KCD2_SALBN Queuine tRNA-ribosyltran sferase OS=Salmonella bongori serovar 66:z41:- str. SA1 9983605 OX=1243617 GN=tgt PE=3 SV=1
MKFELDTTDGRARRGRLVFDRGVVETPAFMPVGTYGTVKGMTPEEVEATGAQIILGNTFHLWLRPGQEIMKLHGDLHDFMQWKGPILTDSGGFQVFSLGDIRKITEQGVHFRNPINGDPIFLDPEKSMEIQYDLGSDIVMIFDECTPYPADWDYAKRSMEMSLRWAKRSRERFDSLGNKNALFGIIQGSVYEDLRDISVKGLVEIGFDGYAVGGLAVGEPKEDMHRILEHVCPQIPADKPRYLMGVGKPEDLVEGVRRGIDMFDCVMPTRNARNGHLFVTDGVVKIRNAKHKSDTSPLDAECDCYTCRNYSRAYLHHLDRCNEILGARLNTIHNLRYYQRLMAGLRRAIEEGKLESFVTEFYQRQGRPVPPLNVD

SEQ ID NO: 60571 - protein, 375 aa, Salmonella bongori; identical to SEQ ID NO: 60570
  misc_feature (1)..(375): tr|A0A0K0H7V8|A0A0K0H7V8_SALBC Queuine tRNA-ribosyltran sferase OS=Salmonella bongori (strain ATCC 43975 / DSM 13772 / NCTC 12419) OX=218493 GN=tgt PE=3 SV=1

SEQ ID NO: 60572 - protein, 375 aa, Salmonella choleraesuis
  misc_feature (1)..(375): sp|Q57SF8|TGT_SALCH Queuine tRNA-ribosyltransferase OS= Salmonella choleraesuis (strain SC-B67) OX=321314 GN=tg t PE=3 SV=1
MKFELDTTDGRARRGRLVFDRGVVETPAFMPVGTYGTVKGMTPEEVEATGAQIILGNTFHLWLRPGQEIMKLHGDLHDFMQWKGPILTDSGGFQVFSLGDIRKITEQGVHFRNPINGDPIFLDPEKSMEIQYDLGSDIVMIFDECTPYPADWDYAKRSMEMSLRWAKRSRDRFDSLGNKNALFGIIQGSVYEDLRDISVKGLVEIGFDGYAVGGLAVGEPKADMHRILEHVCPQIPADKPRYLMGVGKPEDLVEGVRRGIDMFDCVMPTRNARNGHLFVTDGVVKIRNAKHKSDTSPLDAECDCYTCRNYSRAYLHHLDRCNEILGARLNTIHNLRYYQRLMAGLRKAIEEGKLESFVTKFYQRQGRPVPPLNVD

SEQ ID NO: 60573 - protein, 375 aa, Salmonella derby
  misc_feature (1)..(375): tr|A0A4P5EY05|A0A4P5EY05_SALDE Queuine tRNA-ribosyltran sferase OS=Salmonella derby OX=28144 GN=tgt PE=3 SV=1
MKFELDTTDGRARRGRLVFDRGVVETPAFMPVGTYGTVKGMTPEEVEATGAQIILGNTFHLWLRPGQEIMKLHGDLHDFMQWKGPILTDSGGFQVFSLGDIRKITEQGVHFRNPINGDPIFLDPEKSMEIQYDLGSDIVMIFDECTPYPADWDYAKRSMEMSLRWAKRSRERFDSLGNKNALFGIIQGSVYEDLRDISVKGLVEIGFDGYAVGGLAVGEPKADMHRILEHVCPQIPADKPRYLMGVGKPEDLVEGVRRGIDMFDCVMPTRNARNGHLFVTDGVVKIRNAKHKSDTSPLDAECDCYTCRNYSRAYLHHLDRCNEILGARLNTIHNLRYYQRLMAGLRKAIEEGKLESFVTEFYQRQGRPVPPLNVD

SEQ ID NO: 60574 - protein, 375 aa, Salmonella derby; identical to SEQ ID NO: 60563
  misc_feature (1)..(375): tr|A0A3V8R3H6|A0A3V8R3H6_SALDE Queuine tRNA-ribosyltran sferase OS=Salmonella derby OX=28144 GN=tgt PE=3 SV=1

SEQ ID NO: 60575 - protein, 375 aa, Salmonella diarizonae
  misc_feature (1)..(375): tr|A0A2I5HJQ2|A0A2I5HJQ2_SALDZ Queuine tRNA-ribosyltran sferase OS=Salmonella diarizonae OX=59204 GN=tgt PE=3 S V=1
MKFELDTTDVRARRGRLVFDRGVVETPAFMPVGTYGTVKGMTPEEVEATGAQIILGNTFHLWLRPGQEIMKLHGDLHDFMQWKGPILTDSGGFQVFSLGDIRKITEQGVHFRNPINGDPIFLDPEKSMEIQYDLGSDIVMIFDECTPYPADWDYAKRSMEMSLRWAKRSRDRFDSLGNKNALFGIIQGSVYEDLRDISVKGLVEIGFDGYAVGGLAVGEPKEDMHRILEHVCPQIPADKPRYLMGVGKPEDLVEGVRRGIDMFDCVMPTRNARNGHLFVTDGVVKIRNAKHKSDTSPLDAECDCYTCRNYSRAYLHHLDRCNEILGARLNTIHNLRYYQRLMAGLRKAIEEGKLESFVTEFYQRQGRPVPPLNVD

SEQ ID NO: 60576 - protein, 375 aa, Salmonella diarizonae
  misc_feature (1)..(375): tr|A0A379U2J7|A0A379U2J7_SALDZ Queuine tRNA-ribosyltran sferase OS=Salmonella diarizonae OX=59204 GN=tgt PE=3 S V=1
MKFELDTTDGRARRGRLVFDRGVVETPAFMPVGTYGTVKGMTPEEVEATGAQIILGNTFHLWLRPGQEIMKLHGDLHDFMQWKGPILTDSGGFQVFSLGDIRKITEQGVHFRNPINGDPIFLDPEKSMEIQYDLGSDIVMIFDECTPYPADWDYAKRSMEMSLRWAKRSRDRFDSLGNKNALFGIIQGSVYEDLRDISVKGLVEIGFDGYAVGGLAVGEPKEDMHRILEHVCPQIPADKPRYLMGVGKPEDLVEGVRRGIDMFDCVMPTRNARNGHLFVTDGVVKIRNAKHKSDTSPLDAECDCYTCRNYSRAYLHHLDRCNEILGARLNTIHNLRYYQRLMAGLRKAIEEGKLESFVTEFYQRQGRPVPPLNVD

SEQ ID NO: 60577 - protein, 375 aa, Salmonella dublin; identical to SEQ ID NO: 60567
  misc_feature (1)..(375): tr|A0A3T3IJT9|A0A3T3IJT9_SALDU Queuine tRNA-ribosyltran sferase OS=Salmonella dublin OX=98360 GN=tgt PE=3 SV=1

SEQ ID NO: 60578 - protein, 375 aa, Salmonella dublin; identical to SEQ ID NO: 60567
  misc_feature (1)..(375): sp|B5FKR0|TGT_SALDC Queuine tRNA-ribosyltransferase OS= Salmonella dublin (strain CT_02021853) OX=439851 GN=tgt PE=3 SV=1

SEQ ID NO: 60579 - protein, 375 aa, Salmonella enterica
  misc_feature (1)..(375): tr|A0A5F1MMM1|A0A5F1MMM1_SALET Queuine tRNA-ribosyltran sferase OS=Salmonella enterica subsp. enterica serovar Wilhelmsburg OX=1960126 GN=tgt PE=3 SV=1
MKFELDTTDGRARRGRLVFDRGIVETPAFMPVGTYGTVKGMTPEEVEATGAQIILGNTFHLWLRPGQEIMKLHGDLHDFMQWKGPILTDSGGFQVFSLGDIRKITEQGVHFRNPINGDPIFLDPEKSMEIQYDLGSDIVMIFDECTPYPADWDYAKRSMEMSLRWAKRSRDRFDSLGNKNALFGIIQGSVYEDLRDISVKGLVEIGFDGYAVGGLAVGEPIADMHRILEHVCPQIPADKPRYLMGVGKPEDLVEGVRRGIDMFDCVMPTRNARNGHLFVTDGVVKIRNAKHKSDTSPLDAECDCYTCRNYSRAYLHHLDRCNEILGARLNTIHNLRYYQRLMAGLRKAIEEGKLESFVTEFYQRQGRPVPPLNVD

SEQ ID NO: 60580 - protein, 375 aa, Salmonella enterica; identical to SEQ ID NO: 60567
  misc_feature (1)..(375): tr|A0A402MTT7|A0A402MTT7_SALET Queuine tRNA-ribosyltran sferase OS=Salmonella enterica subsp. enterica serovar Braenderup str. CFSAN001740 OX=1299119 GN=tgt PE=3 SV=1

SEQ ID NO: 60581 - protein, 375 aa, Salmonella enteritidis; identical to SEQ ID NO: 60576
  misc_feature (1)..(375): tr|A0A403FIM5|A0A403FIM5_SALEN Queuine tRNA-ribosyltran sferase OS=Salmonella enteritidis OX=149539 GN=tgt PE=3 SV=1

SEQ ID NO: 60582 - protein, 375 aa, Salmonella enteritidis; identical to SEQ ID NO: 60567
  misc_feature (1)..(375): sp|B5QTF4|TGT_SALEP Queuine tRNA-ribosyltransferase OS= Salmonella enteritidis PT4 (strain P125109) OX=550537 G N=tgt PE=3 SV=1

SEQ ID NO: 60583 - protein, 375 aa, Salmonella gallinarum; identical to SEQ ID NO: 60567
  misc_feature (1)..(375): tr|A0A3V9NI21|A0A3V9NI21_SALGL Queuine tRNA-ribosyltran sferase OS=Salmonella gallinarum OX=594 GN=tgt PE=3 SV= 1

SEQ ID NO: 60584 - protein, 375 aa, Salmonella gallinarum; identical to SEQ ID NO: 60567
  misc_feature (1)..(375): sp|B5R6Q7|TGT_SALG2 Queuine tRNA-ribosyltransferase OS= Salmonella gallinarum (strain 287/91 / NCTC 13346) OX=5 50538 GN=tgt PE=3 SV=1

SEQ ID NO: 60585 - protein, 375 aa, Salmonella hadar; identical to SEQ ID NO: 60563
  misc_feature (1)..(375): tr|A0A4Q8S826|A0A4Q8S826_SALHA Queuine tRNA-ribosyltran sferase OS=Salmonella hadar OX=149385 GN=tgt PE=3 SV=1

SEQ ID NO: 60586 - protein, 375 aa, Salmonella heidelberg; identical to SEQ ID NO: 60563
  misc_feature (1)..(375): sp|B4T8P5|TGT_SALHS Queuine tRNA-ribosyltransferase OS= Salmonella heidelberg (strain SL476) OX=454169 GN=tgt P E=3 SV=1

SEQ ID NO: 60587 - protein, 375 aa, Salmonella houtenae; identical to SEQ ID NO: 60576
  misc_feature (1)..(375): tr|A0A3V3VJH0|A0A3V3VJH0_SALHO Queuine tRNA-ribosyltran sferase OS=Salmonella houtenae OX=59205 GN=tgt PE=3 SV= 1

SEQ ID NO: 60588 - protein, 375 aa, Salmonella houtenae
  misc_feature (1)..(375): tr|A0A2K0JFE2|A0A2K0JFE2_SALHO Queuine tRNA-ribosyltran sferase OS=Salmonella houtenae OX=59205 GN=tgt PE=3 SV= 1
MKFELDTTDGRARRGRLVFDRGVVETPAFMPVGTYGTVKGMTPEEVEATGAQIILGNTFHLWLRPGQEIMKLHGDLHDFMQWKGPILTDSGGFQVFSLGDIRKITEQGVHFRNPINGDPIFLDPEKSMEIQYDLGSDIVMIFDECTPYPADWDYAKRSMEMSLRWAKRSRDRFDSLGNKNALFGIIQGSVYEDLRDISVKGLVEISFDGYAVGGLAVGEPKEDMHRILEHVCPQIPADKPRYLMGVGKPEDLVEGVRRGIDMFDCVMPTRNARNGHLFVTDGVVKIRNAKHKSDTSPLDAECDCYTCRNYSRAYLHHLDRCNEILGARLNTIHNLRYYQRLMAGLRKAIEEGKLESFVTEFYQRQGRPVPPLNVD

SEQ ID NO: 60589 - protein, 375 aa, Salmonella infantis; identical to SEQ ID NO: 60567
  misc_feature (1)..(375): tr|A0A5F1J315|A0A5F1J315_SALIN Queuine tRNA-ribosyltran sferase OS=Salmonella infantis OX=595 GN=tgt PE=3 SV=1

SEQ ID NO: 60590 - protein, 375 aa, Salmonella infantis; identical to SEQ ID NO: 60572
  misc_feature (1)..(375): tr|A0A3W0HMC6|A0A3W0HMC6_SALIN Queuine tRNA-ribosyltran sferase OS=Salmonella infantis OX=595 GN=tgt PE=3 SV=1

SEQ ID NO: 60591 - protein, 375 aa, Salmonella montevideo
  misc_feature (1)..(375): tr|A0A3U8JNX9|A0A3U8JNX9_SALMO Queuine tRNA-ribosyltran sferase OS=Salmonella montevideo OX=115981 GN=tgt PE=3 SV=1
MKFELDTTDGRARRGRLVFDRGVVETPAFMPVGTYGTVKGMTPEEVEATGAQIILGNTFHLWLRPGQEIMKLHGDLHDFMQWKGPILTDSGGFQVFSLGDIRKITEQGVHFRNPINGDPIFLDPEKSMEIQYDLGSDIVMIFDECTPYPANWDYAKRSMEMSLRWAKRSRDRFDSLGNKNALFGIIQGSVYEDLRDISVKGLVEIGFDGYAVGGLAVGEPKADMHRILEHVCPQIPADKPRYLMGVGKPEDLVEGVRRGIDMFDCVMPTRNARNGHLFVTDGVVKIRNAKHKSDTSPLDAECDCYTCRNYSRAYLHHLDRCNEILGARLNTIHNLRYYQRLMAGLRKAIEEGKLESFVTEFYQRQGRPVPPLNVD

SEQ ID NO: 60592 - protein, 375 aa, Salmonella montevideo; identical to SEQ ID NO: 60563
  misc_feature (1)..(375): tr|A0A3V6QCD6|A0A3V6QCD6_SALMO Queuine tRNA-ribosyltran sferase OS=Salmonella montevideo OX=115981 GN=tgt PE=3 SV=1

SEQ ID NO: 60593 - protein, 375 aa, Salmonella moscow; identical to SEQ ID NO: 60567
  misc_feature (1)..(375): tr|A0A5H7LIB6|A0A5H7LIB6_SALMC tRNA guanosine(34) trans glycosylase Tgt OS=Salmonella moscow OX=28146 GN=E1B69_ 04735 PE=4 SV=1

SEQ ID NO: 60594 - protein, 375 aa, Salmonella muenchen; identical to SEQ ID NO: 60563
  misc_feature (1)..(375): tr|A0A3U7XKG2|A0A3U7XKG2_SALMU tRNA guanosine(34) trans glycosylase Tgt OS=Salmonella muenchen OX=596 GN=D4Z66_ 02210 PE=3 SV=1

SEQ ID NO: 60595 - protein, 375 aa, Salmonella muenchen; identical to SEQ ID NO: 60567
  misc_feature (1)..(375): tr|A0A3T3ET81|A0A3T3ET81_SALMU Queuine tRNA-ribosyltran sferase OS=Salmonella muenchen OX=596 GN=tgt PE=3 SV=1

SEQ ID NO: 60596 - protein, 375 aa, Salmonella muenster; identical to SEQ ID NO: 60563
  misc_feature (1)..(375): tr|A0A5J2RWP5|A0A5J2RWP5_SALMS tRNA guanosine(34) trans glycosylase Tgt OS=Salmonella muenster OX=82689 GN=tgt PE=3 SV=1

SEQ ID NO: 60597 - protein, 375 aa, Salmonella newport; identical to SEQ ID NO: 60563
  misc_feature (1)..(375): tr|A0A0R9NTX3|A0A0R9NTX3_SALNE Queuine tRNA-ribosyltran sferase OS=Salmonella newport OX=108619 GN=tgt PE=3 SV= 1

SEQ ID NO: 60598 - protein, 375 aa, Salmonella newport; identical to SEQ ID NO: 60563
  misc_feature (1)..(375): sp|B4SWP7|TGT_SALNS Queuine tRNA-ribosyltransferase OS= Salmonella newport (strain SL254) OX=423368 GN=tgt PE=3 SV=1

SEQ ID NO: 60599 - protein, 375 aa, Salmonella oranienberg
  misc_feature (1)..(375): tr|A0A3V8KLE2|A0A3V8KLE2_SALON Queuine tRNA-ribosyltran sferase OS=Salmonella oranienberg OX=28147 GN=tgt PE=3 SV=1
MKFELDTTDGRARRGRLVFDRGVVETPAFMPVGTYGTVKGMTPEEVEATGAQIILGNTFHLWLRPGQEIMKVHGDLHDFMQWKGPILTDSGGFQVFSLGDIRKITEQGVHFRNPINGDPIFLDPEKSMEIQYDLGSDIVMIFDECTPYPADWDYAKRSMEMSLRWAKRSRDRFDSLGNKNALFGIIQGSVYEDLRDISVKGLVEIGFDGYAVGGLAVGEPKADMHRILEHVCPQIPADKPRYLMGVGKPEDLVEGVRRGIDMFDCVMPTRNARNGHLFVTDGVVKIRNAKHKSDTSPLDAECDCYTCRNYSRAYLHHLDRCNEILGARLNTIHNLRYYQRLMAGLRKAIEEGKLESFVTEFYQRQGRPVPPLNVD

SEQ ID NO: 60600 - protein, 375 aa, Salmonella oranienberg; identical to SEQ ID NO: 60563
  misc_feature (1)..(375): tr|A0A3V8URK2|A0A3V8URK2_SALON Queuine tRNA-ribosyltran sferase OS=Salmonella oranienberg OX=28147 GN=tgt PE=3 SV=1

SEQ ID NO: 60601 - protein, 375 aa, Salmonella paratyphi; identical to SEQ ID NO: 60563
  misc_feature (1)..(375): tr|A0A3Z1EF09|A0A3Z1EF09_SALPB Queuine tRNA-ribosyltran sferase OS=Salmonella paratyphi B (strain ATCC BAA-1250 / SPB7) OX=1016998 GN=tgt PE=3 SV=1

SEQ ID NO: 60602 - protein, 375 aa, Salmonella paratyphi
  misc_feature (1)..(375): sp|Q5PFT6|TGT_SALPA Queuine tRNA-ribosyltransferase OS= Salmonella paratyphi A (strain ATCC 9150 / SARB42) OX=2 95319 GN=tgt PE=3 SV=1
MKFELDTTDGRARRGRLVFDRGVVETPAFMPVGTYGTVKGMTPEEVEATGAQIILGNTFHLWLRPGQEIMKLHGDLHDFMQWKGPILTDSGGFQVFSLGDIRKITEQGVHFRNPINGDPIFLDPEKSMEIQYDLGSDIVMIFDECTPYPADWDYAKRSMEMSLRWAKRSRDRFDSLGNKNALFGIIQGSVYEDLRDISVKGLVEIGFDGYAVGGLAVGEPKADMHRILEHVCPQLPADKPRYLMGVGKPEDLVEGVRRGIDMFDCVMPTRNARNGHLFVTDGVVKIRNAKHKSDTSPLDAECDCYTCRNYSRAYLHHLDRCNEILGARLNTIHNLRYYQRLMAGLRKAIEEGKLESFVTEFYQRQGRPVPPLNVD

SEQ ID NO: 60603 - protein, 375 aa, Salmonella potsdam; identical to SEQ ID NO: 60563
  misc_feature (1)..(375): tr|A0A5H6BV84|A0A5H6BV84_SALPO tRNA guanosine(34) trans glycosylase Tgt OS=Salmonella potsdam OX=597 GN=tgt PE= 4 SV=1

SEQ ID NO: 60604 - protein, 375 aa, Salmonella rubislaw
  misc_feature (1)..(375): tr|A0A5I1KTS1|A0A5I1KTS1_SALRU tRNA guanosine(34) trans glycosylase Tgt OS=Salmonella rubislaw OX=598 GN=E0976_ 03675 PE=4 SV=1
MKFELDTTDGRARRGRLVFDRGVVETPAFMPVGTYGTVKGMTPEEVEATGAQIILGNTFHLWLRPGQEIMKLHGDLHDFMQWKGPILTDSGGFQVFSLGDIRKITEQGVHFRNPINGDPIFLDPEKSMEIQYDLGSDIVMIFDECTPYPADWDYAKRSMEMSLRWAKRSRDRFDSLGNKNALFGIIQGSVYEDLRDISVKGLVEIGFDGYAVGGLAVGEPKADMHRILEHVCPQIPADKPRYLMGVGKPEDLVEGGRRGIDMFDCVMPTRNARNGHLFVTDGVVKIRNAKHKSDTSPLDAECDCYTCRNYSRAYLHHLDRCNEILGARLNTIHNLRYYQRLMAGLRKAIEEGKLESFVTEFYQRQGRPVPPLNVD

SEQ ID NO: 60605 - protein, 375 aa, Salmonella rubislaw; identical to SEQ ID NO: 60563
  misc_feature (1)..(375): tr|A0A3V7IKV1|A0A3V7IKV1_SALRU Queuine tRNA-ribosyltran sferase OS=Salmonella rubislaw OX=598 GN=tgt PE=3 SV=1

SEQ ID NO: 60606 - protein, 375 aa, Salmonella schwarzengrund; identical to SEQ ID NO: 60563
  misc_feature (1)..(375): sp|B4TZI0|TGT_SALSV Queuine tRNA-ribosyltransferase OS= Salmonella schwarzengrund (strain CVM19633) OX=439843 G N=tgt PE=3 SV=1

SEQ ID NO: 60607 - protein, 375 aa, Salmonella senftenberg; identical to SEQ ID NO: 60563
  misc_feature (1)..(375): tr|A0A3R0HJK4|A0A3R0HJK4_SALSE Queuine tRNA-ribosyltran sferase OS=Salmonella senftenberg OX=28150 GN=tgt PE=3 SV=1

SEQ ID NO: 60608 - protein, 375 aa, Salmonella sp.; identical to SEQ ID NO: 60563
  misc_feature (1)..(375): tr|A0A509CHF0|A0A509CHF0_9ENTR Queuine tRNA-ribosyltran sferase OS=Salmonella sp. NCTC 6947 OX=2583581 GN=tgt P E=3 SV=1

SEQ ID NO: 60609 - protein, 375 aa, Salmonella sp.; identical to SEQ ID NO: 53884
  misc_feature (1)..(375): tr|A0A1F2K4K2|A0A1F2K4K2_9ENTR Queuine tRNA-ribosyltran sferase OS=Salmonella sp. HMSC13B08 OX=1581094 GN=tgt P E=3 SV=1

SEQ ID NO: 60610 - protein, 375 aa, Salmonella thompson; identical to SEQ ID NO: 60563
  misc_feature (1)..(375): tr|A0A403SNK3|A0A403SNK3_SALTH Queuine tRNA-ribosyltran sferase OS=Salmonella thompson OX=600 GN=tgt PE=3 SV=1

SEQ ID NO: 60611 - protein, 375 aa, Salmonella typhi
  misc_feature (1)..(375): sp|Q8Z8Y0|TGT_SALTI Queuine tRNA-ribosyltransferase OS= Salmonella typhi OX=90370 GN=tgt PE=3 SV=1
MKFELDTTDGRARRGRLVFDRGVVETPAFMPVGTYGTVKGMTPEEVEATGAQIILGNTFHLWLRPGQEIMKLHGDLHDFMQWKGPILTDSGGFQVFSLGDIRKITEQGVHFRNPINGDPIFLDPEKSMEIQYDLGSDIVMIFDECTPYPADWDYAKRSMEMSLRWAKRSRDRFDSLGNKNALFGIIQGSVYEDLRDISVKGLVEIGFDGYAVGGLAVGEPKADMHRILEHVCPQIPADKPRYLMGVGKPEDLVEGVRRGIDMFDCVMPTRNARNGHLFVTDGVVKIRNAKHKSDISPLDAECDCYTCRNYSRAYLHHLDRCNEILGARLNTIHNLRYYQRLMAGLRKAIEEGKLESFVTEFYQRQGRPVPPLNVD

SEQ ID NO: 60612 - protein, 375 aa, Salmonella typhi; identical to SEQ ID NO: 60611
  misc_feature (1)..(375): tr|A0A4U8FH14|A0A4U8FH14_SALTI Queuine tRNA-ribosyltran sferase OS=Salmonella typhi OX=90370 GN=tgt PE=3 SV=1

SEQ ID NO: 60613 - protein, 375 aa, Salmonella typhimurium; identical to SEQ ID NO: 60563
  misc_feature (1)..(375): sp|Q8ZRD8|TGT_SALTY Queuine tRNA-ribosyltransferase OS= Salmonella typhimurium (strain LT2 / SGSC1412 / ATCC 70 0720) OX=99287 GN=tgt PE=3 SV=1

SEQ ID NO: 60614 - protein, 375 aa, Salmonella typhimurium; identical to SEQ ID NO: 60563
  misc_feature (1)..(375): tr|A0A3Z2EZN2|A0A3Z2EZN2_SALTU Queuine tRNA-ribosyltran sferase OS=Salmonella typhimurium (strain ATCC 68169 / UK-1) OX=990282 GN=tgt PE=3 SV=1

SEQ ID NO: 60615 - protein, 375 aa, Salmonella virchow; identical to SEQ ID NO: 60563
  misc_feature (1)..(375): tr|A0A3V4BET0|A0A3V4BET0_SALVI Queuine tRNA-ribosyltran sferase OS=Salmonella virchow OX=48409 GN=tgt PE=3 SV=1

SEQ ID NO: 60616 - protein, 379 aa, Salsuginibacillus halophilus
  misc_feature (1)..(379): tr|A0A2P8HFX7|A0A2P8HFX7_9BACI Queuine tRNA-ribosyltran sferase OS=Salsuginibacillus halophilus OX=517424 GN=tg t PE=3 SV=1
MAAVTYEHIKTCAQSGARLGRLHTPHGTVETPIFMPVGTLATVKTLSPEELEDMSAQIILANTYHLWLRPGEDIVKEAGGLHKFMNWDRPILTDSGGFQVFSLSERRKITEEGVHFRNHINGEKLFLPPEKAMQIQNDLGPDVMMAFDECPPYPAEHSYMKSSVERTSRWAERCLEAHARPEEQALFGIVQGGEYKDLRRQSAEDLVSMNFPGYAIGGLSVGEPKDVMNEMLEFTTPLLPDDKPRYLMGVGSADALIDGAIRGVDMFDCVLPTRIARNGSCMTSHGRVTVRNAKYARDFGPLDENCNCHVCRNYSRAYIRHLVKANETFGFRLTSYHNLYFLLELMRKVRQAIQEDRLLDFREEFFEQYGFNRPDAKNF

SEQ ID NO: 60617 - protein, 381 aa, Samsonia erythrinae
  misc_feature (1)..(381): tr|A0A4R3VSA7|A0A4R3VSA7_9GAMM Queuine tRNA-ribosyltran sferase OS=Samsonia erythrinae OX=160434 GN=tgt PE=3 SV =1
MKYELHTTDGRARRGRLIFERGVVETPAFMPVGTYGTVKGMTPEEVKETGAQILLGNTFHLWLRPGQEIMKLHGDLHDFMQWHGPILTDSGGFQVFSLGDIRKITEQGVHFRNPINGDAIFLSPEKSMEIQYDLGSDIVMIFDECTPYPADWDYAKRSMEMSLRWAKRSRQRFDELNNKNALFGIIQGGVYEDLRDVSVKGLVDIGFDGYAVGGLAVGEPKEDMHRILEHVCPQIPEDKPRYLMGVGKPEDLVEGVRRGIDMFDCVMPTRNARNGHLFVTDGVVKIRNAKYKDDVSPLDEHCDCYTCRNYSRAYLHHLDRCNEILGARLNTIHNLRYYQRLMAGLRQAIEEGKLERFVVDFYQRLGKPIPPLAEENVAAGN

SEQ ID NO: 60618 - protein, 389 aa, Sandaracinaceae bacterium
  misc_feature (1)..(389): tr|A0A520QP82|A0A520QP82_9DELT Queuine tRNA-ribosyltran sferase OS=Sandaracinaceae bacterium OX=2510337 GN=tgt PE=3 SV=1
MPTDGFAFDELARDGDARRGRFTTPRATVETPAFMPVGTQATVKATTPEELERTGARLILANTYHLWLRPGAERIAKLGGVQRFMAWPHALLTDSGGFQVFSLTHMNQIDDDGVTFRSHLDGAKLRLTPEESMRVQGLLGSDVAMLFDECPPGGAPREVVERAMRRTTAWARRSLAVPAPEGQARFGIVQGGTHVDLRLSHLEDIASLAVDGVALGGFSVGEPIEEMVRVLGEVTPKLPTDRPRYLMGVGTPFDLLAAIGTGVDLFDCVLPTRNARNGQALTWTGRVNLRQARHKEDERALDPGCECPTCRTFSRAYLHHLVRTKEMLAPRLVTQHNLWFYQDLTRGARAAIERGRYAAWSDEVATRMREGDEIGSPDPNQREWRANRT

SEQ ID NO: 60619 - protein, 370 aa, Sandaracinobacter sp.
  misc_feature (1)..(370): tr|A0A501XTJ6|A0A501XTJ6_9SPHN Queuine tRNA-ribosyltran sferase OS=Sandaracinobacter sp. PAMC 28131 OX=1715348 GN=tgt PE=3 SV=1
MFNFQIHATDGRARTGLIETDRGTIRTPAFMPVGTAATVKGMHPEAVRAAGADIILGNTYHLMLRPGAERMARLGGLHHFMNWEKPILTDSGGFQVMSLGALVKITEEGVSFQSHVDGSKHFVSPERSIEIQRLLGSDIVMAFDECTKHPATHEEAARSMRMSMRWAKRSREAFEANPAPALFGIQQGSLYPDLRRESAEKLIEIGFEGYAIGGLAVGEGQEAMFEALDTAPELLPTEKPRYLMGVGRPSDIIGAVLRGVDMFDCVMPTRSGRTAQAFVMDGTLNLRNARHAEDAGPLDAECPCPTCAHYSRAYLHHLFKTEEMLGPMLLTQHNIWHYQQLMQGLREAIAEGRVQAFAKTRLDRLSAAAA

SEQ ID NO: 60620 - protein, 395 aa, Sandaracinus amylolyticus
  misc_feature (1)..(395): tr|A0A0F6YJK8|A0A0F6YJK8_9DELT Queuine tRNA-ribosyltran sferase OS=Sandaracinus amylolyticus OX=927083 GN=tgt P E=3 SV=1
MRTEGFSYREIARDGDARRGVFTTPRAVVQTPVFMPVGTLATVKSQSPDEIEATGARLILANTYHLWLRPGAEIVDAMGGVQKFQSWPHAVLTDSGGFQVFSLADLRTIDDEGVSFKSHLDGRPLRLTPEESMRIQALLGSDVAMAFDECPPGGAERPIIEKALRRTSAWARRCLLSPWREGQARFGIVQGATHVDLRLSHLDEIAGMEAGGREFDGIALGGFSVGEPIPEMYRALSEITPKMPTDKPRYLMGVGTPYDLLHAIGCGIDLFDCVLPTRNARNAQALTWSGRVNMKQARHKRDESPIDRECDCPVCARHSRAYLHHLIRAEEMLGARLLTQHNLWFYGALTRRAREKIEAGGYHAWAAEAAAKMREGDEVGKGAREKPRFPGEGDG

SEQ ID NO: 60621 - protein, 386 aa, Sandaracinus sp.
  misc_feature (1)..(386): tr|A0A2E0TDP7|A0A2E0TDP7_9DELT Queuine tRNA-ribosyltran sferase OS=Sandaracinus sp. OX=2024858 GN=tgt PE=3 SV=1
MSAEVGAGALPTKGFAFELRAEDGHARRATFTTPRAVVETPTFMPVGTAATVKGLTPDEVEATGARMILANTYHLWLRPGAELIARRGGVTRFMGWEHALLTDSGGFQVFSLAGLRKVDDDGVTFRSHLDGAEKRLTPEESMRVQRLLGSTVAMVLDVCPPGGAARPEVEEAMRRTTAWAKRCLETEPAEGQARFGIVQGATYLDLRRAHLAELAPMAFDGLALGGFSVGEPVETMYELLDAMAHELPRQKPRYLMGVGTPYDLLKAIGAGVDLFDCVLPTRNARNGQALTWDGRVNLRQARHKEDDGPISEACGCPVCARFSRAYLRHLVKANELLGHRLVTQHNLSFYGELVAEARRQIEAGTYHSWAAEAAKRMREGDEVGRG

SEQ ID NO: 60622 - protein, 392 aa, Sandaracinus sp.
  misc_feature (1)..(392): tr|A0A2D9T170|A0A2D9T170_9DELT Queuine tRNA-ribosyltran sferase OS=Sandaracinus sp. OX=2024858 GN=tgt PE=3 SV=1
MSALPTEGFSFAVKAEDGDARRGTFTTTTAVIETPTFMPVGTAATVKGLTPNEVEETGARIILANTYHLWLRPSAELIERRGGVKRFMGWPHSLLTDSGGFQVFSLAKLRDIDDDGVTFRSHLDGSKRRMTPEESMRVQRLLGSDVAMVLDVCPPGGADRATTERAMALTTAWARRSLAAPAAEGQGRFVIAQGATYEDLRLRHLEEVSALDADGVALGGFSVGEPIETMYELLNTVAPRMPREKPRYLMGVGTPFDLLHAIGTGVDLFDCVLPTRNARNGQALTWTGRVNLRQARLSEDDRPISADCGCPVCDPERGYSRAYLRHLIKANELLGHRLMTQHNLFFYGELVREARAHIEAGDYHAWARGAAERMREGDEVGPVDPNSMRRPS

SEQ ID NO: 60623 - protein, 381 aa, Sandarakinorhabdus cyanobacteriorum
  misc_feature (1)..(381): tr|A0A255Y8R0|A0A255Y8R0_9SPHN Queuine tRNA-ribosyltran sferase OS=Sandarakinorhabdus cyanobacteriorum OX=19810 98 GN=tgt PE=3 SV=1
MPPRFQFTIHARSGKARTGTIAMRRGEIRTPAFMPVGTAATVKAMRTSEVRAAGADIILGNTYHLMLRPTAERIHRLGGLHRFMGWNRPILTDSGGYQVMSLSSLTKRSEEGVTFASHLDGSRHLMSPERSMEIQRLLGSDIVMAFDELVALPAPREQVAAAMERSMRWAVRSRAAFDAGGEHAAGAALFGIQQGGLDERLRAESATALRAIGFDGYAIGGLAVGEGQPAMFGVLDYATDQLPETAPRYLMGVGKPDDIVGAVVRGVDMFDCVLPTRSGRNGQAFTHDGPLNLRNAAHAEDLRPLDEDCRCPVCHGPDAASRAYLHHLIKAGEMLGAMLLTQHNIGFYQQLMAGLRAAIAAGTLTDFAAGFLARYNARVTR

SEQ ID NO: 60624 - protein, 372 aa, Sandarakinorhabdus sp.
  misc_feature (1)..(372): tr|A0A552UHX6|A0A552UHX6_9SPHN Queuine tRNA-ribosyltran sferase OS=Sandarakinorhabdus sp. LB1R16 OX=2593303 GN= tgt PE=3 SV=1
MTTRFEFSIQARDGAARTGTIAMARGTIRTPAFMPVGTAATVKAMRASEVRAAGADIILGNTYHLMLRPGAERVARLGGLHDFMGWSGPILTDSGGYQVMSLSTLTKRSEEGVAFASHLDGSKHMVTPERSIEIQRLLGSDIVMAFDELVALPAERPVVEAAMQRSMRWAARSRTAFDALGDTGAIFGIQQGGLDERLRAESAAALTGIGFHGYAIGGLAVGEGQEAMFGVLDYATAQLPAEAPRYLMGVGKPDDIVGAVRRGVDMFDCVLPTRSGRNGQAFTRDGPVNLRNAKHAEDKAPLDPGCACPVCNGPSRAYLHHLTKAGEMLGAMLLTEHNIWFYQQLMADLRAAIAEGRLEAFAEGFLARYRQG

SEQ ID NO: 60625 - protein, 376 aa, Sanguibacteroides justesenii
  misc_feature (1)..(376): tr|A0A318N4Z5|A0A318N4Z5_9PORP Queuine tRNA-ribosyltran sferase OS=Sanguibacteroides justesenii OX=1547597 GN=t gt PE=3 SV=1
MNYTLLAKDKHSEARCGLLTTDHGTIETPIFMPVGTVGTVKAVHARELKEDIQAQIILGNTYHLYLRPGTDVLQAAGGLHKFNAWDRPILTDSGGFQVFSLTDSRKITEEGVTFRSHIDGSKHLFTPENVMDVQRKIGADIVMAFDECPPGQSDYVYAKKSLELTQRWLERCVKRFDATEPLYGYRQSLFPIVQGCVYKDLRERAAEHAVSLEREGYAIGGLAVGEPAESMYAMIEVVNRILPKDKPRYLMGVGTPENILEAIALGVDMFDCVMPTRNGRNGMLFTTEGVINIKNKKWEKDFSPIDPLALSFADKDYSKAYLRHLIKADEILGLQICSIHNLSFYLWLVKEARKHILEGDFLAWKTKTVKKVTTRL

SEQ ID NO: 60626 - protein, 376 aa, Sanguibacteroides justesenii
  misc_feature (1)..(376): tr|A0A0C3RJZ1|A0A0C3RJZ1_9PORP Queuine tRNA-ribosyltran sferase OS=Sanguibacteroides justesenii OX=1547597 GN=t gt PE=3 SV=1
MNYTLLAKDKHSEARCGLLTTDHGTIETPIFMPVGTVGTVKAVHARELKEDIQAQIILGNTYHLYLRPGTDVLQAAGGLHKFNAWDRPILTDSGGFQVFSLTDSRKITEEGVTFRSHIDGSKHLFTPENVMDVQRRIGADIVMAFDECPPGQSDYAYAKKSLELTQRWLERCVKRFDATEPLYGYRQSLFPIVQGCVYEDLRERAAEHAVSLEREGYAIGGLAVGEPAESMYAMIEVVNRILPKDKPRYLMGVGTPENILEAIALGVDMFDCVMPTRNGRNGMLFTTEGVINIKNKKWEKDFSPIDPLALSFVDKDYSKAYLRHLIKADEILGLQICSIHNLSFYLWLVKEARKHILEGDFLAWKAKTVKKVTTRL

SEQ ID NO: 60627 - protein, 377 aa, Sapientia aquatica
  misc_feature (1)..(377): tr|A0A4V3AUW5|A0A4V3AUW5_9BURK Queuine tRNA-ribosyltran sferase OS=Sapientia aquatica OX=1549640 GN=tgt PE=3 SV =1
MLDFKLIKKDPNSAARRGQVTVNHGVIQTPIFMPVGTYGSVKAMSPLELKEIEAQIILGNTFHLWLRPGLDVVNKFGGLHKFMGWDQPILTDSGGFQVYSLGAMRKITEEGVKFASPINGERLFLSPEISMQIQRVLNSDIVMQFDECTPYEIDGRPATTEEAAKSMRMSLRWAKRSMDEFNQGENPNALFGIVQGGMFEHLRDESLAGLEELNFHGVAIGGLSVGEPKEDMLRVLQHVGPRLPANKPHYLMGVGTPEDLVAGVQNGIDMFDCVMPTRNARNGWLFTRFGDVKIKNARYKEDTAPLDETCSCYACKNFSRAYLHHLHRTGEILGARLNTIHNLHYYLELMQEMRDALDADRFSTFVVQFHADRARGV

SEQ ID NO: 60628 - protein, 376 aa, Saprospira grandis
  misc_feature (1)..(376): tr|H6L8T5|H6L8T5_SAPGL Queuine tRNA-ribosyltransferase OS=Saprospira grandis (strain Lewin) OX=984262 GN=tgt P E=3 SV=1
MKFELEHSDPQSQARVGTLQTAHGQIPTPIFMPVGTIGTVKGVHQKELSEDIKAKIILGNTYHLYLRPGTELLEKAGGLHQFMNWQGPILTDSGGFQVFSLAHRRKIKEEGATFASHIDGSKHLFSPEGVMDIQRSIGADIIMAFDECTPYPCDYRYAKKSMELTHRWLKRCYTRFKETEPKYGYPQSLFPIVQGSVYKDLRLKSAETVAQYADLGIAIGGLSVGEPKEEMYAMTDLVCSQLPTDKPRYLMGVGTPANILECIALGVDMFDCVMPTRNARHGLIFTRKGKLNIKNKKWKDDFSPIDEDAPNPTSRQHTKAYLRHLFTVNELLGMQIATLHNLSFYLELVREARERILDGSFRAWKDELVPILEQKR

SEQ ID NO: 60629 - protein, 376 aa, Saprospira grandis
  misc_feature (1)..(376): tr|J0PBQ8|J0PBQ8_9BACT Queuine tRNA-ribosyltransferase OS=Saprospira grandis DSM 2844 OX=694433 GN=tgt PE=3 SV =1
MKFELEHSDPHSKARVGTLQTAHGQIPTPIFMPVGTIGTVKGVHQKELSEDIKAKIILGNTYHLYLRPGSELLEKAGGLHQFMNWQGPILTDSGGFQVFSLAHRRKIKEEGATFASHIDGSKHLFSPEGVMDIQRSIGADIIMAFDECTPYPCDYRYAKKSMELTHRWLKRCYTRFKETEPKYGYPQSLFPIIQGSVYKDLRLKSAETVVQYADLGIAIGGLSVGEPKEEMYAMTDLVCSQLPSDKPRYLMGVGTPANILECIALGVDMFDCVMPTRNARHGLIFTRKGKLNIKNKKWKDDFSPIDEEAPNPTSRQHTKAYLRHLFTVNELLGMQIATLHNLSFYLELVREARERILDGSFRAWKDELVPILEQKR

SEQ ID NO: 60630 - protein, 376 aa, Saprospiraceae bacterium
  misc_feature (1)..(376): tr|A0A521V9P7|A0A521V9P7_9BACT Queuine tRNA-ribosyltran sferase OS=Saprospiraceae bacterium OX=2202734 GN=tgt P E=3 SV=1
MDFTLQHTDPTSSARAGLIETAHGPIETPIFMPVGTVGAVRAIHQHELEQQIQAQIILGNTYHLYLRPGTEILQKAGGLHKFTGWNHPTLTDSGGYQVYSLSNQRKIKEEGVTFQSHLDGSKHFISPERAVDIQREIGADIIMAFDECTPYPCEYDYARKSMEMTHRWLKRCCDRFDETQGLYGYKQALFPIVQGSIYKDLRAESAETIASFGREGNAIGGLSVGEPAEKMYEMTELVCSILPKDKPRYLMGVGTPVNILEGIALGVDMFDCVLPTRNARHGMLYTAQGIINIKNNKWKDDFGPIDEDSPSHTSRTHSKAYLRHLIYSKEYLGAQVASLHNLSFFLWLVKEARQHIIAGDFPTWKKEMVEKMGRRI

SEQ ID NO: 60631 - protein, 377 aa, Saprospirales bacterium
  misc_feature (1)..(377): tr|A0A1Z9NU86|A0A1Z9NU86_9BACT Queuine tRNA-ribosyltran sferase OS=Saprospirales bacterium TMED214 OX=1986670 G N=tgt PE=3 SV=1
MSQFEFTLKHRDAATSARRGVFLTPHGPVQTPGFMPVGTQGTVKGVTIDQVAATGAHMILGNTYHLSLRPGHDTVRRLGGLHGMSGWQGPILTDSGGFQIFSLKAISQITEQEATFRSHIDGAIVRLTPEHSIEIQEALGSDVAMVLDHVIALPATHDEVEDAMARSIRWAKRCLEASKRDDQAKFAIVQGGLDAELRVQCARELSAMDFNGYAVGGLSVGEAPTEMYRITAATCPSLPEHKPRYLMGVGRPIDLLESIARGIDLFDCVMPTRNGRNGLAFTDEGNLKLRNAIHREDRRPIEEDCPCLACRHSRGYIRHLFVSGEMLGPILLSIHNLTYYQRVMSEARVAIESDRFNEFLAEKKQGWGGTPQNSSAC

SEQ ID NO: 60632 - protein, 376 aa, Saprospirales bacterium
  misc_feature (1)..(376): tr|A0A350C5S5|A0A350C5S5_9BACT Queuine tRNA-ribosyltran sferase OS=Saprospirales bacterium OX=2026790 GN=tgt PE =3 SV=1
MKFNITHKDHGSSARAGILQTGHGEIQTPIFMPVGTQGTVKSVHQEELKTTINADIILGNTYHLYLRPHTDILQKAGGLHKFINWERPILTDSGGYQVYSLKGMRKITEKGVKFRSHIDGSMHFFSPESVMDIQREIGADIIMAFDECTPYPCDYKYARRSMHMTHRWLERCITRFNETDPIYDYEQTLAPIVQGSTYTDLREMSAEYIAGTNMPINAIGGLSVGEPAEELYAMTEVVTNILPEDKPRYLMGVGLPENILECIALGIDMFDCVLPTRNARHGMLYTKNGVINMKNAKWKEDFSPIDPDSEAATSREHNKAYLRHLFKVKEYLAMQIATINNLSFYMWLVRTAREKIQEGTFTQWKNVILPVITQRL

SEQ ID NO: 60633 - protein, 378 aa, Unknown
  misc_feature (1)..(378): tr|A0A2A5YBY5|A0A2A5YBY5_9PROT Queuine tRNA-ribosyltran sferase OS=SAR116 cluster bacterium MED-G05 OX=1986234 GN=tgt PE=3 SV=1
MPDFSFSLKTTDGAARRGRLKTAWGEVETPVFMPVGTAATVKGMTVDSVRSTGASIILANTYHLMLRPGAERVARLGGVRKMMGWDGPLLTDSGGFQVMSLGPLRKLDEDGVTFKSHLDGSKHRLTPERSTEIQHLLDATITMAFDECTPFPATESAAAESMRLSMRWAKRSRSAFVARPGYGQFGIVQGSVFRDLRAESVAALEEIDFEGYAIGGLAVGEGQEAMFEALAFTTPLMRADRPRYLMGVGKPADLVGGVARGVDMFDCVLPTRSGRTGQAFTRRGPVNIKNARHAEDQRPLDEECQCPACAHYSRAYLHHLFKADEVLGLMLLSWHNIQYYQDLMAGMRAAIEAGSFAAFEADFHAGQARGDIEPVGSG

SEQ ID NO: 60634 - protein, 382 aa, Unknown
  misc_feature (1)..(382): tr|G5ZVJ9|G5ZVJ9_9PROT Queuine tRNA-ribosyltransferase OS=SAR116 cluster alpha proteobacterium HIMB100 OX=9099 43 GN=tgt PE=3 SV=1
MANHSDSRPDFGFTLLGTDGAARRGRVTTGFGVVETPAFMPVGTAASVKAMMPNQVASTGAQIILSNTYHLMLRPGPERVERLGGVRALMGWDGPLLTDSGGFQVMSLGPLRKITEQGVSFKSHLDGTVYDLTPERSIQIQHMLDATITMAFDECTPFPATHDEAAASMQLSMRWAERSRAAFVVRTGYGQFGIVQGSVYEDLRHGSIKALTDIGFEGYAIGGLAVGEGQKAMFDTLDVTCPAMPDDKPRYLMGVGKPADIVGAVRRGVDMFDCVMPTRSGRTAQGFTRWGPVNIRNARHAEDLRPLDETCSCPACTRFSRAYLHHLFKADEIQGLMLLTWHNLQHYQDLMAGLRSAIDAGRLDDFAAAFDAEQARGDIPPL

SEQ ID NO: 60635 - protein, 391 aa, Unknown
  misc_feature (1)..(391): tr|A0A2N0L5S7|A0A2N0L5S7_9CHLR Queuine tRNA-ribosyltran sferase OS=SAR202 cluster bacterium Io17-Chloro-G3 OX=1 926612 GN=tgt PE=3 SV=1
MKNRENTTSFWLENVDEKARAGRLVTPRGCVDTPLFMPVATQGSVKALDPEDLERVGAGLVLGNAYHLYLRPGVEIISNLGGLHRFMGWNGPILTDSGGFQGFSLKHLREIDENGITFRSHIDGSTHVITPESIIDVQEKLCSDIMMPLDVCLPHDADEELVSAGISRTNRWMERCIGSRTNTNQVLFGIVQGGLFKDLRRQSVAFMNNLDMPGYSIGGLSVGESKSEMYEITSLTAGLLPEKKPRYLMGVGAPEDIVECVARGIDMFDCVLPTRVARNGALYTRNGRINITAAKFKNFDGPVDSGCHCYCCERFSAAYLNHLFKAREYLAYRLASLHNLSFIFQLMVEIRSSILEGEFANYRNCFWSKYRVSDESVRTQQRKKWESSDRT

SEQ ID NO: 60636 - protein, 392 aa, Unknown
  misc_feature (1)..(392): tr|A0A2N0KH96|A0A2N0KH96_9CHLR Queuine tRNA-ribosyltran sferase OS=SAR202 cluster bacterium Casp-Chloro-G3 OX=1 926605 GN=tgt PE=3 SV=1
MAQQFSFNLKKTQGRARLGEFTTPHGRVATPAFMPVATQATVKTLTPDEVVSVGAEIVLSNAYHLYLRPGVELVQRLGGLHQFMGWSRPILTDSGGFQAFSMGALKSVDESGIRFRSHIDGSEHNFTPELATRNQEGIGADIIMCLDQCIAFGSARDEVVRAMERTHRWAEICHQTHSTAPNADAQALFGIIQGGTFPDLREESAKFITGIPFDGYAIGGLAVGESKDQMYEVTRQVADQLPVAKPRYLMGVGSPEDLVESVAGGVDMCDCVLPTRVARNGALFTQQGRVNITNRRFADQDAPLEPDCDCYTCQRFTAAYLWHLFKAREILGLRLASLHNLRFILRLMDNIRQAIREDRFDQFRQNFWSSYRPTDENTRRQQKEKWLNAREG

SEQ ID NO: 60637 - protein, 381 aa, Unknown
  misc_feature (1)..(381): tr|A0A2A4T8U4|A0A2A4T8U4_9DELT Queuine tRNA-ribosyltran sferase OS=SAR324 cluster bacterium OX=2024889 GN=tgt P E=3 SV=1
MNPKSFSFKLHSVDPSGARRGTMQTPHGKIETPIFMPVGTAAAMKALTVQQLKDTKTQIVLSNAYHLNNQPGADMVEKFGGLHKFMGWDGPMLTDSGGYQVFSLPGKVIDDDGVTFKYAKGGKSTRLSPEISIDIQNRLGADIIMAFDECVEFPATYEYTKRSLKVTSEWARRCKAAHKREDQALFGISQGGLYKDLREEGLKPLIDLDLPGYAVGGLSVGEGLDNMKMALDFTTHMMPVNKPRYLMGIGTPEDILEAVERGIDMMDCVMPTKYARSATLFTNVGKLRLTNREFRNDKFQLDTGCSCYTCENFTRAYLHHLYTSNEILGAILGSIHNVSFYIELMTRSRKAIEEKRFSSFKQDFLALYNRKVKSKKPKKKR

SEQ ID NO: 60638 - protein, 376 aa, Unknown
  misc_feature (1)..(376): tr|A0A432GLW3|A0A432GLW3_9DELT Queuine tRNA-ribosyltran sferase OS=SAR324 cluster bacterium OX=2024889 GN=tgt P E=3 SV=1
MIQFELEAKDHNSRAGILKTLHGTIHTPVFMPVGTLGTVKALTPEEVSELGAEIILGNTYHLHLRPGDELVRKLGGLHHFMNWDGPILTDSGGFQIFSLAKLLKLDQSGVVIRSHIDGSKITLTPEISIAIQQNLGSTIMMCLDQCLELPATRQEIERSIALTTKWAQRSKDASSQGSGVSGEQALFGIVQGGGELNLREQSLEQMVNIGFDGYAIGGLSVGETKEEMYSVVHHIAVKMPAQKPRYLMGVGDPEDLLEGIEAGIDMFDCVMPTRNARNGSLFTSHGKISIKQNQYKEDPAPLDPDCACSTCKNYSRAYLRHLFKTNEILGMRLNTYHNLFFYISLIKQARNAIKEKRFPNFKKTFLQKYRSGIEGV

SEQ ID NO: 60639 - protein, 370 aa, Unknown
  misc_feature (1)..(370): tr|J4V1C2|J4V1C2_9GAMM Queuine tRNA-ribosyltransferase OS=SAR86 cluster bacterium SAR86B OX=1123867 GN=tgt PE= 3 SV=1
MFEVINTSEYARTGLLKLRHGSIQTPAFMPVGTNGTVKSLTNDDLIETGAEIILGNTYHLMLRPGDELIKELGGLNNFINWSKPILTDSGGFQVWSLGDLVKITEEGVSFKSPYDGRNIFIRPEDSIQIQQNLDSDIIMVFDECTNYPATHEEAKSSMELSMRWAKRCKDFHTSDGKLFGIVQGGMYKDLRSSSLEKLNDIGFDGIAIGGLSVGESKEEKTEILEHLAPELPQNLPHYLMGVGKPEDIVEGVRYGIDMFDCVIPTRNARNGQLFTSEGVVNIRNAEHKKSTLPIDPNCKCKVCKNYSRAYLNHLDRTNEILGSMLSSYHNIFYYQNLMQDIRDSIKNNKFANFVKDFYNKRDLEMPKGPV

SEQ ID NO: 60640 - protein, 372 aa, Unknown
  misc_feature (1)..(372): tr|A0A368BMJ3|A0A368BMJ3_9GAMM Queuine tRNA-ribosyltran sferase OS=SAR86 cluster bacterium OX=2030880 GN=tgt PE =3 SV=1
MSFKIINQDGYARRGVLTTKTSEIQTPVFMPVGTYGTVKAMTPLQLKEIGFEIILGNAFHLNLRPGLDVIEKFEGLHKFMGWDRSVLTDSGGFQVWSLGDLRKIHANGVEFKSPLDGSMMNITPEDSIKIQLKLDADIVMIFDECTPYPSTHSQALESMQLTHRWAESSKKYFDKMHRNNLIFGIVQGGKYLDLREESLKHMMSLNFDGIAIGGLSVGEPKSIKTKVLQALADKLPSTLPHYVMGVGTPEELVEGVRYGIDMFDCVIPTRNARNGFIYTTNGILKIRNSKHKNSTLPVDQDCDCYTCSNFSRGYLHHLDKCNEILANTLLTICNLAHFYKLMKQIQGAIEQNTFEEFVDLFYDMRGLKKPKL

SEQ ID NO: 60641 - protein, 370 aa, Unknown
  misc_feature (1)..(370): tr|A0A0R2W2P5|A0A0R2W2P5_9GAMM Queuine tRNA-ribosyltran sferase OS=SAR92 bacterium BACL16 MAG-120619-bin48 OX=1 655625 GN=tgt PE=3 SV=1
MTFDVSATDGKARRGEISFPRGKVQTPAFMPVGTYGTVKGMLPKDIADIGAEIILGNTFHLMLRPGTEVVKAHGDLHNFIQWQGPILTDSGGFQVFSLGDMRKISEAGVKFQSPIDGSPVFIDPETSMQVQRDLGSDIVMIFDECTPHPATEQQARDSMQLSLRWAARSKAAHGDNPSALFGIVQGGMYESLRDESLQGLVDIGFDGYAIGGLSVGEPKEDMMRVLDHLAYQMPADRPRYLMGVGKPEDLVEGVRRGIDMFDCVMPTRNARNGHLFTSTGVIKIRNARHRYDTGPLDSQCDCYTCRNFSRAYLHHLEKCGEMLSAQLNTIHNLRYYQTLMAGLREAITEGRLDAFADDFYAMRAPTTSAD

SEQ ID NO: 60642 - protein, 373 aa, Unknown
  misc_feature (1)..(373): tr|A0A0R2UA07|A0A0R2UA07_9GAMM Queuine tRNA-ribosyltran sferase OS=SAR92 bacterium BACL26 MAG-121220-bin70 OX=1 655626 GN=tgt PE=3 SV=1
MQFKVSATDGKARRGEMQFPRGTVQTPAFMPVGTYGTVKGMLPRDIKEIGAEMILGNTFHLMLRPGTEVIKGHGDLHDFTQWQGPILTDSGGFQVFSLGDMRKISEQGVKFQSPIDGSPVFLDPETSMQVQADLGADVVMIFDECTPYPASEKEAEESMQLSLRWAKRSKDAHGDNPSALFGIVQGGMYESLRDESLAGLVDIGFDGYAIGGLSVGEPKEDMVRVLDYLADTMPADRPRYLMGVGKPADLVEGVRRGIDMFDCVMPTRNARNGHLFTSAGVIKIRNARHRYDTGPLDADCDCYTCTNFSRGYLHHLEKCGEMLSAQLNTIHNLRYYQTLMAGLREAIAEGELEAFADKFYLKQAAGDSRGLNP

SEQ ID NO: 60643 - protein, 373 aa, Unknown
  misc_feature (1)..(373): tr|A0A520MD78|A0A520MD78_9GAMM Queuine tRNA-ribosyltran sferase OS=SAR92 clade bacterium OX=2315479 GN=tgt PE=3 SV=1
MQFKVSATDGKARRGEMQFPRGAVQTPAFMPVGTYGTVKGMLPKDIEEIGAEMILGNTFHLMLRPGTEVVKAHGDLHDFIQWQGPILTDSGGFQVFSLGDMRKITEEGVKFKSPIDGSPVFIDPETSMQVQRDLGSDVVMIFDECTPYPATEKEAEDSMQLSLRWAQRSKAAHGNNPSALFGIVQGGMYESLRDISLASLVDIDFDGYAIGGLSVGEPKEDMLRVLDHLADTMPADKPRYLMGVGKPADLVEGVRRGIDMFDCVMPTRNARNGHLFTSTGVIKIRNAKHRHDTQPLDSECDCYTCKNFSRGYLHHLEKCGEMLSAQLNTIHNLRFYQTLMAGLRDAIAQGELDSFADEFYRKQAIGDSGGLNP

SEQ ID NO: 60644 - protein, 367 aa, Unknown
  misc_feature (1)..(367): tr|A0A520LJV6|A0A520LJV6_9GAMM Queuine tRNA-ribosyltran sferase OS=SAR92 clade bacterium OX=2315479 GN=tgt PE=3 SV=1
MKFEISKTDGHARTGHLIFDKGIVRTPAFMPVGTYGTVKSLTPSDILRSGADIVLGNTFHLMLRPGTEIIKKHGSLHNFMCWEKPILTDSGGFQVFSLGNMRQITEDGVIFKSPIDGSTVSLDPEKSMEVQRALGSDIVMIFDDCTPFPATKKQAMESMHLSLRWAERSKVAHAGNPSALFGIVQGGMHEDLRGESLEQLTAIGFDGYAIGGLSVGEPKKDMQRILNAIGPKMPENKPRYLMGVGKPEDIIRAVQKGVDMFDCVMPTRNARNGHLFTSEGIIRIRNSVYKDDLNPLDPECDCYTCSNFSRSYLHHLEKCKEMLGPQLNTIHNLRFYQNLMSQIRGAIAEGNLDSFANNYFEKHSITI

SEQ ID NO: 60645 - protein, 379 aa, Sarcina sp.
  misc_feature (1)..(379): tr|A0A1G9CS76|A0A1G9CS76_9CLOT Queuine tRNA-ribosyltran sferase OS=Sarcina sp. DSM 11001 OX=1798184 GN=tgt PE=3 SV=1
MYKILKKEGSAKRAHMTTVHGVIETPVFMNVATAGAIKGGLSADDLRSIRTQVALCNTYHLHVRPGDELVHRRGGIHRFMRWDRPILTDSGGFQVFSLADLRSIKEEGVTFRCHIDGHKIFMGPEESMRIQSNLGSTIAMAFDECPPALAEREYVTHSVDRTTRWLERCKKEMQRLNQLEDTVNPGQLLFGINQGAIYGDIRIDHAKRITEMDLDGYAVGGLAVGETHEQMYDMLDQTVPWLPADKPTYLMGVGTPENILEGVARGIDFFDCVYPSRNGRHGNLYTHHGTVHIKSARYAEDDRPIEEGCGCPVCRAGYSRAYLRHLYKAQEALGLRMGVMHNLYYYNHLMEEIRQALDEGRFEAFKKAAIEEMHVGENA

SEQ ID NO: 60646 - protein, 440 aa, Scardovia inopinata; identical to SEQ ID NO: 58790
  misc_feature (1)..(440): tr|W5IHS0|W5IHS0_SCAIO Queuine tRNA-ribosyltransferase OS=Scardovia inopinata F0304 OX=641146 GN=tgt PE=3 SV=1

SEQ ID NO: 60647 - protein, 428 aa, Scardovia wiggsiae
  misc_feature (1)..(428): tr|J0X095|J0X095_9BIFI Queuine tRNA-ribosyltransferase OS=Scardovia wiggsiae F0424 OX=857290 GN=tgt PE=3 SV=1
MMKNEKTAKLPVPRGARPGQPGDRSAFGFEISTQLPGHHGRTGMIRTPHGDIRTPAFVPVATQGTMKAVLPEQMEALGAQCMLSNAFHLFERPGEDILDAAGGLNEFMHWDKPTYTDSGGFQVLSLGAGFKKTLAMDTEGKKSDDVIAKGKNRLAFVDEDGVTFKSPLNGAQKRFSAEISMQIQHKIGADIMFAFDELTTLMNTRHYQEKSVERTFRWAKRCIAEHEKLTAERTGKPYQALFGVVQGANYEDLRRKAASQIGSLGFDGFGIGGAIEKRIIGDICSWICDELPEGKPRHVLGIAAVDDIFACVENGGDTFDCVAPARTARNGAVYTRDGRWNVKRSAMRNDFRPIEDGCDCYTCKNYSRAYVCHLLHAGEMAGATLATIHNERFFIRLLDDIRASIDGGYFTEFKNDTLSRFYAHGSRG

SEQ ID NO: 60648 - protein, 451 aa, Schaalia canis
  misc_feature (1)..(451): tr|A0A3P1SFQ3|A0A3P1SFQ3_9ACTO Queuine tRNA-ribosyltran sferase OS=Schaalia canis OX=100469 GN=tgt PE=3 SV=1
MNAHWIEAPLAETEKTSAAASSFFPVLEAPAVTADRGFTLGERLDTGAGLGRTGVIHTAHGDIATPAFIPVGTKANVKALVPEMVAGLGAQAVLANAYHLYLQPGSDLVDAAGGLGSFMGWRGPTYTDSGGFQVLSLGAGFKKVLSEEFSGNADTTNEALLRQVVKASRAVVDDDGVIFHSHIDGTAHRFNPEVSMGIQHELGSDIMFAFDELTSLLHPRSYQEESLDRTEAWAVRCLREHKRLTEERSHRPYQQLWGVVQGAQYEDLRRRAARTLAQMEVDGQRFDGFGVGGALEKENLGTIVSWVCEELPEDLPRHLLGISEPDDFFRAVEAGADTFDCVNPSRVARNGSIYTPDGRYNITNARFRSDFTPLVEGCGCYTCTHFTRAYVRHLFKAKEILASTLATIHNEWFTVRLVDGIRRSIAEGTYESFRDEMLGRYRVGALAAKRG

SEQ ID NO: 60649 - protein, 437 aa, Schaalia cardiffensis
  misc_feature (1)..(437): tr|N6X2E3|N6X2E3_9ACTO Queuine tRNA-ribosyltransferase OS=Schaalia cardiffensis F0333 OX=888050 GN=tgt PE=3 SV =1
MNTHWLATAPSPLPASGSNLPTRDRGFDLGTRLNAGPGLGRTGVLHTAHGEIHTPAFIPVGTKANVKALVPEMLAALGAQAVLANAYHLYLQPGSDLVDEAGGLGSFMNWPGPTYTDSGGFQVLSLGAGFKKVLSQEFSGSANTDDPRLHMQAVKASEAVVDEDGVVFRSHIDGTRHRFTAEVSMRIQHELGSDIMFSFDELTSLLHPRSYQEESLERTHAWARRCLRAHARLTEERVDKPYQQLWGVIQGAQYEDLRRKAARTMAEMDEGGWRFDGFGLGGALEKENLGTILTWVSEELGEDRPRHLLGISEPEDFFSGVEAGADTFDCVNPSRVARNAAIYSPDGRFNVTNARFKRDFSPLVEGCGCYTCTHYSAAYVHHLFKAKEMLASTLATIHNEWFTVRLVDAIRDSIDNGDYEAFRDDMLGRYTSKGSPA

SEQ ID NO: 60650 - protein, 443 aa, Schaalia georgiae
  misc_feature (1)..(443): tr|J1HYX7|J1HYX7_9ACTO Queuine tRNA-ribosyltransferase OS=Schaalia georgiae F0490 OX=1125717 GN=tgt PE=3 SV=1
MSSDWLAAPPVPFALPAAPPSGWRDRGFQVGTHLASGSGLGRTGTIHTAHGTIRTPAFIPVGTKANVKALTPEMVEALGAQAVLANAYHLYLRPGSDVVDEAGGFARFMNWRGPTYTDSGGFQVLSLGAGFKKVLSQEFSGAADPNDPRLSAQAVKASNAVVDDDGVVFSSHIDGTKHRFTPEVSMRIQHQLGADIMFAFDELTSLLHPRSYQVESLERTHAWARRCLVEHARLTEERRATPYQQLWGVVQGAQWEDLRRRAARTMAGMEADGQRFDGFGVGGALEKEHLGTIVAWVCEELGEDRPRHLLGISEPEDLFAGVEAGADTFDCVNPSRVARNAAIYTPTGRYNITNARFKRDFSPLAPGCGCYTCTNHTRAYVHHLFKAKEILSSTLATIHNEWFTLRLVDAMRDSIERGCFEDFRDDMLGRYRSGGGREGRSAQ

SEQ ID NO: 60651 - protein, 443 aa, Schaalia georgiae
  misc_feature (1)..(443): tr|A0A3R8QVA5|A0A3R8QVA5_9ACTO Queuine tRNA-ribosyltran sferase OS=Schaalia georgiae OX=52768 GN=tgt PE=3 SV=1
MSSDWLAAPPVPLALPAAPPSGWRDRGFQVGTRLASGSGLGRTGTIHTAHGTIRTPAFIPVGTKANVKALTPEMVEALGAQAVLANAYHLYLRPGSDVVDEAGGFARFMNWRGPTYTDSGGFQVLSLGAGFKKVLSQEFSGAADPNDPRLSAQAVKASNAVVDDDGVVFSSHIDGTKHRFTPEVSMRIQHQLGADIMFAFDELTSLLHPRSYQVESLERTHAWARRCLVEHARLTEERRAMPYQQLWGVVQGAQWEDLRRRAARTMAGMEADGQRFDGFGVGGALEKERLGTIVAWVCEELGEDRPRHLLGISEPEDLFAGVEAGADTFDCVNPSRVARNAAIYTPTGRYNITNARFKRDFSPLAPGCGCYTCTNHTRAYVHHLFKAKEILSSTLATIHNEWFTLRLVDAVRDSIERGCFEDFRDDMLGRYRSGGGREGRSAQ

SEQ ID NO: 60652 - protein, 441 aa, Schaalia meyeri
  misc_feature (1)..(441): tr|A0A1H1KRT6|A0A1H1KRT6_9ACTO Queuine tRNA-ribosyltran sferase OS=Schaalia meyeri OX=52773 GN=tgt PE=3 SV=1
MNANWLQAPSPDAVAAFDATAASGAHSPDRGFEINARLHTNGGLGRTGIIRTAHGDIRTPAFIPVGTKANVKALTPEMVRSLGAQAVLANAYHLYLQPGSDIIDEAGGFAAFMNWAGPTYTDSGGFQVLSLGAGFKKVLSQEFSGQADPNDPALNAQAIKASNAVVDDDGVVFSSHIDGSKHRFNPEVSMGIQHQLGSDIMFAFDELTSLLHPRSYQVESLERTHAWAARCLAEHKRLTEQRAGKPYQQLWGVIQGARWEDLRRQAARTMARMEVDGQRFDGFGVGGALEKENLGTIVSWVCEELGEDRPRHLLGISEPEDLFEGVAAGADTFDCVNPSRVARNAAIYTPDGRFNITNARFKRDFTPLVDGCGCYTCTHYTRAYMHHLFKAKEILSATLATIHNEWFTLRLVDGIRASIEDGCFDEFRSDMLGRYLAGRRH

SEQ ID NO: 60653 - protein, 441 aa, Schaalia odontolytica
  misc_feature (1)..(441): tr|D4U1M2|D4U1M2_9ACTO Queuine tRNA-ribosyltransferase OS=Schaalia odontolytica F0309 OX=649742 GN=tgt PE=3 SV =1
MNDNWLSAPTPEQLTPFEPPASEGAHHPDRGFTIGHRMESHGGLGRTGVIHTAHGTIATPAFIPVGTKANVKALTPEMVRSLGAQAVLANAYHLYLQPGSDIVDEAGGFGPFMNWSGPTYTDSGGFQVLSLGAGFKKVLSQEFSGQADPTDPKVQMQAIKASNAVVDDDGVIFSSHIDGTKHRFNPEVSMGIQHQLGSDIMFAFDELTSLLHPRSYQEESLARTHAWAARCLAEHKRLTEERSHKPYQQLWGVIQGAQWEDLRRQAARTMADMEVDGQRFDGFGVGGALEKENLGTIVSWVCEELGEDRPRHLLGISEPEDLFAGVAAGADTFDCVNPSRVARNAAIYTPDGRFNITNARFKRDFTPLVEGCGCYTCTHYTRAYIHHLFKAKEILSATLATIHNEWFTLRLVDGIRASIIDGCFDQFRSDMLGRYEAGRRR

SEQ ID NO: 60654 - protein, 441 aa, Schaalia odontolytica
  misc_feature (1)..(441): tr|A0A2X0U354|A0A2X0U354_9ACTO Queuine tRNA-ribosyltran sferase OS=Schaalia odontolytica OX=1660 GN=tgt PE=3 SV =1
MNDNWLCAPAPEQLTPFEAPASSGGHSPDRGFTIGTRLDTHGCLGRTGVVHTAHGDIRTPAFIPVGTKANVKALTPEMVRGLGAQAVLANAYHLYLQPGSDIVDDAGGFAQFMNWSGPTFTDSGGFQVLSLGAGFKKVLSQEFSGKADPTDPAVQMQAIKASHAVVDNDGVIFSSHIDGTKHRFNPEVSMGIQHQLGSDIMFAFDELTSLLHPRSYQEESLERTHAWAARCLSEHKRLTEERSHKPYQQLWGVIQGAQWEDLRRQAARTMADMDVEGQRFDGFGVGGALEKENLGTIVSWVCEELGEDRPRHLLGISEPEDLFAGVAAGADTFDCVNPSRVARNAAIYSPDGRFNITNARFKRDFTPLVEGCECYTCTHYTRAYLHHLFKAKEILSATLATIHNEWFTLRLVDSIRDSIEEGCFDEFRSDMLGRYEAGRRR

SEQ ID NO: 60655 - protein, 448 aa, Schaalia radingae
  misc_feature (1)..(448): tr|A0A1H2ELP9|A0A1H2ELP9_9ACTO Queuine tRNA-ribosyltran sferase OS=Schaalia radingae OX=131110 GN=tgt PE=3 SV=1
MTDAPQWIALPSRPHPEITPQPGQADKVSEGGVGFEVTYRHDSGMGLSRTGVITTPHGQIHTPAFIPVGTKANVKALVPEMVANLGGQAVLANAYHLYLQPGSDIVDRAGGFGAFMNWHGPTFTDSGGFQVLSLGAGFKKVLTQEFSGVYKEASAAEQDWMFRQAVKSSRAVVDSDGVVFQSHIDGSHHRFTPEKSMQIQHQLGADIMFAFDELTSLLHPRWYQEESLERTHEWARRCLAEHERLTRERADHPYQQLFGVVQGAQYEDLRRCAARTLAQMEVDGRTFDGFGVGGALEKENLGRIVSWVCEELPDDRPRHLLGISEPDDLFAGVEAGADTFDCVNPSRVARNAAIYTPDGRFNVTNARFADDFTPLVDGCGCYTCQHYTRAYVRHLFKAREILASTLATIHNEWFTVHLVDAIRGSIQSGDFDAFRDEMLGRYHHADQR

SEQ ID NO: 60656 - protein, 440 aa, Schaalia turicensis
  misc_feature (1)..(440): tr|A0A2I1I523|A0A2I1I523_9ACTO Queuine tRNA-ribosyltran sferase OS=Schaalia turicensis OX=131111 GN=tgt PE=3 SV =1
MSEQWLAAPPSNECPLGAQPGSLDRGFNVGSRLESGRGLGRTGILHTAHGDIRTPAFIPVGTKANVKALVPEMVADLGAQAVLANAYHLYLQPGSNLVDEAGGLGKFMNWPGPTYTDSGGFQVLSLGAGFKKVLSQEFSGAADPNDPKLHMQAVKASTAVVDDDGVVFSSHIDGTKHRFTAEVSMNIQHQLGSDIMFAFDELTSLLHPRSYQEMSLERTHEWARRCLREHARLTEVRADKPYQQLWGVIQGAQYEDLRRLAARTMNDMDEDGTRFDGFGIGGALEKENLGTIVSWVSEELDEDRPRHLLGISEPDDFFRGVEAGADTFDCVNPSRVARNAAIYSPNGRFNITNARFKRDFNPMVEGCGCYTCTHYSAAYVHHLFKAHEILASTLATIHNEWFTVRLVDTIRDSIDNGNFEAFRADMLGKYAGGSTRARHS

SEQ ID NO: 60657 - protein, 440 aa, Schaalia turicensis
  misc_feature (1)..(440): tr|K0ZF85|K0ZF85_9ACTO Queuine tRNA-ribosyltransferase OS=Schaalia turicensis ACS-279-V-Col4 OX=883077 GN=tgt PE=3 SV=1
MSEQWLAAPPSDERPLGAKPGSPDRGFDVGSRLESGRGLGRTGILHTAHGDIRTPAFIPVGTKANVKALVPEMVADLGAQAVLANAYHLYLQPGSDLVDEAGGLGEFMNWPGPTYTDSGGFQVLSLGAGFKKVLSQEFSGAADPNDPKLHMQAVKASTAVVDDDGVVFSSHIDGTKHRFTAEVSMNIQHQLGSDIMFAFDELTSLLHPRSYQETSLERTHQWARRCLREHARLTKVRANKPYQQLWGVIQGAQYEDLRRLAARTMNDMDEDGTRFDGFGIGGALEKENLGTIVSWVSEELDEDRPRHLLGISEPDDFFRGVEAGADTFDCVNPSRVARNAAIYSPNGRFNITNARFKRDFNPMVEGCGCYTCTHYSAAYVHHLFKAHEILASTLATIHNEWFTVRLVDAIRDSIDNGNFEVFRADMLGKYAGGSTRVVHS

SEQ ID NO: 60658 - protein, 392 aa, Schlegelella thermodepolymerans
  misc_feature (1)..(392): tr|A0A2S5T893|A0A2S5T893_9BURK Queuine tRNA-ribosyltran sferase OS=Schlegelella thermodepolymerans OX=215580 GN =tgt PE=3 SV=1
MTTTDTAAPVLSRGLHFEILKTEGHARRGRLTLNHGVVETPIFMPVGTYGTVKGVMPRSLEEMGAQIILGNTFHLWLRPGLDVLRQFGGLHRFEGWHKPILTDSGGFQVWSLGEMRKISEEGVKFASPVNGDKLFLTPEVSMQIQRVLNSDIVMQFDECTPYIMGDKASGHVTTEKEARASMELSLRWAKRCLAEFERLENPNALFGIVQGGMYTHLRDESLAGLEALDFPGLAVGGLSVGEPKEEMLRVLSHIGPKLPAHKPHYLMGVGTPEDLVDGVASGIDMFDCVMPTRNARNGHLFTRYGDLRLRNSRYKTDERPVDETCTCYTCRHFSRAYLHHLDRCGEMLGPMLTSIHNLHYYLNLMREIREALDAGNFAGFRRQFAQDRARGV

SEQ ID NO: 60659 - protein, 377 aa, Schleiferia sp.
  misc_feature (1)..(377): tr|A0A401XL62|A0A401XL62_9FLAO Queuine tRNA-ribosyltran sferase OS=Schleiferia sp. LA OX=2173829 GN=tgt PE=3 SV =1
MLTFQLQATDPHSKARAGCITTDHGQIETPIFMPVGTAGTVKATHQYELTDDIRAQIILGNTYHLYLRPGTEILKKAGGLHRFIGWQRPILTDSGGYQVFSLADSRKLTEEGARFKSHIDGSYHLFTPESVIDIQRAIGADIIMAFDECPPWPCDERYAEESMHLTHRWLDRCIARMQTTEPLYGYGQSVFPIVQGSTIARLRRESAEYIAAKDMPGNAIGGLSVGEPPELMYEMTDLVTDILPAHKPRYLMGVGTPENILNAIALGVDMFDCVMPTRNGRNGMLFTTEGIINIKNRKWAEDFSPIDPAGISRVDTLYTKAYLRHLFVADEYLARQIASVHNLAFYLWLVREARSHILAGTFPDWKRTILPIITRRL

SEQ ID NO: 60660 - protein, 377 aa, Schleiferia thermophila
  misc_feature (1)..(377): tr|A0A369A158|A0A369A158_9FLAO Queuine tRNA-ribosyltran sferase OS=Schleiferia thermophila OX=884107 GN=tgt PE= 3 SV=1
MLRFELEAMDPGSKARAGRIATDHGVIETPIFMPVGTVGSVKAVHQYELVDDVDAKIILGNTYHLYLRPGTDVLKKAGGLHRFMGWERPILTDSGGYQVFSLAENRKLTEEGARFKSHIDGSYHMFTPEGVMDIQRSIGADVVMAFDECPPWPCDERYVEESMHLTHRWLERCIRRFDETPSLYGYEQSLFGIVQGGTVSRLRKESAEFVASKNLSGNAIGGLSVGEPAELMYEMTDLVTDILPADRPRYLMGVGTPENILNSIALGVDMFDCVMPTRNGRNGMLFTTEGIINIKNRRWADDFSPIDPAGISRVDFQYSKAYLRHLFVADEFLGRQIASVHNLAFYLWLVREARRHIVQGDFVEWKNEILPVISRRL

SEQ ID NO: 60661 - protein, 376 aa, Schleiferia thermophila
  misc_feature (1)..(376): tr|A0A085L2D7|A0A085L2D7_9FLAO Queuine tRNA-ribosyltran sferase OS=Schleiferia thermophila str. Yellowstone OX= 1453500 GN=tgt PE=3 SV=1
MRFELEATDPGSKARAGRIATDHGVIDTPIFMPVGTVGSVKAVHQYELVDDVDAKIILGNTYHLYLRPGTDVLRKAGGLHRFMGWERPILTDSGGYQVFSLAENRKITEEGARFKSHIDGSYHMFTPEGVMDIQRSIGADVVMAFDECPPWPCDERYVEESMHLTHRWLERCISRFDETPSLYGYEQSLFGIVQGGTVSRLRKESAEFVASKNLSGNAIGGLSVGEPAELMYEMTDLVTDILPADRPRYLMGVGTPENILNSIALGVDMFDCVMPTRNGRNGMLFTTEGIINIKNRRWADDFSPIDPAGISRVDFQYSKAYLRHLFVADEFLGRQIASVHNLAFYLWLVREARRHIVQGDFVEWKNEILPVISRRL

SEQ ID NO: 60662 - protein, 375 aa, Schwartzia succinivorans
  misc_feature (1)..(375): tr|A0A1M4VBR0|A0A1M4VBR0_9FIRM Queuine tRNA-ribosyltran sferase OS=Schwartzia succinivorans DSM 10502 OX=112324 3 GN=tgt PE=3 SV=1
MPAITYELVHRDEKTGARAGIIHTPHGSFETPIFMPVGTQASVKGISPDELKELHAGIILSNTYHLFLRPGMDLVREAGGLHKFMHWDRGILTDSGGFQVFSLGPLRKITEEGVTFRSHIDGSKQFLSPEVSIAVQTALGSDIVMAFDECVPYPADFEYTKNSLARTLRWAERCKNAMTREDQGLFGIVQGGMYQELRHESVDRLIEMDLPGYSIGGLSVGEPKEMMYEVLSYTAERLPSNKPRYLMGVGTPDCLVESVERGIDMFDCVFPTRVARNGMAMTWTGRLVMKNKAFEHDHTVLEDGCGCYACRNGYTRAYIRHLVRAGEIFGLRLLTLHNLWFLQDYMRKMRKAILEDRFTEFKNDFFRNYDMRGKN

SEQ ID NO: 60663 - protein, 379 aa, Scopulibacillus darangshiensis
  misc_feature (1)..(379): tr|A0A4R2PAY5|A0A4R2PAY5_9BACL Queuine tRNA-ribosyltran sferase OS=Scopulibacillus darangshiensis OX=442528 GN= tgt PE=3 SV=1
MSAVTYELIKECGQSGARLGKIHTPHGSFDTPMFMPVGTLATVKTMSPEELKEMGAGIILSNTYHLWLRPGEDIVEEAGGLHQFMNWDRGILTDSGGFQVFSLSDLRKITEEGVHFRNHLSGEKLFLSPEKSIAIQNALGSDIMMAFDECPPYPAEFDYMKASVERTSRWAERCLHSNKSPDRQALFGIIQGGEYEALRKQSAADLTSLDFPGYAVGGLSVGEPKDVMNRVLEFTTPLLPQNKPRYLMGVGSPDSLIDGVIRGIDMFDCVLPTRIARNGTCMTSTGRLVVRNSKYARDFGPLDEACDCHVCQTYSRAYIRHLVKANETFGFRLTTYHNLYFLIKLMGQVRQAIKEDRLLDFKAAFFEQYGFNKPNARNF

SEQ ID NO: 60664 - protein, 373 aa, Scytonema hofmannii
  misc_feature (1)..(373): tr|A0A139XAZ5|A0A139XAZ5_9CYAN Queuine tRNA-ribosyltran sferase OS=Scytonema hofmannii PCC 7110 OX=128403 GN=tg t PE=3 SV=1
MTAQFSFQRLAYCSQTKARVGIFSTPHGIVETPRFMPVGTLANVKTMTPSQLEETGAQMVLCNTYHLHLQPGEAIVAGGGGLHKFMGWNGPILTDSGGFQVFSLSEMRKISEEGVTFRSPHDGQIINLTPERSIEIQNTLGADVIMAFDECPPYPATYQEVEASTQRTYRWLERCVTAHQCQDQALFGIVQGGVYLDLRSQAALSLAELDLPGYAIGGVSVGEPPELISHVVKATAPLLPPEKPRYLMGVGTYREIAIAIASGVDLFDCVIPTRWARHGTAMVQGDRWNLKNAKFREDFTPIDETCPCYTCRNFSRAYISHLVRAQEILAYTLLSIHNITELIRFTQKIREAILDDRFAIDFASWLEEGTSDQ

SEQ ID NO: 60665 - protein, 367 aa, Scytonema millei
  misc_feature (1)..(367): tr|A0A4R4IVM1|A0A4R4IVM1_9CYAN Queuine tRNA-ribosyltran sferase OS=Scytonema millei VB511283 OX=1245923 GN=tgt PE=3 SV=1
MTTQFSFQVSTRCSQTKARAGVFYTPHGAVETPRFMPVGTLANVKTITPAQLQETGAQMVLANTYHLHLQPGESIVEKAGGLHQFMRWNQPILTDSGGFQVFSLSEMRQITDDGVIFRSPHDGQMINLTPERSIQIQNALGADVIMAFDECPPYPASREAVEAATQRTYRWLERCISAHQRPDQALFGIVQGGIYPDLRAAAAEALAGLDLVGYAIGGVSVGEPPELIAKIVQATTPMLPVDKPRYLMGVGTYKEMAQAIASGMDLFDCVIPTRLARHGAALVKGERWNLKNSQYREDFQPLDETCPCYTCQNFTRAYISHLVRSQEILAYTLLTIHNITELVRFTQKIREAIISDRFATEFAQWLS

SEQ ID NO: 60666 - protein, 360 aa, Scytonema millei
  misc_feature (1)..(360): tr|A0A1D2P5A9|A0A1D2P5A9_9CYAN Queuine tRNA-ribosyltran sferase OS=Scytonema millei VB511283 OX=1245923 GN=tgt PE=3 SV=1
MFFTPHGPVETPRFMPVGTLANVKTLTPAQLRDTEAQMILCNTYHLHLQPGEAIVAGGGGLHKFMGWNGPILTDSGGFQVFSLSEMRKISEEGVTFRSPHDGQIINLTPERSIEIQNILGADVIMAFDECPPYPASREEVEAATQRTYRWLERCIVAHQRSDQALFGIVQGGVHLDLRSSAAVALTQLDLPGYAIGGVSVGEPPELIANIVQATAPLLPPEKPRYLMGVGTYREMAIAIASGVDLFDCVIPTRWARHGTAMVQGERWNLKNAKFREDFTPLDETCPCYTCQNFSRAYLSHLVRSQEILAYTLLSIHNITELIRFTQNIRKAILEDQFATKFAQWLTPTPQSGETVSRNCL

SEQ ID NO: 60667 - protein, 373 aa, Scytonema sp.
  misc_feature (1)..(373): tr|A0A1Z4J316|A0A1Z4J316_9CYAN Queuine tRNA-ribosyltran sferase OS=Scytonema sp. HK-05 OX=1137095 GN=tgt PE=3 S V=1
MKAKFSFQRLTSCSQTKARAGIFFTPHGPVETPRFMPVGTLANVKTLTPAQLRDTEAQMILCNTYHLHLQPGEAIVAGGGGLHKFMGWNGPILTDSGGFQVFSLSEMRKISEEGVTFRSPHDGRIINLTPERSIEIQNILGADVIMAFDECPPYPATREDVEAATLRTYRWLERCIAAHQRSDQALFGIVQGGVHLDLRSSAAIALAQLDLPGYAIGGVSVGEPPELIAKIVEATAPLLPPEKPRYLMGVGTFREMAIAIASGVDLFDCVIPTRWARHGTAMVQGERWNLKNAQFREDFTPLDETCPCYTCQNFSRAYLSHLVRSQEILAYTLLSIHNITEVIRFTQNIRKAILEDQFATKFAQWLTPTPQSG

SEQ ID NO: 60668 - protein, 714 aa, Scytonema sp.
  misc_feature (1)..(714): tr|A0A1Z4PMR7|A0A1Z4PMR7_9CYAN Queuine tRNA-ribosyltran sferase OS=Scytonema sp. NIES-4073 OX=2005464 GN=tgt PE =4 SV=1
MTKSIPTKTLVSTSTISRLRTLIITSCTGKKLHNPTNQLTIEDFKDTERLRERTQSLSEFSCPSGQMYTGLQHLRLMEGVDILRSHFGREVVDVKIISAAYGLIPEDKVIVPYSVTFNSMKSDEISSWANFIGIHKDFQEAVIGYDLVFVLLGDKYIRALNLPIETHPKQTFIFLASNKSRNLLVLGNANFEVLTFSNADASRFGCALVGLKGQLIKLIATEIRQKPNLLSELYNNPKTLEKVLNNQPQQLELPLGISVATAKKSNIKNKKPKRAIANLDEFLNLPRAVNTHLRMKYFIPEWDDKVDIGYNFLLDESSLNRNAYRDDVYAHEIYSQPNYDGILVSKVVVDKIKNKRADIEKLGGIRNFVRFPGEIMGDCGAFGYIKQEVPPYNTVEILDYYEKLQFNYGVSIDHLIVGPFAEPGVREKRYDLTLQNAEEFISKHQKIGYTFTPIGVAQGWNPETYADAVKKLVEMGYDYIAIGGVARTPTIEILEILKEVYQHLTPNTRLHLFGVGRIDALPYFRHLGVTSFDSASPLRKAWFDAVENYHTLSGKAYAAVRIPFVDKQSPRIKHLLLEGYERETLRQLEQEALKAIREYDKDNISLDESLEKLLAYDELLELPRDGKVTPTAKARRLRQHTQLYRELLEVKPWQECECKICKDYGVETAIFRGNDRNRRRGFHNTYVFYQRFQEFLSNENHLENYNVDTTGESI

SEQ ID NO: 60669 - protein, 384 aa, Scytonema tolypothrichoides
  misc_feature (1)..(384): tr|A0A0C2QIT6|A0A0C2QIT6_9CYAN Queuine tRNA-ribosyltran sferase OS=Scytonema tolypothrichoides VB-61278 OX=1233 231 GN=tgt PE=3 SV=1
MSAKFSFQHLANCSQTKARAGIFFTPHGPVETPRFMPVGTLANVKTLTPAQLLDTGAQMVLCNTYHLHLQPGEAIVAGGGGLHKFMGWNGPILTDSGGFQVFSLSEMRKISEEGVTFRSPHDGQIINLTPERSIEIQNILGADVIMAFDECPPYPASREDVEAATQRTYRWLERCIVAHQRSEQALFGIVQGGVHLDLRSDAAIALRKLDLPGYAIGGVSVGEPPELIAKIVQATAPLLPPEKPRYLMGVGTYREIAIAIASGVDLFDCVIPTRWARHGTAMVQGERWNLKNAKFREDFTPLDETCPCYTCQNFSRAYLSHLVRSQEILAYTLLSIHNITELIRFTQRIRKAILEDRFPCEFAQWLTPESSDCSVDKDSGLIED

SEQ ID NO: 60670 - protein, 384 aa, Sebaldella termitidis
  misc_feature (1)..(384): tr|D1AH21|D1AH21_SEBTE Queuine tRNA-ribosyltransferase OS=Sebaldella termitidis (strain ATCC 33386 / NCTC 1130 0) OX=526218 GN=tgt PE=3 SV=1
MELPVKYTLEKKDGNARAGVIETPHGKIETPVFMPVGTQATVKTMTREELETIETEIILGNTYHLYLRPGDKLIDDFGGLHKFMNWDKPILTDSGGFQVFSLGDLRKITEEGVHFRSHIDGSKHFLSPEKSIDIQNNLGSDIMMALDECPPGLSAREYLIPSIERTTRWAQRCIEANRNKDRQGLFGIFQGGIYEDLREKSFEELYKMDEYFSGYAIGGLAVGEPREDMYRILEYMTPKLPENKPRYLMGVGEPVDMLEAVEDGVDMMDCVQPTRIGRHGTVFTKYGRLVIKNAKYFRDPRPLDDGCDCYVCRNYTRAYIRHLFKAEEMLGQRLTTYHNLYFLIKLMKGARTAILENRFQEYKNNFISDYSAGSTHEWITAKEL

SEQ ID NO: 60671 - protein, 372 aa, Unknown
  misc_feature (1)..(372): tr|J3TWS3|J3TWS3_9ENTR Queuine tRNA-ribosyltransferase OS=secondary endosymbiont of Ctenarytaina eucalypti OX= 1199245 GN=tgt PE=3 SV=1
MKYQLLKTDCQARRGRLVFQRGVVETPAFMPVGTYGTVKSMTPEELKDTGTQILLGNSFHLWLRPGQEVIKLHGDLHDFMQWHGPILTDSGGFQVFSLGETRTINESGVNFCNYINGAEIFLSPEKSMEIQYHLGADIVMIFDECMPYPSSWEDVKRSMEMSLRWATRSRQHFNALENPNALFGIIQGGIYEDLRDISIKRLVDIGFDGYAIGGLSVGEPKADMHRILSYLCPKMPTDKPRYLMGVGNPEDVVRGVQCGVDMFDCVLPTRNARNGYLFVANGVVKIRNAQYKNDIQPIDTTCDCYTCRHYSRAYLHHLDHCKEILGARLNTIHNLRYYQILMAGLRQAINAGTLEGFVDEFYCRTSNPRLNL

SEQ ID NO: 60672 - protein, 372 aa, Unknown
  misc_feature (1)..(372): tr|J3TZ87|J3TZ87_9ENTR Queuine tRNA-ribosyltransferase OS=secondary endosymbiont of Heteropsylla cubana OX=134 287 GN=tgt PE=3 SV=1
MKYQVLKKDNQARRGRLIFNRGIVETPAFMPVGTYGSVKGITPEELQATGTQILLSNTFHLWLRPGPVIIKSHGDLHNFMQWSNPILTDSGGYQVFSLRNMRHITEIGVYFRNPINGDVIFLNPEKSIELQNDLGSDIVMVFDECLPYPSNWNDAKKSMEMSIRWARRSRERFDELGNQNSLFGIIQGSVYEDLRDISITKLVEIGFDGYAFGGLAVGEPKEYMYRILERFCPQIPPDKPRYLMGVGKPEDLVEGVRRGIDMFDCVIPTRNARNGHLFVSNGIIKIRNTRYKNDLSPLDEACDCYTCCNYTRSYLHHLDHCKEMLGARLNTIHNLRYYQTLMRCLRQAIFEGKLEDYIDNFYNQRGNFQFRL

SEQ ID NO: 60673 - protein, 369 aa, Sedimentibacter saalensis
  misc_feature (1)..(369): tr|A0A562JA83|A0A562JA83_9FIRM Queuine tRNA-ribosyltran sferase OS=Sedimentibacter saalensis OX=130788 GN=tgt P E=3 SV=1
MFSFELIKESKECKARLGKIHTNHGDIETPIFMPVGTKATVKAMTPEEMKELEAQIILGNTYHLYLRPGHELIKEAGGLHKFMNWDRPILTDSGGFQVFSLGNLRKIKEEGVEFRSHVDGSKHFLSPEKSMEIQNYLGSDIMMAFDECIPYPASREYVEQSIKRTTRWAKRCKEFHENTENQALFGIVQGGMYEDLRRESAKQITDIDFPGYAIGGLSVGEPRELMCEVMDYTVDLLPKDKPRYLMGVGSPDYLFEAVERGIDMADCVLPTRMARHGAFFTSRGQLTIKNAKYKRDFGPIDENCNCYTCRNYSRAYIRHLFNENEILGARLASIHNLFFLINLMKSIRISIKEDNFMNFKKEFYDNYGY

SEQ ID NO: 60674 - protein, 381 aa, Sedimentibacter sp.
  misc_feature (1)..(381): tr|A0A252CMW9|A0A252CMW9_9FIRM Queuine tRNA-ribosyltran sferase OS=Sedimentibacter sp. SX930 OX=1955060 GN=tgt PE=3 SV=1
MTEPAIRYRLIKKEKHTGARLGEIITPHGTFQTPMFMPVGTLATVKTMSPEELKTMGSQIILSNTYHLWLRPGSDLVEEAGGLHKFMNWDRGILTDSGGFQVFSLSQNRQITEAGVHFRNHLNGSKMFLSPEKAIHIENQLGADIIMSFDECPPYSESYDYIKASVERTTRWAERGLEAHKKPNQQGLFGIIQGAGYKDLRLQSAKELISLDFPGYSIGGLSVGETKEEMNGVLDYLTPVMPENKPRYLMGVGAPDSLIDGVIRGIDMFDCVLPTRIARNGTCMTSSGRLVIKNAKYERDFRPLDEKCDCYTCKNYTRAYIRHLIKADETFGLRLTSYHNLHFLINLMKNVRQAIMDDNLLEFREAFVEEYGFNVENPKKF

SEQ ID NO: 60675 - protein, 364 aa, Sedimenticola selenatireducens
  misc_feature (1)..(364): tr|A0A557RTW3|A0A557RTW3_9GAMM Queuine tRNA-ribosyltran sferase OS=Sedimenticola selenatireducens OX=191960 GN= tgt PE=3 SV=1
MLFDVEKIDGAARRGQLTFARGTIQTPAFMPVGTYGTVKAMTPEELEASGAEIILGNTFHLMLRPGTEIIAAHGDLHDFTHWQRPILTDSGGFQVFSLGAMRKITEAGVHFRSPIDGSKIFMGPEESMEVQRKLGSDIVMIFDECTPYPATETEARVSMELSLRWAERSKLAHADNPSALFGIVQGGVYESLRGRSLEGLIEIGFDGYAVGGLSVGEPPEDRWRVLDYLASRLPVDKPHYLMGVGTPEDIVEAVRRGIDMFDCVMPTRNARNGHLFTHEGVVRIRNAVHANDTGPLDPHCDCYTCQNYSRSYLRHLSRCNEILGARLNTIHNLHYYQTLMRNIRQAISEQRFDVFARDFYALRA

SEQ ID NO: 60676 - protein, 364 aa, Sedimenticola selenatireducens
  misc_feature (1)..(364): tr|A0A2N6CRA4|A0A2N6CRA4_9GAMM Queuine tRNA-ribosyltran sferase OS=Sedimenticola selenatireducens OX=191960 GN= tgt PE=3 SV=1
MLFEVVNIDGAARRGQLTFPRGTIQTPAFMPVGTYGTVKAMTPEELESGGAEIILGNTFHLMLRPGTDIISAHGDLHDFIHWQRPILTDSGGFQVFSLGAMRKITEAGVHFRSPIDGSRIFMGPEESMAVQRKLGSDIVMIFDECTPYPATELEARVSMELSLRWAERSRQAHGDNPSALFGIVQGGVYESLRGRSLEGLMEIGFDGYAVGGLSVGEPPADRWRVLDFLSSRLPADKPHYLMGVGTPEDIVEAVRRGIDMFDCVMPTRNARNGHLFTHQGVVRIRNAVHAGDTGPLDPHCDCYTCQNYSRSYLRHLSRCNEILGARLNTIHNLHYYQSLMRDIRQAITEQRFDAFVRDFYAMRA

SEQ ID NO: 60677 - protein, 365 aa, Sedimenticola sp.
  misc_feature (1)..(365): tr|A0A2N6GC44|A0A2N6GC44_9GAMM Queuine tRNA-ribosyltran sferase OS=Sedimenticola sp. OX=1940285 GN=tgt PE=3 SV= 1
MKYEILETDGAARRGRLTFERCTIETPAFMPVGTYGTVKAMTPEELEGIGAEIILGNTFHLMLRPGTDIIEMHGDLHDFMHWKLPILTDSGGFQVFSLGQMRKITEQGVHFRSPVDGSKIFMGPEESMAVQRKLGSDIVMIFDECTPYPATESEAETSMELSLRWAERSRAAHADNPSALFGIIQGSVFSELRERSLDGLVEIGFDGYAVGGLSVGEPPEDRWRVLDFLSTSLPAMHPHYLMGVGTPEDIVEAVGRGIDMFDCVMPTRNARNGHLFTHQGVVRIRNAVHGTDTGPLDPMCDCYTCQNYSKSYLRHLARCNEILWARLNTIHNLHYYQTLMRNIRAAIEEQRFERFVQEFYALRKS

SEQ ID NO: 60678 - protein, 364 aa, Sedimenticola thiotaurini
  misc_feature (1)..(364): tr|A0A558D8J7|A0A558D8J7_9GAMM Queuine tRNA-ribosyltran sferase OS=Sedimenticola thiotaurini OX=1543721 GN=tgt PE=3 SV=1
MLFRVENSDGAARRGQLTFPRGTIQTPAFMPVGTYGTVKAMTPEELEASGAEIILGNTFHLMLRPGTEIISAHGDLHDFTHWQRPILTDSGGFQVFSLGAMRKITEEGVHFRSPIDGSRIFMGPEESMAVQRKLGSDIVMIFDECTPYPATETEARVSMELSLRWAGRSKQAHGDNPSALFGIVQGGVYESLRGRSLEGLIEIGFDGYAVGGLSVGEPPEDRWRVLDYLSPRLPANKPHYLMGVGTPEDIVEAVRRGIDMFDCVMPTRNARNGHLFTHEGVVRIRNAVHANDTGPLDPHCDCYTCQNYSRSYLRHLSRCNEILGARLNTIHNLHYYQTLMRNIRDAISAQRFDLFAQDFYAMRS

SEQ ID NO: 60679 - protein, 364 aa, Sedimenticola thiotaurini
  misc_feature (1)..(364): tr|A0A0F7JV20|A0A0F7JV20_9GAMM Queuine tRNA-ribosyltran sferase OS=Sedimenticola thiotaurini OX=1543721 GN=tgt PE=3 SV=1
MLFEVSKIDGIARRGQLTFPRGTIQTPAFMPVGTYGTVKAMTPEELDACGAEIILGNTFHLMLRPGTEIISAHGDLHDFMHWERPILTDSGGFQVFSLGAMRKITEAGVHFRSPIDGSRIFMGPEESMAVQRQLGSDIVMIFDECTPYPATEAEARASMELSLRWAERSRQAHGDNPSALFGIVQGGVYESLRGRSLEGLMEIGFDGYAVGGLSVGEPPADRWRVLDYLASRLPADKPHYLMGVGTPEDIVEAVRRGIDMFDCVMPTRNARNGHLFTHEGVVRIRNAVHAHDTGPLDPHCDCYTCQNYSRSYLRHLARCNEILGARLNTIHNLHYYQSLMRDIRQAISEGRFEAFAQDFYAMRS

SEQ ID NO: 60680 - protein, 376 aa, Sedimentisphaera cyanobacteriorum
  misc_feature (1)..(376): tr|A0A1Q2HNE3|A0A1Q2HNE3_9BACT Queuine tRNA-ribosyltran sferase OS=Sedimentisphaera cyanobacteriorum OX=1940790 GN=tgt PE=3 SV=1
MGKVFEVKSKDEFSHARTGVLETAHGEIETPVFMPVGTRGSVKGLTPEQITETDSQIILANTYHMMLRPGADIVEELGGLHKLMAWDKPILTDSGGYQVFSLSTLNKITDSGVEFASHIDGKKYILGPESSIEIQNKLGADIIMAFDECTPFPCPEERLKTAVNRSIRWAEQSLKSHKRDDQLLFGIVQGGIDLALRSGCAEGLVSMGFPGYAIGGLSVGEGHKNMIETVNHTATLLPEDKPRYLMGVGMPPDIIAAVKAGVDMFDCVLPTRNGRNAFAFTQSGAVRLRNSIHTKDSSPIENNCDCYACRNFSRAAIRHFFNVGEMLGPTLVSIHNIRFFQRLIASIKERIKDGSFSSWADKQVEKYQKCGLCRDF

SEQ ID NO: 60681 - protein, 376 aa, Sedimentisphaera salicampi
  misc_feature (1)..(376): tr|A0A1W6LJX2|A0A1W6LJX2_9BACT Queuine tRNA-ribosyltran sferase OS=Sedimentisphaera salicampi OX=1941349 GN=tgt PE=3 SV=1
MGKIFEVKSRDESSNARTAVLKTNHGAIQTPVFMPVGTRGSVKGLTPDQITETGSQIILANTYHMMLRPGADIVAELGGLHKLMAWDKPILTDSGGYQVFSLNTLNKINDNGVEFASHIDGKKYMLGPKDSIGIQNKLGADIIMAFDECTPFPCPEDRLKTAVEKSIRWAEQSLNAHDREEQLLFGIVQGGIDLDLRSRCAEELVSMDFPGYAIGGLSVGEGHKNMIRAVNHTAPLLPENKPRYLMGVGMPPDVIAAVKAGVDMFDCVLPTRNGRNAFAFTQSGAVRLRNSIHTKDKSPIEEGCDCYACRNFSRAAIRHFFNVGEMLGPTLVSIHNIRFFQRLIHSIREKIEEGNFSSWADEQIENYQKCGLCRDF

SEQ ID NO: 60682 - protein, 405 aa, Sedimentitalea nanhaiensis
  misc_feature (1)..(405): tr|A0A1I6YKM1|A0A1I6YKM1_9RHOB Queuine tRNA-ribosyltran sferase OS=Sedimentitalea nanhaiensis OX=999627 GN=tgt PE=3 SV=1
MPTLIIKLIRALATSRPLLFATRAGNRAGMSDRFSFALNATDGKARTGVISTPRGEIRTPAFMPVGTAATVKAMLPENVRATGADILLGNTYHLMLRPTAERIDRLGGLHRFMNWERPILTDSGGFQVMSLAGLRKLTETGVTFKSHIDGSRHELTPERSMEIQRLLGSDIVMCFDECPALPADRARIAESMELSMRWAARSRDAFGDRPGHALFGIQQGGLETDLRAQSAAALTEIGFDGYAVGGLAVGEGQEAMFACLDHAPDTLPTDKPRYLMGVGKPDDIVGAVARGIDMMDCVLPSRSGRTGQVFTRHGVLNIKNARHQDDPRPLDDNCGCPACRGYSRAYLHHVFRSQEIISSMLLTWHNLRYYQDLMAGMRAAIAGGTFADWQADFHAARAQGDIEPL

SEQ ID NO: 60683 - protein, 376 aa, Sedimentitalea sp.
  misc_feature (1)..(376): tr|A0A3T0N0X3|A0A3T0N0X3_9RHOB Queuine tRNA-ribosyltran sferase OS=Sedimentitalea sp. W43 OX=2483033 GN=tgt PE= 3 SV=1
MPSKVTFDLQATDGKARTGVISTPRGEIRTPAFMPVGTAATVKAMMPESVRSTGADILLGNTYHLMLRPTAERIDRLGGLHKFMNWERPILTDSGGFQVMSLAGLRKMTEHGVTFKSHVDGSKHELTPERSMEIQKLLGSDIVMCFDECPALPASDAEVAESMRMSMRWAARSRDAFGDRPGHALFGIQQGGVTHDLRAESAEKLREIEFDGYAVGGLAVGEGQEAMFNVLDYAPDMLPTDKPRYLMGVGKPDDIVGAVARGIDMMDCVLPSRSGRTGQVYTRQGVVNIKNARHIDDPRPLDENCACPACRNYSRAYLSHVFRSNEMISGMLLTWHNLQYFQDIMAGMREAIAAGTFAAWQSDFHSGRAQGDIDPL

SEQ ID NO: 60684 - protein, 378 aa, Sediminibacillus albus
  misc_feature (1)..(378): tr|A0A1G9CJ08|A0A1G9CJ08_9BACI Queuine tRNA-ribosyltran sferase OS=Sediminibacillus albus OX=407036 GN=tgt PE=3 SV=1
MPITYEHIKTCKQTGARLGRVHTPHGSFETPMFMPVGTLATVKTMSPEELEEMGAKIILSNTYHLWLRPGEDIIEEAGGLHKFMNWDGAILTDSGGFQVFSLSDLRDIVEEGVHFRNHISGEKLFLSPEKAIEIQNSLGSDIMMAFDECPPYPAAHDYMKASVERTSRWAERCLQAHRRPGDQGLFGIVQGGEYEDLRRQSANDLTSMDFSGYAVGGLSVGEPKDVMNKVLEFTTPLLPTNKPRYLMGVGSPDSLIDGAIRGIDMFDCVLPTRVARNGTCMTSNGRLVVRNAKFARDFRPLDENCSCHVCRNYSRAYIRHLVKTNETFGFRLTTYHNLYFLLELMMQVREAIREDRLGDFREEFFEQYGFNKPNAKNF

SEQ ID NO: 60685 - protein, 378 aa, Sediminibacillus halophilus
  misc_feature (1)..(378): tr|A0A1G9XR73|A0A1G9XR73_9BACI Queuine tRNA-ribosyltran sferase OS=Sediminibacillus halophilus OX=482461 GN=tgt PE=3 SV=1
MPITYEHIKTCKQTGARLGRVHTPHGSFDTPMFMPVGTLATVKTMSPEELEEMGAKIILSNTYHLWLRPGEDIVEEAGGLHKFMNWDGAILTDSGGFQVFSLSDLRDIEEQGVHFRNHISGEKLFLSPEKAIQIQNSLGSDIMMAFDECPPYPASHDYMKASVERTSRWAERCLAAHKRPEEQGLFGIVQGGEYEELRRQSARDLTSLDFSGYAVGGLSVGEPKDVMNKVLEFTTPLLPTNKPRYLMGVGSPDSLIDGAIRGIDMFDCVLPTRVARNGTCMTSNGRLVVRNAKYARDFGPLDENCGCHVCRNYSRAYIRHLIKANETFGFRLTTYHNLYFLLELMMQVREAIKEDRLGDFREEFFEQYGFNKPNAKNF

SEQ ID NO: 60686 - protein, 380 aa, Sediminibacterium ginsengisoli
  misc_feature (1)..(380): tr|A0A1T4KS11|A0A1T4KS11_9BACT Queuine tRNA-ribosyltran sferase OS=Sediminibacterium ginsengisoli OX=413434 GN= tgt PE=3 SV=1
MAALTFELQASGLQGSKARAGKIRTDHGEILTPIFMPVGTVGSVKAVTQQQLKQDINAQIILGNTYHLYLRPGIEVLEAAGGLHRFNGWDRPILTDSGGYQVFSLAANRKIKEEGVMFQSHIDGSRHLFTPEYVMDIQRAIGADIIMAFDECPPYPSDYSYARKSMDLTHRWLNRCFEQLARTEDKYGYTQNLFPIVQGSTYKDLRKASCEFVAEKNAVGNAIGGLSVGEPEEMMYEFTELCAENLPADKPRYLMGVGTPWNILEGIDRGIDMFDCVMPTRNGRNGMLFTTQGLVNIRNKKWAADFSPIDPGLPNEMSQYYTKAYLRHLFVADEILGLQLASIQNLSFYLWLVTTARGHILAGDFSSWKQEMIPILKQRL

SEQ ID NO: 60687 - protein, 379 aa, Sediminibacterium goheungense
  misc_feature (1)..(379): tr|A0A4R6IWE9|A0A4R6IWE9_9BACT Queuine tRNA-ribosyltran sferase OS=Sediminibacterium goheungense OX=1086393 GN= tgt PE=3 SV=1
MAALSFELETTSVGSRARAGKISTDHGEIHTPIFMPVGTVGTVKAVTQQQLKDDVEAQIILGNTYHLYLRPGTEVLEAAGGLHKFNGWDRPILTDSGGYQVFSLAANRKIKEEGVMFQSHIDGSRHLFSPESVMDIQRSIGADIIMAFDECPPYPSEYGYAKKSMELTHRWLDRCIQRLADTPDKYGYTQNLFPIVQGSTYKDLRKASCEYIASKQAVGNAIGGLSVGEPEEMMYEFTELCTENLPVDKPRYLMGVGTPWNILECIDRGIDMFDCVMPTRNGRNGMIFTTEGVINIKNKKWATDFSPIDPGLDNEISRFYTKAYLRHLFVADEILGMQLASLQNLSFYLWLVGEARQHILAGDFASWKTGMVDQVKRRC

SEQ ID NO: 60688 - protein, 379 aa, Sediminibacterium sp.
  misc_feature (1)..(379): tr|A0A2M8JYE8|A0A2M8JYE8_9BACT Queuine tRNA-ribosyltran sferase OS=Sediminibacterium sp. FEMGT703S OX=2080766 G N=tgt PE=3 SV=1
MAALSFTLNNTADGSAARAGIIQTDHGTIQTPIFMPVGTVGSVKAVTQQQLKLDVQAQIILGNTYHLYLRPGTDVLEAAGGLHRFNGWDRPILTDSGGYQVFSLAANRKIKEEGVVFQSHIDGSKHLFSPESVMDIQRSIGADIIMAFDECPPYPSDYDYAKKSMELTHRWLNRCIARLAETPDKYGYTQNLFPIVQGSTYKDLRKASCEFIASRGAVGNAIGGLSVGEPEEMMYEFTALCTEHLPLDKPRYLMGVGTPWNLLECIDLGIDMFDCVMPTRNGRNGMLFTTQGVINIRNKKWYKDFSPIDPGLPAETSQYYTKAYLRHLFVAEEILGLQIASIHNLSFYLWLVGEARKHILDNSFSSWKKEMLEIIKRRL

SEQ ID NO: 60689 - protein, 376 aa, Sediminicola luteus
  misc_feature (1)..(376): tr|A0A2A4G747|A0A2A4G747_9FLAO Queuine tRNA-ribosyltran sferase OS=Sediminicola luteus OX=319238 GN=tgt PE=3 SV =1
MKFEKLHNDPASKARAGKITTDHGVIETPIFMPVGTVASVKGVHQRELKEEINPDIILGNTYHLYLRPKLPILEQAGGLHKFMGWDRNILTDSGGYQVYSLSANRKIKEEGVKFKSHIDGSYHTFTPENVMEIQRTIGADIIMAFDECTPYPCDYNYAKRSMHMTHRWLDRCIAHLEKLPFKYGYSQAFFPIVQGSTYKDLRMQSAEYIANSGAVGNAIGGLSVGEPAEEMYAMTEVVCDILPEDKPRYLMGVGTPINILENIALGVDMFDCVMPTRNARNGMLFTAHGTINIKNKKWEDDFSPIDEMGHTFVDQEYSKAYLRHLFAANEYLGKQIATIHNLGFYLWLVREARRRIIAGDFRDWKDKMVKQMDKRL

SEQ ID NO: 60690 - protein, 376 aa, Sediminicola sp.
  misc_feature (1)..(376): tr|A0A0S1SFA2|A0A0S1SFA2_9FLAO Queuine tRNA-ribosyltran sferase OS=Sediminicola sp. YIK13 OX=1453352 GN=tgt PE= 3 SV=1
MEFTLLHTDPNSKARAGKMVTDHGTIETPIFMPVGTVASVKGVHQRELKEDINPDIILGNTYHLYLRPKTRILEEAGGLHKFMNWDRNILTDSGGYQVYSLSDNRKIKEEGVKFKSHIDGSYHVFTPENVMEIQRTIGADIIMAFDECTPYPCDYNYAKRSMHMTHRWLERCLTHLEKTPFKYGYSQAFFPIVQGSTYKDLRRQSAEYIAGVGAVGNAIGGLSVGEPADEMYAMTEVVTEILPEDKPRYLMGVGTPINILENIALGIDMFDCVMPTRNARNGMLFTANGTINIKNKKWEDDFSPLDEMGITFVDTEYTKAYLRHLFAANEYLGKQIATIHNLGFYLWLTREARKHILAGDFYEWKNIMVKQMDKRL

SEQ ID NO: 60691 - protein, 374 aa, Sediminispirochaeta smaragdinae
  misc_feature (1)..(374): tr|E1R1L8|E1R1L8_SEDSS Queuine tRNA-ribosyltransferase OS=Sediminispirochaeta smaragdinae (strain DSM 11293 / JCM 15392 / SEBR 4228) OX=573413 GN=tgt PE=3 SV=1
MLTIDHNDTLTAARTGTLALPHGTIEVPAFMPVGTNGTVKAISHAAVDNMGYRLILGNTYHLYLRPGKEVFETYGGLHAFSSWPHNILTDSGGFQVFSLAPFRKIRDEGVRFRSHIDGSYHHLTPESVVEFQRTLGSDIMMCLDECTPPEISYKKAIEACRRTTAWAKRSKVRWDIEREAGFEGKLFGIIQGNFFKDLRKISSEEIIELDFPGIAIGGLSVGEPKETFEEYLAYTSQFLPSEKPRYLMGIGTPDYIFAAVENGIDLFDCVFATRTARNGTVFTKDGMINLKKAGHALDKGPIEEGCTCQACTRYSRGYMRHLFKAGELFGPMLATEHNLQFLYDLMVEIRHSIREDRFSSFKKNFLDRYVKKGN

SEQ ID NO: 60692 - protein, 379 aa, Sediminitomix flava
  misc_feature (1)..(379): tr|A0A315ZAC7|A0A315ZAC7_9BACT Queuine tRNA-ribosyltran sferase OS=Sediminitomix flava OX=379075 GN=tgt PE=3 SV =1
MSGLKFELKKKDPQSKARLGEITTGHGKIQTPIFMPVGTAGTVKSVHTREIKEDINAEIILGNTYHLYLRPKLEILEKAGGLHKFNGWDRPILTDSGGYQVFSLGDMRKITEEGVLFRSHIDGSKHLFTPENVMDTQRTIGADIIMAFDECTPYPCDYAYAKNSMERTHRWLQRCVDRFDSTDPKYGYHQSLFPIVQGSTFKDLRIKSAETIASFGREGNAIGGLSVGEPAEDMYEMTDLVTDILPEDKPRYLMGVGTPANILEGIALGVDMFDCVMPTRNARNGMLFTTQGVINIKNLKWADDFSPIDEELGGYVSTFYSKAYLRHLIHAKEILAAQIASIHNLTFYLWLVREARKHIEAGDFREWKDVMVKKLMTRL

SEQ ID NO: 60693 - protein, 379 aa, Segetibacter aerophilus
  misc_feature (1)..(379): tr|A0A512BHE3|A0A512BHE3_9BACT Queuine tRNA-ribosyltran sferase OS=Segetibacter aerophilus OX=670293 GN=tgt PE= 3 SV=1
MPALQFELTHTQQHSKARAGKITTDHGEIETPIFMPVGTVGSVKAVTQQQLYNDVHAQIILGNTYHLYLRPGLEVLEAAGGLHKFNGWHRPILTDSGGYQVFSLAANRKINEEGVMFQSHIDGGKHLFTPEKVMDIERTIGADIMMAFDECPPYPSEYKYAKDSMELTHRWLDRCFTHFNATPSKYGYTQNLFPIVQGGTYKDLRTASCQYIASKDATGNAIGGLSVGEPMEMMYEFTALCCEELPENKPRYLMGVGTPWNILECIDLGIDMFDCVMPTRNGRNGMLFTTRGVINIKNLKWAKDFSVIDNQLPNEVSQYYSKAYMRHLFVANEILGLQLASIHNLAFYLWLVKEARKHILQDCFTSWKNDVVPVLQQRL

SEQ ID NO: 60694 - protein, 411 aa, Segniliparus rotundus
  misc_feature (1)..(411): tr|D6ZAQ1|D6ZAQ1_SEGRD Queuine tRNA-ribosyltransferase OS=Segniliparus rotundus (strain ATCC BAA-972 / CDC 107 6 / CIP 108378 / DSM 44985 / JCM 13578) OX=640132 GN=tg t PE=3 SV=1
MGVRFSLAGRLPDGRGRAGVIHTPHGDIETPAFIPVGTAAAVKTVLPSLVADLGAHAVLANAYHLYLRPGAQLVAQAGGVAAFMGWRGPTYTDSGGFQVLSLGAGHRKILAMDTAGVGADQVIAKPEARLAKVDEDGVTFTSHVDGSKHRFTPEVSIAVQRDIGADIIFAFDELTTLLHSEEYQRSSVERTLRWARRCLAEHNRTKGLATATAAPQSLWAVVQGAQYEYLRRHCARELVGMSEADEAEGGVGFGGFGIGGAIAKERLGEIIGWVAEELPEHKPRHVLGVGEPDDLFAAVESGGDTFDCVAPTRLARNGVVFSWDGRYHLTNARFRRDFRPLDDALANSSAEFTRAYIHHLFKIREPLAGTLASVHNLSFLVTLMARVRAAILENRYEEYKAEVLGRYYAKR

SEQ ID NO: 60695 - protein, 411 aa, Segniliparus rugosus
  misc_feature (1)..(411): tr|E5XKY0|E5XKY0_9ACTN Queuine tRNA-ribosyltransferase OS=Segniliparus rugosus ATCC BAA-974 OX=679197 GN=tgt P E=3 SV=1
MRLSFSLARRLSGSQGRAGVIHTPHGEIETPAFIPVGTAAAVKTVLPGLVSGLGAQAVLSNAYHLYLRPGPQLMAEAGGLGAFMGWPGPTYTDSGGFQVLSLGAGHRKILAMDTSGLGAEQVIAKPEARLAKVDEDGVTFKSHIDGSKHRFTPEVSISVQRDIGADIMFAFDELTTLLHSEDYQRASVERTLRWARRCLAEHNRGGGLATATGAPQSLWAVVQGAQYEYLRRRCAKELVAMSEADEAEGGVGFGGFGIGGAIAKERLGEIIGWVSGELPERKPRHVLGVGEPDDLFAAVESGGDTFDCVSPTRLARNGVVFSWDGRYHVTNARFRRDFRPLDEGLSNLSAGFTRAYIHHLFKIREPLAGTLVSVHNMSFLVTLMARMRAAILEDRYEEYKAETLGRYYAKR

SEQ ID NO: 60696 - protein, 378 aa, Seinonella peptonophila
  misc_feature (1)..(378): tr|A0A1M4TRK7|A0A1M4TRK7_9BACL Queuine tRNA-ribosyltran sferase OS=Seinonella peptonophila OX=112248 GN=tgt PE= 3 SV=1
MAVRFEQIQDCQQTNARLGRLHTPHGTIETPIFMPVGTLATVKTMSPEELKAIGSQIILANTYHLYLRPGHEIVREAGGLHTFMNWNRPILTDSGGFQVFSLSKLRKITEEGVSFRSHLSGEPLFLGPEQAMEIQNALGSDIAMAFDECAPYPADREYVRQSAERTVRWLKRCKEAHQRTDSQALFGIVQGGMYPDLRVENAKAIVDLDLPGYAIGGLSVGESKEQMYEMISHTTPYLPKDKPRYLMGVGSPDALIRGVMLGIDMFDCVLPTRIARNGTAMTSQGRLVVKKAEYARDFTSLDPECDCYTCTKYTRAYIRHLVKADETFGLRLISYHNLHFLLQLMTKVREAIRNKQLPEFANRFLTQYYGSDELSVRF

SEQ ID NO: 60697 - protein, 371 aa, Selenihalanaerobacter shriftii
  misc_feature (1)..(371): tr|A0A1T4MZG0|A0A1T4MZG0_9FIRM Queuine tRNA-ribosyltran sferase OS=Selenihalanaerobacter shriftii OX=142842 GN= tgt PE=3 SV=1
MSFEYTLHKESNNTKARLGEFSTPHGVIETPIFMPVGTQATVKTMTPEELEELGAQIILSNTYHLYLRPGHELIAEAGGLHEFMNWDRPILTDSGGFQVFSLADMRDISEEGVEFQSHLDGSKHFITPEKATEIQMDLGADIIMSFDECPPYPAEKDYVKESLERTTRWAKRCKEAHTRDDQALFGIIQGGMHRDLREQSAKEIIDLDFPGYALGGLSVGEANELMYEVLDYAPDLLPKNKPRYLMGVGTPQDLFEGVIRGIDMFDCVFPTRIARNGAVFTSQGRITIRNATYKRQFTKLDPECDCYVCNNYTRAYIRHLIKRNEVLGIRLTTYHNLYFLCSLMTKIREAISKGRLLEYQEEFYKKYGLDL

SEQ ID NO: 60698 - protein, 369 aa, Seleniivibrio woodruffii
  misc_feature (1)..(369): tr|A0A4R1K5L3|A0A4R1K5L3_9BACT Queuine tRNA-ribosyltran sferase OS=Seleniivibrio woodruffii OX=1078050 GN=tgt P E=3 SV=1
MFSFRLEETDNRARTGTITTPHGIIETPIFMPVGTVGSVKTISPQELDDMGAQIILGNTYHLHLRPGDEVVAKFGGLAKFNSWHKPTLTDSGGFQVFSLAEMNKITDEGVHFRSHLDGSKLFLNPERSIEIQQNIGADIMMAFDECVSLPAEKEYVRKSIERTYRWAVRSRAAKTNGHQALFGIIQGGTDLDLRRISAEQITSIDFEGFAIGGLSVGEEIPLMYETTSFTTEYMPKDKPRYLMGVGTPQDLLHGIKYGVDMFDCVMPTRNARNAMLFTSAGKLHIKNKQWELSDEPVDAECSCYTCRNFSRGYLRHLHKAGEYLGLRLNSIHNLHFYLSLVKRARNAIKLGIYDKFMNETLEKMSTGGL

SEQ ID NO: 60699 - protein, 374 aa, Selenomonadales bacterium
  misc_feature (1)..(374): tr|A0A316QJ29|A0A316QJ29_9FIRM Queuine tRNA-ribosyltran sferase OS=Selenomonadales bacterium OX=2137878 GN=tgt PE=3 SV=1
MQTAQFKYEIIKECRQTGARIGRLSTPHGIIETPVFMPVGTQGTVKAMSPEELKEMEAQIILSNTYHLFLRPGHELIRSAGGLHNFMHWDRPILTDSGGFQVFSLAALRRIKEEGVAFQSHIDGSPRFLSPETSIEVQTALGSDIMMAFDVCSPYPCDYNSTAASMERTLRWLERCKKAWTREDQALFGIVQGGMYKDLRIESAKATAAMDLPGIAVGGLSVGEPKEVMYEMLEAIRPYLPEDKPRYLMGVGSPDCLVEGFMRGIDMMDCVLPTRIARNGTFMTSRGRMVIRNAKYARDLTPVDPECGCYTCRNYTRAYIRHLFKAGEILGARLASYHNLYFLINLTKQIKKAIYEDRLADFRNEFFVKYGYDV

SEQ ID NO: 60700 - protein, 374 aa, Selenomonas artemidis
  misc_feature (1)..(374): tr|E7MZ80|E7MZ80_9FIRM Queuine tRNA-ribosyltransferase OS=Selenomonas artemidis F0399 OX=749551 GN=tgt PE=3 SV =1
MAAISYELVRQDETTGARAGVLHTPHGSYPTPIFMPVGTQATVKGVSPDELRDLGAGIILGNTYHLFLRPGAELVREAGGLHRFMHWEGAILTDSGGVQVFSLGDLRKITEEGVAFRSHIDGSKKFLSPEVSMQVQRCLGSDIVMAFDECIPYPADHDYAKASTERTQRWLVRCKAAMAGAEGQGLFGIVQGGMYRDLRARHAAEVAELDLPGYAIGGLSVGEPHALMEEILSYTAQLLPAGKPRYLMGVGTPDYLLTGVRHGIDMFDCVFPTRVARNGMAMTWTGRLVMKNAEHTHAHEILEEGCGCYACRNGYTRAYIRHLVRAQEIFGLRLLTLHNLYFLQEFMRRMRAAIIDGTFPAFYGSVMEHYRKNG

SEQ ID NO: 60701 - protein, 340 aa, Selenomonas flueggei
  misc_feature (1)..(340): tr|C4V0G5|C4V0G5_9FIRM Queuine tRNA-ribosyltransferase OS=Selenomonas flueggei ATCC 43531 OX=638302 GN=tgt PE= 3 SV=1
MPVGTQASVKGVSPDELRDLGAGIILSNTYHLFLRPGMELVREAGGLHRFMHWDGAILTDSGGFQVFSLGDLRKITEEGATFRSHIDGSKKFLSPEVSMEVQRALGADIVMAFDECIPYPADHDYAKASTERTQRWLIRCRDAMAGAEGQGLFGIVQGGMYRDLRAWHAAAATELDLPGYAIGGLSVGEPHALMEEILSYTTELLPEEKPRYLMGVGTPDYLLTGVRHGIDMFDCVFPTRVARNGMAMTWTGRLVMKNAAYAHDHTVMEDGCGCYACRNGYTRAYIRHLVRAQEIFGLRLLSLHNLYFLQEFMRRIRASILDGTFLSFYQDFMSHYHRNK

SEQ ID NO: 60702 - protein, 373 aa, Selenomonas infelix
  misc_feature (1)..(373): tr|G5GLN8|G5GLN8_9FIRM Queuine tRNA-ribosyltransferase OS=Selenomonas infelix ATCC 43532 OX=679201 GN=tgt PE=3 SV=1
MAAITYELIRKDETTGARAGVIHTPHGSFPTPIFMPVGTQATVKGVSPDELRELGAGIILSNTYHLFLRPGMELVREAGGLHRFMHWDGAILTDSGGFQVFSLGDLRKITEEGATFRSHIDGSKKFLSPEVSMEVQKALGSDIVMAFDECIPYPADHTYAKASTERTQRWLVRCRDAMADAEGQGLFGIVQGGMYRDLRAWHAAEVTALELPGYAIGGLSVGEPHELMEEILSYTVELLPANKPRYLMGVGTPDYLLTGVRHGIDMFDCVFPTRVARNGMAMTWTGRLVMKNAVHTHDHTVIEEGCGCYTCRNGYTRAYIRHLVRAEEIFGLRLLTLHNLYFLQEFMRRMRAAIIAGTFSAFYQDFMNHYHKK

SEQ ID NO: 60703 - protein, 339 aa, Selenomonas noxia
  misc_feature (1)..(339): tr|D4S7Z4|D4S7Z4_9FIRM Queuine tRNA-ribosyltransferase OS=Selenomonas noxia ATCC 43541 OX=585503 GN=tgt PE=3 S V=1
MPVGTQASVKGVSPDELRDLGAGIILSNTYHLFLRPGMELVREAGGLHRFMHWDGAILTDSGGFQVFSLGDLRKITEDGATFRSHIDGSKKFLSPEVSMQVQRCLGSDIVMAFDECIPYPADYAYAKASTERTQRWLVRCRKAMAEAEDQGLFGIVQGGMYHDLRAWHAAEAAALDLPGYAIGGLSVGEPHALMEEILSSTAELLPADKPRYLMGVGTPDYLLTGVRHGIDMFDCVFPTRVARNGMAMTWTGRLVMKNAVHTHEHTVLSEGCGCYACRSGYTRAYIRHLVRAQEIFGLRLLSLHNLYFLQEFMQRMREAILAGTFLSFYQDFMNHYHKK

SEQ ID NO: 60704 - protein, 373 aa, Selenomonas noxia
  misc_feature (1)..(373): tr|G5H256|G5H256_9FIRM Queuine tRNA-ribosyltransferase OS=Selenomonas noxia F0398 OX=702437 GN=tgt PE=3 SV=1
MAAITYELLRRDETTGARAGIIHTPHGSFPTPIFMPVGTQASVKGVSPDELRDLGAGIILSNTYHLFLRPGMELVREAGGLHRFMHWDGAILTDSGGFQVFSLGDLRKITEDGATFRSHIDGSKKFLSPEVSMQVQRCLGSDIVMAFDECIPYPADYAYAKASTERTQRWLVRCRKAMAEAEDQGLFGIVQGGMYHDLRAWHAAEAAALDLPGYAIGGLSVGEPHALMEEILSSTAELLPADKPRYLMGVGTPDYLLTGVRHGIDMFDCVFPTRVARNGMAMTWTGRLVMKNAVHTHEHTVLSEGCGCYACRSGYTRAYIRHLVRAQEIFGLRLLSLHNLYFLQEFMQRMREAILAGTFLSFYQDFMNHYHKK

SEQ ID NO: 60705 - protein, 371 aa, Selenomonas ruminantium
  misc_feature (1)..(371): tr|A0A1H0MS25|A0A1H0MS25_SELRU Queuine tRNA-ribosyltran sferase OS=Selenomonas ruminantium OX=971 GN=tgt PE=3 S V=1
MAAITYELVKKDEATGARAGIIHTPHGSFPTPIFMPVGTQASVKGVSPDELKDLGAGIILSNTYHLFLRPGMELVKEAGGLHKFMHWDGAILTDSGGFQVFSLGDLRKITEEGVTFRSHIDGSKKFLSPEVSMEVQMCLGSDIVMAFDECVPYPADHDYAKQSTERTLRWAQRCKDAMTAPNQGLFGIVQGGMYKDLRKWHAKEMVEMDFPGYAVGGLSVGEPPELMYEMLEYSTSLLPENKPRYLMGVGTPDHLVEGVMRGIDMFDCVYPTRVARNGMAMTWTGRLVMKNANLTHDHHVIEEGCGCYACRNGYTRAYIRHLVRAGEIFGLRLLSLHNLYFLEEFVRRMRQSIIDGKFTQFRSDFLANYKR

SEQ ID NO: 60706 - protein, 375 aa, Selenomonas ruminantium
  misc_feature (1)..(375): tr|A0A1H6HEE2|A0A1H6HEE2_SELRU Queuine tRNA-ribosyltran sferase OS=Selenomonas ruminantium OX=971 GN=tgt PE=3 S V=1
MAAITYELIKQDETTGARAGIIHTPHGSFPTPIFMPVGTQATVKGVSPEELKDLGAGIILSNTYHLFLRPGMELVKEAGGLHKFMHWDGAILTDSGGFQVFSLGELRKITEEGVTFRSHLDGSRKFLSPEVSMEVQMCLGSDIVMAFDECVPYPADYEYAKRSTERTLRWAKRCQAAMTAPNQGLFGIVQGGMYKDLREWHAKEMTALDFPGYAVGGLSVGEPKELMYEMLEYSTAHLPKDKARYLMGVGTPDHLVEGVARGIDMFDCVYPTRVARNGMAMTWHGRLVMKNSNFTHDHNVLEEGCGCYACRNGYTRAYIRHLVRAGEIFGLRLLSLHNLYFLEEFVRRMRTAILEDRFPAFRAEFLENYNPRGNK

SEQ ID NO: 60707 - protein, 373 aa, Selenomonas sp.
  misc_feature (1)..(373): tr|L1NEW4|L1NEW4_9FIRM Queuine tRNA-ribosyltransferase OS=Selenomonas sp. oral taxon 138 str. F0429 OX=1127695 GN=tgt PE=3 SV=1
MAAITYELIRKDETTGARAGVIHTPHGSFPTPIFMPVGTQATVKGVSPDELRELGAGIILSNTYHLFLRPGMELVREAGGLHRFMHWDGAILTDSGGFQVFSLGDLRKITEEGATFRSHIDGSKKFLSPEVSMEVQKALGSDIVMAFDECIPYPADHTYAKASTERTQRWLVRCRDAMADAEGQGLFGIVQGGMYRDLRAWHAAEVTALELPGYAIGGLSVGEPHELMEEILSYTVELLPEHKPRYLMGVGTPDYLLTGVRHGIDMFDCVFPTRVARNGMAMTWTGRLVMKNAVHTHDHTVLEEGCGCYACRNGYTRAYIRHLVRAEEIFGLRLLTLHNLYFLQEFMRRMRAAIIAGTFSAFYHDFMNHYHKK

SEQ ID NO: 60708 - protein, 374 aa, Selenomonas sp.
  misc_feature (1)..(374): tr|A0A109WDT4|A0A109WDT4_9FIRM Queuine tRNA-ribosyltran sferase OS=Selenomonas sp. oral taxon 136 OX=713030 GN= tgt PE=3 SV=1
MAAITYELIRKDPATGARAGVIHTPHGSFPTPIFMPVGTQASVKGVSPDELRDLGAGIILSNTYHLFLRPGMELVREAGGLHRFMHWDGAILTDSGGFQVFSLGDLRKITEEGATFRSHIDGAKKFLSPEVSMEVQRALGADIVMAFDECIPYPADHDYAKASTERTQRWLIRCRNAMAGAEEQGLFGIVQGGMYRDLRAWHAAAATELDLPGYAIGGLSVGEPHALMEEILSYTTELLPEEKPRYLMGVGTPDYLLTGVRHGIDMFDCVFPTRVARNGMAMTWTGRLVMKNAAYAHDHTVMEDGCGCYACRNGYTRAYIRHLVRAQEIFGLRLLSLHNLYFLQEFMRRIRASILDGTFLSFYQDFMSHYHRNK

SEQ ID NO: 60709 - protein, 395 aa, Selenomonas sputigena
  misc_feature (1)..(395): tr|C9LW36|C9LW36_SELS3 Queuine tRNA-ribosyltransferase OS=Selenomonas sputigena (strain ATCC 35185 / DSM 20758 / VPI D19B-28) OX=546271 GN=tgt PE=3 SV=1
MGGGIYLWFLNMPCRKRCERGGDFLTAITYELIKKDEATGARAGILHTPHGSFPTPIFMPVGTQASVKGVSPDELKELGAGVILSNTYHLFLRPGMDLVREAGGLHRFMNWDGAILTDSGGFQVFSLGDLRKITEDGVTFRSHIDGSKKFLSPEVSMEVQMALGSDIVMAFDECVPYPADYEYAKTSTERTTRWAKRCKDAMTSESQGLFGIVQGGMYKDLREKSVADLVELDFPGYAVGGLSVGEPKELMYEMLGLTVHLLPEDKPRYLMGVGTPDYLLEGVMYGIDMFDCVFPTRVARNGMAMTHEGRLVMKNAAYTRDFSVLEEGCGCYACRNGYTRAYIRHLVRAEEIFGLRLLTLHNLYFLQAFMREMREAILADAFSDFRAKFLARYQK

SEQ ID NO: 60710 - protein, 371 aa, Selenomonas sputigena
  misc_feature (1)..(371): tr|F4EZG3|F4EZG3_SELS3 Queuine tRNA-ribosyltransferase OS=Selenomonas sputigena (strain ATCC 35185 / DSM 20758 / VPI D19B-28) OX=546271 GN=tgt PE=3 SV=1
MTAITYELIKKDEATGARAGILHTPHGSFPTPIFMPVGTQASVKGVSPDELKELGAGVILSNTYHLFLRPGMDLVREAGGLHRFMNWDGAILTDSGGFQVFSLGDLRKITEDGVTFRSHIDGSKKFLSPEVSMEVQMALGSDIVMAFDECVPYPADYEYAKTSTERTTRWAKRCKDAMTSESQGLFGIVQGGMYKDLREKSVADLVELDFPGYAVGGLSVGEPKELMYEMLGLTVHLLPEDKPRYLMGVGTPDYLLEGVMYGIDMFDCVFPTRVARNGMAMTHEGRLVMKNAAYTRDFSVLEEGCGCYACRNGYTRAYIRHLVRAEEIFGLRLLTLHNLYFLQAFMREMREAILADAFSDFRAKFLARYQK

SEQ ID NO: 60711 - protein, 377 aa, Sellimonas intestinalis
  misc_feature (1)..(377): tr|A0A3E3K540|A0A3E3K540_9FIRM Queuine tRNA-ribosyltran sferase OS=Sellimonas intestinalis OX=1653434 GN=tgt PE =3 SV=1
MYELLKRDGLAKRGRFTTVHGTVETPVFMNVGTAAAIKGAVSTDDLREIKTQVELSNTYHLHVRPGDEVIKKLGGLHKFMVWDKPILTDSGGFQVFSLAGLRKIQEEGVHFHSHIDGRKIFMGPEESMQIQSNLASTIAMAFDECPASTKDRDYIERSVARTARWLRRCKAEMERLNSLPDTINPHQMLFGINQGGILENVRIAHAQEIAELDLPGYAIGGLAVGESHEEMYRILDAVVPYLPLEKPTYLMGVGTPANILEAVDRGVDFFDCVYPTRNGRHGHVYTNHGKLNLFNAKYELDERPIEEGCGCPVCRKYSRAYIRHLLKAKEMLGMRFCVLHNLYFYNTMMEEIRAAIEEGRYKEYKKQKLEGMSLSQK

SEQ ID NO: 60712 - protein, 381 aa, Senegalimassilia anaerobia
  misc_feature (1)..(381): tr|A0A369L8Q5|A0A369L8Q5_9ACTN Queuine tRNA-ribosyltran sferase OS=Senegalimassilia anaerobia OX=1473216 GN=tgt PE=3 SV=1
MALFDCTIEATCGHARALSYETAHGTFHTPMFMPVGTSATVKGITVDQLHQLNSQVVLANTYHLSMRPGADLVEEAGGVHKFMNYDGPMLTDSGGFQVFSLADTLKLDADGLTFRSIYDGSYVRWTPESNMRIQEQIGADIAMQLDQCTPYPAERSFVANAVDLSANWARRCLAAHKRPDQTLFGIVQGGMELDLRLESIRRLREIEDESLAAGGRRFGGFGIGGYSVGEDHETMFETLGQVARACPEDRPRYLMGVGNPTTLVRAVREGVDMFDCVLPTRTARMGTAFSSTGRMNMRNAKFTRDFTPLDHSCTCPTCQNYTRAYLRHLVKQNEMLGAILLSVHNLHFLLDLMRRAREAVLAGEYEQFYEEWMNSPAAKDY

SEQ ID NO: 60713 - protein, 381 aa, Senegalimassilia sp.
  misc_feature (1)..(381): tr|A0A4V1QU15|A0A4V1QU15_9ACTN Queuine tRNA-ribosyltran sferase OS=Senegalimassilia sp. KGMB04484 OX=2509433 GN =tgt PE=3 SV=1
MALFDCTIEAQSGHARALSYETAHGTFRTPMFMPVGTSATVKGITVDQLHDLQSQVVLANTYHLSMRPGADLVEEAGGVHKFMNYDGPMLTDSGGFQVFSLADTLKLDADGLTFRSIYDGSYVRWTPESNMHIQEQIGADIAMQLDQCTPYPAERSFVANAVDLSANWARRCLAAHKRPDQTLFGIVQGGMELDLRMESIRRLRQIEDESLAAGGRRFGGFGIGGYSVGEDHETMFETLGQVARACPEDRPRYLMGVGNPTTLVRAVREGVDMFDCVLPTRTARMGTAFSSTGRMNMRNAKYTRDFTPLDHNCTCPTCQSYTRAYLRHLVKQNEMLGAILLSVHNLHFLLDLMRRAREAVLADAYEEFCQAWMNSPAAKDY

SEQ ID NO: 60714 - protein, 376 aa, Seonamhaeicola algicola
  misc_feature (1)..(376): tr|A0A5C7AFE1|A0A5C7AFE1_9FLAO Queuine tRNA-ribosyltran sferase OS=Seonamhaeicola algicola OX=1719036 GN=tgt PE =3 SV=1
MKFTLKAQDPKSKARAGEITTDHGVIQTPIFMPVGTVATVKGVHQRELKNDINPDIILGNTYHLYLRPQTKILEQAGGLHKFMNWDRNILTDSGGYQVYSLSANRKIKEEGVKFKSHIDGSYHTFTPENVMEIQRSIGADIIMAFDECTPYPCDYNYAKRSMHMTHRWLDRCIAHLEKTPLKYGYNQAFFPIVQGSTYKDLRIQSAEYIANAGAVGNAIGGLSVGEPAEEMYAMTDVVCNILPEDKPRYLMGVGTPINILENIALGVDMFDCVMPTRNARNGMLFTAHGTINIKNKKWEDDFSPIDEMGITFVDTEYSKAYLRHLFSVNELLGKQIATIHNLGFYLWLVREARKHILAGDFNTWKNTMVKQMDKRL

SEQ ID NO: 60715 - protein, 376 aa, Seonamhaeicola aphaedonensis
  misc_feature (1)..(376): tr|A0A3D9HFF8|A0A3D9HFF8_9FLAO Queuine tRNA-ribosyltran sferase OS=Seonamhaeicola aphaedonensis OX=1461338 GN=t gt PE=3 SV=1
MKFQLNAQDNQSKARAGKITTDHGVIETPIFMPVGTVATVKGVHQRELKEEINPDIILGNTYHLYLRPQTNIIEKAGGLHKFMNWDRNILTDSGGYQVYSLSANRKIKEEGVKFKSHIDGSYHIFTPENVMEIQRSIGADIIMAFDECTPYPCDYNYAKRSMHMTHRWLDRCMNHLEKTPFKYDYSQAFFPIVQGSTYKDLRIQSAEYIANAGAIGNAIGGLSVGEPAEEMYAMTDVVCGVLPEDKPRYLMGVGTPINILENIALGIDMFDCVMPTRNARNGMLFTAHGTINIKNKKWEDDFSPIDEMGITFVDTEYSKAYLRHLFSVNELLGKQIATIHNLGFYLWLVREARKHILAGDFRIWKDTMVKQMDKRL

SEQ ID NO: 60716 - protein, 376 aa, Seonamhaeicola marinus
  misc_feature (1)..(376): tr|A0A5D0J2C3|A0A5D0J2C3_9FLAO Queuine tRNA-ribosyltran sferase OS=Seonamhaeicola marinus OX=1912246 GN=tgt PE= 3 SV=1
MKFQLNAQDAQSKARAGKITTDHGVIETPIFMPVGTVATVKGVHQRELKQDINPDIILGNTYHLYLRPQTDIIEKAGGLHKFMNWDRNILTDSGGYQVYSLSANRKIKEEGVKFKSHIDGSYHTFTPENVMEIQRSIGADIIMAFDECTPYPCDYNYAKRSMHMTHRWLDRCIAHLEKTPLKYDYSQAFFPIVQGSTYKDLRLQSAEYIANSGAVGNAIGGLSVGEPAEEMYAMTDIVCGVLPEDKPRYLMGVGTPINILENIALGVDMFDCVMPTRNARNGMLFTAHGTINIKNKKWEDDFSPIDEMGITFVDTEYSKAYLRHLFSVNELLGKQIATIHNLGFYLWLVREARKHILAGDFRTWKDTMVKQMDKRL

SEQ ID NO: 60717 - protein, 376 aa, Seonamhaeicola sp.
  misc_feature (1)..(376): tr|A0A562Y9J7|A0A562Y9J7_9FLAO Queuine tRNA-ribosyltran sferase OS=Seonamhaeicola sp. W255 OX=2528206 GN=tgt PE =3 SV=1
MKFQLKAQDSQSKARAGIITTDHGHIETPIFMPVGTVATVKGVHQRELKEDINPDIILGNTYHLYLRPQTDIIEKAGGLHKFMNWDRNILTDSGGYQVYSLSANRKIKEEGVKFKSHIDGSYHIFTPENVMEIQRSIGADIIMAFDECTPYPCDYNYAKRSMHMTHRWLDRCISHLEKTPLKYDYSQAFFPIVQGSTYKDLRIQSAEYIANTGAVGNAIGGLSVGEPAEEMYAMTEVVCGVLPEDKPRYLMGVGTPINILENIALGIDMFDCVMPTRNARNGMLFTAHGTINIKNKKWEDDFSPIDDMGITFVDTEYSKAYLRHLFSVNELLGKQIATIHNLGFYLWLVREARKHILAGDFKTWKDTMVKQMDKRL

SEQ ID NO: 60718 - protein, 376 aa, Seonamhaeicola sp.
  misc_feature (1)..(376): tr|A0A1U7DMZ8|A0A1U7DMZ8_9FLAO Queuine tRNA-ribosyltran sferase OS=Seonamhaeicola sp. S2-3 OX=1936081 GN=tgt PE =3 SV=1
MKFQLNGKDSQSKARAGKLTTDHGVIETPIFMPVGTVATVKGVHQRELKQDINPDIILGNTYHLYLRPQTDIIEKAGGLHKFMNWDRNILTDSGGYQVYSLSANRKIKEEGVKFKSHIDGSYHVFTPENVMEIQRSIGADIIMAFDECTPYPCDYNYAKRSMHMTHRWLDRCIAHLAKTPLKYGYNQAFFPIVQGSTYKDLRIQSAEYIANAGAVGNAIGGLSVGEPAEEMYAMTDVVCSILPEDKPRYLMGVGTPINILENIALGVDMFDCVMPTRNARNGMLFTAHGTINIKNKKWEDDFSPIDEMGITFVDTEYTKAYLRHLFSVNELLGKQIATIHNLGFYLWLVREARKHILAGDFKAWKDKMVKQMDKRL

SEQ ID NO: 60719 - protein, 371 aa, Serpentinicella alkaliphila
  misc_feature (1)..(371): tr|A0A4R2TY05|A0A4R2TY05_9CLOT Queuine tRNA-ribosyltran sferase OS=Serpentinicella alkaliphila OX=1734049 GN=tg t PE=3 SV=1
MGIKYELIKECKQSGARLGKIYTPHGVIETPIFMPVGTQATVKTMTKEELEEIHSQIILSNTYHLYLRPGHELIKKAGGLHKFMNWDKPILTDSGGFQVFSLGDLRKITEEGVEFRSHIDGSKHFISPEKAVEIQTALGSDIMMAFDECAPYPADREYVKNSLERTTRWAKRCKEAHWNTEKQSLFGIIQGGMYNDLRKISAEQIIELDFPGYAVGGLSVGEPKPLMYEVLDHTTPLMPKDKPRYLMGVGSPDALIEGVIRGIDMFDCVLPTRIGRNGTAMTSHGKVIIKNAKHTESFEPLDVECGCYTCKNYSRAYLRHLFKADEILGLRLLTYHNLYFLLKLMEEMRQAIREDRLLDYRKSFYEKYGLK

SEQ ID NO: 60720 - protein, 400 aa, Serpentinomonas mccroryi
  misc_feature (1)..(400): tr|A0A060NTB4|A0A060NTB4_9BURK Queuine tRNA-ribosyltran sferase OS=Serpentinomonas mccroryi OX=1458426 GN=tgt P E=3 SV=1
MLQFEILATDPTSHARRGRLSLRHGVVQTPIFMPVGTYGTVKGVLPQSLQQMGAQIILGNTFHLWLRPGLEVVQGFGGLHGFENWQAPILTDSGGFQVWSLGAMRKISEQGVQFASPVNGDKLFLSPEVSMQIQTVLDSDIAMQFDECTPYWQGDGAAAAKGGSGHVTTEAEARASMELSLRWARRSQAEFARLQNPNALFGIVQGGMFEHLRLESLQALVDLDLPGYAIGGVSVGEPKELMRQIMAHTPHRLPAHKPRYLMGVGTPEDLVQGVADGVDMFDCVMPTRNARNGTLFTRYGDLKIRNARHRHDPQPIDPSCSCTACAGPEGVPWEQGGRGGFSRAYLHHLERCGEMLAPMLASIHNLHYYLNLMRELRAALEAGAFAAWRARFAVERSRGV

SEQ ID NO: 60721 - protein, 398 aa, Serpentinomonas raichei
  misc_feature (1)..(398): tr|A0A060NKH3|A0A060NKH3_9BURK Queuine tRNA-ribosyltran sferase OS=Serpentinomonas raichei OX=1458425 GN=tgt PE =3 SV=1
MLQFERLATDPASHARRGRLTLRHGVVQTPIFMPVGTYGTVKGVLPQSLQQMGAEIILGNTFHLWLRPGLEVVQTFGGLHRFENWHAPILTDSGGFQVWSLGAMRKISEQGVQFASPVNGDKLFLSPEVSMQIQTVLDSDIAMQFDECTPYWQGEGATQGGSGHVTSEAEARASMALSLRWARRSKAEFERLQNPNALFGIVQGGMFEHLRLESLQALVELDLPGYAIGGVSVGEPKELMRQIMAHTPHRLPAHKPRYLMGVGTPEDLVQGVADGVDMFDCVMPTRNARNGTLFTRYGDLKIRNARHRHDPQPIDPSCSCSACAGPDGLSWEQGGRGGFSRAYLHHLERCGEMLAPMLASIHNLHYYLNLMREVRAALEGGVFAAWRLRFAADRSRGV

SEQ ID NO: 60722 - protein, 374 aa, Serratia ficaria
  misc_feature (1)..(374): tr|A0A240BFK3|A0A240BFK3_SERFI Queuine tRNA-ribosyltran sferase OS=Serratia ficaria OX=61651 GN=tgt PE=3 SV=1
MKYELQTTDGRARRGRLIFDRGVVETPAFMPVGTYGTVKGMTPEEVKETGAQILLGNTFHLWLRPGQEIMKLHGDLHDFMQWHGPILTDSGGFQVFSLGAMRKIKEEGVYFRNPINGDKVFLSPEKSMEIQYDLGSDIVMIFDECTPYPADWDYAKRSMEMSLRWAQRSRQRFDELKNKNALFGIIQGGVYEDLRDVSVKGLVDIGFDGYAVGGLAVGEPKEDMHRILEHVCPQIPEDKPRYLMGVGKPEDLVEGVRRGIDMFDCVMPTRNARNGHLFVTDGVVKIRNAKHKDDTSPLDKDCDCYTCRNYSRAYLHHLDRCNEILGARLNTIHNLRHYQRLMAGLRQAIEEGKLELFVADFYGRIGKPIPPLNA

SEQ ID NO: 60723 - protein, 374 aa, Serratia fonticola
  misc_feature (1)..(374): tr|A0A0F7D255|A0A0F7D255_SERFO Queuine tRNA-ribosyltran sferase OS=Serratia fonticola OX=47917 GN=tgt PE=3 SV=1
MKYELQTTDGRARRGRLVFERGVVETPAFMPVGTYGTVKGMTPEEVKDTGAQILLGNTFHLWLRPGQEIMKLHGDLHDFMQWHGPILTDSGGFQVFSLGAMRKIKEEGVYFRNPINGDKVFLSPEKSMEIQYDLGSDIVMIFDECTPYPADWDYAKRSMEMSLRWAQRSRQRFDELNNNNALFGIIQGGVYEDLRDVSVKGLVEIGFDGYAVGGLAVGEPKEDMHRILEHVCPQIPEDKPRYLMGVGKPEDLVEGVRRGIDMFDCVMPTRNARNGHLFVTDGVVKIRNAKHKDDTSTLDSECDCYTCRHYSRAYLHHLDRCNEILGARLNTIHNLRYYQRLMAGLRQAIEEGKLELFVADFYGRIGKPIPPLNA

SEQ ID NO: 60724 - protein, 77 aa, Serratia fonticola
  misc_feature (1)..(77): tr|A0A4V6KMX3|A0A4V6KMX3_SERFO Queuine tRNA-ribosyltran sferase OS=Serratia fonticola OX=47917 GN=tgt_2 PE=4 SV =1
MKYELQTTDGRARRGRLVFERGVVETPAFMPVGTYGTVKGMTPEEVKDTGAQILLGNTFPPVAAPRAGDHEAARRSA

SEQ ID NO: 60725 - protein, 374 aa, Serratia liquefaciens
  misc_feature (1)..(374): tr|A0A515CZH5|A0A515CZH5_SERLI Queuine tRNA-ribosyltran sferase OS=Serratia liquefaciens OX=614 GN=tgt PE=3 SV= 1
MKYELDTTDGRARRGRLIFDRGVVETPAFMPVGTYGTVKGMTPEEVKETGAQILLGNTFHLWLRPGQEIMKLHGDLHDFMQWHGPILTDSGGFQVFSLGAMRKIKEEGVHFRNPINGDKVFLSPEKSMEIQYDLGSDIVMIFDECTPYPADWDYAKRSMEMSLRWAQRSRQRFDELNNKNALFGIIQGGVYEDLRDVSVKGLVDIGFDGYAVGGLAVGEPKEDMHRILEHVCPQIPEDKPRYLMGVGKPEDLVEGVRRGIDMFDCVMPTRNARNGHLFVTDGVVKIRNAKHKDDTSPLDKDCDCYTCRNYSRAYLHHLDRCNEILGARLNTIHNLRHYQRLMAGLREAIEQGKLELFVADFYGRIGKPIPPLNA

SEQ ID NO: 60726 - protein, 311 aa, Serratia liquefaciens
  misc_feature (1)..(311): tr|A0A484X9S5|A0A484X9S5_SERLI Queuine tRNA-ribosyltran sferase OS=Serratia liquefaciens OX=614 GN=tgt PE=3 SV= 1
MVETPAFMPVGTYGTVKGMTPEEVEATGAQIILGNTFHLWLRPGQEIMKLHGDLHDFMQWKGPILTDSGGFQVFSLGDIRKITEQGVHFRNPINGDPIFLDPEKSMEIQYDLGSDIVMIFDECTPYPADWDYAKRSMEMSLRWAKRSRDRFDSLGNKNALFGIIQGSVYEDLRDISVKGLVEIGFDGYAVGGLAVGEPKEDMHRILEHVCPQIPADKPRYLMGVGKPEDLVEGVRRGIDMFDCVMPTRNARNGHLFVTDGVVKIRNAKHKSDTAPLDAECDCYTCRNYSRAYLHHLDRCNEILGRASQYHS

SEQ ID NO: 60727 - protein, 374 aa, Serratia marcescens
  misc_feature (1)..(374): tr|A0A5F0Z717|A0A5F0Z717_SERMA Queuine tRNA-ribosyltran sferase OS=Serratia marcescens subsp. sakuensis OX=2117 60 GN=tgt PE=3 SV=1
MKYELQTTDGRARRGRLIFDRGVVETPAFMPVGTYGTVKGMTPEEVKETGAQILLGNTFHLWLRPGQEIMKLHGDLHDFMQWPGPILTDSGGFQVFSLGAMRKIKEEGVYFRNPINGDKVFLSPEKSMEIQYDLGSDIVMIFDECTPYPADWDYAKRSMEMSLRWAQRSRKRFDELENKNALFGIIQGGVYEDLRDVSVKGLVDIGFDGYAVGGLAVGEPKEDMHRILEHVCPQIPEDKPRYLMGVGKPEDLVEGVRRGIDMFDCVMPTRNARNGHLFVTDGVVKIRNAKHKDDTSPLDKDCDCYTCRHYSRAYLHHLDRCNEILGARLNTIHNLRHYQRLMAGLRQAIEEGKLEQFVADFYGRIGKPIPPLNA

SEQ ID NO: 60728 - protein, 374 aa, Serratia marcescens
  misc_feature (1)..(374): tr|A0A0F6KZH1|A0A0F6KZH1_SERMA Queuine tRNA-ribosyltran sferase OS=Serratia marcescens OX=615 GN=tgt PE=3 SV=1
MKYELQTTDGRARRGRLIFDRGVVETPAFMPVGTYGTVKGMTPEEVKETGAQILLGNTFHLWLRPGQEIMKLHGDLHDFMQWPGPILTDSGGFQVFSLGAMRKIKEEGVYFRNPINGDKVFLSPEKSMEIQYDLGSDIVMIFDECTPYPADWDYAKRSMEMSLRWAQRSRQRFDELENKNALFGIIQGGVYEDLRDVSVKGLVDIGFDGYAVGGLAVGEPKEDMHRILEHVCPQIPEDKPRYLMGVGKPEDLVEGVRRGIDMFDCVMPTRNARNGHLFVTDGVVKIRNAKHKDDTSPLDKDCDCYTCRHYSRAYLHHLDRCNEILGARLNTIHNLRHYQRLMAGLRQAIEEGKLEQFVADFYGRIGKPIPPLNA

SEQ ID NO: 60729 - protein, 374 aa, Serratia nematodiphila
  misc_feature (1)..(374): tr|A0A5C7D0X2|A0A5C7D0X2_9GAMM Queuine tRNA-ribosyltran sferase OS=Serratia nematodiphila OX=458197 GN=tgt PE=3 SV=1
MKYELQTTDGRARRGRLIFDRGVVETPAFMPVGTYGTVKGMTPEEVKETGAQILLGNTFHLWLRPGQEIMKLHGDLHDFMQWPGPILTDSGGFQVFSLGAMRKIKEEGVYFRNPINGDKVFLSPEKSMEIQYDLGSDIVMIFDECTPYPADWDYAKRSMEMSLRWAERSRKRFDELENKNALFGIIQGGVYEDLRDVSVKGLVDIGFDGYAVGGLAVGEPKEDMHRILEHVCPQIPEDKPRYLMGVGKPEDLVEGVRRGIDMFDCVMPTRNARNGHLFVTDGVVKIRNAKHKDDTSPLDKDCDCYTCRHYSRAYLHHLDRCNEILGARLNTIHNLRHYQRLMAGLRQAIEEGKLEQFVADFYGRIGKPIPPLNA

SEQ ID NO: 60730 - protein, 386 aa, Serratia odorifera
  misc_feature (1)..(386): tr|D4DWD3|D4DWD3_SEROD Queuine tRNA-ribosyltransferase OS=Serratia odorifera DSM 4582 OX=667129 GN=tgt PE=3 SV =1
MTSDCFSDAGGIVKYELQTTDGRARRGRLVFERGVVETPAFMPVGTYGTVKGMTPEEVKETGAQILLGNTFHLWLRPGQEIMKLHGDLHDFMQWHGPILTDSGGFQVFSLGAMRKIKEEGVYFRNPINGDKVFLSPEKSMEIQYDLGSDIVMIFDECTPYPADWDYAKRSMEMSLRWAQRSRARFDELNNKNALFGIIQGGVYEDLRDVSVKGLVEIGFDGYAVGGLAVGEPKEDMHRILEHVCPQIPEDKPRYLMGVGKPEDLVEGVRRGIDMFDCVMPTRNARNGHLFVTDGVVKIRNAKHKDDTSPLDNECDCYTCRNYSRAYLHHLDRCNEILGARLNTIHNLRYYQRVMAGLRQAIEEGKLETFVADFYGRIGKPVPPLTV

SEQ ID NO: 60731 - protein, 374 aa, Serratia odorifera
  misc_feature (1)..(374): tr|A0A3S5D6R5|A0A3S5D6R5_SEROD Queuine tRNA-ribosyltran sferase OS=Serratia odorifera OX=618 GN=tgt PE=3 SV=1
MKYELQTTDGRARRGRLVFERGVVETPAFMPVGTYGTVKGMTPEEVKETGAQILLGNTFHLWLRPGQEIMKLHGDLHDFMQWHGPILTDSGGFQVFSLGAMRKIKEEGVYFRNPINGDKVFLSPEKSMEIQYDLGSDIVMIFDECTPYPADWDYAKRSMEMSLRWAQRSRARFDELNNKNALFGIIQGGVYEDLRDVSVKGLVEIGFDGYAVGGLAVGEPKEDMHRILEHVCPQIPEDKPRYLMGVGKPEDLVEGVRRGIDMFDCVMPTRNARNGHLFVTDGVVKIRNAKHKDDTSPLDNECDCYTCRNYSRAYLHHLDRCNEILGARLNTIHNLRYYQRVMAGLRQAIEEGKLETFVADFYGRIGKPVPPLTV

SEQ ID NO: 60732 - protein, 374 aa, Serratia oryzae
  misc_feature (1)..(374): tr|A0A1S8CNS8|A0A1S8CNS8_9GAMM Queuine tRNA-ribosyltran sferase OS=Serratia oryzae OX=2034155 GN=tgt PE=3 SV=1
MKYELQTTDGRARRGRLVFERGVVETPAFMPVGTYGTVKGMTPEEVRDTGAQILLGNTFHLWLRPGQEIMKLHGDLHDFMQWHGPILTDSGGFQVFSLGAMRKIKEEGVYFRNPINGDKVFLSPEKSMEIQYDLGSDIVMIFDECTPYPADWDYAKRSMEMSLRWAQRSRQRFDELNNKNALFGIIQGGVYEDLRDVSVKGLVDIGFDGYAVGGLAVGEPKEDMHRILEHVCPQIPEDKPRYLMGVGKPEDLVEGVRRGIDMFDCVMPTRNARNGHLFVTDGVIKIRNAKHKDDTSALDKDCDCYTCRHYSRAYLHHLDRCNEILGARLNTIHNLRYYQRLMAGLRQAIEESKLELFVADFYGRIGKPVPPLNA

SEQ ID NO: 60733 - protein, 374 aa, Serratia plymuthica
  misc_feature (1)..(374): tr|A0A447Q308|A0A447Q308_SERPL Queuine tRNA-ribosyltran sferase OS=Serratia plymuthica OX=82996 GN=tgt PE=3 SV= 1
MKYELQATDGRARRGRLIFERGVVETPAFMPVGTYGTVKGMTPEEVKETGAQILLGNTFHLWLRPGQEIMKLHGDLHDFMQWHGPILTDSGGFQVFSLGAMRKIKEEGVYFRNPINGDKVFLSPEKSMEIQYDLGSDIVMIFDECTPYPADWDYAKSSMEMSLRWAQRSRQRFDELNNKNALFGIIQGGVYEDLRDVSVKGLVDIGFDGYAVGGLAVGEPKEDMHRILEHVCPQIPEDKPRYLMGVGKPEDLVEGVRRGIDMFDCVMPTRNARNGHLFVNDGVVKIRNAKHKDDTSPLDKDCDCYTCRNYSRAYLHHLDRCNEILGARLNTIHNLRHYQRLMAGLRQAIEQGKLELFVTDFYGRIGKPIPPLNA

SEQ ID NO: 60734 - protein, 374 aa, Serratia plymuthica
  misc_feature (1)..(374): tr|A0A318NVM0|A0A318NVM0_SERPL Queuine tRNA-ribosyltran sferase OS=Serratia plymuthica OX=82996 GN=tgt PE=3 SV= 1
MKYELQATDGRARRGRLVFERGVVETPAFMPVGTYGTVKGMTPEEVKETGAQILLGNTFHLWLRPGQEIMKLHGDLHDFMQWHGPILTDSGGFQVFSLGAMRKIKEEGVYFRNPINGDKVFLSPEKSMEIQYDLGSDIVMIFDECTPYPADWDYAKSSMEMSLRWAQRSRQRFDELNNKNALFGIIQGGVYEDLRDVSVKGLVDIGFDGYAVGGLAVGEPKEDMHRILEHVCPQIPEDKPRYLMGVGKPEDLVEGVRRGIDMFDCVMPTRNARNGHLFVTDGVVKIRNAKHKDDTSPLDKDCDCYTCRNYSRAYLHHLDRCNEILGARLNTIHNLRHYQRLMAGLRQAIEQGKLELFVTDFYGRIGKPIPPLNA

SEQ ID NO: 60735 - protein, 374 aa, Serratia proteamaculans; identical to SEQ ID NO: 60725
  misc_feature (1)..(374): tr|A0A379ZZE6|A0A379ZZE6_9GAMM Queuine tRNA-ribosyltran sferase OS=Serratia proteamaculans OX=28151 GN=tgt PE=3 SV=1

SEQ ID NO: 60736 - protein, 374 aa, Serratia proteamaculans
  misc_feature (1)..(374): sp|A8GAM5|TGT_SERP5 Queuine tRNA-ribosyltransferase OS= Serratia proteamaculans (strain 568) OX=399741 GN=tgt P E=3 SV=1
MKYELDTTDGRARRGRLIFERGVVETPAFMPVGTYGTVKGMTPEEVKETGAQILLGNTFHLWLRPGQEIMKLHGDLHDFMQWHGPILTDSGGFQVFSLGAMRKIKEEGVHFRNPINGDKVFLSPEKSMEIQYDLGSDIVMIFDECTPYPADWDYAKSSMEMSLRWAQRSRQRFDELNNKNALFGIIQGGVYEDLRDVSVKGLVDIGFDGYAVGGLAVGEPKEDMHRILEHVCPQIPEDKPRYLMGVGKPEDLVEGVRRGIDMFDCVMPTRNARNGHLFVTDGVVKIRNAKHKDDTSPLDKDCDCYTCRNYSRAYLHHLDRCNEILGARLNTIHNLRHYQRLMAGLREAIEQGKLELFVADFYGRIGKPVPPLNA

SEQ ID NO: 60737 - protein, 374 aa, Serratia quinivorans
  misc_feature (1)..(374): tr|A0A2X2GEQ3|A0A2X2GEQ3_9GAMM Queuine tRNA-ribosyltran sferase OS=Serratia quinivorans OX=137545 GN=tgt PE=3 S V=1
MKYELDTTDGRARRGRLIFERGVVETPAFMPVGTYGTVKGMTPEEVKETGAQILLGNTFHLWLRPGQEIMKLHGDLHDFMQWHGPILTDSGGFQVFSLGAMRKIKEEGVHFRNPINGDKVFLSPEKSMEIQYDLGSDIVMIFDECTPYPADWDYAKSSMEMSLRWAQRSRQRFDELNNKNALFGIIQGGVYEDLRDVSVKGLVDIGFDGYAVGGLAVGEPKEDMHRILEHVCPQIPEDKPRYLMGVGKPEDLVEGVRRGIDMFDCVMPTRNARNGHLFVTDGVVKIRNAKHKDDTSPLDKDCDCYTCRNYSRAYLHHLDRCNEILGARLNTIHNLRHYQRLMAGLREAIEQGKLELFVADFYGRIGKPIPPLNA

SEQ ID NO: 60738 - protein, 374 aa, Serratia quinivorans; identical to SEQ ID NO: 60736
  misc_feature (1)..(374): tr|A0A2X2HAL7|A0A2X2HAL7_9GAMM Queuine tRNA-ribosyltran sferase OS=Serratia quinivorans OX=137545 GN=tgt PE=3 S V=1

SEQ ID NO: 60739 - protein, 156 aa, Serratia rubidaea
  misc_feature (1)..(156): tr|A0A4U9HAI5|A0A4U9HAI5_SERRU Queuine tRNA-ribosyltran sferase OS=Serratia rubidaea OX=61652 GN=tgt_2 PE=4 SV= 1
MTWGSDIVMIFDECTPYPADWDYAKRSMEMSLRWAQRSRQRFDELNNKNALFGIIQGGVYEDLRDVSVKGLVEIGFDGYAVGGLAVGEPKEDMHRILEHVCPQIPADKPRYLMGVGKPEDLVEGVRRGIDMFDCVMPTRNARNGHLFVTGRCGKNP

SEQ ID NO: 60740 - protein, 374 aa, Serratia rubidaea
  misc_feature (1)..(374): tr|A0A140F0H4|A0A140F0H4_SERRU Queuine tRNA-ribosyltran sferase OS=Serratia rubidaea OX=61652 GN=tgt PE=3 SV=1
MKYELDTTDGRARRGRLIFERGVVETPAFMPVGTYGTVKGMTPEEVKETGAQILLGNTFHLWLRPGQEIMKLHGDLHDFMQWPGPILTDSGGFQVFSLGAMRKIKEEGVYFRNPINGDKVFLSPEKSMEIQYDLGSDIVMIFDECTPYPADWDYAKRSMEMSLRWAQRSRQRFDELNNKNALFGIIQGGVYEDLRDVSVKGLVEIGFDGYAVGGLAVGEPKEDMHRILEHVCPQIPADKPRYLMGVGKPEDLVEGVRRGIDMFDCVMPTRNARNGHLFVTDGVVKIRNAKHKDDTSPLDSECDCYTCRNYSRAYLHHLDRCNEILGARLNTIHNLRFYQRLMAGLRQAIEEGKLEAFVADFYGRIGKPVPPLNV

SEQ ID NO: 60741 - protein, 374 aa, Serratia sp.; identical to SEQ ID NO: 60728
  misc_feature (1)..(374): tr|A0A1B3F8E6|A0A1B3F8E6_9GAMM Queuine tRNA-ribosyltran sferase OS=Serratia sp. YD25 OX=1759437 GN=tgt PE=3 SV= 1

SEQ ID NO: 60742 - protein, 374 aa, Serratia sp.; identical to SEQ ID NO: 60399
  misc_feature (1)..(374): tr|A0A0Q4MJW8|A0A0Q4MJW8_9GAMM Queuine tRNA-ribosyltran sferase OS=Serratia sp. Leaf50 OX=1736223 GN=tgt PE=3 S V=1

SEQ ID NO: 60743 - protein, 374 aa, Serratia symbiotica
  misc_feature (1)..(374): tr|A0A068Z5Y2|A0A068Z5Y2_9GAMM Queuine tRNA-ribosyltran sferase OS=Serratia symbiotica OX=138074 GN=tgt PE=3 SV =1
MEYQLQTTDGCARRGRLIFERGVVETPAFMPVGTYGTVKGMTPEEVKETGAQILLGNTFHLWLRPGQTIMKLHGDLHDFMQWHGPILTDSGGFQVFSLGAMRKIKEEGVYFRNPINGDKVFLSPEKSMEIQYDLGSDIVMIFDECTPYPADWDYAKRSMELSLRWAQRSRQRFDELNNKNALFGIIQGGVYEDLRDASVKGLVDIGFDGYAIGGLAVGEPKEAMHRILEHVCPQIPPDKPRYLMGVGKPEDLVEGVRRGIDMFDCVMPTRNARNGHLFVTDGVVKIRNAKYKDDISPLDKDCDCYTCRHYSRAYLHHLDRCNEILGARLNTIHNLRYYQRLMAGLRQAIEEGKLALFVADFYGRLGKPMPPLNT

SEQ ID NO: 60744 - protein, 374 aa, Serratia symbiotica
  misc_feature (1)..(374): tr|A0A068RC48|A0A068RC48_9GAMM Queuine tRNA-ribosyltran sferase OS=Serratia symbiotica SCt-VLC OX=1347341 GN=tg t PE=3 SV=1
MEYQLQTTDGCAHRGRLIFERGVVETPAFMPVGTYGTVKGMTPEEVKETGAQILLGNTFHLWLRPGQTIMKLHGDLHDFMQWHGPILTDSGGFQVFSLGAMRKIKEEGVYFRNPINGDKVFLSPEKSMEIQYDLGSDIVMIFDECTPYPADWDYAKRSMELSLRWAQRSRQRFDELNNKNALFGIIQGGVYEDLRDASVKGMVDIGFDGYAVGGLAVGEPKEAMHRILEHVCPQIPPDKPRYLMGVGKPEDLVEGVRRGIDMFDCVMPTRNARNGHLFVTDGVVKIRNAKYKDDISPLDKDCDCYTCRHYSRAYLHHLDRCNEILGARLNTIHNLRYYQRLMAGLRQAIEEGKLAMFVADFYGRLGKPMPPLNT

SEQ ID NO: 60745 - protein, 374 aa, Serratia ureilytica; identical to SEQ ID NO: 60728
  misc_feature (1)..(374): tr|A0A5C7BVK5|A0A5C7BVK5_9GAMM Queuine tRNA-ribosyltran sferase OS=Serratia ureilytica OX=300181 GN=tgt PE=3 SV =1

SEQ ID NO: 60746 - protein, 377 aa, Sharpea azabuensis
  misc_feature (1)..(377): tr|A0A1H6TBP9|A0A1H6TBP9_9LACO Queuine tRNA-ribosyltran sferase OS=Sharpea azabuensis OX=322505 GN=tgt PE=3 SV= 1
MKDFWYELKHVEKDTGARYGILHTPHGDVETPMFMPVGTQATVKGIWPEMLKEMQSQVVLANTYHLWLRPGDDVVKQAGGLHKFMNYDGPILTDSGGFQVFSLGKMRKIEEEGVTFRSYIDGSKLFLSPEKSIEIQENLGADIIMSFDECAPYPSDYYYMKNSVERTLRWAERGLKAHKREDQALFGIVQGGEFADLRELSAKTLASMDFPGYSIGGTSVGEPKDVMYQMIDDSVKWLPENKPRYLMGVGNPIDLIEAAMRGIDMYDCVLPTRVARHGALMTHHGRMNINNEKYKYDFTPIDDQCNCYACKNYTRAYIRHLHKEDEIFGKSLMSIHNVQFLLDLSRDIREAIKNDRLLEFRKEFLDAYGHNVYERAF

SEQ ID NO: 60747 - protein, 374 aa, Shewanella algae
  misc_feature (1)..(374): tr|A0A1S2TUN6|A0A1S2TUN6_9GAMM Queuine tRNA-ribosyltran sferase OS=Shewanella algae OX=38313 GN=tgt PE=3 SV=1
MKFELDTTDGRARRGRLIFERGTVETPAFMPVGTYGTVKGMTPEEVRATGADILLGNTFHLWLRPGEEIMRKHGDLHDFMNWQRPILTDSGGFQVFSLGDIRKITEEGVHFRSPINGEKIFMDAEKSMQIQYSLGSDVVMIFDECTPYPATHDEARKSMQMSLRWAKRSRDEFDRLENPNSLFGIIQGSVYEDLRDESLKGLLEIGFDGYAVGGLAVGEPKADMHRVLEHVCPQIPTDKPRYLMGVGKPEDLVEGVRRGIDMFDCVMPTRNARNGHLFVTEGVIKIRNARHRDDTSPLDPECDCYTCKNYSRAYLYHLDRCNEILGARLNTIHNLRYYQRLMEGLRGAIETGTLDAFVKDFYGRQGREVPELVD

SEQ ID NO: 60748 - protein, 374 aa, Shewanella algae
  misc_feature (1)..(374): tr|A0A2T3H602|A0A2T3H602_9GAMM Queuine tRNA-ribosyltran sferase OS=Shewanella algae OX=38313 GN=tgt PE=3 SV=1
MKFELDTTDGRARRGRLIFDRGTVETPAFMPVGTYGTVKGMTPEEVRATGADILLGNTFHLWLRPGEEIMRKHGDLHDFMNWQRPILTDSGGFQVFSLGDIRKITEEGVHFRSPINGEKIFMDAEKSMQIQYSLGSDVVMIFDECTPYPATHDEARKSMQMSLRWAKRSRDEFDRLENPNSLFGIIQGSVYEDLRDESLKGLLEIGFDGYAVGGLAVGEPKADMHRVLEHVCPQIPTDKPRYLMGVGKPEDLVEGVRRGIDMFDCVMPTRNARNGHLFVTEGVIKIRNARHRDDTSPLDPECDCYTCKNYSRAYLYHLDRCNEILGARLNTIHNLRYYQRLMEGLRGAIETGTLDAFVKDFYGRQGREVPELVD

SEQ ID NO: 60749 - protein, 374 aa, Shewanella amazonensis
  misc_feature (1)..(374): sp|A1S7P2|TGT_SHEAM Queuine tRNA-ribosyltransferase OS= Shewanella amazonensis (strain ATCC BAA-1098 / SB2B) OX =326297 GN=tgt PE=3 SV=1
MKFELITTQGRARRGRLVFERGTVETPAFMPVGTYGTVKGMTPEEVRATGADILLGNTFHLWLRPGEEIMRKHGDLHDFMNWQRPILTDSGGFQVFSLGDIRKITEEGVHFRSPINGEKIFMDAEKSMQIQHSLGSDVVMIFDECTPYPATHDEARKSMQMSLRWAKRSRDEFDRLENPNSLFGIIQGSVYEDLRDESLKGLLEIGFDGYAVGGLAVGEPKEDMHRVLEHVCPQIPADKPRYLMGVGKPEDLVEGVRRGVDMFDCVMPTRNARNGHLFTSEGVIKIRNARHRDDTSPLDPKCDCYTCTNYSRAYLHHLDRCNEILGARLNTIHNLRYYQRLMEGLRGAIETGTLDAFVADFYTSQGREVPELKD

SEQ ID NO: 60750 - protein, 377 aa, Shewanella atlantica
  misc_feature (1)..(377): tr|A0A3S0I7X7|A0A3S0I7X7_9GAMM Queuine tRNA-ribosyltran sferase OS=Shewanella atlantica OX=271099 GN=tgt PE=3 S V=1
MKFELDTTQGRARRGRLVFERGTVETPAFMPVGTYGTVKGMTPEEVRATGADILLGNTFHLWLRPGEEIMRKHGDLHDFMNWQRPILTDSGGFQVFSLGDIRKITEEGVHFRSPINGEKIFLDPEKSMQIQNSLGSDVVMIFDECTPYPATEDEARKSMQMSLRWAQRSRDEFDKLENPNSLFGIIQGGVYEDLRDESLKGLVDIGFDGYAVGGLAVGEPKEDMHRILEHTCPQIPTDKPRYLMGVGKPEDLVEGVRRGVDMFDCVMPTRNARNGHLFTTEGVIKIRNARHRDDTSPLDDKCDCYTCKNYSRAYLYHLDRCNEILGARLNTIHNLRYYQKLMEGLRGAIETGTLDAFVEEFYTSQGREVPEVPELTD

SEQ ID NO: 60751 - protein, 374 aa, Shewanella baltica
  misc_feature (1)..(374): tr|A0A161WKV7|A0A161WKV7_9GAMM Queuine tRNA-ribosyltran sferase OS=Shewanella baltica OX=62322 GN=tgt PE=3 SV=1
MKFELDTTDGRARRGRLIFDRGTVETPAFMPVGTYGTVKGMTPEEVRATGADILLGNTFHLWLRPGEEIMRKHGDLHDFMNWQRPILTDSGGFQVFSLGDIRKITEEGVHFRSPINGEKIFLDPEKSMQIQDALGSDVVMIFDECTPYPATEDEARKSMQMSLRWARRSRDEFDRLENPNSLFGIIQGGVYEDLRDESLKGLVDIGFDGYAVGGLAVGEPKADMHRILEHICPQIPADKPRYLMGVGKPEDLVEGVRRGVDMFDCVMPTRNARNGHLFTSEGVIKIRNARHRDDTSPLDTKCDCYTCKNYSRAYLYHLDRCNEILGARLNTIHNLRYYQMLMEGLRGAIETGTLDAFVADFYTSQGREVPELVD

SEQ ID NO: 60752 - protein, 374 aa, Shewanella baltica; identical to SEQ ID NO: 60751
  misc_feature (1)..(374): sp|B8EDJ7|TGT_SHEB2 Queuine tRNA-ribosyltransferase OS= Shewanella baltica (strain OS223) OX=407976 GN=tgt PE=3 SV=1

SEQ ID NO: 60753 - protein, 374 aa, Shewanella benthica
  misc_feature (1)..(374): tr|A9D3Y7|A9D3Y7_9GAMM Queuine tRNA-ribosyltransferase OS=Shewanella benthica KT99 OX=314608 GN=tgt PE=3 SV=1
MKFELDTTDGRARRGRLIFDRGTVETPAFMPVGTYGTVKGMTPEEVRETGAEILLGNTFHLWLRPGEEIMRKHGGLHDFMNWQGPILTDSGGFQVFSLGDIRKITEAGVHFRSPINGDKIFLDPEKSMQIQNSLGSDVVMIFDECTPYPATEDEARKSMQMSLRWAQRSRDEFDKLENPNSLFGIIQGGVYEDLRDESLQGLVDIGFDGYAVGGLAVGEPKEDMHRILEHVCPQIPTDKPRYLMGVGKPEDLVEGVRRGVDMFDCVMPTRNARNGHLFTSEGVIKIRNARHRDDTATLDAKCDCYTCKNYSRAYLYHLDRCNEILGARLNTIHNLRYYQRLMQGLRGAIETGTLDAFVEEFYTSQGREVPKLFD

SEQ ID NO: 60754 - protein, 374 aa, Shewanella benthica
  misc_feature (1)..(374): tr|A0A330M5Y4|A0A330M5Y4_9GAMM Queuine tRNA-ribosyltran sferase OS=Shewanella benthica OX=43661 GN=tgt PE=3 SV= 1
MKFELDTTDGRARRGRLIFDRGTVETPAFMPVGTYGTVKGMTPEEVRETGAEILLGNTFHLWLRPGEEIMRKHGGLHDFMNWQGPILTDSGGFQVFSLGDIRKITEAGVHFRSPINGDKIFLDPEKSMQIQNSLGSDVVMIFDECTPYPATEDEARKSMQMSLRWAQRSRAEFDKLENPNSLFGIIQGGVYEDLRDESLQGLVDIGFDGYAVGGLAVGEPKEDMHRILEHVCPQIPTDKPRYLMGVGKPEDLVEGVRRGVDMFDCVMPTRNARNGHLFTSEGVIKIRNARHRDDTATLDAKCDCYTCKNYSRAYLYHLDRCNEILGARLNTIHNLRYYQRLMQGLRGAIETGTLDAFVEEFYTSQGREVPKLFD

SEQ ID NO: 60755 - protein, 374 aa, Shewanella bicestrii
  misc_feature (1)..(374): tr|A0A220UQ57|A0A220UQ57_9GAMM Queuine tRNA-ribosyltran sferase OS=Shewanella bicestrii OX=2018305 GN=tgt PE=3 SV=1
MKFELDTTDGRARRGRLIFERGTVETPAFMPVGTYGTVKGMTPEEVRATGADILLGNTFHLWLRPGEEIMRKHGDLHDFMNWQRPILTDSGGFQVFSLGDIRKITEEGVHFRSPINGEKIFLDPEKSMQIQHALGSDVVMIFDECTPYPATEDEARKSMQMSLRWAKRSRDEFDRLENPNSLFGIIQGSVYEDLRDESLKGLVEIGFDGYAVGGLAVGEPKEDMHRILEHVCPQIPADKPRYLMGVGKPEDLVEGVRRGIDMFDCVMPTRNARNGHLFTSEGVIKIRNARHRDDTSPLDPKCDCYTCKNYSRAYLYHLDRCNEILGARLNTIHNLRYYQMLMEGLRGAIETGTLDAFVKDFYTSQGREVPELVD

SEQ ID NO: 60756 - protein, 377 aa, Shewanella canadensis
  misc_feature (1)..(377): tr|A0A431WUP3|A0A431WUP3_9GAMM Queuine tRNA-ribosyltran sferase OS=Shewanella canadensis OX=271096 GN=tgt PE=3 SV=1
MKFELDTTQGRARRGRLVFERGTVETPAFMPVGTYGTVKGMTPEEVRATGADILLGNTFHLWLRPGEEIMRKHGDLHDFMNWQRPILTDSGGFQVFSLGDIRKITEEGVHFRSPINGEKIFLDPEKSMQIQNSLGSDVVMIFDECTPYPATEDEARKSMQMSLRWAQRSRDEFDKLENPNSLFGIIQGGVYEDLRDESLKGLVDIGFDGYAVGGLAVGEPKADMHRILEHVCPQIPTDKPRYLMGVGKPEDLVEGVRRGVDMFDCVMPTRNARNGHLFTTEGVIKIRNARHRDDTSPLDDKCDCYTCKNYSRAYLYHLDRCNEILGARLNTIHNLRYYQKLMEGLRGAIETGTLDAFVEEFYTSQGREVPEVPELTD

SEQ ID NO: 60757 - protein, 374 aa, Shewanella chilikensis; identical to SEQ ID NO: 60748
  misc_feature (1)..(374): tr|A0A2V4W3X3|A0A2V4W3X3_9GAMM Queuine tRNA-ribosyltran sferase OS=Shewanella chilikensis OX=558541 GN=tgt PE=3 SV=1

SEQ ID NO: 60758 - protein, 374 aa, Shewanella colwelliana
  misc_feature (1)..(374): tr|A0A1E5INA5|A0A1E5INA5_SHECO Queuine tRNA-ribosyltran sferase OS=Shewanella colwelliana OX=23 GN=tgt PE=3 SV= 1
MKFELDTTDGRARRGRLVFERGTVETPAFMPVGTYGTVKGMTPEEVRATGADILLGNTFHLWLRPGEEIMRKHGDLHDFMNWQRPILTDSGGFQVFSLGDIRKITEEGVHFRSPINGEKIFLDPEKSMQIQDSLGSDVVMIFDECTPYPATEDEARKSMQMSLRWAQRSRDEFNRLENPNSLFGIIQGGVYEDLRDESLEGLVNIGFDGYAIGGLAVGEPKEDMHRILEHVCPKIPTEKPRYLMGVGKPEDLVEGVRRGVDMFDCVMPTRNARNGHLFTSEGVIKIRNARHRDDTSPLDTKCDCYTCKNYSRAYLYHLDRCNEILGARLNTIHNLRYYQMLMEGLRGAIETGTLDAFVEEFYTSQGREVPKLID

SEQ ID NO: 60759 - protein, 374 aa, Shewanella decolorationis
  misc_feature (1)..(374): tr|A0A5B8QWY2|A0A5B8QWY2_9GAMM Queuine tRNA-ribosyltran sferase OS=Shewanella decolorationis OX=256839 GN=tgt P E=3 SV=1
MKFELDTTDGRARRGRLIFERGTVETPAFMPVGTYGTVKGMTPEEVRATGADILLGNTFHLWLRPGEEIMRKHGDLHDFMNWQRPILTDSGGFQVFSLGDIRKITEEGVHFRSPINGEKIFLDPEKSMQIQHALGSDVVMIFDECTPYPATEDEARKSMQMSLRWAKRSRDEFDRLENPNSLFGIIQGSVYEDLRDESLKGLVDIGFDGYAVGGLAVGEPKEDMHRILEHICPQIPADKPRYLMGVGKPEDLVEGVRRGIDMFDCVMPTRNARNGHLFTSEGVIKIRNARHRDDTSPLDPKCDCYTCKNYSRAYLYHLDRCNEILGARLNTIHNLRYYQMLMEGLRGAIETGTLDAFVKDFYTSQGREVPELVD

SEQ ID NO: 60760 - protein, 374 aa, Shewanella decolorationis; identical to SEQ ID NO: 60759
  misc_feature (1)..(374): tr|V1DHQ6|V1DHQ6_9GAMM Queuine tRNA-ribosyltransferase OS=Shewanella decolorationis S12 OX=1353536 GN=tgt PE=3 SV=1

SEQ ID NO: 60761 - protein, 377 aa, Shewanella denitrificans
  misc_feature (1)..(377): sp|Q12PD9|TGT_SHEDO Queuine tRNA-ribosyltransferase OS= Shewanella denitrificans (strain OS217 / ATCC BAA-1090 / DSM 15013) OX=318161 GN=tgt PE=3 SV=1
MKFELDTTQGRARRGRLIFDRGTVETPAFMPVGTYGTVKGMTPEEVRATGADILLGNTFHLWLRPGEEIMRKHGDLHDFMNWQRPILTDSGGFQVFSLGDIRKITEEGVHFRSPINGEKIFLDPEKSMQIQDSLGSDVVMIFDECTPYPATEDEARKSMQMSLRWAQRSRDEFDRLENPNALFGIIQGGVYEDLRDESLTGLVNIGFDGYAIGGLAVGEPKPDMHRILEHVCPQIPADKPRYLMGVGKPEDLVEGVRRGVDMFDCVMPTRNARNGHLFTSEGVIKIRNARHRDDTAPLDEKCDCYTCKNYSRAYLYHLDRCNEILGARLNTIHNLRYYQMLMEGLRGAIETGTLDAFVSDFYTGLGREVPEVPELVD

SEQ ID NO: 60762 - protein, 374 aa, Shewanella fodinae
  misc_feature (1)..(374): tr|A0A4R2FER6|A0A4R2FER6_9GAMM Queuine tRNA-ribosyltran sferase OS=Shewanella fodinae OX=552357 GN=tgt PE=3 SV= 1
MKFELDTTDGRARRGRLIFERGTVETPAFMPVGTYGTVKGMTPEEVRATGADILLGNTFHLWLRPGEAIMRKHGDLHDFMNWPRPILTDSGGFQVFSLGDIRKITEEGVHFRSPINGEKIFLDPEKSMQIQHALGSDIVMIFDECTPYPATPDEARKSMEMSLRWAKRSREEFDRLQNPNSLFGIIQGSIYETLRDESLKGLVDIGFDGYAIGGLAVGEPKADMHRILEHICPQIPADKPRYLMGVGKPEDLVEGVRRGVDMFDCVMPTRNARNGHLFTSDGVIKIRNARHRDDTSPLDPECDCYTCKHYSRAYLHHLDRCNEMLGARLNTIHNLRYYQRLMEGLRGAIETGTLDAFVREFYSRQGREVPEAID

SEQ ID NO: 60763 - protein, 374 aa, Shewanella frigidimarina
  misc_feature (1)..(374): sp|Q07ZM2|TGT_SHEFN Queuine tRNA-ribosyltransferase OS= Shewanella frigidimarina (strain NCIMB 400) OX=318167 G N=tgt PE=3 SV=1
MKFELDTTDGRARRGRLIFDRGTVETPAFMPVGTYGTVKGMTPEEVRATGADILLGNTFHLWLRPGEEIMRKHGDLHDFMNWQRPILTDSGGFQVFSLGDIRKITEEGVHFRSPINGEKIFLDPEKSMQIQDSLGSDVVMIFDECTPYPATHDEARKSMQMSLRWAKRSRDEFDRLENPNSLFGIIQGGVFEDLRDESVKGLLDIGFDGYAVGGLAVGEPKADMHRILEHVCPQIPADKPRYLMGVGKPEDLVEGVRRGVDMFDCVMPTRNARNGHLFTSEGVIKIRNARHRDDTATLDPKCDCYTCKNYSRAYLYHLDRCNEILGARLNTIHNLRYYQMLMEGLRGAIETGTLDAFVKEFYTSFGREVPELIV

SEQ ID NO: 60764 - protein, 374 aa, Shewanella frigidimarina; identical to SEQ ID NO: 60763
  misc_feature (1)..(374): tr|A0A106C3P4|A0A106C3P4_SHEFR Queuine tRNA-ribosyltran sferase OS=Shewanella frigidimarina OX=56812 GN=tgt PE= 3 SV=1

SEQ ID NO: 60765 - protein, 377 aa, Shewanella halifaxensis
  misc_feature (1)..(377): sp|B0TND4|TGT_SHEHH Queuine tRNA-ribosyltransferase OS= Shewanella halifaxensis (strain HAW-EB4) OX=458817 GN=t gt PE=3 SV=1
MKFELDTTQGRARRGRLIFERGTVETPAFMPVGTYGTVKGMTPEEVRATGADILLGNTFHLWLRPGEEIMRKHGDLHDFMNWQRPILTDSGGFQVFSLGDIRKITEEGVHFRSPINGEKIFLDPEKSMQIQDSLGSDVVMIFDECTPYPATEDEARKSMQMSLRWAQRSRDEFDRLENPNSLFGIIQGGVYEDLRDESLNGLVDIGFDGYAVGGLAVGEPKEDMHRILEHVCPKIPADKPRYLMGVGKPEDLVEGVRRGVDMFDCVMPTRNARNGHLFTSEGVIKIRNARHRDDTSPLDDKCDCYTCKNYSRAYLYHLDRCNEILGARLNTIHNLRYYQRLMEGLRGAIETGTLDAFVTEFYTSQGREVPEVPELTD

SEQ ID NO: 60766 - protein, 377 aa, Shewanella hanedai
  misc_feature (1)..(377): tr|A0A553JH39|A0A553JH39_SHEHA Queuine tRNA-ribosyltran sferase OS=Shewanella hanedai OX=25 GN=tgt PE=3 SV=1
MKFELDTTDGRARRGRLIFDRGTVETPAFMPVGTYGTVKGMTPEEVRETGADILLGNTFHLWLRPGEEIMRKHGDLHDFMNWQRPILTDSGGFQVFSLGDIRKITEAGVHFRSPINGEKIFLDPEKSIQIQNSLGSDVVMIFDECTPYPATEDEARKSMQMSLRWAQRSRDEFDRLENPNSLFGIIQGGVYEDLRDESLNGLVNIGFDGYAVGGLAVGEPKEDMHRILEHVCPQIPNDKPRYLMGVGKPEDLVEGVRRGVDMFDCVMPTRNARNGHLFTSEGVIKIRNARHRDDTATLDDKCDCYTCKNYSRAYLYHLDRCNEILGARLNTIHNLRYYQRLMEGLRGAIETGTLEAFVEEFYTSQGREVPEVPELIV

SEQ ID NO: 60767 - protein, 374 aa, Shewanella livingstonensis; identical to SEQ ID NO: 60763
  misc_feature (1)..(374): tr|A0A3G8LZ32|A0A3G8LZ32_9GAMM Queuine tRNA-ribosyltran sferase OS=Shewanella livingstonensis OX=150120 GN=tgt PE=3 SV=1

SEQ ID NO: 60768 - protein, 374 aa, Shewanella loihica
  misc_feature (1)..(374): sp|A3QFF5|TGT_SHELP Queuine tRNA-ribosyltransferase OS= Shewanella loihica (strain ATCC BAA-1088 / PV-4) OX=323 850 GN=tgt PE=3 SV=1
MKFELDTTDGRARRGRLVFERGTVETPAFMPVGTYGTVKGMTPEEVRATGADILLGNTFHLWLRPGEEIMRKHGDLHDFMNWQRPILTDSGGFQVFSLGDIRKITEEGVHFRSPINGEKIFMDAEKSMQIQYSLGSDVVMIFDECTPYPATHDEARKSMQMSLRWAQRSRDEFDRLENPNSLFGIIQGSVYEDLRDESLKGLLEIGYDGYAVGGLAVGEPKEDMHRILEHVCPQIPADKPRYLMGVGKPEDLVEGVRRGVDMFDCVMPTRNARNGHLFTSEGVIKIRNARHRDDTSPLDAKCDCYTCKNYSRAYLYHLDRCNEILGARLNTIHNLRYYQMLMEGLRGAIETGTLDAFVEEFYTSQGREVPKLSD

SEQ ID NO: 60769 - protein, 374 aa, Shewanella mangrovi
  misc_feature (1)..(374): tr|A0A094JXI0|A0A094JXI0_9GAMM Queuine tRNA-ribosyltran sferase OS=Shewanella mangrovi OX=1515746 GN=tgt PE=3 S V=1
MKFELQTTDGRARRGRLVFERGTVETPAFMPVGTYGTVKGMTPEEVRETGADILLGNTFHLWLRPGEEVMQKHGDLHDFMNWQRPILTDSGGFQVFSLGDIRKITEEGVHFRSPINGEKIFLDPEKSMQIQHSLGSDVVMIFDECTPYPATVDEARKSMQMSLRWAQRSRDEFDRLKNPNALFGIIQGSVYEHLRDESLDGLVNIGFDGYAIGGLAVGEPKEDMHRILEHVCPKIPADKPRYLMGVGKPEDLVEGVRRGVDMFDCVMPTRNARNGHLFTADGVIKIRNARHRDDTSPLEAECDCYTCKHYSRAYLHHLDRCNEMLGARLNTIHNLRYYQRLMQGLRGAIETGTLDAFVRDFYTRQGREVPELLD

SEQ ID NO: 60770 - protein, 374 aa, Shewanella marisflavi
  misc_feature (1)..(374): tr|A0A4Y6IZT9|A0A4Y6IZT9_9GAMM Queuine tRNA-ribosyltran sferase OS=Shewanella marisflavi OX=260364 GN=tgt PE=3 SV=1
MKFELDTTDGRARRGRLVFERGTVETPAFMPVGTYGTVKGMTPEEVRATGADILLGNTFHLWLRPGEEIMRKHGDLHDFMNWQRPILTDSGGFQVFSLGDIRKITEEGVHFRSPINGEKIFMDAEKSMQIQDSLGSDVVMIFDECTPYPATHDEARKSMQMSLRWAQRSRDEFDRLENPNSLFGIIQGSVYEDLRDESLKGLLEIGFDGYAVGGLAVGEPKEDMHRVLEHVCPQIPADKPRYLMGVGKPEDLVEGVRRGVDMFDCVMPTRNARNGHLFTSEGVIKIRNARHRDDTSPLDAKCDCYTCKNYSRAYLYHLDRCNEILGARLNTIHNLRYYQMLMEGLRGAIETGTLDAFVEEFYTSQGREVPKLSD

SEQ ID NO: 60771 - protein, 374 aa, Shewanella morhuae
  misc_feature (1)..(374): tr|A0A1N6W5X3|A0A1N6W5X3_9GAMM Queuine tRNA-ribosyltran sferase OS=Shewanella morhuae OX=365591 GN=tgt PE=3 SV= 1
MKFELDTTDGRARRGRLIFERGTVETPAFMPVGTYGTVKGMTPEEVRATGADILLGNTFHLWLRPGEEIMRKHGDLHDFMNWQRPILTDSGGFQVFSLGDIRKITEEGVHFRSPINGEKIFLDPEKSMQIQDALGSDVVMIFDECTPYPATEDEARKSMQMSLRWAKRSRDEFDRLDNPNSLFGIIQGGVYEDLRDESLKGLVDIGFDGYAVGGLAVGEPKADMHRILEHICPQIPADKPRYLMGVGKPEDLVEGVRRGVDMFDCVMPTRNARNGHLFTSEGVIKIRNARHRDDTSPLDAKCDCYTCKNYSRAYLYHLDRCNEILGARLNTMHNLRYYQMLMEGLRGAIETGTLDAFVKDFYTNQGREVPEFVD

SEQ ID NO: 60772 - protein, 374 aa, Shewanella oneidensis
  misc_feature (1)..(374): sp|Q8ECM3|TGT_SHEON Queuine tRNA-ribosyltransferase OS= Shewanella oneidensis (strain MR-1) OX=211586 GN=tgt PE =3 SV=1
MKFELDTTDGRARRGRLIFDRGTVETPAFMPVGTYGTVKGMTPEEVRATGADILLGNTFHLWLRPGEEIMRKHGDLHDFMNWQRPILTDSGGFQVFSLGDIRKITEEGVHFRSPINGEKIFLDPEKSMQIQHALGSDVVMIFDECTPYPATEDEARKSMQMSLRWAKRSRDEFDRLENPNSLFGIIQGSVYEDLRDESLKGLVEIGFDGYAVGGLAVGEPKEDMHRILEHVCPQILADKPRYLMGVGKPEDLVEGVRRGIDMFDCVMPTRNARNGHLFTSEGVIKIRNARHRDDTSPLDPKCDCYTCKNYSRAYLYHLDRCNEILGARLNTIHNLRYYQMLMEGLRGAIETGTLDAFVKDFYTSQGREVPELVD

SEQ ID NO: 60773 - protein, 374 aa, Shewanella oneidensis; identical to SEQ ID NO: 60755
  misc_feature (1)..(374): tr|A0A2W5FAZ0|A0A2W5FAZ0_SHEOE Queuine tRNA-ribosyltran sferase OS=Shewanella oneidensis OX=70863 GN=tgt PE=3 S V=1

SEQ ID NO: 60774 - protein, 377 aa, Shewanella pealeana
  misc_feature (1)..(377): sp|A8H2K8|TGT_SHEPA Queuine tRNA-ribosyltransferase OS= Shewanella pealeana (strain ATCC 700345 / ANG-SQ1) OX=3 98579 GN=tgt PE=3 SV=1
MKFELDTTQGRARRGRLIFERGTVETPAFMPVGTYGTVKGMTPEEVRETGADILLGNTFHLWLRPGEEIMRKHGDLHDFMNWQRPILTDSGGFQVFSLGDIRKITEEGVHFRSPINGEKIFLDPEKSMQIQDSLGSDVVMIFDECTPYPATEDEARKSMQMSLRWAQRSRDEFDRLENPNSLFGIIQGGVYEDLRDESLNGLVDIGFDGYAVGGLAVGEPKEDMHRILEHVCPKIPADKPRYLMGVGKPEDLVEGVRRGVDMFDCVMPTRNARNGHLFTSEGVIKIRNARHRDDTSPLDDKCDCYTCKNYSRAYLYHLDRCNEILGARLNTIHNLRYYQRLMEGLRGAIETGTLDAFVTEFYTSQGREVPEVPELSD

SEQ ID NO: 60775 - protein, 377 aa, Shewanella piezotolerans
  misc_feature (1)..(377): sp|B8CLC5|TGT_SHEPW Queuine tRNA-ribosyltransferase OS= Shewanella piezotolerans (strain WP3 / JCM 13877) OX=22 5849 GN=tgt PE=3 SV=1
MKFELDTTQGRARRGRLVFERGTVETPAFMPVGTYGTVKGMTPEEVRETGADILLGNTFHLWLRPGEEIMRKHGDLHDFMNWQRPILTDSGGFQVFSLGDIRKITEEGVHFRSPINGEKIFLDPEKSMQIQDSLGSDVVMIFDECTPYPATEDEARKSMQMSLRWAQRSRDEFDRLENPNSLFGIIQGGVYEGLRDESLKGLVDIGFDGYAVGGLAVGEPKEDMHRILEHTCPQIPADKPRYLMGVGKPEDLVEGVRRGVDMFDCVMPTRNARNGHLFTSEGVVKIRNARHRDDTSTLDDKCDCYTCKNYSRAYLYHLDRCNEILGARLNTIHNLRYYQRLMEGLRGAIETGTLDDFVTEFYTSQGREVPEVPELTD

SEQ ID NO: 60776 - protein, 374 aa, Shewanella psychrophila
  misc_feature (1)..(374): tr|A0A1S6HT85|A0A1S6HT85_9GAMM Queuine tRNA-ribosyltran sferase OS=Shewanella psychrophila OX=225848 GN=tgt PE= 3 SV=1
MKFELDTTDGRARRGRLIFERGTVETPAFMPVGTYGTVKGMTPEEVRETGADILLGNTFHLWLRPGEEIMRKHGDLHDFMNWQGPILTDSGGFQVFSLGDIRKITEEGVHFRSPINGEKIFLDPEKSMQIQNSLGSDVVMIFDECTPYPATEDEARKSMQMSLRWAQRSRDEFDKLENPNSLFGIIQGGVYEDLRDESLNGLVDIGFDGYAVGGLAVGEPKEDMHRILEHVCPQIPTDKPRYLMGVGKPEDLVEGVRRGVDMFDCVMPTRNARNGHLFTSEGVIKIRNARHRDDTATLDAKCDCYTCKNYSRAYLYHLDRCNEILGARLNTIHNLRYYQRLMEGLRGAIETGTLDAFVEEFYTSQGREVPKLSD

SEQ ID NO: 60777 - protein, 374 aa, Shewanella putrefaciens; identical to SEQ ID NO: 60751
  misc_feature (1)..(374): tr|A0A3S4Q7P6|A0A3S4Q7P6_SHEPU Queuine tRNA-ribosyltran sferase OS=Shewanella putrefaciens OX=24 GN=tgt PE=3 SV =1

SEQ ID NO: 60778 - protein, 374 aa, Shewanella putrefaciens
  misc_feature (1)..(374): sp|A4Y8C2|TGT_SHEPC Queuine tRNA-ribosyltransferase OS= Shewanella putrefaciens (strain CN-32 / ATCC BAA-453) O X=319224 GN=tgt PE=3 SV=1
MKFELDTTDGRARRGRLIFDRGTVETPAFMPVGTYGTVKGMTPEEVRATGADILLGNTFHLWLRPGEEIMRKHGDLHDFMNWQRPILTDSGGFQVFSLGDIRKITEEGVHFRSPINGEKIFLDPEKSMQIQDALGSDVVMIFDECTPYPATEDEARKSMQMSLRWAKRSRDEFDRLKNPNSLFGIIQGGVYEDLRDESLKGLVEIGFDGYAVGGLAVGEPKADMHRILEHICPQIPADKPRYLMGVGKPEDLVEGVRRGVDMFDCVMPTRNARNGHLFTSEGVIKIRNARHRDDTSPLDTKCDCYTCKNYSRAYLYHLDRCNEILGARLNTIHNLRYYQMLMEGLRGAIETGTLDAFVADFYTSQGREVPELVD

SEQ ID NO: 60779 - protein, 377 aa, Shewanella sediminis
  misc_feature (1)..(377): sp|A8FXC6|TGT_SHESH Queuine tRNA-ribosyltransferase OS= Shewanella sediminis (strain HAW-EB3) OX=425104 GN=tgt PE=3 SV=1
MKFELDTTQGRARRGRLVFERGTVETPAFMPVGTYGTVKGMTPEEVRATGADILLGNTFHLWLRPGEEIMRKHGDLHDFMNWQRPILTDSGGFQVFSLGDIRKITEEGVHFRSPINGEKIFLDPEKSMQIQNSLGSDVVMIFDECTPYPATEDEARKSMQMSLRWAQRSRDEFDKLENPNSLFGIIQGGVYEDLRDESLKGLVDIGFDGYAVGGLAVGEPKADMHRILEHTCPQIPTDKPRYLMGVGKPEDLVEGVRRGVDMFDCVMPTRNARNGHLFTTEGVIKIRNARHRDDTSPLDDKCDCYTCKNYSRAYLYHLDRCNEILGARLNTIHNLRYYQKLMEGLRGAIETGTLDAFVEEFYTSQGREVPEVPELTD

SEQ ID NO: 60780 - protein, 374 aa, Shewanella sp.; identical to SEQ ID NO: 60755
  misc_feature (1)..(374): sp|A0KV50|TGT_SHESA Queuine tRNA-ribosyltransferase OS= Shewanella sp. (strain ANA-3) OX=94122 GN=tgt PE=3 SV=1

SEQ ID NO: 60781 - protein, 374 aa, Shewanella sp.; identical to SEQ ID NO: 60755
  misc_feature (1)..(374): sp|Q0HKF7|TGT_SHESM Queuine tRNA-ribosyltransferase OS= Shewanella sp. (strain MR-4) OX=60480 GN=tgt PE=3 SV=1

SEQ ID NO: 60782 - protein, 377 aa, Shewanella violacea
  misc_feature (1)..(377): tr|D4ZIP6|D4ZIP6_SHEVD Queuine tRNA-ribosyltransferase OS=Shewanella violacea (strain JCM 10179 / CIP 106290 / LMG 19151 / DSS12) OX=637905 GN=tgt PE=3 SV=1
MKFELDTTDGRARRGRLIFDRGTVETPAFMPVGTYGTVKSMTPEEVRESGADILLGNTFHLWLRPGEEIMRKHGDLHDFMNWQRPILTDSGGFQVFSLGDIRKITEAGVHFRSPINGEKIFLDPEKSIQIQNSLGSDVVMIFDECTPYPATEDEARKSMQMSLRWAQRSRDEFDKLENPNSLFGIIQGGVYEDLRDESLQGLVDIGFDGYAVGGLAVGEPKEDMHRILEHVCPQIPADKPRYLMGVGKPEDLVEGVRRGVDMFDCVMPTRNARNGHLFTPEGVIKIRNARHRDDTATLDATCDCYTCKNYSRAYLYHLDRCNEILGARLNTIHNLRYYQRLMEGLRGAIETGTLDSFVEEFYANQGREVPEVPKLTD

SEQ ID NO: 60783 - protein, 374 aa, Shewanella xiamenensis; identical to SEQ ID NO: 60755
  misc_feature (1)..(374): tr|A0A1E3V4L5|A0A1E3V4L5_9GAMM Queuine tRNA-ribosyltran sferase OS=Shewanella xiamenensis OX=332186 GN=tgt PE=3 SV=1

SEQ ID NO: 60784 - protein, 375 aa, Shewanella xiamenensis
  misc_feature (1)..(375): tr|A0A073KKH5|A0A073KKH5_9GAMM Queuine tRNA-ribosyltran sferase OS=Shewanella xiamenensis OX=332186 GN=tgt PE=3 SV=1
MMKFELDTTDGRARRGRLIFERGTVETPAFMPVGTYGTVKGMTPEEVRATGADILLGNTFHLWLRPGEEIMRKHGDLHDFMNWQRPILTDSGGFQVFSLGDIRKITEEGVHFRSPINGEKIFLDPEKSMQIQHALGSDVVMIFDECTPYPATEDEARKSMQMSLRWAKRSRDEFDRLENPNSLFGIIQGSVYEDLRDESLKGLVEIGFDGYAVGGLAVGEPKEDMHRILEHVCPQIPADKPRYLMGVGKPEDLVEGVRRGIDMFDCVMPTRNARNGHLFTSEGVIKIRNARHRDDTSPLDPKCDCYTCKNYSRAYLYHLDRCNEILGARLNTIHNLRYYQMLMEGLRGAIETGTLDAFVKDFYTSQGREVPELVD

SEQ ID NO: 60785 - protein, 375 aa, Shigella boydii; identical to SEQ ID NO: 50999
  misc_feature (1)..(375): tr|F3WEI6|F3WEI6_9ENTR Queuine tRNA-ribosyltransferase OS=Shigella boydii 5216-82 OX=766141 GN=tgt PE=3 SV=1

SEQ ID NO: 60786 - protein, 375 aa, Shigella boydii; identical to SEQ ID NO: 50999
  misc_feature (1)..(375): sp|B2U4K7|TGT_SHIB3 Queuine tRNA-ribosyltransferase OS= Shigella boydii serotype 18 (strain CDC 3083-94 / BS512 ) OX=344609 GN=tgt PE=3 SV=1

SEQ ID NO: 60787 - protein, 375 aa, Shigella dysenteriae; identical to SEQ ID NO: 50999
  misc_feature (1)..(375): sp|Q32JG0|TGT_SHIDS Queuine tRNA-ribosyltransferase OS= Shigella dysenteriae serotype 1 (strain Sd197) OX=30026 7 GN=tgt PE=3 SV=1

SEQ ID NO: 60788 - protein, 375 aa, Shigella dysenteriae; identical to SEQ ID NO: 50999
  misc_feature (1)..(375): tr|A0A090NLX6|A0A090NLX6_SHIDY Queuine tRNA-ribosyltran sferase OS=Shigella dysenteriae WRSd3 OX=1401327 GN=tgt PE=3 SV=1

SEQ ID NO: 60789 - protein, 375 aa, Shigella flexneri
  misc_feature (1)..(375): tr|A0A2Y2P6G4|A0A2Y2P6G4_SHIFL Queuine tRNA-ribosyltran sferase OS=Shigella flexneri 2a OX=42897 GN=tgt PE=3 SV =1
MKFELDTTDGRARRGRLVFDRGVVETPCFMPVGTYGTVKGMTPEEVEATGAQIILGNTFHLWLRPGQEIMKLHGDLHDFMQWKGPILTDSGGFQVFSLGDIRKITEQGVHFRNPINGDPIFLDPEKSMEIQYDLGSDIVMIFDECTPYPADWDYAKRSMEMSLRWAKRSRERFDSLGNKNALFGIIQGSIYEDLRDISVKGLVDIGFDGYAVGGLAVGEPKADMHRILEHVCPQIPADKPRYLMGVGKPEDLVEGVRRGIDMFDCVMPTRNARNGHLFVTDGVVKIRNAKYKSDTGPLDPECDCYTCRNYSRAYLHHLDRCNEILGARLNTIHNLRYYQRLMAGLRKAIEEGKLESFVTDFYQRQGREVPPLNVD

SEQ ID NO: 60790 - protein, 375 aa, Shigella flexneri; identical to SEQ ID NO: 60789
  misc_feature (1)..(375): sp|Q0T7I3|TGT_SHIF8 Queuine tRNA-ribosyltransferase OS= Shigella flexneri serotype 5b (strain 8401) OX=373384 G N=tgt PE=3 SV=1

SEQ ID NO: 60791 - protein, 375 aa, Shigella sonnei; identical to SEQ ID NO: 60789
  misc_feature (1)..(375): tr|A0A200LH44|A0A200LH44_SHISO Queuine tRNA-ribosyltran sferase OS=Shigella sonnei OX=624 GN=tgt PE=3 SV=1

SEQ ID NO: 60792 - protein, 375 aa, Shigella sonnei; identical to SEQ ID NO: 50999
  misc_feature (1)..(375): sp|Q3Z503|TGT_SHISS Queuine tRNA-ribosyltransferase OS= Shigella sonnei (strain Ss046) OX=300269 GN=tgt PE=3 SV =1

SEQ ID NO: 60793 - protein, 380 aa, Shigella sp.; identical to SEQ ID NO: 59426
  misc_feature (1)..(380): tr|A0A1D3DGE9|A0A1D3DGE9_9ENTR Queuine tRNA-ribosyltran sferase OS=Shigella sp. FC1655 OX=1898038 GN=tgt PE=3 S V=1

SEQ ID NO: 60794 - protein, 375 aa, Shigella sp.; identical to SEQ ID NO: 50999
  misc_feature (1)..(375): tr|A0A1E3MZT7|A0A1E3MZT7_9ENTR Queuine tRNA-ribosyltran sferase OS=Shigella sp. FC569 OX=1892897 GN=tgt PE=3 SV =1

SEQ ID NO: 60795 - protein, 376 aa, Shimia abyssi
  misc_feature (1)..(376): tr|A0A2P8FFH6|A0A2P8FFH6_9RHOB Queuine tRNA-ribosyltran sferase OS=Shimia abyssi OX=1662395 GN=tgt PE=3 SV=1
MSSKVSFELKATDGAARTGVINTPRGDICTPAFMPVGTAATVKAMMPESVRATGADILLGNTYHLMLRPTAERIDRLGGLHKFMNWERPILTDSGGFQVMSLAGLRKLTEEGVTFKSHIDGSKHALTPERSMEIQRLLGSDIVMCFDECPALPADRARIAESMRLSMRWAKRSKDAFGDRPGHALFGIMQGGLESDLREESAEALKEIGFDGYAVGGLAVGEGQEAMFDCLDYAPGYLPEDKPRYLMGVGKPDDIVGAVKRGIDMMDCVLPSRSGRTGQVFTRHGVVNIKNARHSDDPRPLDEACNCPACTNYSRAYLHHVFRSNEMISGMLLTWHNLHYFQEIMDGMRTAIAAGSFAAWEADFHAGRASGDIEPV

SEQ ID NO: 60796 - protein, 376 aa, Shimia aestuarii
  misc_feature (1)..(376): tr|A0A1I4LEY8|A0A1I4LEY8_9RHOB Queuine tRNA-ribosyltran sferase OS=Shimia aestuarii OX=254406 GN=tgt PE=3 SV=1
MSVKISFELKATDGKARTGVISTPRGEVRTPAFMPVGTAATVKAMMPESVRATGADILLGNTYHLMLRPTAERIDRLGGLHKFMNWERPILTDSGGFQVMSLAGLRKLTEKGVTFKSHIDGSKHELTPERSMEIQRLLGSDIVMCFDECPALPADRDRIADSMRLSMRWAERSREAFGDRPGHALFGIMQGGLEKDLREESAEALKAIGFEGYAVGGLAVGEGQAAMFDCLDYAPGFLPEDKPRYLMGVGKPDDIVGAVKRGIDMMDCVLPSRSGRTGQVFTRHGVVNIKNARHADDPRPLDAACTCPACANYSRAYLHHVFRANEMISGMLLTWHNLHYFQEIMAGMRAAIAAGTFDSWEADFHAQRAQGDIEPL

SEQ ID NO: 60797 - protein, 376 aa, Shimia haliotis
  misc_feature (1)..(376): tr|A0A1I4AI70|A0A1I4AI70_9RHOB Queuine tRNA-ribosyltran sferase OS=Shimia haliotis OX=1280847 GN=tgt PE=3 SV=1
MTERFSFALNATDGKARTGVISTPRGDIRTPAFMPVGTAATVKAMMPESVRQTGADILLGNTYHLMLRPTAERIDRLGGLHKFMNWDRPILTDSGGFQVMSLAELRKLTEKGVTFKSHIDGSKHELTPERSMEIQKLLGSDIVMCFDECPALPADRDRIAESMRLSMRWAKRSRDAFGDRPGHALFGIQQGGLEKDFREESAEALKEVGFDGYAVGGLAVGEGQEGMFGCLDYAPDMLPVDKPRYLMGVGKPDDIVGAVKRGIDMMDCVLPSRSGRTGQVFTRHGVVNIKNARHQDDPRPLDEQCSCPACRDYSRAYLHHVFRSNEMISGMLLTWHNLHYFQEIMQGMRDAIAAGTFAVWEADFHAQRAQGDIEPI

SEQ ID NO: 60798 - protein, 376 aa, Shimia isoporae
  misc_feature (1)..(376): tr|A0A4R1NN46|A0A4R1NN46_9RHOB Queuine tRNA-ribosyltran sferase OS=Shimia isoporae OX=647720 GN=tgt PE=3 SV=1
MTERFSFALNATDGKARTGVISTPRGEIRTPAFMPVGTAATVKAMMPESVRQTGADILLGNTYHLMLRPTAERIDRLGGLHKFMNWERPILTDSGGFQVMSLAGLRKLTERGVTFKSHIDGSKHELTPERSMEIQKLLGSDIVMCFDECPALPADRDRIAESMRLSMRWADRSKQAFGDRPGHALFGIQQGGLEQDFREESAEALREIGFDGYAVGGLAVGEGQEAMFGCLDFAPDMLPVDRPRYLMGVGKPDDIVGAVKRGIDMMDCVLPSRSGRTGQVFTRHGVVNIKNARHQDDPRPLDEQCSCPACQNYSRAYLHHVFRSNEMISGMLLTWHNLHYFQEIMQGMRDAIAAGSFDVWETEFHAQRAQGDIEPI

SEQ ID NO: 60799 - protein, 376 aa, Shimia marina
  misc_feature (1)..(376): tr|A0A0P1FDY9|A0A0P1FDY9_9RHOB Queuine tRNA-ribosyltran sferase OS=Shimia marina OX=321267 GN=tgt PE=3 SV=1
MSQKFSFSLNATDGKARTGVISTPRGDIRTPAFMPVGTAATVKAMMPESVRATGADILLGNTYHLMLRPTAERIDRLGGLHKFMNWERPILTDSGGFQVMSLAGLRKLTEEGVTFKSHIDGSKHALTPERSMEIQKLLGSDIVMCFDECPALPADRDRIAESMRLSMRWAQRSRDAFGDRPGHALFGIQQGGLEQDFREESAEALKEIGFDGYAVGGLAVGEGQEAMFGCLDYAPDMLPVDKPRYLMGVGKPSDIVGAVKRGIDMMDCVLPSRSGRTGQVFTRRGVVNIKNARHADDPRPLDEACTCPACQNYSRAYLHHVFRSNEMISGMLLTWHNLHYFQQIMQEMRDAIAAGTFDAWEKQFQEMQAQGDIEPL

SEQ ID NO: 60800 - protein, 376 aa, Shimia sp.
  misc_feature (1)..(376): tr|A0A0M9EK56|A0A0M9EK56_9RHOB Queuine tRNA-ribosyltran sferase OS=Shimia sp. SK013 OX=1389006 GN=tgt PE=3 SV=1
MTERFSFALNATDGKARTGVISTPRGEIRTPAFMPVGTAATVKAMMPESVRATGADILLGNTYHLMLRPTAERIDRLGGLHKFMNWDRPILTDSGGFQVMSLAELRKLTEKGVTFKSHIDGSKHELTPERSMEIQKLLGSDIVMCFDECPALPADRARIAESMRLSMRWAARSKQAFGDRPGHALFGIMQGGLEQDFREESAEALKEIGFDGYAVGGLAVGEGQKGMFACLDYAPDMLPVDRPRYLMGVGKPDDIVGAVKRGIDMMDCVLPSRSGRTGQVFTRYGVVNIKNARHQDDPRPLDEHCGCPACASYSRAYLHHVFRSNEMISGMLLTWHNLHYFQELMQGMRDAIAAGTFAAWEAEFHAQRAQGDIERV

SEQ ID NO: 60801 - protein, 375 aa, Shimwellia blattae
  misc_feature (1)..(375): tr|I2BBT2|I2BBT2_SHIBC Queuine tRNA-ribosyltransferase OS=Shimwellia blattae (strain ATCC 29907 / DSM 4481 / J CM 1650 / NBRC 105725 / CDC 9005-74) OX=630626 GN=tgt P E=3 SV=1
MKFELDTTDGRARRGRLIFERGVVETPAFMPVGTYGTVKGMTPEEVEATGAQIILGNTFHLWLRPGQEIMKLHGDLHDFMQWKGPILTDSGGFQVFSLGDIRKITEEGVHFRNPINGDPIFLSPEKSMEIQYDLGSDIVMIFDECTPYPADWDYAKRSMEMSLRWAKRSRERFDSLGNKNALFGIIQGSVYEDLRDISVKGLVNIGFDGYAVGGLAVGEPKPDMHRILEHVCPQIPADKPRYLMGVGKPEDLVEGVRRGIDMFDCVMPTRNARNGHLFVTDGVVKIRNAKYKDDTSALDEACDCYTCRNYSRAYLHHLDRCNEILGARLNTIHNLRYYQRLMAGLRKAIEEGKLEHFVADFYTRTGKPVPPLNVN

SEQ ID NO: 60802 - protein, 376 aa, Shinella granuli
  misc_feature (1)..(376): tr|A0A4R2CJ10|A0A4R2CJ10_9RHIZ Queuine tRNA-ribosyltran sferase OS=Shinella granuli OX=323621 GN=tgt PE=3 SV=1
MTETFQFKLLATDGKARRGEVSMPRGTIRTPAFMPVGTVGTVKAMYLDQVRDLGADIILGNTYHLMLRPGPERVARLGGLHELIRWPHPILTDSGGFQVMSLAGLRKLDEKGVTFKSHVDGALHHMSPERSIEIQGLLDSDIQMQLDECVALPASPKEIERAMEMSLRWAERCKTAFGDQPGKAMFGIVQGGDIPHLRVRSAQALAELNLKGYAIGGLAVGEPQEVMLDMIDTTVPHMPTEKPRYLMGVGTPDDMLKSVARGIDMFDCVMPTRSGRHGLAFTRRGRINLRNARHAEDMRPLDEESTCPAARDYSRAYLHHLIRANESLGGMLLTWNNLSYYQDLMAGIRTAIEEGRFADFMAETQENWARGDLAPL

SEQ ID NO: 60803 - protein, 376 aa, Shinella sp.
  misc_feature (1)..(376): tr|A0A4Q8MLC1|A0A4Q8MLC1_9RHIZ Queuine tRNA-ribosyltran sferase OS=Shinella sp. JR1-6 OX=2527671 GN=tgt PE=3 SV =1
MTETFQFKLLATDGKARRGEVSMPRGVIRTPAFMPVGTVGTVKAMYLDQVRELGADIILGNTYHLMLRPGPERVARLGGLHELIRWPHPILTDSGGFQVMSLSGLRKLDEQGVTFKSHVDGALHHMSPERSIEIQGLLDSDIQMQLDECVALPASPKEIERAMEMSLRWAERCKVAFGDQPGKAMFGIVQGGDIPHLRVRSAQALAELNLKGYAIGGLAVGEPQEVMLDMIDTTIPHMPFEKPRYLMGVGTPDDMLKSVARGIDMFDCVMPTRSGRHGLAFTRRGRINLRNARHAEDMRPLDEESTCPAARDYSRAYLHHLIRANESLGGMLLTWNNLSYYQDLMAGIRKAIEEGRFADFMAETQETWARGDLAPL

SEQ ID NO: 60804 - protein, 376 aa, Shinella sp.; identical to SEQ ID NO: 60803
  misc_feature (1)..(376): tr|A0A021X3W8|A0A021X3W8_9RHIZ Queuine tRNA-ribosyltran sferase OS=Shinella sp. DD12 OX=1410620 GN=tgt PE=3 SV= 1

SEQ ID NO: 60805 - protein, 378 aa, Shuttleworthia satelles
  misc_feature (1)..(378): tr|C4GA79|C4GA79_9FIRM Queuine tRNA-ribosyltransferase OS=Shuttleworthia satelles DSM 14600 OX=626523 GN=tgt P E=3 SV=1
MYQLLKTEGRAKRAKFTTVHGTVETPLFMNVGTVGAIKGAVSTEDLKELGCQIQLSNTYHLHVRTGDETIRELGGLHRFMVWDRPILTDSGGFQVFSLAGLRRIREEGVTFRSHIDGHRIFMGPEESMRIQSNLGSTIAMAFDECPDALSERDYVQKSVDRTYRWLVRCKEEMARLNALEGRVNPQQILFGINQGAIFPDIRIEHARRIAELELPGYAIGGLAVGESHEQMYRILDEVVPYLPQDKPTYLMGVGTPQNILEAVERGVDFFDCVYPSRNARHGQLYTHRGKINIKNARYEKDMKPIEEGCRCPTCQTYSRAYIRHLMKANEMLGMRLCVMHNLYFYNHLMEEIRNALDQGRFAEFKRQTLADMDGNERK

SEQ ID NO: 60806 - protein, 381 aa, Shuttleworthia sp.
  misc_feature (1)..(381): tr|X8GN60|X8GN60_9FIRM Queuine tRNA-ribosyltransferase OS=Shuttleworthia sp. MSX8B OX=936574 GN=tgt PE=3 SV=1
MYQLLKTEGRAKRAKFTTVHGTVETPLFMNVGTVGAIKGAVSTEDLKELGCQIQLSNTYHLHVRTGDETIRELGGLHRFMVWDRPILTDSGGFQVFSLAGLRRIREEGVTFRSHIDGHRIFMGPEESMRIQSNLGSTIAMAFDECPDALSERDYVQKSVDRTYRWLVRCKEEMARLNALEGRVNPQQLLFGINQGAIFPDIRIEHARRIAELELPGYAIGGLAVGESHEQMYRILDEVVPYLPQDKPTYLMGVGTPQNILEAVERGVDFFDCVYPSRNARHGQLYTHRGKINIKNARYEKDMKPIEEGCRCPTCQTYSRAYIRHLMKANEMLGMRLCVMHNLYFYNHLMEEIRNALDQGRFAEFKRQTLADMDGNEREVTD

SEQ ID NO: 60807 - protein, 376 aa, Siansivirga zeaxanthinifaciens
  misc_feature (1)..(376): tr|A0A0C5WNV1|A0A0C5WNV1_9FLAO Queuine tRNA-ribosyltran sferase OS=Siansivirga zeaxanthinifaciens CC-SAMT-1 OX= 1454006 GN=tgt PE=3 SV=1
MQFELLTKDSQSKARAGKITTDHGVIETPIFMPVGTVATVKGVHQRELKEVINPDIILGNTYHLYLRPQTTIIEKAGGLHKFMNWDRNILTDSGGYQVYSLSSNRKIKEEGVKFKSHIDGSYHVFTPENVMEIQRKIGADIIMAFDECTPYPCDYNYAKRSMHMTHRWLDRCINHLEKTPLTYDYNQAFFPIVQGSTYKDLRKQSAEYIANAGAVGNAIGGLSVGEPAEEMYAMTDVVCEILPEDKPRYLMGVGTPINILENIALGVDMFDCVMPTRNARNGMLFTAHGSINIKNKKWEADFSPIDEMGITFVDTEYSKAYLRHLFTVNELLGKQIATIHNLGFYLWLVREARKHILAGDFAAWKNKMVKQMDNRL

SEQ ID NO: 60808 - protein, 428 aa, Siccationidurans arizonensis
  misc_feature (1)..(428): tr|A0A1I5ZX88|A0A1I5ZX88_9BACT Queuine tRNA-ribosyltran sferase OS=Siccationidurans arizonensis OX=1227077 GN=t gt PE=3 SV=1
MLSLRSTLLDSNDLFSRDKVLRKLRMTDDWIYYYGRNSPHCLTFSCATYFSRMTFDLLAQDPATKARAGRLETAHGAIETPIFMPVGTAGTVKAVSQHTLKEDINAQIILGNTYHLYLRPGLDVLRAAGGLHKFNGWDRPILTDSGGYQVYSLSNTRKIKEEGVKFRSHIDGSQHLFSPEGVMDIQRVIGADIIMAFDECTPWPCEYDYAARSLDMTHRWLQRCIQRFDSTEGLYGYQQTLFPIVQGSTFRDLRIKSAEFIAAQGREGNAIGGLSVGEPAELMYEMTELVCDILPKDKPRYLMGVGTPADILENIALGVDMFDCVMPTRNARNGMLFTTQGIMNVTNKKWATDFSPIDAELGGHASTFYSRAYLRHLFQCQEMLGPQIASAHNLAFYLWLVKEARKQIVAGTFGPWKDRMVKQVMTRL

SEQ ID NO: 60809 - protein, 375 aa, Siccibacter turicensis
  misc_feature (1)..(375): tr|A0A2P8VNX3|A0A2P8VNX3_9ENTR Queuine tRNA-ribosyltran sferase OS=Siccibacter turicensis OX=357233 GN=tgt PE=3 SV=1
MKFELDTTDGRARRGRLVFERGVVETPAFMPVGTYGTVKGMTPEEVEATGAQIILGNTFHLWLRPGQEIMKLHGDLHDFMQWKGPILTDSGGFQVFSLGDIRKITEAGVHFRNPINGDPIFLDPEKSMEIQYDLGSDIVMIFDECTPYPADWDYAKRSMEMSLRWAQRSRDRFDSLGNKNALFGIIQGSVYEDLRDISVKGLVEIGFDGYAVGGLAVGEPKEDMHRILEHVCPQIPADKPRYLMGVGKPEDLVEGVRRGIDMFDCVMPTRNARNGHLFVTTGVVKIRNAKYKSDTGPLDPECDCYTCRNYSLAYLHHLDRCNEILGARLNTIHNLRFYQRLMAGLRKAIEEGKLEHFVTEFYQRQGRPVPPLNVD

SEQ ID NO: 60810 - protein, 388 aa, Siculibacillus lacustris
  misc_feature (1)..(388): tr|A0A4Q9VTP8|A0A4Q9VTP8_9RHIZ Queuine tRNA-ribosyltran sferase OS=Siculibacillus lacustris OX=1549641 GN=tgt P E=3 SV=1
MTELTRPDAAPSEAPAFGFALHATDGTARRGTVTTAHGEIRTPAFMPVGTLGTVKCLYPEQVRATGADILLGNTYHLMLRPGAERVAGQGGLHRFMNWPHPILTDSGGFQVMSLAKLRKITEKGVTFQSHVDGSRHELTPERSLEIQGLLGSDIQMQLDECVALPADRREMERAMELSLRWAARSKAAFFGRRGHGLFGIVQGGDDEELRARSAAGLVEIGFDGYALGGLAVGEPQEVMFRVIEATAPALPADRPRYLMGVGTPQDILGGVARGIDMFDCVMPTRAGRHGLAYTRYGKVNLRNARHADDPRPLDAASDCPAARDWSRAYLHHLVRTGEALGAMLLTHVNVAYYQSLMAELRVAIETGRFAEVKAQIEADWARGDIAAL

SEQ ID NO: 60811 - protein, 366 aa, Sideroxydans lithotrophicus
  misc_feature (1)..(366): tr|D5CQ33|D5CQ33_SIDLE Queuine tRNA-ribosyltransferase OS=Sideroxydans lithotrophicus (strain ES-1) OX=580332 GN=tgt PE=3 SV=1
MKFTLHNTSGAARRGTLDLAHGKLETPAFMPVGTYGTVKAMSPLELKDMGAQIVLGNTFHLWLRPGLEVIAAHGGLHRFMGWDGPILTDSGGFQVFSLGELRKITGGGVEFRSPVNGDKCFLSPEESMRIQQVLNSDIVMIFDECTPYPADEQAAGVSMRLSLSWAERSKKAHEGNPNALFGIVQGGMHEHLRDESLTGLKGIGFDGFAIGGLSVGEPKEDMLRILRHTAPQLPVDKPRYLMGVGTPEDLVEAVGNGIDMFDCVMPTRNARNGHLFTRFGDVRIKNAQYRLDTRPLDEQCSCYTCRHFTRAYLHHLHRLNEILGARLNSIHNLHYYQELMRDIRVSIEAGRYAEFQASFRHARAGL

SEQ ID NO: 60812 - protein, 344 aa, Sideroxydans sp.
  misc_feature (1)..(344): tr|A0A1G3INI0|A0A1G3INI0_9PROT Queuine tRNA-ribosyltran sferase (Fragment) OS=Sideroxydans sp. RIFOXYD2_FULL_59 _7 OX=1802156 GN=A3J99_01745 PE=3 SV=1
MKFTLHNTSGAARRGTLELAHGKVETPAFMPVGTYGTVKAMSPQELKDIDAHIVLGNTFHLWLRPGLEVIAAHGGLHKFMGWDGSILTDSGGFQVFSLGELRKITGGGVEFRSPVNGDKCFLSPEESMRIQRVLNSDIVMIFDECTPYPADEQVAGVSMRLSLDWAKRSKKAHEGNPNALFGIVQGGMHEHLRDESLAGLKEIGFDGFAIGGLSVGEPKEDMLRILRHTAPQLPTDKPRYLMGVGTPEDLVEAVANGVDMFDCVMPTRNARNGHLFTRNGDVRIKNAVHRLDTRSLDPQCTCYTCQNFSRAYLHHLHRLGEILGARLNTIHNLHYYQELMQGIR

SEQ ID NO: 60813 - protein, 372 aa, Sideroxydans sp.
  misc_feature (1)..(372): tr|A0A1G3JF15|A0A1G3JF15_9PROT Queuine tRNA-ribosyltran sferase OS=Sideroxydans sp. RIFOXYB12_FULL_59_6 OX=1802 155 GN=tgt PE=3 SV=1
MKFTLHNTSGAARRGTLELAHGKVETPAFMPVGTYGTVKAMSPQELKDIDAHIVLGNTFHLWLRPGLEVIAAHGGLHKFMGWDGPILTDSGGFQVFSLGELRKITGGGVEFRSPVNGDKCFLSPEESMRIQKVLNSDIVMIFDECTPYPADEQVAGVSMRLSLDWAKRSKKAHEGNPNALFGIVQGGMHEHLRDESLAGLKEIGFDGFAIGGLSVGEPKEDMLRILRHTAPQLPADKPRYLMGVGTPEDLVEAVANGVDMFDCVMPTRNARNGHLFTRHGDVRIKNAVHRMDTRSLDPQCTCYTCQNFSRAYLHHLHRLGEILGARLNTIHNLHYYQKLMQGIRAAIEAGRYDEFQAAFHAARAGGGALPGN

SEQ ID NO: 60814 - protein, 376 aa, Silicibacter sp.
  misc_feature (1)..(376): tr|C9D2T0|C9D2T0_9RHOB Queuine tRNA-ribosyltransferase OS=Silicibacter sp. TrichCH4B OX=644076 GN=tgt PE=3 SV= 1
MAELFNFEMTATDGKARTGVIHTPRGDIRTPAFMPVGTAATVKAMMPESVRATGADILLGNTYHLMLRPTAERIDRLGGLHKFMNWDRPILTDSGGFQVMSLAGLRKLTEKGVTFKSHIDGSRHELTPERSMEIQALLGSDIVMCFDECPALPADRDRIAESMRLSMRWAERSREAFGDRPGHALFGIQQGGLEKDFREESAEALTKIGFDGYAVGGLAVGEGQEAMFGCLDYAPDMLPVDKPRYLMGVGKPDDIVGAVARGIDMMDCVLPSRSGRTGQAFTRHGVVNIKNARHQDDPRPLDENCSCPACSNYSRAYLHHVFRSNEMISGMLLTWHNLHYFQDIMAGMRESIAAGTFDAWQKTFHNMRAQGDIEPL

SEQ ID NO: 60815 - protein, 376 aa, Silicimonas algicola
  misc_feature (1)..(376): tr|A0A316GB07|A0A316GB07_9RHOB Queuine tRNA-ribosyltran sferase OS=Silicimonas algicola OX=1826607 GN=tgt PE=3 SV=1
MTERFSFSLAATDGKARTGTIRTPRGEIRTPAFMPVGTAATVKAMLPESVAATGADILLGNTYHLMLRPGAERVARLGGLHRFMNWDRPILTDSGGFQVMSLAGLRKLTEEGVTFTSHIDGSKHELTPERSMEIQRLLGSDIVMCFDECPALPADAAAVEASMQLSMRWAERSKIAFGDRPGHALLGIQQGGVTRELRAESAEALKAIGFDGYAVGGLAVGEGQEAMFGVLDYAPDMLPEDRPRYLMGVGKPDDIVGAVKRGIDMMDCVLPSRSGRTGQAFTRRGVVNIKNARHADDPRPLDEACGCPACQGYSRAYLHHVFRAGEMISGMLLTWHNLRYYQDLMAAMRAAIAAGTFAEFETTFHADRAEGDIPPL

SEQ ID NO: 60816 - protein, 369 aa, Silvanigrella aquatica
  misc_feature (1)..(369): tr|A0A1L4D439|A0A1L4D439_9PROT Queuine tRNA-ribosyltran sferase OS=Silvanigrella aquatica OX=1915309 GN=tgt PE= 3 SV=1
MALKFDYLAKDPHSEARRGRIHTAHGIIETPVFMPVGTFGSVRTLDHTELEDIGVQIILGNTYHLYLRPGPEILKDLGGYHKLISWNKPILTDSGGFQIFSLPHQRVISEKGVTFKSYIDQSYKRLTPESDIAFQEVIGSDIMMVLDVCVPSTSSYDVCVEAMNRTHRWAKRCKQAKTREENSLFGIVQGAIFENLRTESAEALTSLNFDGYAIGGLAVGESDEERDHFTRFSAKLLPENKPRYLMGVGTPHDLVRSVLAGVDMFDCIIPTNHARQGVAYTFAGKVKLRRVFHAREDKPIDESCACYVCKRFSRAYLHQLTKCEEPTGWKLISYHNTWFYERLMEKVRETIVDGTFSTFAKNFLENAEE

SEQ ID NO: 60817 - protein, 424 aa, Silvanigrella aquatica
  misc_feature (1)..(424): tr|A0A1L4CYS4|A0A1L4CYS4_9PROT Queuine tRNA-ribosyltran sferase OS=Silvanigrella aquatica OX=1915309 GN=tgt PE= 3 SV=1
MLSNRNLIEFTKIKSLQLPLDFHKGKYDTENLKAHDLENEFSLLIEKGIARENEKSLLEQVGPRITKLKFGNVELETPIFMPVGTVGSVKSLSPEDVYSIGYRVILGNTYHLNLRPGMELMRDFGGLHEFMRWPGAILTDSGGFQVMSLAKIRKITEEGATFANHINGAKITLTPENVVEIQEDIDSDIQMVLDECTPYPATHAEALASMERSMRWAKRARQARKKLNRAQFGIVQGGMYGDLRVKSIKQLIENDFEGYAIGGLSVGESKREMRRLLSATIPWMPENKPRYLMGVGAPDDLIDAILLGIDMFDCVMPTRNARNGSVFVRSSAAPTGKIQIKNSAHKSSREPLDSQCLCYTCKNYSRAYLRHLFVAEELLVFRLMSIHNLQFLYDLTHEMREAIRSGELFHSLPDIRRKYAPGSV

SEQ ID NO: 60818 - protein, 369 aa, Silvanigrellales bacterium
  misc_feature (1)..(369): tr|A0A4V0P2V5|A0A4V0P2V5_9PROT Queuine tRNA-ribosyltran sferase OS=Silvanigrellales bacterium RF1110005 OX=2493 639 GN=tgt PE=3 SV=1
MPLKFDYIAKDPHSEARRGRVHTAHGTIETPVFMSVGTFGAVRTLDHTEIEEIGVQIILGNTYHLYLRPGPEILKDVGGYHKLIGWNKPILTDSGGFQIFSLPHQRVIGEKGVTFKSYIDQSYKRLTPESDIAFQETIGSDIMMVLDVCVPSTSPYEVCVDAMKRTHRWAKRCKLAKTRDENSLFGIVQGAIHENLRKESAETLVDLNFDGYAVGGLAVGETDEEREHFTNFTARLLPTQKPRYLMGVGTPHDLVRSVRAGIDMFDCIIPTNHARQGVAYTFSGKVKMRRVFHAREQSPIDPSCACYVCKRFTRAYLHQLTKCEEPTGWKLIAYHNTWFYERLMEKIRDTIVAGTFSQFAKDFLSHVEE

SEQ ID NO: 60819 - protein, 424 aa, Silvanigrellales bacterium
  misc_feature (1)..(424): tr|A0A4P2VI33|A0A4P2VI33_9PROT Queuine tRNA-ribosyltran sferase OS=Silvanigrellales bacterium RF1110005 OX=2493 639 GN=tgt PE=3 SV=1
MLANRNLIEFSLLKSIELDETFKSGAYDTVDLKAQDLENEFSVAVEKGAAQEEEKSLVQKVGPRITKLKFGNIELETPIFMPVGTVGSVKSLSPEDVYSIGYRLILGNTYHLNLRPGMELMREFGGLHEFMRWPGAILTDSGGFQVMSLAKIRKLNEDGATFANHINGAKITLTPENVVHIQEDIDSDIQMVLDECTSYPATHAEAKASMERSMRWAQRARTARKKQNRAQFGIVQGGMYADLRVKSIKELKKNDFEGYAIGGLSVGESKREMRRLLSATIPFMPHEKPRYLMGVGAPDDIIDSVLLGIDMFDCVMPTRNARNGSVFVRSKSAANGKIQIKNAAHKTNKGPLDTECSCYTCKNYSRAYLRHLFVAEELLVFRLLSIHNLQFLYDLTEEMREAIRQGKIFAELPHIRKKYAPGSV

SEQ ID NO: 60820 - protein, 375 aa, Simiduia agarivorans
  misc_feature (1)..(375): tr|K4KJ22|K4KJ22_SIMAS Queuine tRNA-ribosyltransferase OS=Simiduia agarivorans (strain DSM 21679 / JCM 13881 / BCRC 17597 / SA1) OX=1117647 GN=tgt PE=3 SV=1
MQFELDTTDGRARRGRLKFPRGTVETPAFMPVGTYGTVKGMLPRDIEDIGAEIILGNTFHLMLRPGTEVVKAHGDLHDFIQWQGPILTDSGGFQVFSLGKMRKITEEGVTFKSPINGSKVELNPEIAMQVQRDLGSDIVMIFDECTPYPASEKQARDSMELSLRWARRSKTAHGDNPSALFGIVQGGMYTDLRSESLKGLTDIGFDGYAIGGLSVGEPKEDMIRVLNHLAPEMPADKPRYLMGVGKPEDIVEAVRRGVDMFDCVMPTRNARNGHLFTTAGVIKIRNAVHRHDTGPLDPGCDCYTCTHFSRAYLHHLDKCNEILGAELNTIHNLRFYQRVMAELRDAIANHRLEDYVAEFYRRQGLPVPPGPDDAV

SEQ ID NO: 60821 - protein, 376 aa, Simkania negevensis
  misc_feature (1)..(376): tr|F8L752|F8L752_SIMNZ Queuine tRNA-ribosyltransferase OS=Simkania negevensis (strain ATCC VR-1471 / Z) OX=331 113 GN=tgt PE=3 SV=1
MIPFTFEILHQSKKSRARVGRIHTPHGIIDTPNFVAVGTNGTLKALDNEMVKTIGLQLMFCNTYHLLLQPGTSVIREAGGIHKFINRNLPIITDSGGFQVFSLAYGGVADELKSKGTKKSEGSVLKITSDGVLFRSYRDGQKVLLTPETSVQAQKALGADIIIPFDELPPYHICPKALSRSLDRTHEWEKRSLEEHLKNPQGQAMYAVVHGGVDNKLREKSCKFLADLPFDGFAIGGSMGKTKEEMVTMLSATLPKLPETAPNHLLGIADLESLEACVPLGIDTFDSSYPTKAARHGTLLTHEGPLKITRGIFKNKFTSPVKGCSCYTCEHYTLAYLHHLFKAKEISGLTLASVHNLHFMVELMSQYKNKILNDII

SEQ ID NO: 60822 - protein, 371 aa, Simonsiella muelleri
  misc_feature (1)..(371): tr|V9H665|V9H665_9NEIS Queuine tRNA-ribosyltransferase OS=Simonsiella muelleri ATCC 29453 OX=641147 GN=tgt PE= 3 SV=1
MLNFTLHQKDGYARRGTLELNHGKIETPVFMPVGTYGSVKAMTPHNLHDIKAQIILGNTYHLWLRPGLEVIEQFGGLHDFIGWNKPILTDSGGFQVFSLSDMRKLTEDGCTFKSPINGDKLFLSPEISMKIQTVLNSDIVMQLDECTPGEATHEQARKSLQMSLRWAERSKKAFEDLNNPNALFGIIQGAMYEDLREESLRGLEDIGFKGIAIGGLSVGEPKPEMYRMLRAIAPMLPESKPHYLMGVGTPEDLVYGVAHGVDMFDCVMPTRNARNGWLFTRFGDLKIRNAKHRFDKRPLDESCTCYACQHFSRAYLHHLDKVGEILGAQLCTIHNLHFYQVIMAEMREAIEQGKFADWQAQFHENRARGVD

SEQ ID NO: 60823 - protein, 390 aa, Simplicispira metamorpha
  misc_feature (1)..(390): tr|A0A4R2N663|A0A4R2N663_9BURK Queuine tRNA-ribosyltran sferase OS=Simplicispira metamorpha OX=80881 GN=tgt PE= 3 SV=1
MLQFDILTTDASSHARRGQLTLNHGVVQTPIFMPVGTYGTVKGVMPQSLHDMGAQIILGNTFHLWMRPGLDVMQSFGGLHGFEQWHKPILTDSGGFQVWSLGAMRKITEEGVTFASPVNGDKLFMSPEVSMQIQTTLNSDIVMQLDECTPYETKGHLTTEAEARKSMEMSLRWAVRSKNEIERLQNPNALFGIVQGGMYLNLREESLQRLVEMDFPGYAIGGVSVGEPKDEMLSIMAHTPHRLPAHKPRYLMGVGTPEDLVEGVACGVDMFDCVMPTRNARNGTLFTRFGDLKIRNARHKTDHQPLDTTCTCHACAGAAGVSWDEGGRGGFSRAYLHHLDRCGEMLGPMLTTIHNLHYYLNLMREVREALEAGRFSAFRAQFKADRARGV

SEQ ID NO: 60824 - protein, 390 aa, Simplicispira sp.
  misc_feature (1)..(390): tr|A0A2U1C846|A0A2U1C846_9BURK Queuine tRNA-ribosyltran sferase OS=Simplicispira sp. 125 OX=2135643 GN=tgt PE=3 SV=1
MLQFQILTTDPSSHARRATLTLNHGVVQTPIFMPVGTYGTVKGVMPQSLHDMGAQIILGNTFHLWMRPGQDVMQSFGGLHAFEQWHKPILTDSGGFQVWSLGDMRKITEEGVTFASPVNGDKLFMSPEVSMQIQTTLNSDIVMQLDECTPYETKGHLTTEAEARKSMEMSRRWALRSKVEFERLGNPNALFGIVQGGMFEHLRQESLEALVEMDFPGYAIGGVSVGEPKEQMLQIMAHTPHRLPAHKPRYLMGVGTPEDLVQGVADGVDMFDCVMPTRNARNGTLFTRFGDLKIRNARHKTDHQPLDTSCTCHACAGASGVAWDAGGRGGFSRAYLHHLDRCGEMLGPMLTTVHNLHYYLNLMREVREALDAGRFGEFRAQFKADRARGV

SEQ ID NO: 60825 - protein, 390 aa, Simplicispira sp.
  misc_feature (1)..(390): tr|A0A398C8M0|A0A398C8M0_9BURK Queuine tRNA-ribosyltran sferase OS=Simplicispira sp. NY-02 OX=2315688 GN=tgt PE =3 SV=1
MLKFELLTTDPTSHARRAAMTLNHGVVQTPVFMPVGTYGTVKGVMPQSLLDMGAQIILGNTFHLWMRPGQDVMQSFGGLHAFEQWHKPILTDSGGFQVWSLGAMRKITEEGVHFASPVNGDKLFMSPEVSMQIQTTLNSDIVMQLDECTPYETKGQLTTEREARQSMEMSLRWARRSQEEFARLQSPNALFGIVQGGMFTNLREESLARLVEMDFPGYAIGGVSVGEPKEQMLHIMAHTPHQLPQHKPRYLMGVGTPEDLVQGVADGVDMFDCVMPTRNARNGTLFTRFGDLKIRNARHKTDHQPLDTTCTCHACAGQSGVAWDQGGRGGFSRAYLHHLDRCGEMLGPMLTTIHNLHYYLNLMHEVRNALDAGQFAQFRAQFKADRARGV

SEQ ID NO: 60826 - protein, 390 aa, Simplicispira suum
  misc_feature (1)..(390): tr|A0A2S0MYK2|A0A2S0MYK2_9BURK Queuine tRNA-ribosyltran sferase OS=Simplicispira suum OX=2109915 GN=tgt PE=3 SV =1
MLKFELLTTDPTSHARRAAMTLNHGVVQTPVFMPVGTYGTVKGVMPQSLHDMGAQIILGNTFHLWMRPGQDVMQSFGGLHAFEQWHKPILTDSGGFQVWSLGAMRKITEEGVHFASPVNGDKLFMSPEVSMQIQTTLNSDIAMQLDECTPYETKGHITTESEARQSMEMSLRWARRSQDAFARLQNPNALFGIVQGGMFENLRQESLDALVAMDFPGYAIGGVSVGEPKEQMLQIMAHTPHRLPAHKPRYLMGVGTPEDLVQGVADGVDMFDCVMPTRNARNGTLFTRFGDLKIRNARHKTDHQPLDTTCTCHACAGSSGVAWDAGGRGGFSRAYLHHLDRCGEMLGPMLTTIHNLHYYLNLMREVRSALDAGQFAQFRAQFKADRARGV

SEQ ID NO: 60827 - protein, 371 aa, Singulisphaera acidiphila
  misc_feature (1)..(371): tr|L0DK50|L0DK50_SINAD Queuine tRNA-ribosyltransferase OS=Singulisphaera acidiphila (strain ATCC BAA-1392 / DS M 18658 / VKM B-2454 / MOB10) OX=886293 GN=tgt PE=3 SV= 1
MSRPVEFQVLHRDPASLARRGRLSTPHGPVETPAFMPVGTQATVKGLTPDQLRATGTSMLLANTYHLALRPGEEVVAQLGGLHRFMGWDGPILTDSGGFQVFSLAARSKITEAGVAFRSHIDGRLLELSPESAVRIQEALGADVAMCFDECPALPASKETIASAVGRTVRWARRCKDAHTRSDQALFGIVQGGSHADLRGECAEALVALDFDGYAVGGVSVGESREQVREALRVTTPWLPEDRPRYLMGVGRPQDILDAVATGIDMFDCVLPTRNGRNATCLTGSGQVKLRNAAHRLDPRPIEEGCDCFACQSFSRAYVRHLFMAKEMLGPILASIHNVAYLHRLTRQIREAITEERFVQFRLEVLEALGP

SEQ ID NO: 60828 - protein, 371 aa, Singulisphaera sp.
  misc_feature (1)..(371): tr|A0A1N6F7U0|A0A1N6F7U0_9BACT Queuine tRNA-ribosyltran sferase OS=Singulisphaera sp. GP187 OX=1882752 GN=tgt P E=3 SV=1
MSRPVEFQVLHRDPASLARRGRLVTPHGSVETPAFMPVGTQATVKGLTPDQLRATGTSMLLANTYHLALRPGEAVVAQLGGLHRFMGWDGPILTDSGGFQVFSLAARSKITEAGVAFRSHIDGRLLELSPESAVKIQEALGADVAMCFDECPALPASKETIASAVGRTVRWARRCKEAHTRRDQALFGIVQGGSHADLRGECAEALVALDFDGYAVGGVSVGESREQVREALRVTTPWLPEDRPRYLMGVGRPQDILDAVATGIDMFDCVLPTRNGRNATCLTGSGQVKLRNAAHRLDPGPVEEGCDCFACRNFSRAYLRHLFMAKEMLGPILASIHNVAYLHRLTRQIREAITEERFVQFRLEVLEALGP

SEQ ID NO: 60829 - protein, 377 aa, Sinimarinibacterium flocculans
  misc_feature (1)..(377): tr|A0A318E971|A0A318E971_9GAMM Queuine tRNA-ribosyltran sferase OS=Sinimarinibacterium flocculans OX=985250 GN= tgt PE=3 SV=1
MKFELLATSGAARRGRLLFERGTVETPAFMPVGTYGTVKAMTPEELRASGAQIVLGNTFHLMLRPGAETMRALGGLHRFMHWDGPILTDSGGFQVWSLSGLRKITEEGVKFASPVNGDRIFLTPERAIEVQHALGSDVVMQFDECTPYPATAKQARQSMELSARWAARCKTAHGANHGALFGIVQGGMHADLRRESLARLREIGFDGYAVGGLSVGEPEAERLQVLDAIGPELPSDHPHYLMGVGTPRDLVQAVARGIDMFDCVMPTRNARNGHLFTSEGVIKIRNAVHREDPRPLDPACDCPTCTNYSRAYLHHLDRCNEILGSRLNTIHNLHYYQNHMRRIREAIEQGRFEAFAEAFLAGPAGAPTRSRVAASGA

SEQ ID NO: 60830 - protein, 378 aa, Sinimarinibacterium sp.
  misc_feature (1)..(378): tr|A0A4U0GQF9|A0A4U0GQF9_9GAMM Queuine tRNA-ribosyltran sferase OS=Sinimarinibacterium sp. CAU 1509 OX=2562283 GN=tgt PE=3 SV=1
MKFELLSTSAAARRGRLIFDRGSVETPAFMPVGTYGTVKAMTPEELRGVGAQIILGNTFHLMLRPGEQIIRELGGLHRFMHWDGPILTDSGGFQVWSLSELRKITEEGVKFASPINGDRIFLTPERAIEVQHALGSDIVMQFDECTPYPATEKQARKSMELSARWGARCKQAHADSPHALFGIVQGGMYPELRSESLQRLTEIGFHGYAVGGLSVGEPEVERLTVLDAIGPQLPAAHPHYLMGVGTPRDLVQAVARGIDMFDCVMPTRNARNGHLFTSQGVIKIRNAAHKADPNPLDPECDCYTCSHYSRAYLHHLDRCNEILGSRLNTIHNLRYYQNHMRRIREAIEEDRFETFAKAFLDSPAGAPSRSKQAPVQLA

SEQ ID NO: 60831 - protein, 376 aa, Sinirhodobacter ferrireducens
  misc_feature (1)..(376): tr|A0A443LVE6|A0A443LVE6_9RHOB Queuine tRNA-ribosyltran sferase OS=Sinirhodobacter ferrireducens OX=1215032 GN= tgt PE=3 SV=1
MTEKFSFTLHATDGKARTGVIHTPRGEIRTPAFMPVGTAGTVKAMMPESVAATGADILLGNTYHLMLRPTAERIDRLGGLHRFMNWPKPILTDSGGFQVMSLSGLRKLTEEGVTFASHVDGSKHFLSPERSMEIQRLLGSDIVMAFDECPALPADETRVAESMRLSMRWAERSRDAFGDRPGHALFGIMQGGVTPELRAESAEKLTEIGFDGYAVGGLAVGEGQEAMFGVLDYAPGFLPEDRPRYLMGVGKPDDIVGAVERGIDMMDCVLPSRSGRTGQAWTRRGQVNIKNARHMDDPRPLDEHCSCPACRNYSRAYLHHVFRAGEMISGMLLTWHNLHYYQELMQGLRDAIAAGRLSAFVAEFHALRAEGDIEPL

SEQ ID NO: 60832 - protein, 376 aa, Sinirhodobacter hungdaonensis
  misc_feature (1)..(376): tr|A0A443LXK8|A0A443LXK8_9RHOB Queuine tRNA-ribosyltran sferase OS=Sinirhodobacter hungdaonensis OX=2501515 GN= tgt PE=3 SV=1
MTEKFSFTLHATDGKARTGVISTPRGEIRTPAFMPVGTAGTVKAMMPESVAATGADILLGNTYHLMLRPTAERIDRLGGLHRFMNWPKPILTDSGGFQVMSLSGLRKLTEEGVTFASHVDGSKHFLSPERSMEIQRLLGSDIVMAFDECPALPADETRVAESMRLSMRWAKRSRDAFGDRPGHALFGIMQGGVTPELRAESAEKLTEIGFDGYAVGGLAVGEGQEAMFGVLDYAPGFLPEDRPRYLMGVGKPDDIVGAVERGIDMMDCVLPSRSGRTGQAWTRRGQVNIKNARHMDDPRPLDEHCTCPACRNYSRAYLHHVFRAGEMISGMLLTWHNLQYYQELMQGLRDAIAAGRLSAFVAEFHALRAEGDIEPL

SEQ ID NO: 60833 - protein, 376 aa, Sinirhodobacter populi
  misc_feature (1)..(376): tr|A0A443KAQ9|A0A443KAQ9_9RHOB Queuine tRNA-ribosyltran sferase OS=Sinirhodobacter populi OX=2306993 GN=tgt PE= 3 SV=1
MTDRFRFTLNATDGKARTGVIHTPRGEIRTPAFMPVGTAATVKAMMPESVAATGADILLGNTYHLMLRPTAERIDRLGGLHRFMNWEKPILTDSGGFQVMSLADLRKMSEDGVTFRSHVDGSKHFLSPERSMEIQRLLGSDIVMAFDECPALPATDEVVAKSMRLSMRWAQRSRDAFGDRPGHALFGIMQGGVNRELRAESAEALKAIGFEGYALGGLAVGEGQEAMFGVLDYAPGFLPEDRPRYLMGVGKPDDIVGAVERGIDMMDCVLPSRSGRTGQAWTRRGQVNIKNARHMDDPRPLDEDCTCPACRNYSRAYLHHVFKAQEIISAMLLTWHNLQYYQDLMQGLRDAIAAGRLAEFTAAFHAKRAEGDIEPL

SEQ ID NO: 60834 - protein, 376 aa, Sinirhodobacter populi
  misc_feature (1)..(376): tr|A0A443KMZ9|A0A443KMZ9_9RHOB Queuine tRNA-ribosyltran sferase OS=Sinirhodobacter populi OX=2306993 GN=tgt PE= 3 SV=1
MTDRFRFTLNATDGKARTGVIHTPRGDIRTPAFMPVGTAATVKAMMPESVASTGADILLGNTYHLMLRPTAERIDRLGGLHRFMNWEKPILTDSGGFQVMSLADLRKMSEDGVTFRSHVDGSKHFLSPERSMEIQRLLGSDIVMAFDECPALPATDEVVAKSMRLSMRWAQRSRDAFGDRPGHALFGIMQGGVNRELRAESAEALKAIGFEGYALGGLAVGEGQEAMFGVLDYAPGFLPEDRPRYLMGVGKPDDIVGAVERGIDMMDCVLPSRSGRTGQAWTRRGQVNIKNARHMDDPRPLDADCTCPACRNYSRAYLHHVFKAQEIISAMLLTWHNLQYYQDLMQGLRDAIAAGRLAEFTAAFHTKRAEGDIEPL

SEQ ID NO: 60835 - protein, 379 aa, Sinobaca qinghaiensis
  misc_feature (1)..(379): tr|A0A419V3Q0|A0A419V3Q0_9BACL Queuine tRNA-ribosyltran sferase OS=Sinobaca qinghaiensis OX=342944 GN=tgt PE=3 SV=1
MSAIRYELIKTCKQSGARLGKLHTPHGVIETPIFMPVGTMATVKTISPDELEEMHAQIILSNTYHLWIRPGEDIIKEAGGLHKFMNWNKPILTDSGGFQVFSLSKLRDIKEEGVHFRNHISGEKLFLSPEKAMQIQNDLGPDIMMAFDECPPHPASEEYMKASVERTSRWAERCLGAHANPDTQGLFGIVQGGEYEHFRKQSAKELISLDFPGYAIGGLSVGEPKEIMNRVLEYTTPLLPDNKPRYLMGVGSADSLIDGAIRGIDMFDCVLPTRIARNGTCMTSSGRLVVRNAKFARDFRPIDEKCDCHVCKNYSRAYIRHLVKCNESFGFRLTSYHNLYFLLNLMEQVRQAIREDRLLDFREEYFEAYGFNKENAKNF

SEQ ID NO: 60836 - protein, 395 aa, Sinobacteraceae bacterium
  misc_feature (1)..(395): tr|A0A2T5MII5|A0A2T5MII5_9GAMM Queuine tRNA-ribosyltran sferase OS=Sinobacteraceae bacterium GT1R17 OX=2029166 GN=tgt PE=3 SV=1
MKFELIKQDGHARRGRLVFERGTVETPAFMPVGTYGTVKAMKPEEVRDTGAHILLGNTFHLMMRPGEETIRGLGGLHRFMNWKGPILTDSGGFQVWSLSGLRKITEEGVKFASPVNGDRIMLTPERSIEVQHALGSDIIMQFDECTPYPATDKQARKSMEMSARWAARCKTAHAALPQETRGGGGEERSALFGIVQGGMYEDLRRESLQKLVDVGFDGYALGGLSVGETEEERLHVLDAIGHTLPADRPHYLMGVGTPRDLVQAVGRGIDMFDCVMPTRNARNGHLFTHEGVIKIRNSAHKNDSRPLDEKCDCYTCKNYSRAYLHHLDKCNEILGSQLNTLHNLHHYQNVMQRIRAAIEANDFQRFSADFLAGEGAERGAHKIAKKVAGPLDSAI

SEQ ID NO: 60837 - protein, 381 aa, Sinobacteraceae bacterium
  misc_feature (1)..(381): tr|A0A522ZMJ3|A0A522ZMJ3_9GAMM Queuine tRNA-ribosyltran sferase OS=Sinobacteraceae bacterium OX=1969813 GN=tgt PE=3 SV=1
MPIPELLSAARYECVATDGDARRGRVHLPRGIIDTPQFMPVGTYGSVKGITPEELEAAGAQIILGNTFHLMLRPGSEIMQRLGGLHRFMHWERPILTDSGGFQVWSLAKLRKLTEEGVTFASPIDGSRVFLSPERATEVQHALGSDIIMQFDECTAWPATEEVAADSMRRSARWAQRCKDAHAGHPGALFGIVQGGTWPELRRESVQRLTEIDFPGYAIGGLAVGEPAPARLAMLETVNALLPTDRPRYLMGVGTPRDLVEGVARGVDLFDCVMPTRNARNGHLFTSQGVVRIRNARYRDDDTALDPACSCPTCQHYSRAYLHHLDRCNEMLGARLNTLHNLHYYLGLMHAVRKAIEAGQFAAFARNFLLGPQGAPKKPSS

SEQ ID NO: 60838 - protein, 402 aa, Sinobacterium caligoides
  misc_feature (1)..(402): tr|A0A3N2DZC2|A0A3N2DZC2_9GAMM Queuine tRNA-ribosyltran sferase OS=Sinobacterium caligoides OX=933926 GN=tgt PE =3 SV=1
MSCQNDEKSCTCVEHRDSFEGFHTEGRDECFMSFEVDHQRGLSRRGRLKFPRGTVETPAFMPVGTYGTVKGMMARDIEEIGAEIILGNTFHLMLRPGTEIIAEHGDLHDFTGWNKPILTDSGGFQVFSLGKMRKITEEGVTFRSPVNGDKVVLTPERSMEVQRALGSDVVMIFDECTPHPATHKEAKDSMEMSMRWAKRSRTAHGDSPSALFGIIQGGMYEDLRLQSIKGLCEIGFDGLAIGGLSVGEPKEEMFKVLDFLAHKMPADKPRYLMGVGTPSDLVEGVRKGVDMFDCVMPTRNARNGHIFTSQGVLKIRNAKHKHSTEPLDPECDCYTCKHHTRGYLHHLDKCKEILGSTLNTIHNLRYYQKVMADIRQALDDDRFEEYRAEFYAAQGIDVPDYV

SEQ ID NO: 60839 - protein, 397 aa, Sinomicrobium oceani
  misc_feature (1)..(397): tr|A0A1K1LX92|A0A1K1LX92_9FLAO Queuine tRNA-ribosyltran sferase OS=Sinomicrobium oceani OX=1150368 GN=tgt PE=3 SV=1
MVRVIPLLHYRYLCRRIDTVFMKFDLEAKDAASKARAGKITLGHGIVETPIFMPVGTVASVKGVHQRELKEDINPDIILGNTYHLYLRPQTDILEKAGGLHKFMGWDRNILTDSGGYQVYSLSANRKIKEEGVKFKSHIDGSYHFFSPERAMEIQRSIGADIIMAFDECTPYPCDYRYAQRSMHMTHRWLDRCVEHLKKVPEKYDYPQTLFPIVQGSVYKDLRKQSAEYIAGAGAAGNAIGGLSVGEPAEEMYAMTEVVCDILPEDKPRYLMGVGTPVNILENIALGVDMFDCVMPTRNARNGMLFTANGIINIKNKKWEDDFSPVDEMGITFVDTQYSKAYLRHLFAANEYLGKQIATIHNLGFYLWLVREARKHILAGDFYRWKNEMVPRLGQRL

SEQ ID NO: 60840 - protein, 376 aa, Sinomicrobium pectinilyticum
  misc_feature (1)..(376): tr|A0A3N0ET93|A0A3N0ET93_9FLAO Queuine tRNA-ribosyltran sferase OS=Sinomicrobium pectinilyticum OX=1084421 GN=t gt PE=3 SV=1
MKFELQANDPASKARAGKISAGHGVIETPIFMPVGTVASVKGVHQRELREDINPDIILGNTYHLYLRPQTEILEKAGGLHKFMGWERNILTDSGGYQVYSLSANRKIKEEGVKFKSHIDGSYHFFSPESVMEIQRSIGADIIMAFDECTPYPCDYRYAQRSMHMTHRWLDRCVEHLKKVPAKYGYEQSLFPIVQGSVYKDLREQSAEYIAGVGADGNAIGGLSVGEPAEEMYAMTEVVCKILPEDKPRYLMGVGTPVNILENIALGVDMFDCVMPTRNARNGMLFTANGIINIKNKKWEDDFSPVDEMGVTFVDTQYSRAYLRHLFAANEYLGKQIATIHNLGFYLWLVREARKHILAGDFYAWKNAMVPKLGHRL

SEQ ID NO: 60841 - protein, 376 aa, Sinomicrobium sp.
  misc_feature (1)..(376): tr|A0A329MW24|A0A329MW24_9FLAO Queuine tRNA-ribosyltran sferase OS=Sinomicrobium sp. N-1-3-6 OX=2219864 GN=tgt PE=3 SV=1
MEFELLAKDPGSKARAGKITAAHGTIETPIFMPVGTVASVKGVHQRELREDINPDIILGNTYHLYLRPQTGILEKAGGLHKFMGWERNILTDSGGYQVYSLSANRKIREEGVKFKSHIDGSYHFFSPEKAMEIQRSIGADIIMAFDECTPYPCDYGYAKRSMHMTHRWLDRCVEHLGKVPEKYGYGQSLFPIVQGSVYKDLRMQSAEYIAGAGADGNAIGGLSVGEPAEEMYAMTEVVCDILPEDKPRYLMGVGTPVNILENIALGVDMFDCVMPTRNARNGMLFTAGGIINIKNKKWEDDFSPVDEMGITFVDTQYSKAYLRHLFAANEFLGKQIATIHNLGFYLWLVREARKHILQGDFHTWKNAMTGKLAQRL

SEQ ID NO: 60842 - protein, 436 aa, Sinomonas atrocyanea
  misc_feature (1)..(436): tr|A0A126ZWB5|A0A126ZWB5_9MICC Queuine tRNA-ribosyltran sferase OS=Sinomonas atrocyanea OX=37927 GN=tgt PE=3 SV =1
MPDSVPVPEAPPVPSAQAGHPRQSEFGFEVGTRLAGPDGSPGLGRTGTITTPHGTIRTPAFIAVGTKATVKAVLPESMAELGAQALLANAYHLYLQPGADILDEAGGLGRFMNWPGPTFTDSGGFQVMSLGSGFKKVIDMKGPDAPHQAGADDAVAPGKERLAHIDDDGVWFKSHLNGDRHRFTPEISMQVQHQIGADIMFAFDELTTLHNSRGYQEEALERTRLWAQRCVDEHFRLTDERAGKPYQALFGVIQGAQYEDLRRKACTDLGAMPFDGYGIGGALEKENLGTIVGWCSEVLPEDRPRHLLGISEPDDIFVAIEAGADTFDCVSPTRVARNSAFYTAEGRLNLSGAKYRRDWGPLQDGCDCYTCANYSRAYIRHLYKASEMLSHTLISIHNERFVVRMVDDARRAIEDGTFAEFKAETLGRYYGSTPTV

SEQ ID NO: 60843 - protein, 424 aa, Sinomonas humi
  misc_feature (1)..(424): tr|A0A0B2ANN4|A0A0B2ANN4_9MICC Queuine tRNA-ribosyltran sferase OS=Sinomonas humi OX=1338436 GN=tgt PE=3 SV=1
MDSPLMASDGARTLGRTGTITTPHGEIRTPAFIAVGTKATVKAVLPESVRDLGAQAVLANAYHLYLQPGPEILDEAGGLGKFMNWQGPTFTDSGGFQVMSLGSGFKKVIDMTAVDASGPDDPTRGHSAREQSALGHPDRDLAVAPGKERLAHIDEDGVWFTSHLNGDRHRFSPEISMNVQHQIGADIMFAFDELTTLQNSRGYQEESLERTRRWAERCVAEHFRLTDERSHRPYQALFGVIQGAQYEDLRRKACRDLGAMPFDGFGIGGALEKENLGTIVAWCSEELPEDKPRHLLGISEPDDIFAAIEAGADTFDCVSPTRVARNSAFYTSEGRFNLSGARYRKDWGPLQEGCDCYTCQNYSRAYIRHLFKAKEMLSHTLISIHNERFVVRMVDDARNAIEDGTFWDFKEETLGRYYPAAARR

SEQ ID NO: 60844 - protein, 434 aa, Sinomonas sp.
  misc_feature (1)..(434): tr|A0A221R1Y8|A0A221R1Y8_9MICC Queuine tRNA-ribosyltran sferase OS=Sinomonas sp. R1AF57 OX=2020377 GN=tgt PE=3 SV=1
MPDSAPVAPEAAPAPSSAAASHPRQSEFSFAVGTRLEGGDGAPTLGRTGTITTPHGTIQTPAFIAVGTKATVKAVLPESMAELGAQALLANAYHLYLQPGADILDEAGGLGRFMNWSGPTFTDSGGFQVMSLGSGFKKVIDMTGPQRDATPGSDDAVAPGKERLAHIDDDGVWFKSHLNGDRHRFSPEISMQVQHQIGADIMFAFDELTTLHNSRRYQEEALERTRKWAERCVAEHFRLTDERVGKPYQALFGVIQGAQYEDLRRKACGDLGAMPFDGFGIGGALEKENLGTIVGWCSEALPEDRPRHLLGISEPDDIFVAIEAGADTFDCVSPTRVARNSAFYTAEGRLNLSGAKYKRDWGPLQDGCDCYTCANYSRAYIRHLFKASEMLSHTLISIHNERFVVRMVDDARRAIEEGTFHDFKAETLGRYYGP

SEQ ID NO: 60845 - protein, 376 aa, Sinorhizobium americanum
  misc_feature (1)..(376): tr|A0A1L3L3M2|A0A1L3L3M2_9RHIZ Queuine tRNA-ribosyltran sferase OS=Sinorhizobium americanum CCGM7 OX=1408224 GN =tgt PE=3 SV=1
MTETFQFKLLATDGKARRGEVSMPRGTIRTPAFMPVGTVGTVKAMYLDQVRELGADIILGNTYHLMLRPGAERVARLGGLHNFIRWERPILTDSGGFQVMSLSSLRKLNEQGVTFKSHVDGALYQMSPERSIEIQGLLDSDIQMQLDECVALPAEPGEIERAMEMSIRWAERCKVAFGDQPGKAMFAIVQGGDLPKLRERSALALKELDLKGYAVGGLAVGEPQEVMLEMLDVTCPILPAEKPRYLMGVGTPDDILKSVAHGIDMFDCVMPTRSGRHGLAFTRYGRINLRNARHAEDLRPLDEQSSCPATRDYSRAYLHHLIRSNESLGGMLLSWNNLAYYQELMAGIRKAIEEGRYADFMVETQEGWQRGDLPPV

SEQ ID NO: 60846 - protein, 376 aa, Sinorhizobium americanum
  misc_feature (1)..(376): tr|A0A2S3YP18|A0A2S3YP18_9RHIZ Queuine tRNA-ribosyltran sferase OS=Sinorhizobium americanum OX=194963 GN=tgt PE =3 SV=1
MTETFQFKLLATDGKARRGEVSMPRGTIRTPAFMPVGTVGTVKAMYLDQVRELGADIILGNTYHLMLRPGAERVARLGGLHNFIRWERPILTDSGGFQVMSLSSLRKLNEQGVTFKSHVDGALYHMSPERSIEIQGLLDSDIQMQLDECVALPAEPGEIERAMEMSIRWAERCKVAFGDQPGKAMFAIVQGGDIPKLRERSALALKGLDLKGYAVGGLAVGEPQEVMLEMLDVTCPILPAEKPRYLMGVGTPDDILKSVAHGIDMFDCVMPTRSGRHGLAFTRYGRINLRNARHAEDLRPLDEQSSCPATRDYSRAYLHHLIRSNESLGGMLLSWNNLAYYQELMAGIRKAIEEGRYADFMAETQEGWQRGDLPPV

SEQ ID NO: 60847 - protein, 376 aa, Sinorhizobium fredii; identical to SEQ ID NO: 60007
  misc_feature (1)..(376): tr|A0A2U8G4I5|A0A2U8G4I5_RHIFR Queuine tRNA-ribosyltran sferase OS=Sinorhizobium fredii CCBAU 45436 OX=1128331 GN=tgt PE=3 SV=1

SEQ ID NO: 60848 - protein, 376 aa, Sinorhizobium fredii; identical to SEQ ID NO: 60007
  misc_feature (1)..(376): tr|A0A249PTP2|A0A249PTP2_RHIFR Queuine tRNA-ribosyltran sferase OS=Sinorhizobium fredii CCBAU 83666 OX=1128334 GN=tgt PE=3 SV=1

SEQ ID NO: 60849 - protein, 376 aa, Sinorhizobium medicae
  misc_feature (1)..(376): tr|A6U8Y8|A6U8Y8_SINMW Queuine tRNA-ribosyltransferase OS=Sinorhizobium medicae (strain WSM419) OX=366394 GN=t gt PE=3 SV=1
MTEAFQFKLLSSDGNARRGEVLTPRGTIRTPAFMPVGTVGTVKAMYLDQVRELGADIILGNTYHLMLRPGAERVARLGGLHKFIRWDRPILTDSGGFQVMSLSSLRKLNEQGVTFKSHVDGALYHMSPERSIEIQGLLGSDIQMQLDECVALPAEPGEIERAMEMSLRWAERCKVAFGDQPGKAMFGIVQGGDIPKLRERSASALNELDLKGYAVGGLAVGEPQEVMLDMLDVTCPVLPADKPRYLMGVGTPDDILKSVAHGVDMFDCVMPTRSGRHGLAFTRYGRINLRNARHAEDARPLDEQSSCPAARDYSRAYLHHLIRSNESLGGMLLSWNNLAYYQELMAGIRKAIEEGRYSDFMAETIEGWQRGDLAPV

SEQ ID NO: 60850 - protein, 376 aa, Sinorhizobium medicae; identical to SEQ ID NO: 60849
  misc_feature (1)..(376): tr|A0A508WSS7|A0A508WSS7_9RHIZ Queuine tRNA-ribosyltran sferase OS=Sinorhizobium medicae OX=110321 GN=tgt PE=3 SV=1

SEQ ID NO: 60851 - protein, 376 aa, Sinorhizobium meliloti; identical to SEQ ID NO: 60024
  misc_feature (1)..(376): tr|F7X091|F7X091_SINMM Queuine tRNA-ribosyltransferase OS=Sinorhizobium meliloti (strain SM11) OX=707241 GN=tg t PE=3 SV=1

SEQ ID NO: 60852 - protein, 376 aa, Sinorhizobium meliloti; identical to SEQ ID NO: 60024
  misc_feature (1)..(376): tr|A0A0E0UD55|A0A0E0UD55_SINMB Queuine tRNA-ribosyltran sferase OS=Sinorhizobium meliloti (strain BL225C) OX=69 8936 GN=tgt PE=3 SV=1

SEQ ID NO: 60853 - protein, 376 aa, Sinorhizobium saheli
  misc_feature (1)..(376): tr|A0A178YLS6|A0A178YLS6_SINSA Queuine tRNA-ribosyltran sferase OS=Sinorhizobium saheli OX=36856 GN=tgt PE=3 SV =1
MNETFQFKLLATDGKARCGEISTPRGMIRTPAFMPVGTVGTVKAMYLDQVRELGADIILGNTYHLMLRPGAERVARLGGLHNLIRWQGPILTDSGGFQVMSLSALRKLDERGVTFKSHVDGAIHHMSPERSIEIQGLLDSDIQMQLDECIALPAEPNEIERAMEMSLRWAERCKLAFGDQPGKAMFGIVQGGDIPKLRERSALVLKELDLKGYAIGGLAVGEPQEVMLDMLDVTCPALPAEKPRYLMGVGTPDDILKSVAHGVDMFDCVMPTRSGRHGLAFTRYGRINLRNARHAEDLRPLDEQSSCPATRDYSRAYLHHLIRSNESLGGMLLSWSNLAYYQELMADIRKAIEEGRFADFMAETIEGWQRGDLPPV

SEQ ID NO: 60854 - protein, 376 aa, Sinorhizobium sp.
  misc_feature (1)..(376): tr|A0A0T6Y558|A0A0T6Y558_9RHIZ Queuine tRNA-ribosyltran sferase OS=Sinorhizobium sp. Sb3 OX=1358417 GN=tgt PE=3 SV=1
MTETFQFKLHKTDGKARRGEVSMPRGTIRTPAFMPVGTVGTVKAMYLDQVKDLGADIILGNTYHLMLRPGAERVARLGGLHGLIRWQGPILTDSGGFQVMSLAGLRKLDEQGVTFKSHVDGALFHMSPERSIEIQGLLDSDIQMQLDECVALPAEPKEIERAMEMSLRWAERCKVAFGDQPGKAMFGIVQGGDIPKLRERSAEALKGLDLKGYAVGGLAVGEPQEVMLRMLDITCPIMPVDKPRYLMGVGTPDDILRSVAEGIDMFDCVMPTRSGRHGLAFTRHGRINLRNARHAEDMRPLDEESSCPAARDYSRAYLHHLIRSNESLGGMLLSWNNLAYYQELMAGIRLAIDEGRFADFMAETQETWRRGDLPPV

SEQ ID NO: 60855 - protein, 376 aa, Sinorhizobium sp.
  misc_feature (1)..(376): tr|A0A2A6MKA4|A0A2A6MKA4_9RHIZ Queuine tRNA-ribosyltran sferase OS=Sinorhizobium sp. NG07B OX=1538174 GN=tgt PE =3 SV=1
MTETFQFKLLATDGKARRGEVSMPRGTIRTPAFMPVGTVGTVKAMYLDQVRELGADIILGNTYHLMLRPGAERVARLGGLHNFIRWERPILTDSGGFQVMSLSSLRKLNEQGVTFKSHVDGALYHMSPERSIEIQGLLDSDIQMQLDECVALPAEPDEIERAMEMSIRWAERCKVAFGDQPGKAMFAIVQGGDIPKLRERSALALKGLDLKGYAVGGLAVGEPQEVMLEMLDVTCPILPAEKPRYLMGVGTPDDILKSVAHGIDMFDCVMPTRSGRHGLAFTRYGRINLRNARHAEDLRPLDEQSSCPATRDYSRAYLHHLIRSNESLGGMLLSWNNLAYYQELMAGIRKAIEEGRYADFMAETQEGWQRGDLPPV

SEQ ID NO: 60856 - protein, 377 aa, Siphonobacter aquaeclarae
  misc_feature (1)..(377): tr|A0A1G9MGC7|A0A1G9MGC7_9BACT Queuine tRNA-ribosyltran sferase OS=Siphonobacter aquaeclarae OX=563176 GN=tgt P E=3 SV=1
MQFDLIKQDPGSKARAGRIQTDHGTIETPIFMPVGTVGTVKAVHQRELKDDIQAQIILGNTYHLYLRPGLEVLEKAGGLHGFNGWDRPILTDSGGFQVYSLAGTGRKIDEAGVKFKSHIDGSTHYFTPEGVMDIQRTIGADFVMAFDECTPYPCDYGYARRSMELTHRWLKRCCERFDATEPKYGHSQTLFPIVQGSTYKDLRAQSAEFIASMGREGNAIGGLSVGEPVEDMYEMTDLVCSILPADKPRYLMGVGTPANILESIALGVDMFDCVMPTRNARHGILYTTQGIINIKNEKWREDFSPVDEALGGYASTFYTKAYLRHLFKSDELLGPQIASVHNLTFYLWLVKQARERILDGTFAAWKDGMVRQVMQRL

SEQ ID NO: 60857 - protein, 375 aa, Siphonobacter curvatus
  misc_feature (1)..(375): tr|A0A2S7IEM2|A0A2S7IEM2_9BACT Queuine tRNA-ribosyltran sferase OS=Siphonobacter curvatus OX=2094562 GN=tgt PE= 3 SV=1
MQFEVIKQDQKARAGTIQTDHGTIETPIFMPVGTVASVKAVHQRELKEDIKAQIILGNTYHLYLRPGLEVLEQAGGLHKFNGWDRPILTDSGGFQVYSLAGTGRKIDEAGVKFKSHIDGSTHVFTPESVMDIQRTIGADFVMAFDECTPYPCDYGYARRSMELTHRWLQRCCDRFDTTEPKYGHSQALFPIVQGSTYPDLRRQSAEFIASLGREGNAIGGLSVGEPAEDMYEMTDLVCSILPQDKPRYLMGVGTPANILESIALGIDMMDCVLPTRNARHGILYTTQGIINIKNEKWRKDFSPIDEGLGGYTSTFYSKAYLRHLFKSDELLGPQIASVHNLTFYLWLVKEARLQILNGTYLPWKNQMVEQIMRRL

SEQ ID NO: 60858 - protein, 375 aa, Siphonobacter sp.
  misc_feature (1)..(375): tr|A0A2N7BA59|A0A2N7BA59_9BACT Queuine tRNA-ribosyltran sferase OS=Siphonobacter sp. BAB-5405 OX=1864825 GN=tgt PE=3 SV=1
MQFEVIKQDQKARAGTIQTDHGTIETPIFMPVGTVASVKAVHQRELKEDIKAEIILGNTYHLYLRPGLEVLEQAGGLHKFNGWDRPILTDSGGFQVYSLAGTGRKIDEAGVKFKSHIDGSTHVFTPEGVMDIQRAIGADFVMAFDECTPYPCDYGYARRSMELTHRWLQRCCDRFDTTEPKYGHSQALFPIVQGSTYPDLRRQSAEFIASLGREGNAIGGLSVGEPAEDMYEMTDLVCSILPQDKPRYLMGVGTPANILESIALGIDMMDCVLPTRNARHGILYTTQGIINIKNEKWRKDFSPIDEGLGGYTSTFYSKAYLRHLFKSDELLGPQIASVHNLTFYLWLVKEARQQILNGTYLPWKNQMVEQIMRRL

SEQ ID NO: 60859 - protein, 375 aa, Siphonobacter sp.
  misc_feature (1)..(375): tr|A0A261Q5Q4|A0A261Q5Q4_9BACT Queuine tRNA-ribosyltran sferase OS=Siphonobacter sp. BAB-5385 OX=1864822 GN=tgt PE=3 SV=1
MQFEVIKQDQKARAGTIQTDHGTIETPIFMPVGTVASVKAVHQRELKEDIKAQIILGNTYHLYLRPGLEVLEQAGGLHKFNGWDRPILTDSGGFQVYSLAGTGRKIDEAGVKFKSHIDGSTHVFTPEGVMDIQRAIGADFVMAFDECTPYPCDYGYARRSMELTHRWLQRCCDRFDTTEPKYGHSQALFPIVQGSTYPDLRRQSAEFIASLGREGNAIGGLSVGEPAEDMYEMTDLVCSILPQDKPRYLMGVGTPANILESIALGIDMMDCVLPTRNARHGILYTTQGIINIKNEKWRKDFSPIDEGLGGYTSTFYSKAYLRHLFKSDELLGPQIASVHNLTFYLWLVKEARQQILNGTYLPWKNQMVEQIMRRL

SEQ ID NO: 60860 - protein, 412 aa, Skermanella aerolata
  misc_feature (1)..(412): tr|A0A512DR44|A0A512DR44_9PROT Queuine tRNA-ribosyltran sferase OS=Skermanella aerolata OX=393310 GN=tgt PE=3 S V=1
MGFDVHATDGMARRGTLTTAHGTVETPAFMPVGTAGTVKGMMPGSVKTTGAQIILGNTYHLMLRPTAERVAQLGGLHRFMNWHGPILTDSGGFQVMSLSDLRKMSEDGVTFKSHLDGKRHHLTPERSMQIQHLLDSNVTMCLDECTAFPATHEVAEKSMKLSMRWAQRSRDAFVERPGYGLFGIVQGSVYADLRAESVKALTDIGFDGYAVGGLAVGEGQQMMFDTLDVTTPLLPKDRPRYLMGVGKPSDIIGAVRRGIDMFDCVMPTRSGRTGQAFVRRGVLNIRNARHAHDDRPLDEKCGCPACRSYSRGYLHHLFKAGEMLGPMLLTWHNLSYYQDLMADLRRAIAQGCFEERAAELEAQLLLGDIPATPDPLAGTPAAEAEAEAAATEPDAKAGGAADEEIHSVPVDL

SEQ ID NO: 60861 - protein, 427 aa, Skermanella aerolata
  misc_feature (1)..(427): tr|A0A0D2VWR4|A0A0D2VWR4_9PROT Queuine tRNA-ribosyltran sferase OS=Skermanella aerolata KACC 11604 OX=1385368 G N=tgt PE=3 SV=1
MTATGSGFSGAGFRGLGFDVHATDGMARRGTLTTAHGTVETPAFMPVGTAGTVKGMMPGSVKTTGAQIILGNTYHLMLRPTAERVAQLGGLHRFMNWHGPILTDSGGFQVMSLSDLRKMSEDGVTFKSHLDGKRHHLTPERSMQIQHLLDSNVTMCLDECTAFPATHEVAEKSMKLSMRWAQRSRDAFVERPGYGLFGIVQGSVYADLRAESVKALTDIGFDGYAVGGLAVGEGQQMMFDTLDVTTPLLPKDRPRYLMGVGKPSDIIGAVRRGIDMFDCVMPTRSGRTGQAFVRRGVLNIRNARHAHDDRPLDEKCGCPACRSYSRGYLHHLFKAGEMLGPMLLTWHNLSYYQDLMADLRRAIAQGCFEERAAELEAQLLLGDIPATPDPLAGTPAAEAEAEAAATEPDAKAGGAADEEIHSVPVDL

SEQ ID NO: 60862 - protein, 407 aa, Skermanella stibiiresistens
  misc_feature (1)..(407): tr|W9GYC4|W9GYC4_9PROT Queuine tRNA-ribosyltransferase OS=Skermanella stibiiresistens SB22 OX=1385369 GN=tgt P E=3 SV=1
MTESSTTSTGLGFDLIKTDGMARRGRLSTAHGDVETPAFMPVGTVGTVKGMMPGSVRETGAQILLGNTYHLMLRPTAERVAQFGGLHKFMNWSGPILTDSGGFQVMSLSDLRTMNEDGVTFKSHLDGRRHHLTPERSMRIQHLLDSNVTMCLDECTPFPATHEVADKSMRMSMRWAQRSRDAFVERPGYGLFGIVQGGVYPDLRADSVKALTDIGFDGYAVGGLAVGEGQQMMFDVLDVTTPLLAADRPRYLMGVGRPGDIIGAVRRGVDMFDCVMPTRSGRTGQAFVRRGVLNIRNARHAHDPRPLDEDCRCPACREYSRGYLHHLFRAGEMLGPMLLTWHNLTYYQDLMADLRRAIEDGCFEQRAAELEAGLALGDHPALPDPLNLKAAPETDKSEEDSSVAIDL

SEQ ID NO: 60863 - protein, 410 aa, Skermania sp.
  misc_feature (1)..(410): tr|A0A554V609|A0A554V609_9ACTN Queuine tRNA-ribosyltran sferase OS=Skermania sp. ID1734 OX=2597516 GN=tgt PE=3 SV=1
MTEGRAQFGFRIGARLPGRHGRTGTIATPHGEIQTPAFIPVGTKATVKAVLPETMKELGAQALLANAYHLYLQPSPEIIDAAGGLGRFMNWDRPTFTDSGGFQVMSLGVGFKKVLAMEAVGHQSDEVIAKGRERLAKVDDDGVTFTSHLNGSRHRFTPEISMQIQHQLGADIMFAFDELTTLFNTREYQETSLQRTHDWAVRCMDEHDRLTETRRHRPYQALFAVIQGAQYEDLRRKACRGLASITGPSGNVFDGYGIGGAIEKHNLGAIVGWCSDELPEDKPRHMLGISEPEDLFEAIANGADTFDCVNPSRTGRNGRVYTLDGRFNVDTSRFRRDFTPIDDACDCYTCGHYTKAYLHHLFKAKEMLAATLCTVHNERFTIRLVDAIRDSITDGTFDDFHEQAMARWKN

SEQ ID NO: 60864 - protein, 382 aa, Slackia equolifaciens
  misc_feature (1)..(382): tr|A0A3N0ASI8|A0A3N0ASI8_9ACTN Queuine tRNA-ribosyltran sferase OS=Slackia equolifaciens OX=498718 GN=tgt PE=3 SV=1
MSLFDVTIDAHDGEARALTFETAHGTVHTPMFMPVGTHATVKGVTVDQLRGIGSQVVLANTYHLYMRPGVEIIEAAGGVQKFMNYDGPMLTDSGGFQLFSLDHMMKTDPDGVTFHARDYDGSKHRWTPEINMDIQQRIGADIVMQLDQCIGYPAAKEDVAASTKLSWEWAERCCAAHTREDQALFGIVQGGMHLDLRLESVRRLLDIDERSRAAGHKGFQGFGIGGYSVGEPHDVMFETLPQVCAALPDDRPRYLMGVGNPTTLVRAVRAGVDMFDCVLPTRTGRMGTAFSHEGRMNLRNAKYKADFTPLDPQCSCPVCTQYTRAYLRHLVKQNEMLGGILLSIHNLHFLIDLMAKAREAVLAGEYEAFYQDWMNSPAANDY

SEQ ID NO: 60865 - protein, 382 aa, Slackia exigua
  misc_feature (1)..(382): tr|D0WG60|D0WG60_SLAES Queuine tRNA-ribosyltransferase OS=Slackia exigua (strain ATCC 700122 / DSM 15923 / CIP 105133 / JCM 11022 / KCTC 5966 / S-7) OX=649764 GN=tgt PE=3 SV=1
MSLFDVTVEASCGAARALSFETAHGTVRTPMFMPVGTHATVKGITPDQLHALNSQIVLANTYHLYMRPGVDVVEEAGGIQRFMNYDGPMLTDSGGFQLFSLDHMMKADADGVTFHARDYDGSAHRWTPESNMDIQQRIGADICMQLDQCIGYPCEKEDVAASTALSWEWAKRCCDAHTRIDQALFAIVQGGMHLDLRLESVRRLLEIDAESRSSGGRGFQGFGIGGYSVGEPHDVMFETLGQVTRALPDDRPRYLMGVGNPTTLVRAVREGVDMFDCVLPTRTGRMGTAFSSQGRMNMRNAKYKRDFTPLDHACDCPVCRQYTRAYLRHLVMQKEMLGGILLSVHNLHFLISLMGRAREAILGGTYEEFYRAWMASPAANDY

SEQ ID NO: 60866 - protein, 382 aa, Slackia faecicanis
  misc_feature (1)..(382): tr|A0A3N0AF79|A0A3N0AF79_9ACTN Queuine tRNA-ribosyltran sferase OS=Slackia faecicanis OX=255723 GN=tgt PE=3 SV= 1
MALFDVTVDARDGNARAISFDTAHGTVHTPMFMPVGTHATVKGVTVDQLHDMKSQVVLANTYHLYMRPGVDIIERAGGVQKFMNYDGPMLTDSGGFQLFSLDHMMKTDPDGVSFHARDYDGSKHRWTPESNMDIQQRIGADIVMQLDQCIGYPAEKEAVAASTKLSWEWAERCCAAHTREDQALFAIVQGGMHRDLRLESARRLMEIDAASRAAGHKGFQGFGIGGYSVGEPHDVMFETLGAVCEALPQDKPRYLMGVGNPTTLVRAVREGVDMFDCVLPTRTGRMGTAFSHQGRMNLRNAKYKEDFTPLDPQCSCPVCTQYTRAYLRHLVMQKEMLGGILLSMHNLHFLIDLMAKAREAVLAGEYEAFYQDWMNSPAADDY

SEQ ID NO: 60867 - protein, 382 aa, Slackia heliotrinireducens
  misc_feature (1)..(382): tr|C7N4E0|C7N4E0_SLAHD Queuine tRNA-ribosyltransferase OS=Slackia heliotrinireducens (strain ATCC 29202 / DSM 20476 / NCTC 11029 / RHS 1) OX=471855 GN=tgt PE=3 SV=1
MALFDVTIDATCGNARALTFETAHGQVHTPMFMPVGTHATVKGITVDQLHELKSQVVLANTYHLYMRPGVDIVEAAGGVQKFMNYDGPMLTDSGGFQLFSLDHMMKTDPDGVSFQARDYDGSKHRWTPESNMEIQQRIGADIAMQLDQCVGYPETRERVEASTKLSWEWAERCLAAHTREDQALFGIVQGGMHLDLRLESVRHLIEIEERSIAAGHKRFGGFGIGGYSVGEPHDVMFETLGTVAQACPEDRPRYLMGVGNPTTLVRAVREGVDMFDCVLPTRTGRMGTAFSSQGRMNLRNAKYKVDFTPLDHECSCPVCQNYTRAYLRHLVKQNEMLGGILLSMHNLHFLIDLMARARQAVLDGEYEAFYQEWMASPGANDY

SEQ ID NO: 60868 - protein, 382 aa, Slackia isoflavoniconvertens
  misc_feature (1)..(382): tr|A0A3N0IB23|A0A3N0IB23_9ACTN Queuine tRNA-ribosyltran sferase OS=Slackia isoflavoniconvertens OX=572010 GN=tg t PE=3 SV=1
MPLFDVNIDATCGNARALTFETAHGTVHTPMFMPVGTHATVKGVTTPQLRELNSQVVLANTYHLYMRPGVDIIEKAGGVQKFMNYDGPMLTDSGGFQLFSLDHMMKTDPDGVTFHARDYDGSKHRWTPESNMDIQQRIGADIVMQLDQCIGYPSPKEAVAASTKLSWEWAERCCAAHTREDQALFAIVQGGMHLDLRLENVKRLIEIDAASRAAGHKGFQGYGIGGYSVGEPHDVMFETLGDVCQALPDNRPRYLMGVGNPTTLVRAVREGVDMFDCVLPTRTARMGTAFSHTGRMNMRNAKYKEDFTPLDPECSCPTCTHYTRAYLRHLVKQGEMLGGILLSIHNLHFLIDLMGKAREAVLAGEYETFYQDWMNSPAANDY

SEQ ID NO: 60869 - protein, 382 aa, Slackia isoflavoniconvertens
  misc_feature (1)..(382): tr|A0A369LGG0|A0A369LGG0_9ACTN Queuine tRNA-ribosyltran sferase OS=Slackia isoflavoniconvertens OX=572010 GN=tg t PE=3 SV=1
MPLFDVNIDATCGNARALTFETAHGTVHTPMFMPVGTHATVKGVTTPQLRELNSQVVLANTYHLYMRPGVDIIEKAGGVQKFMNYDGPMLTDSGGFQLFSLDHMMKTDPDGVTFHARDYDGSKHRWTPESNMDIQQRIGADIVMQLDQCIGYPSPKEAVAASTKLSWEWAERCCAAHTREDQALFAIVQGGMHRDLRLESVKRLIEIDASSRAAGHKGFQGFGIGGYSVGEPHDVMFETLGDVCQALPDNRPRYLMGVGNPTTLVRAVREGVDMFDCVLPTRTARMGTAFSHTGRMNMRNAKYKEDFTPLDPECSCPTCTHYTRAYLRHLVKQGEMLGGILLSIHNLHFLIDLMGKAREAVLAGEYETFYQDWMNSPAANDY

SEQ ID NO: 60870 - protein, 382 aa, Slackia piriformis
  misc_feature (1)..(382): tr|K0YMD8|K0YMD8_9ACTN Queuine tRNA-ribosyltransferase OS=Slackia piriformis YIT 12062 OX=742818 GN=tgt PE=3 S V=1
MALFDVTIDARDGNARALTFDTAHGAVHTPMFMPVGTHATVKGVTVDQLHDLGSQVVLANTYHLYMRPGVDIIERAGGVQKFMNYNGPMLTDSGGFQLFSLDHMMKTDPDGVSFHARDYDGSKHRWTPESNMDIQQRIGADIVMQLDQCIGYPAEKEAVAASTKLSWEWAERCCAAHTREDQALFAIVQGGMHRDLRLESARRLMEIDAASRAAGHKGFQGFGIGGYSVGEPHDVMFETLGAVCDALPQDRPRYLMGVGNPTTLVRAVREGVDMFDCVLPTRTGRMGTAFSHEGRMNLRNAKYKEDFTPLDPQCTCPVCTQYTRAYLRHLVMQKEMLGGILLSIHNLHFLIDLMAKAREAVLAGEYEAFYQDWMNSPAANDY

SEQ ID NO: 60871 - protein, 399 aa, Slackia sp.
  misc_feature (1)..(399): tr|J4XJT7|J4XJT7_9ACTN Queuine tRNA-ribosyltransferase OS=Slackia sp. CM382 OX=1111137 GN=tgt PE=3 SV=1
MVRAGRSGCIKKIRGGSMSLFDVTVEASCGAARALSFETAHGTVRTPMFMPVGTHATVKGITPDQLHALNSQVVLANTYHLYMRPGVDVVEEAGGIQRFMNYDGPMLTDSGGFQLFSLDHMMKTDADGVTFHARDYDGSAHRWTPESNMDIQQRIGADICMQLDQCIGYPCEKEDVAASTALSWEWAKRCCDAHSRIDQALFAIVQGGMHLDLRLESVRRLLEIDAESRSSGGRGFQGFGIGGYSVGEPHDVMFETLGQVTRALPDDRPRYLMGVGNPTTLVRAVREGVDMFDCVLPTRTGRMGTAFSSQGRMNMRNAKYKRDFTSLDHACDCPVCRQYTRAYLRHLVMQKEMLGGILLSVHNLHFLISLMGRAREAILDGIYEEFYRAWMASPAANDY

SEQ ID NO: 60872 - protein, 369 aa, Smithella sp.
  misc_feature (1)..(369): tr|A0A091AH39|A0A091AH39_9DELT Queuine tRNA-ribosyltran sferase OS=Smithella sp. F21 OX=1538640 GN=tgt PE=3 SV= 1
MPFSFELIKKDLQTSARLGKMVTPHGTVQTPAFMPVGTQGTVKSMRPEEIQNCGAQILLSNTYHLYLRPGHETIRRMGGLHSFMNWPGPILTDSGGFQVYSLAALRKIGPDGVMFQSHIDGSKHFLTPQKAVLIQEALGSDIMMCLDECTPYPATRKQTSDSLDLTVKWAGLCRKAKTNPEQALFGIVQGGTYMDLRRQALEQTVPIGFDGYALGGVSVGEPKEMMQAITDEITPLLPSEKPRYLMGVGTPADIVYGVSRGIDLFDCVIPTRSARHGLLFTNSEKIVIKNARWREDNNPLDETCDCYTCKNYSRGYLRHLYVAGEILAMILNTIHNIRHYMRLMEKIRAAISENHFGEFQKDFLSQEEK

SEQ ID NO: 60873 - protein, 366 aa, Smithella sp.
  misc_feature (1)..(366): tr|A0A0N8W7M2|A0A0N8W7M2_9DELT Queuine tRNA-ribosyltran sferase OS=Smithella sp. SDB OX=1735324 GN=tgt PE=3 SV= 1
MPLEFDLIKQDYSTAARLGKIVTSHGTVHTPAFMPVGTQGTVKSMLPEEIKNCGAEIILSNTYHLYLRPGYEIIKKIGGLHRFMNWAGPILTDSGGFQVYSLGALRKITPDGVVFHSHIDGSKHFLSPQKAIEIQEALNSDIMMCLDECTPYPATFLQAKESLALTVKWADLCIKSRNNTEQALFGIIQGGIYLDLRKEAVEQLRHLDFDGYALGGVSVGEPKEIMYKITDSITPLLPETKPRYLMGVGTPADIVFAVSRGIDMFDCVIPTRCARHGLLFTNTENVVIKNARWREDNNPIEQTCDCYTCRNYSRAYLRHLYVTGEILAMILNTIHNIRHYMRLMENIRLAISESRFEEFKKSYFNK

SEQ ID NO: 60874 - protein, 382 aa, Sneathia amnii
  misc_feature (1)..(382): tr|A0A0E3ZA70|A0A0E3ZA70_9FUSO Queuine tRNA-ribosyltran sferase OS=Sneathia amnii OX=187101 GN=tgt PE=3 SV=1
MLPVRYELLYSDGNARCGIIHTPHGDIKTPIFMPVGTQATVKTMTPEELKEIGAEIILGNTYHLHLRPTDELINTFGGLHEFMHWDRPILTDSGGFQIFSLAVRRKLTEEGAYFSSHLDGSKHFISPEKSIEIQNNLGSDIMMVLDECPPGLSTREYLEPSINRTVRWARRCIDANRNKDKQGLFAIVQGGIYEDLRDYCFNELYKTNDDFSGYAIGGLAVGEPTEDMYRILKYITPKLPKDKPRYLMGVGEPLDMLEAIEHGVDMMDCVHPSRIGRHGTVFTKYGRLVIKNEKYSRDPRPLDISDNYVCKNYTRAYIRHLFKANEVLAQRLATYHNLWFLLNLVKEARKAIEEGRFKEYKEEFIKNYTMGSNSDWIKPIVK

SEQ ID NO: 60875 - protein, 377 aa, Sneathiella sp.
  misc_feature (1)..(377): tr|A0A2G1YZ13|A0A2G1YZ13_9PROT Queuine tRNA-ribosyltran sferase OS=Sneathiella sp. OX=1964365 GN=tgt PE=3 SV=1
MINSDFTFNISATDGAARRGTISTAHGEIRTPAFMPVGTAATVKGMTPEAVRETGADILLGNTYHLMLRPGSERVAKLGGLHKFMNWERPILTDSGGFQVMSLNELRKIDEEGVTFKSHIDGKRFELTPERSMEIQNHLDATITMAFDECTPYPATHEVAVTSMQRSMRWAKRSRDAFEERTGYGLFGIVQGSTYEDLRQESIDALTGIGFDGYAIGGLAVGEGQEEMFRTLEFTVPALPQDKPRYLMGVGKPSDLVGSVMRGVDMFDCVLPTRSGRNAQAFTRHGTVNMRNARHADDSRPLDALCDCPACRNYCRGYLHHLFKAKEMLGSMLLTWHNLHYYQGLMAGMRSAIEDKRLSDFALDFFACQDHGDIDIL

SEQ ID NO: 60876 - protein, 376 aa, Sneathiella sp.
  misc_feature (1)..(376): tr|A0A2D8HKC4|A0A2D8HKC4_9PROT Queuine tRNA-ribosyltran sferase OS=Sneathiella sp. OX=1964365 GN=tgt PE=3 SV=1
MTDDFHFTIHATDGAARRGTLKTAHGDIRTPAFMPVGTAATVKGMTVEAVRETGADILLGNTYHLMLRPGSERVKRLGGLHKFMNWPRPILTDSGGFQVMSLNELRKIDENGVTFKSHIDGKRFELTPERSMQIQNDLDATITMAFDECTPYPATHDVAASSMRRSMRWAARSRDAYELRPGYGLFGIVQGSTFEDLRLESVAALSETGFDGYAVGGLAVGEGQAEMFRTLEFTTPAMPQDRPRYLMGVGKPDDLVGAVMRGIDMFDCVLPTRSGRNAQAFTRYGTINMRNARHADDPRPLDENCGCPACRNYSRGYLNHLFKAKEMLGGMLLTWHNLHYYQDVMAGMRSAIAAGQLADFALDFYALQEQGDIEPV

SEQ ID NO: 60877 - protein, 385 aa, Snodgrassella alvi
  misc_feature (1)..(385): tr|X2HAV9|X2HAV9_9NEIS Queuine tRNA-ribosyltransferase OS=Snodgrassella alvi wkB2 OX=1196094 GN=tgt PE=3 SV=1
MIYSVIIFASELFNMLKFSLKRTDGFARRGTLELNHGTVETPVFMPVGTYGSVKAMSPRNLEEIKAQIILGNTFHLWLRPGLDVIRDFGGLHDFIGWNRPILTDSGGFQVFSLAQMRKLTEEGCTFRSPINGDKLFLSPEISMQIQTVLNSDIVMQLDECPDGNVDAREAEKSLQMSLRWAERSKNEFERLNNPNALFGIVQGGMYEDLREQSLVGLEEIGFPGLSVGGLSVGEPKPEMYRILRAIGPKLPAHKPHYLMGVGTPEDLVYGVACGIDMFDCVMPTRNARNGWLFTRFGDVKIRNAIYRHDQRPLDESCDCYTCRNFSRAYLHHLQRVGEILGAQLNTIHNLRYYQILTAEMRLAIEAGKFEDFQTRFHAERARGVL

SEQ ID NO: 60878 - protein, 371 aa, Snodgrassella alvi
  misc_feature (1)..(371): tr|A0A2N9XP44|A0A2N9XP44_9NEIS Queuine tRNA-ribosyltran sferase OS=Snodgrassella alvi OX=1196083 GN=tgt PE=3 SV =1
MLKFTLQCTDGFARRGTLELNHGTVETPVFMPVGTYGSVKAMSPRNLEEIKAQIILGNTFHLWLRPGLDVIRDFGGLHDFIGWNRPMLTDSGGFQVFSLAQMRKLTEEGCTFRSPINGDKLFLSPEISMQIQTVLNSDIVMQLDECPDGNVDAKEAEKSLQMSLRWAERSKNEFERLNNPNALFGIVQGGMYEDLREQSLAGLEEIGFPGLSVGGLSVGEPKPEMYRILRAIGPKLPAHKPHYLMGVGTPEDLVYGVAYGIDMFDCVMPTRNARNGWLFTRFGDVKIRNAIYRHDQRPLDESCDCYTCCNFSRAYLHHLQRVGEILGAQLNTIHNLRYYQILTAEMRLAIEAGKFSEFQTCFHADRARGVL

SEQ ID NO: 60879 - protein, 371 aa, Snodgrassella sp.
  misc_feature (1)..(371): tr|A0A1C4CEF9|A0A1C4CEF9_9NEIS Queuine tRNA-ribosyltran sferase OS=Snodgrassella sp. R-53583 OX=1798181 GN=tgt PE=3 SV=1
MLKFTLQRTDGFARRGTLELNHGTVETPVFMPVGTYGSVKAMSPRNLEEIKAQIILGNTFHLWLRPGLDVIRDFGGLHDFIGWNRPMLTDSGGFQVFSLAQMRKLTEEGCTFRSPINGDKLFLSPEISMQIQTVLNSDIVMQLDECPDGNVDAREAEKSLQMSLRWAERSKNEFERLNNPNALFGIVQGGMYEDLREQSLAGLEKIGFPGLSVGGLSVGEPKPEMYRILRAIGPKLPAHKPHYLMGVGTPEDLVYGVAYGIDMFDCVMPTRNARNGWLFTRFGDVKIRNAMYRHDQRPLDESCDCYTCRNFSRAYLHHLQRVGEILGAQLNTIHNLRYYQILTAEMRSAIEAGKFSEFQAHFHDDRARGVL

SEQ ID NO: 60880 - protein, 370 aa, Snowella sp.
  misc_feature (1)..(370): tr|A0A2W7B1W8|A0A2W7B1W8_9CYAN Queuine tRNA-ribosyltran sferase OS=Snowella sp. OX=2164131 GN=tgt PE=3 SV=1
MKFSYQCHAKCSHTHARAGVWHTPHGIVETPRFMPVGTVATVKGITPAQLATTGAQMILANTYHLHLQPGESIIEKAGGLHSFMGWSGPILTDSGGFQVFSLSALRSLSEKGVIFRSPKDGRMIEITPEKSIQIQNALGADVIMAFDECPPGQASREHVQAATERTYRWLERCIEAHQRREDQALFGIVQGGTYLDLRFQAVEDLTKLDLPGYAIGGVSVGEAPELVHQIVRATTPLLPVNKPRYLMGVGTYREMAIAIASGIDLFDCVIPTRFGRHGTALVQGERWNLKNAPFREDFRPLDETCPCYTCQTFSRAYLNHLVRSREMLGYILLSLHNITELVRFTQRIREAIIGDRFLAEFGHWLTDEKV

SEQ ID NO: 60881 - protein, 382 aa, Sodalis glossinidius
  misc_feature (1)..(382): sp|Q2NVA4|TGT_SODGM Queuine tRNA-ribosyltransferase OS= Sodalis glossinidius (strain morsitans) OX=343509 GN=tg t PE=3 SV=1
MEYQLLKTDGQARRGRLVFDRGVVETPAFMPVGTYGTVKGMTPEEVKETGAQILLGNTFHLWLRPGQAVMKLHGDLHDFMQWHGPILTDSGGFQVFSLGDIRKITEEGVYFRNPINGDTIFLSPEKSMEIQYDLGSDIVMIFDECTSYPSDWDYAKQSMEMSLRWAARSRQRFDELGNHNALFGIIQGSVYEDLRDVSVKRLVEIGFDGYAVGGLAVGEPKADMHRILAHLCPQIPADKPRYLMGVGKPEDLVEGVRRGIDMFDCVMPTRNARNGHLFVTDGVVKIRNARYKDDVAPLDAECDCYTCRNYSRAYLHHLDRCNEILGARLNTIHNLRYYQRLMAGLRQAIDEGKLEHFVGEFYRRTGKPAPPLVVELHNNEGI

SEQ ID NO: 60882 - protein, 382 aa, Sodalis glossinidius; identical to SEQ ID NO: 60881
  misc_feature (1)..(382): tr|A0A193QGS9|A0A193QGS9_SODGM Queuine tRNA-ribosyltran sferase OS=Sodalis glossinidius (strain morsitans) OX=3 43509 GN=tgt PE=3 SV=1

SEQ ID NO: 60883 - protein, 382 aa, Sodalis praecaptivus
  misc_feature (1)..(382): tr|W0I0P3|W0I0P3_9GAMM Queuine tRNA-ribosyltransferase OS=Sodalis praecaptivus OX=1239307 GN=tgt PE=3 SV=1
MEYQLLKTDGQARRGRLVFDRGVVETPAFMPVGTYGTVKGMTPEEVKETGAQILLGNTFHLWLRPGQAVMKLHGDLHDFMQWHGPILTDSGGFQVFSLGDIRKITEEGVHFRNPINGDAIFLSPEKSMEIQYDLGSDIVMIFDECTPYPSDWDYAKRSMEMSLRWAARSRQRFDELENPNALFGIIQGGVYEDLRDVSVKRLVEIGFDGYAVGGLAVGEPKADMHRILAHLCPQIPADKPRYLMGVGKPEDLVEGVRRGIDMFDCVMPTRNARNGHLFVTDGVVKIRNARYKDDVAPLDAECDCYTCRNYSRAYLHHLDRCNEILGARLNTIHNLRYYQRLMAGLRQAIDEGKLEHFVGEFYRRTGKPVPPLVVELNNNEGI

SEQ ID NO: 60884 - protein, 382 aa, Sodalis sp.; identical to SEQ ID NO: 60883
  misc_feature (1)..(382): tr|A0A1J7CX16|A0A1J7CX16_9GAMM Queuine tRNA-ribosyltran sferase OS=Sodalis sp. TME1 OX=1912097 GN=tgt PE=3 SV=1

SEQ ID NO: 60885 - protein, 382 aa, Sodalis sp.
  misc_feature (1)..(382): tr|A0A4R1N9W1|A0A4R1N9W1_9GAMM Queuine tRNA-ribosyltran sferase OS=Sodalis sp. 159R OX=2529856 GN=tgt PE=3 SV=1
MKYELIKTDGRARRGRLVFERGVVETPAFMPVGTYGTVKGMTPEEVAETGAQIILGNTFHLWLRPGQEIMKLHGDLHDFMQWHGPILTDSGGFQVFSLGDIRKITEEGVHFRNPINGDAIFLSPEKSMEIQHDLGSDIVMIFDECTPFPAEHDYARKSMEMSLRWAERSRRRFDELGNKNALFGIIQGSVYEDLRDVSVKRLVEIGFDGYAVGGLAVGEPKADMHRILEHVLPQIPADKPRYLMGVGKPEDLVEGVRRGIDMFDCVMPTRNARNGHLFVTDGVVKIRNASNKSDTSPLDEHCDCYTCRNYSRAYLHHLDRCNEILGARLNTIHNLRYYQRLMAGLRHAIDEGKLEQFVDEFYGRVGKPVPPLVVELNYNEGI

SEQ ID NO: 60886 - protein, 371 aa, Unknown
  misc_feature (1)..(371): tr|A0A151UL29|A0A151UL29_9GAMM Queuine tRNA-ribosyltran sferase OS=Sodalis-like endosymbiont of Proechinophthir us fluctus OX=1462730 GN=tgt PE=3 SV=1
MEYQLLKTDGPARRGRLVFDRGVVETPAFMPVGTYGTVKGMMPEEVKETGAQILLGNTFHLWLRPGQEVMKMHGDLHDFMQWHGPILTDSGGFQVFSLGDIRKITEEGVHFRNPINGTTIFLSPEKSMEIQYDIGSDIVMIFDECMPYPSDWDYAKCSMEMSLRWAARSRQRFDELGNPNAIFGIIQGSIYEDLRDVSVKRLVEIGFDGYAVGGLAVGEPKADMHRILAHLCPKIPVSKPRYLMGVGKPEDLVEGVRHGIDMFDCVMPTRNARNGHLFVTDGVVKIRNARYKDDVAPLDAECDCYTCRNYSRAYLHHLDRCNEILGARLNTIHNLRYYQRLMAGLRQAIDEGKLEHLVGEFYRRTSKPVHL

SEQ ID NO: 60887 - protein, 373 aa, Soehngenia sp.
  misc_feature (1)..(373): tr|A0A4Z0D4X0|A0A4Z0D4X0_9FIRM Queuine tRNA-ribosyltran sferase OS=Soehngenia sp. 1933P OX=2562294 GN=tgt PE=3 SV=1
MAIRFELLKESNECMARLGKIETPHGTIETPIFMPVGTRATVKAMTPDELKYLGAQIILSNTYHLYLKPGHDLIEKAGGLHKFMNWDRPILTDSGGFQVFSLTDLRKIHEEGVEFRSHIDGSKHFISPEISIDIQNSLGSDIMMCFDECVAYPSEYEYTKESMERTTRWAARCRDHHHKWDTQGLFGIVQGGFFKDLRKESAKSLVDMDFSGYAVGGLSVGEPKDLMCDILEYTTPFLPKDKPRYLMGVGSPDFLFEAVERGIDMADCVLPTRIARNGTAMTSNGKVIIKNAKYADDFNPLDSECDCYTCKNYSRAYIRHLFNVNEILGLRLTTIHNLYFLLKLMENIRQSIREDNFYKYKESFYKKYGYIKE

SEQ ID NO: 60888 - protein, 365 aa, Solemya elarraichensis
  misc_feature (1)..(365): tr|A0A1T2KY35|A0A1T2KY35_9GAMM Queuine tRNA-ribosyltran sferase OS=Solemya elarraichensis gill symbiont OX=1918 949 GN=tgt PE=3 SV=1
MHQNIHNTDAGSRRGQLVFTRGTVETPAFMPVGTYGTVKAMTPEELRSVGAEMILGNTFHLWLRPGTDIVRLHGDLHDFMHWDGPILTDSGGFQVYSLGAMRKITEEGVHFRSPIDGDKVFMGPEESMQIQRELGSDVVMIFDECTPYPATQEVAEESMELSLRWAKRSKTTHGDNPSALFGIVQGGVYEDLRQRSLEGLMEIGFDGYAVGGLSVGEPPEDRWRILDFLSDKLPADKPRYLMGVGTPEDLVEAVQRGIDMFDCVMPTRNARNGDLFTHTGKVRIKNAKYAKDTGPLDPDCDCYTCQNYSRAYLRHLQRCNEILGARLNTIHNLHYYQSLMRGIRSAIEEQRLSSFVDDFYAMRRG

SEQ ID NO: 60889 - protein, 371 aa, Solemya pervernicosa
  misc_feature (1)..(371): tr|A0A1T2LAP7|A0A1T2LAP7_9GAMM Queuine tRNA-ribosyltran sferase OS=Solemya pervernicosa gill symbiont OX=642797 GN=tgt PE=3 SV=1
MKFEKLGSDGQARRGRLEFPRGSVETPAFMPVGTYGTVKSMTPEEIEAIGAEIILGNTFHLMLRPGTDVIKAHGDLHDFMQWKGPILTDSGGFQVFSLGAMRKIKEEGVTFKSPVDGSKVFMGPEESMAVQRELGSDIVMIFDECTPYPATEREARSSMELSLRWAKRSKIAHSDNPNALFGIVQGGMYADLRRESLEGLVEIGFDGYAIGGLSVGEPKEEMLATLEAITPDMPEDRPRYLMGVGKPEDIVEAVRRGVDMFDCVMPTRNARNGHLFTREGVIRIRNSGYRFDTRPLDEQCSCYTCQNYSRAYLKHLDKCGEMLGPRLATIHNLHYYQDLMRGLRKAIEEQRLEQWVEAFYKARSQKAPGVS

SEQ ID NO: 60890 - protein, 369 aa, Solemya velesiana
  misc_feature (1)..(369): tr|A0A1T2KTL0|A0A1T2KTL0_9GAMM Queuine tRNA-ribosyltran sferase OS=Solemya velesiana gill symbiont OX=1918948 G N=tgt PE=3 SV=1
MKFECITKEGFARRGRLTFERGSIETPAFMPVGTYGTVKAMTPEELEGLGAEIILGNTFHLMLRPGTEIITKHGDLHDFMHWQRPILTDSGGFQVFSLGQMRKITEEGVHFRSPVDGSRIFMGPEESMQVQRELGSDIVMIFDECTPYPATEKEARDSMELSLRWAECSKRAHGDNPSALFGIVQGGVYEVLRESSLNGLIEIGFDGYAVGGLSVGEPPEDRWRVLDFLSSRLPEEKPHYLMGVGTPEDIVEAVRRGIDMFDCVMPTRNARNGHLFTHEGVVRIRNAVHADDTGPLDPHCDCYTCRNYSRSYLRHLFRCNEILGSRLNTIHNVYYYQTLMRNIRESIEAGRFDEFVKTFYEMRGGKAQG

SEQ ID NO: 60891 - protein, 366 aa, Solemya velum
  misc_feature (1)..(366): tr|A0A0B0H9U6|A0A0B0H9U6_SOVGS Queuine tRNA-ribosyltran sferase OS=Solemya velum gill symbiont OX=2340 GN=tgt P E=3 SV=1
MQQNIHARDAGSRRGQLVFERGSVETPAFMPVGTYGTVKAMTPEELRSVGAEMILGNTFHLWLRPGTEIVRLHGDLHDFMHWDGPILTDSGGFQVYSLGAMRKITEEGVHFRSPIDGDKVFMGPEESMQIQRELGSDVVMIFDECTPYPATHKVAEESMELSLRWAKRSKEAHGDNPSALFGIVQGGIYEDLRQRSLEGLMEIGFDGYAVGGLSVGEPPEDRWRILDFLSDKLPTDKPRYLMGVGTPEDLVEAVQRGIDMFDCVMPTRNARNGDLFTHTGKVRIKNAKYAKDTGPLDPDCDCYTCQNYSRAYLRHLHRCNEILGARLNTIHNLAYYQSLMHGIRSAIEEQRLASFVDDFYAMKRTG

SEQ ID NO: 60892 - protein, 385 aa, Solibacillus isronensis
  misc_feature (1)..(385): tr|K1KTM6|K1KTM6_9BACL Queuine tRNA-ribosyltransferase OS=Solibacillus isronensis B3W22 OX=1224748 GN=tgt PE=3 SV=1
MTETTKQPPIRYELIKTCAQTGARLGIVHTPHGSFETPTFMPVGTQATVKAMSPEELKEMNAGIILSNTYHLWLRPGNDIVKEAGGLHKFMNWDRPILTDSGGFQVFSLSKFRKIEEEGVYFRNHLNGDKLFLSPEKAMEIQNDLGSDIMMAFDECPPFPATYEYMEASVDRTTRWAKRCKEAHQRPEEQGLFGIIQGGEYEELRRKSAEALVELDFPGYAIGGLSVGEPKDIMNKVLDFTAPMMPADKPRYLMGVGSPDSLIDGAMRGIDMFDCVLPTRIARNGTLMTSEGRMVIKNAKYAKDFTPIDENCDCYTCKNYTRAYVRHLLRTEETFGLRLTSYHNLRFLIKLMEDVRQAIREDRLGDFKEEFFEKYGYNKPNAKNF

SEQ ID NO: 60893 - protein, 385 aa, Solibacillus silvestris
  misc_feature (1)..(385): tr|F2F3G0|F2F3G0_SOLSS Queuine tRNA-ribosyltransferase OS=Solibacillus silvestris (strain StLB046) OX=1002809 GN=tgt PE=3 SV=1
MTETTKQPPIRYELIKTCAQTGARLGIVHTPHGSFETPTFMPVGTQATVKAMSPEELKEMNAGIILSNTYHLWLRPGNDIVKEAGGLHKFMNWDRPILTDSGGFQVFSLSKFRKIEEEGVYFRNHLNGDKLFLSPEKAMEIQNDLGSDIMMAFDECPPFPATYEYMEASVDRTTRWAKRCKEAHQRPEEQGLFGIIQGGEYEELRRKSAEALVELDFPGYAIGGLSVGEPKDIMNKVLEFTAPMMPADKPRYLMGVGSPDSLIDGAMRGIDMFDCVLPTRIARNGTLMTSEGRMVIKNAKYAKDFTPIDENCDCYTCKNYTRAYVRHLLRTEETFGLRLTSYHNLRFLIKLMEDVRQAIREDRLGDFKEEFFEKYGYNKPNAKNF

SEQ ID NO: 60894 - protein, 385 aa, Solibacillus silvestris
  misc_feature (1)..(385): tr|A0A1A7LZZ9|A0A1A7LZZ9_9BACL Queuine tRNA-ribosyltran sferase OS=Solibacillus silvestris OX=76853 GN=tgt PE=3 SV=1
MTETTKQPPIRYELIKTCAQTGARLGIVHTPHGSFETPTFMPVGTQATVKAMSPEELKEMNAGIILSNTYHLWLRPGNDIVKEAGGLHKFMNWNRPILTDSGGFQVFSLSKFRKIEEEGVYFRNHLNGDKLFLSPEKAMEIQNDLGSDIMMAFDECPPFPATYEYMEASVDRTTRWAKRCKEAHQRPEEQGLFGIIQGGEYEELRRKSAEALVELDFPGYAIGGLSVGEPKDIMNKVLEFTAPMMPADKPRYLMGVGSPDSLIDGAMRGIDMFDCVLPTRIARNGTLMTSEGRMVIKNAKYAKDFTPIDENCDCYTCKNYTRAYVRHLLRTEETFGLRLTSYHNLRFLIKLMEDVRQAIREDRLGDFKEEFFEKYGYNKPNAKNF

SEQ ID NO: 60895 - protein, 383 aa, Solibacillus sp.
  misc_feature (1)..(383): tr|A0A2D1SVX9|A0A2D1SVX9_9BACL Queuine tRNA-ribosyltran sferase OS=Solibacillus sp. R5-41 OX=2048654 GN=tgt PE= 3 SV=1
MTQSQPPIRYELIKTCAQTGARLGIVHTPHGSFETPTFMPVGTQATVKAMSPEELKEMDAGIILSNTYHLWLRPGNDIVKEAGGLHKFMNWDRPILTDSGGFQVFSLSKFRKIEEEGVHFRNHLNGDKLFLSPEKAMEIQNDLGSDIMMAFDECPPFPATYEYMLASVDRTTRWAKRCKEAHQRSEEQGLFGIIQGGEYEELRRRSAEALVELDFPGYAIGGLSVGEPKDIMNRVLDFTAPLMPADKPRYLMGVGSPDSLIDGAMRGIDMFDCVLPTRIARNGTLMTSEGRMVIKNAKYAKDFTPIDENCDCYTCKNYTRAYVRHLMRTEETFGLRLTSYHNLRFLIKLMEDVRQAIREDRLGDFKEEFFEKYGYNKPNAKNF

SEQ ID NO: 60896 - protein, 379 aa, Solibacter usitatus
  misc_feature (1)..(379): sp|Q029K6|TGT_SOLUE Queuine tRNA-ribosyltransferase OS= Solibacter usitatus (strain Ellin6076) OX=234267 GN=tgt PE=3 SV=1
MPQISFEVVAECPHTRARAGVLHTAHGDIETPVFMPVGTQATVKGLTQRDLAEDLGVKILLSNTYHLYLRPGHELIRQMGGLHKFMSWPNAILTDSGGFQVFSLSGLRKIHEHGVVFQSHLNGDTHKFTPESTVDVQLAYGSDILMVLDECPEYPVSHEYARESMQRTVRWAREANEHFLERMKQMPTRHALFPIVQGSMFTDLRRECATALVDLDTDGYAIGGLSVGEPRPLSLEVVEATEAILPRTKPRYAMGVGMPAELPEYVARGIDMMDCVLPSRNARNGYLFTSEGRVIIKHARYKDDEGPLDPRCACYTCKSYSRAYLRHLFQSGEILFSVLATRHNIQRYLDIMREIRHAIISGSFPDYLRCVQSSLHDAG

SEQ ID NO: 60897 - protein, 377 aa, Solimicrobium silvestre
  misc_feature (1)..(377): tr|A0A2S9H119|A0A2S9H119_9BURK Queuine tRNA-ribosyltran sferase OS=Solimicrobium silvestre OX=2099400 GN=tgt PE =3 SV=1
MLDFKLIKKDPNSAARRGQVTVNHGVIQTPIFMPVGTYGSVKAMSPLELKEIQAQIILGNTFHLWLRPGLEVVKKFGGLHKFMGWDQPILTDSGGFQVFSLGAMRKITEEGVKFASPISGERLFLSPEISMQIQKVLNSDIVMQFDECTPYEIDGRPATNDEAARSMRMSLRWAKRSMNEFNREENPNALFGIVQGGMFEHLRDESLAGLEELDFHGVAIGGLSVGEPKEDMLRVLQHVGPRLPANKPHYLMGVGTPEDLVAGVTNGIDMFDCVMPTRNARNGWLFTRFGDIKIKNARYKEDTAPLDSTCGCYACQNFSRAYLHHLHRTGEILGARLNTIHNLHYYLELMQEMRNALDVDAFSAFVVQFHADRARGV

SEQ ID NO: 60898 - protein, 383 aa, Solimonas aquatica
  misc_feature (1)..(383): tr|A0A1H9H5G2|A0A1H9H5G2_9GAMM Queuine tRNA-ribosyltran sferase OS=Solimonas aquatica OX=489703 GN=tgt PE=3 SV= 1
MNNSNTRMKFELLKTDGGARRGRLSFARGVVETPIFMPVGTYGTVKALSPEELLAVGSQIILGNTFHLMLRPGEQLIQQRFGSLHGFMHWDKPILTDSGGFQVWSLSGLRKITEEGVKFASPINGDRIFLSPERSIEVQHGLGSDIIMQFDECTPYPATEKQARKSMELSARWAARCKTAHGEAPGALFGIVQGGMHAPLRLESLQRLREIGFDGYAVGGLSVGEPEAERLQVLDAVGPQLPADRPHYLMGVGTPRDIVQGVARGIDMFDCVMPTRNARNGHLFTSQGVLKLRNAQYRDDPAPLDPACDCYTCQNYSRAYLHHLDRCDEMLGPRLNTIHNLHYYLKLMQRIRSAIEAGCFEAFASDFIASAEGKPAKSKAAPV

SEQ ID NO: 60899 - protein, 386 aa, Solimonas fluminis
  misc_feature (1)..(386): tr|A0A2S5TL42|A0A2S5TL42_9GAMM Queuine tRNA-ribosyltran sferase OS=Solimonas fluminis OX=2086571 GN=tgt PE=3 SV =1
MKFELLHTDGQARRGRLQLQHGTVETPVFMPVGTYGTVKAMTPEDLRGIGAQIILGNTFHLMLRPGPEIIRAHGGLHGFMNWSGPILTDSGGFQVWSLSGLRKITEEGVKFQSPVNGDRIFLTPERSIEVQHALNSDIVMQFDECTPHPATEKQVRASMELSARWGQRCKLAHGDNPNALFGIVQGGMSAELRRESLQRLLDIGFDGYALGGLSVGETEAERLEVLDAIGPALPAGHPHYLMGVGTPRDLVQAVGRGIDMFDCVMPTRNARNGHLFTSEGVIKIRNARHRADQGPLDPKCGCYTCRHYTRAYLHHLDKCEEMLGGQLNTIHNLHYYQELARRMREAIEQNRFAAFSADFLASPEGAPSRTAAGEAGAPVEPRPAAE

SEQ ID NO: 60900 - protein, 375 aa, Solimonas sp.
  misc_feature (1)..(375): tr|A0A346N863|A0A346N863_9GAMM Queuine tRNA-ribosyltran sferase OS=Solimonas sp. K1W22B-7 OX=2303331 GN=tgt PE= 3 SV=1
MKFELLHTDGGARRGRLQLQHGTVETPVFMPVGTYGTVKAMTPEDLRAIGAQIILGNTFHLMLRPGPEIIQAHGGLHGFMNWSGPILTDSGGFQVWSLSGLRKITEEGVKFQSPVNGDRIFLTPERSIEVQHALNADIVMQFDECTPHPATEKEVRASMELSARWAIRCKTAHGDNPNALFGIVQGGMSAELRRESLQRLRETGFDGYALGGLSVGETEAERLGVLDAIGPELPAGHPHYLMGVGTPRDLVQAVGRGIDMFDCVMPTRNARNGHMFTSEGVVKIRNAKYRADQGPLDPKCGCYTCRNYTRSYLYHLDKCEEMLGGQLNTIHNLHYYQELTRRMRAAIEEGRFAAFSADFLASPEGAASRTAAAAG

SEQ ID NO: 60901 - protein, 399 aa, Solirubrobacterales bacterium
  misc_feature (1)..(399): tr|A0A1M3BJI2|A0A1M3BJI2_9ACTN Queuine tRNA-ribosyltran sferase OS=Solirubrobacterales bacterium 70-9 OX=189583 3 GN=tgt PE=3 SV=1
MREDPRRLTFAIEARDGTARAGTIGTAHGPIETPTFIPLATKGSVRGLDGDEVAALGYQLILGNTYHLFVNPGPERIAAAGDLHGFMNWNRALITDSGGFQVFSLAHGGVANEVKGSGRSGGHDSSVEITEEGARFSSPRDGRELFISPEVSMEVQAALGADIALAFDECTPFHADRDYTARSTERTHRWLDRCIAWHDENGPERQALFGIVQGGTHADLRRESAEFISAADVDGLAIGGTLGRDKEEMAAVLAMTAPLLPEAAAKHLLGIGEVDDLLGGIALGLDVFDCAVPTRLARHGVALAPSPETRWRLDLRKGRWVGDKGPLVEGCPCPACTRHTRDYISYLSRAEELTAVRLIVLHNLTYMRELTTHARRAIQEGRFEAYRAAVLGGAAPWGA

SEQ ID NO: 60902 - protein, 401 aa, Solirubrobacterales bacterium
  misc_feature (1)..(401): tr|A0A1Q3NIC8|A0A1Q3NIC8_9ACTN Queuine tRNA-ribosyltran sferase OS=Solirubrobacterales bacterium 67-14 OX=18958 32 GN=tgt PE=3 SV=1
MRHDPARLTFEIHARDGDARRGTLQTPHGPVETPAFIPLATKGSVRGMSSREIEGMGYELVLGNTYHLLVAPGPERIAAAGGLHEFMGWEKAIITDSGGFQVFSLAHGGVSQEIKGSGRKMYGLAKTLGIEEEGVRFRSYKDGSELMLSPEESMRVQAALGSDIALVFDECTPFHADREYTARSTERTHRWLKRCLDWHEANGPAGQAVFGIIQGGTHADLREESCAAVSASAVDGISIGGTLGRDKEEMAEVLGFTVPHLPVEAPKHLLGIGEVDDLMRGIAIGLDGFDCAVPTRLARHGMALAPLPDKRFRIDVRKPGEVGNREPLVPGCPCIACADYDRDYLNYISKSEELTAVRLLVDHNLTYMERLMRGAREAISAGGFADYSEKILAGAAPWSAR

SEQ ID NO: 60903 - protein, 376 aa, Solirubrum puertoriconensis
  misc_feature (1)..(376): tr|A0A0W8EL53|A0A0W8EL53_9BACT Queuine tRNA-ribosyltran sferase OS=Solirubrum puertoriconensis OX=1751427 GN=tg t PE=3 SV=1
MTFDLVAHDPQSKARAGVLTTDHGTIQTPIFMPVGTAGSVKAVHQREIKEDINAQIILGNTYHLYLRPGLDTLQKAGGLHKFNGWDRPILTDSGGYQVYSLSETRKIKEEGVKFRSHIDGSHHLFTPEGVMDIQRVIGADIIMAFDECTPWPCEYDYARRSMEMTHRWLKRCIERIDSTEPLYGYEQQLFPIVQGSTFRDLRKQSAEFIAEQGRAGNAIGGLSVGEPADLMYEMTELCCDILPVDKPRYLMGVGTPANILENIALGVDMFDCVLPTRNARNGMLFTTQGIINIKNKKWEQDFSPIDEELGGYASTFYSKSYVRHLFHASEYLAGMVASVHNLTFYLWLVRNAREQILAGTFREWKEKMVKQLMVRL

SEQ ID NO: 60904 - protein, 376 aa, Solitalea canadensis
  misc_feature (1)..(376): tr|H8KUE9|H8KUE9_SOLCM Queuine tRNA-ribosyltransferase OS=Solitalea canadensis (strain ATCC 29591 / DSM 3403 / NBRC 15130 / NCIMB 12057 / USAM 9D) OX=929556 GN=tgt P E=3 SV=1
MKFDLVVTDNSSSARAGLMQTDHGTIETPIFMPVGTAGTVKAVHQRELKDDIEAQIILGNTYHLYLRPGLDTIQKAGGLHKFNGWEHPILTDSGGYQVYSLSDIRKIKEEGATFQSHIDGSKHLFTPENVMDIQRVIGADIIMAFDECTPYPCEYTYARKSMEMTHRWLKRCCDRFDSTEGLYGYNQTLFPIVQGSTFKDLRKQSAETIASFEREGNAIGGLSVGEPAPEMYEMTELVCNILPKAKPRYLMGVGTPMNILECIALGVDMFDCVMPTRNARNGMLFTQHGIINIKNEKWKNDFSPIDETSDLYADQVYTKAYLRHLLQSKEILGAQIATLHNLHFYLWLVKEARKHIIQGDFIQWKNKMVVDMGKRL

SEQ ID NO: 60905 - protein, 376 aa, Solitalea koreensis
  misc_feature (1)..(376): tr|A0A521D940|A0A521D940_9SPHI Queuine tRNA-ribosyltran sferase OS=Solitalea koreensis OX=543615 GN=tgt PE=3 SV =1
MDFKLLTTDKGSKARAGELTTDHGTVQTPIFMPVGTAGTVKGVHQRELKDDVQAQIILGNTYHLYLRPGLDTIQKAGGLHKFNGWDGPILTDSGGYQVYSLSEIRKIKEEGATFKSHIDGSKHLFTPENVMDIQRIIGADIIMAFDECAPYPCDYSYARKSMDMTHRWLKRCCDQFDKTEGLYGYNQTLFPIIQGSTYKDLRVRSAETIASFEREGNAIGGLSVGEPAEEMYEMTDIVCNILPKDKPRYLMGVGTPVNLLECIALGIDMFDCVMPTRNARNGMLFTKNGIINIRNEKWKNDFSPIDASSDLYSDQVYTKAYLRHLMHAKELLGAQIASLHNLHFYLWLVKEARKKIIEGEFIQWKNKMVVELGKRL

SEQ ID NO: 60906 - protein, 376 aa, Solitalea longa
  misc_feature (1)..(376): tr|A0A2S5A0D0|A0A2S5A0D0_9SPHI Queuine tRNA-ribosyltran sferase OS=Solitalea longa OX=2079460 GN=tgt PE=3 SV=1
MKFELVATDNGSSARAGLMQTDHGTIETPIFMPVGTAGTVKAVHQRELRDDIQAQIILGNTYHLYLRPGLDTIQKAGGLHKFNGWERPILTDSGGYQVYSLSDIRKIKEDGATFQSHIDGSKHLFTPENVMDIQRIIGADIIMAFDECTPYPCDYTYARKSMEMTHRWLKRCCDRFDSTEGLYGYNQTLFPIVQGSTYKDLRIRSAETIASFEREGNAIGGLSVGEPAEEMYAMTEVVTNILPKSKPRYLMGVGTPMNILECIALGIDMFDCVMPTRNARNGMLFTKNGIINIKNEKWKNDFSPIDETSDLYADQVYTKAYLRHLMQSKEILAAQIASLHNLNFYLWLVKEARMHIIQGDFIQWKNKMVVDMAKRL

SEQ ID NO: 60907 - protein, 377 aa, Solobacterium moorei
  misc_feature (1)..(377): tr|A0A412PIY8|A0A412PIY8_9FIRM Queuine tRNA-ribosyltran sferase OS=Solobacterium moorei OX=102148 GN=tgt PE=3 S V=1
MKQPVTFEITHICKQSGARTGILHTPHGDVETPMFMPVGTQATVKFVSPEELKNLGSGVVLANTYHLWLRPGEDIVDQAGGVQKFMNYKGPMLTDSGGFQVFSLADQRKITEEGVTFKNTLNGDTLFLSPEKSIQIQNKIGADIMMSFDECIPYPATREYVEKSTERTLRWALRGKQAHSRPEEQALFGIVQGGDYEDLRRYCAEKLIEMDFPGYAIGGTSVGEDKETMYRMVKWASDALPFDKPRYLMGVGAVNDLLEAVSRNVDMCDCVLPTRIARHGTLMTSEGRISIRKAIYKNDFTPLDPECDCYTCRNYTKAYLNHLQRTNEGFGTRLMSIHNLRFLVKLMEDARKAIKEDRFNDFKEETLAKMKFDHRGF

SEQ ID NO: 60908 - protein, 377 aa, Solobacterium moorei; identical to SEQ ID NO: 60907
  misc_feature (1)..(377): tr|E7MPH1|E7MPH1_9FIRM Queuine tRNA-ribosyltransferase OS=Solobacterium moorei F0204 OX=706433 GN=tgt PE=3 SV= 1

SEQ ID NO: 60909 - protein, 377 aa, Soonwooa buanensis
  misc_feature (1)..(377): tr|A0A1T5G1Z4|A0A1T5G1Z4_9FLAO Queuine tRNA-ribosyltran sferase OS=Soonwooa buanensis OX=619805 GN=tgt PE=3 SV= 1
MSKFFEIEKTSQSKARAGVLHTDHGDIQTPIFMPVGTVASVKTVHQRELKDDINAQIILGNTYHLMLRPGMDIMQQAGGLHKFMNWDRPILTDSGGYQVFSLSKSRKMTEEGVKFKSHIDGSYHFISPEKSMEIQRQIGADIFMAFDECTPYPCEYNQAKLSMELTHRWLKRCVDWTKENEELYGHKQRLFPIVQGSTYSDLRKISAEVISEAGAEGNAIGGLSVGEPEEEMYRITNEVTDILPKDKPRYLMGVGTPWNILESIGLGVDMMDCVMPTRNARNAMLFTWQGVINMKNEKWKNDFSALDEFGTSFVDRDYSKAYVRHLFVAKEYLAKQIASIHNLAFYLDLVKVAREHIVAGDFYEWKDSIIPQLKQRL

SEQ ID NO: 60910 - protein, 366 aa, Sorangiineae bacterium
  misc_feature (1)..(366): tr|A0A1W9QHE9|A0A1W9QHE9_9DELT Queuine tRNA-ribosyltran sferase OS=Sorangiineae bacterium NIC37A_2 OX=1970199 G N=tgt PE=3 SV=1
MSPVHFRTIQTSGAARAGVLETRSGEVLTPAFMPVGTQAAVKALDRDEVLATGARAVIMNTYHLWLRPGADEVESLGGLHEFSRLPCTLVTDSGGFQAFSLAERTKVSEDGFEFSSHIDGRRMALSPERAMQVQGQLGADIAMQLDVCPPGDAPRGEVALAVERTTRWAERCLAARRPEQAVFGIVQGGIHVDLRVRHAEALGAMPFDGLALGGFSVGEDPAEMHRVLPLVVPSVDPARIRYLMGVGTPKDLLIAVRAGVDLFDCVMPTRNARNGHIFVRGGRLNIKNAAHRLDRQVLEAGCDCFTCREGYCRAYLRHLYIAGEILALRLLSIHNLRFYARLLEGAREAILEGRFERYFEAWFPST

SEQ ID NO: 60911 - protein, 394 aa, Sorangium cellulosum
  misc_feature (1)..(394): sp|A9FI06|TGT_SORC5 Queuine tRNA-ribosyltransferase OS= Sorangium cellulosum (strain So ce56) OX=448385 GN=tgt PE=3 SV=1
MSRTPGFSFSELARDGHARTGVLSTPHGDVLTPTFMPVGTQGSVKTLTPAEVAATGARIVLGNTYHLWLRPGPELVAQLGGLHAFTRWPHAMLTDSGGFQAFSLAERRTLVEDGFVFRSHLDGARKALTPEVAMEVQGLLGADIAMQLDVCPPGGAPRPEVEEACRLTTRWGKRCLAAKRPSQALFGIVQGGTSVALRMAHADELGALPFDGLALGGFSVGEPIAMMHEVVAQIGPHLDPTRPRYLMGVGTPIDLVHAIGAGVDMFDCVLPTRNARNGQALTQHGKIVIKQARYKEDRSPLDPTCACPTCTGGYSRAYLRHLYMAGEILVLRLLTEHNLHLYGRLMREARAAIAEGRYAAFARAWLGASDAGNANDANETVGATESTESTESTE

SEQ ID NO: 60912 - protein, 373 aa, Sorangium cellulosum
  misc_feature (1)..(373): tr|S4XGF8|S4XGF8_SORCE Queuine tRNA-ribosyltransferase OS=Sorangium cellulosum So0157-2 OX=1254432 GN=tgt PE=3 SV=1
MSRTPGFAFSELARDGHARTGVLSTPHGDVPTPTFMPVGTQGSVKTLTPAEVAATGARIVLGNTYHLWLRPGPELVAQLGGLHAFTRWPHAMLTDSGGFQAFSLAERRTLVEDGFVFRSHLDGARKALTPEVAMEVQGLLGADIAMQLDVCPPGGAPLAEVEEACRLTTRWGKRCLAAKRPTQALFGIVQGGTSVALRTAHADELAALPFDGLALGGFSVGEPIALMHEVVAQIAPRLDPSRPRYLMGVGTPLDLVHAIGAGVDMFDCVLPTRNARNGQALTQHGKIVIKQARYKDDRSPLDPTCACPTCAGGYSRAYLRHLYMAGEILVLRLLTEHNLHLYGRLMREARAAIAEGRYAAFARAWLGARDATE

SEQ ID NO: 60913 - protein, 375 aa, Spartobacteria bacterium
  misc_feature (1)..(375): tr|A0A2A2RGS3|A0A2A2RGS3_9BACT Queuine tRNA-ribosyltran sferase OS=Spartobacteria bacterium Tous-C9RFEB OX=1982 327 GN=tgt PE=3 SV=1
MSSSFTLEATDSAARAGTLQTRRGPVQTPVFMPVGTQATVKAMTPEELREVGAQIILGNTYHLHVRPGEKLISRLGGLHRFMHWDGPILTDSGGFQVFSLAKLRKISEEGVRFQNHLDGTPTFIGPETSMEIQRDLGSDIVMLFDECPPHPCAHEEADKSLDLTLRWARRCKDWWATQPQESRPLLFGITQGSSYPDLREKSARALVDIGFDGYAIGGVSVGEPEKEMFCAVESAIPFLPHDHARYAMGLGTPPQIIEMIARGVDMFDCVLPTRLARNGTAFTASGTINLKNAPYAEDSSPIEEGCRCYACKNFTRAYLRHLVKAEEILGLRLISIHNLHFYIGLARTAREHILAGTFQDFRKDFVANYAVRSTE

SEQ ID NO: 60914 - protein, 114 aa, Spartobacteria bacterium
  misc_feature (1)..(114): tr|A0A3C0R6H4|A0A3C0R6H4_9BACT tRNA guanosine(34) trans glycosylase Tgt (Fragment) OS=Spartobacteria bacterium OX=2052183 GN=tgt PE=4 SV=1
DMFDCVLPTRLARNGTAFTASGTLNLKNAEFAMQKGPIENGCICAACCEFSRSYIRHLIKAEEILGLRLITLHNLHFYLDLMKRTRAAIAFGNFSEFQRHFISGYRVRPIIAGE

SEQ ID NO: 60915 - protein, 414 aa, Sphaerobacter thermophilus
  misc_feature (1)..(414): tr|D1C314|D1C314_SPHTD Queuine tRNA-ribosyltransferase OS=Sphaerobacter thermophilus (strain DSM 20745 / S 602 2) OX=479434 GN=tgt PE=3 SV=1
MIERDNAASHSGGKQPHHFEIQASDPTTRARVGILRTRRGEVRTPAFMPVGTQASVKSLTPDEVRASGTDIILANTYHLMLRPGLAVLEAAGGVQRFMAWDGPILTDSGGFQVFSLAQRREVREEGVTFRSHLDGSLWELTPESAIDLQLGFGSDIIMPLDELVGYGSDDAAQAAAMERTHRWLRRAIERFAARQADVAPDSRPMLFGIAQGGFDPDRRRESASFLRDLPLDGSAIGGLSVGEPKEVMAEMLDASIDGLPPERPRYLMGVGSPEDLWRGVAAGVDMFDCVHPTRVARRGALFTPDGRVDVTAARFRTHFGPVDETCNCPTCTTFSAAYLHHLFRARELLAYRLGTIHNLWFIQREMARIRDAIARGTFVEEMRSFLDRYRPADSAAAARQRQRHRGLRAEAGTA

SEQ ID NO: 60916 - protein, 379 aa, Sphaerochaeta coccoides
  misc_feature (1)..(379): tr|F4GK59|F4GK59_SPHCD Queuine tRNA-ribosyltransferase OS=Sphaerochaeta coccoides (strain ATCC BAA-1237 / DSM 17374 / SPN1) OX=760011 GN=tgt PE=3 SV=1
MSHPIHTVTHIDAGSHARCGLLSLPHGTIETPAFMPVGTNGTVKGIYHEKVEQMGYRLILGNTYHLYLRPGCDVLESFGGLHAFSSWKHNILTDSGGFQVFSLSKLRKIKDAGVTFQSHIDGSRHAFTPEKVVDIQTIIGSDIAMVLDVCTPPDIDYRAAQEAWRVTKLWAERSLIRRDENGEKFRGCLFGIVQGNFFKELRKESAETISAMDFPGIAIGGLSVGETPDRFSDFLAYTTEMVTPEKPRYVMGIGSPDYILDAVANGIDLFDCVLATRTARHGLLFSDDGPVNITKAIHEFSSEPVEPTCGCTACTQYSRGYIRHLFKAGEMLGPMLATEHNLMYLHTLMERIKNAIKNNSFSVFRKEYLARYYGEKKNV

SEQ ID NO: 60917 - protein, 373 aa, Sphaerochaeta dissipatitropha
  misc_feature (1)..(373): tr|A0A375AMN0|A0A375AMN0_9SPIO Queuine tRNA-ribosyltran sferase OS=Sphaerochaeta dissipatitropha OX=1945881 GN= tgt PE=3 SV=1
MKIFQQLHQDTTSKARLGLLTLGHGQVETPVFMPVGTNGTVKGMFHEDVKKIGYSLILGNTYHLYLRPGLEVLSQFGGLHSFSNWDGNLLTDSGGFQVFSLSGLRKIGEKGVTFQSHIDGSKHVFTPESVVDTQKIIGSDIAMCLDVCTPPEINHRAATEAMHITHSWAKRALTHRKELGESFKGNLFGIVQGNFYEDLRKQSAEFFNEMDFPGIAIGGLSVGETSEQFVHYLQYTADLVTREKPRYVMGIGSPDYILEAVENGIDMFDCVLATRMARNGAVFTDDGVVTLKKAMHKFDQRPIEERCNCRACTQYSRAYMHHMVKTGEMLGGMLATEHNLTYFYRLMQQVRQAIRENRFASFKRDYLARFYAK

SEQ ID NO: 60918 - protein, 373 aa, Sphaerochaeta globosa
  misc_feature (1)..(373): tr|F0RZ04|F0RZ04_SPHGB Queuine tRNA-ribosyltransferase OS=Sphaerochaeta globosa (strain ATCC BAA-1886 / DSM 22 777 / Buddy) OX=158189 GN=tgt PE=3 SV=1
MKIFQEIHQDTTSKARLGLLTLGHGQVETPVFMPVGTNGTVKGMFHEDVKKIGYTLILGNTYHLYLRPGLEVLSQFGGLHSFSNWDGNLLTDSGGFQVFSLSGLRKIGEKGVTFQSHIDGSKHIFTPESVVDTQRVIGSDIAMCLDVCTPPEIDHRAATEAMHITHAWAKRALDHRTQLAGDFKGNLFGIVQGNFYEDLRKQSAEFFNEMDFPGIAIGGLSVGETSEQFTHFLQYTADLVTREKPRYVMGIGSPDYILEAVENGIDMFDCVLATRMARNGAVFTDDGVVTLKKAIHKFDQHPIEEGCTCRACTQYSRAYMHHMVKTGEMLGGMLATEHNLTYFYRLMQQIRLAIRENRFASFKRDYLARFYAK

SEQ ID NO: 60919 - protein, 373 aa, Sphaerochaeta halotolerans
  misc_feature (1)..(373): tr|A0A372MFQ1|A0A372MFQ1_9SPIO Queuine tRNA-ribosyltran sferase OS=Sphaerochaeta halotolerans OX=2293840 GN=tgt PE=3 SV=1
MALFRTIHQDTSSNARLGILSLGHGEVETPVFMPVGTKGTVKAMFHEDVKKIGYKLILGNTYHLYLKPGLEVLSQFGGLHNFSHWDGNLLTDSGGFQVFSLSGLRKIGEKGVTFQSHIDGSKHIFTPENVVDTQNVIGSDIAMCLDVCTPPDIDYRAATEAMQITHAWAQRAIEHRQHLGESFKGNLFGIVQGNFYEDLRKQSAEFFNEMDFPGIAIGGLSVGESREQFSHFLGYTAELVTKEKPRYVMGIGSPDYILEAVENGIDMFDCVLATRMGRNGGIFTDDGIITLKKAIHTFDHGPLEEGCTCRACTQYSRAYMHHLIKTGEMLGGMLATEHNLTYFYRLMERVRQAIRENRFASFKREYLARFYAK

SEQ ID NO: 60920 - protein, 374 aa, Sphaerochaeta pleomorpha
  misc_feature (1)..(374): tr|G8QW33|G8QW33_SPHPG Queuine tRNA-ribosyltransferase OS=Sphaerochaeta pleomorpha (strain ATCC BAA-1885 / DSM 22778 / Grapes) OX=158190 GN=tgt PE=3 SV=1
MQTIFTETHKDAHSNARLGILSLPHGDVQTPAFMPVGTNGTVKGIYHDKIEEIGYNLILGNTYHLYLRPGLEVLEKFGGLHNFSHWNHNLLTDSGGFQVFSLSGLRKISEKGVAFQSHIDGSRHIFTPEKVVDIQKVIGSDIAMCLDVCTPPNIEYRAAKEAMHITHNWAERALNHRKELGDAFKGNLFGIVQGNFYKDLRKESAEVLSAMDFPGIAIGGLSVGETTDQFNEFLAYTADIVTKEKPRYVMGIGSPDYILEAVENGIDMFDCVLATRMARNGAVFTDDGIVTLKKAMHKFDQGPIESECHCTACTEYSRAYMHHMVKTNEMLGGMLATEHNLTYFYRLMEKIRLAIAEDRFSSFKKDYLARFYKR

SEQ ID NO: 60921 - protein, 386 aa, Sphaerochaeta sp.
  misc_feature (1)..(386): tr|A0A3C1LQR8|A0A3C1LQR8_9SPIO Queuine tRNA-ribosyltran sferase OS=Sphaerochaeta sp. OX=1972642 GN=tgt PE=3 SV= 1
MENRIFTLHHKDSHCNARTGEIRLPHGVVQTPAFMPVGTNGTVKGIHHDDVAKIGYNLILGNTYHLYLRPGIEVLKTFDGLHNFSHWNGNILTDSGGFQVFSLSQLRKIHEEGVKFQSHIDGSRHIFTPEKVVDIQQVIGSDIAMMLDVCSAPGISWKETLNAMDITHLWAERAIVRRDSLKDLTGRAFRGNLFGIVQGGFYEDLRIKSAQTISSMDFPGIAIGGLSVGESKEDFCRFLAITADNITESKPRYVMGIGTPDYILEAIENGIDLFDCVLATRTARNGSVFTDDGMLTLSRSFNEFDHGPIQEGCTCRACTEYSLAYMRHMFKCNEMLGGMLATEHNLTYLYNLVLKARKAIEENRFQSFKEDYLKRFYANGGRCIRG

SEQ ID NO: 60922 - protein, 373 aa, Sphaerochaeta sp.
  misc_feature (1)..(373): tr|A0A3D4N308|A0A3D4N308_9SPIO Queuine tRNA-ribosyltran sferase OS=Sphaerochaeta sp. OX=1972642 GN=tgt PE=3 SV= 1
MDRIFTKTHQDENSLARCGIVSLPHGDVVTPTFMPVGTNGTVKGMYHDAVADIGYNLILGNTYHLYLRPGIEVLKQYGGLHNFSNWKHNILTDSGGFQIFSLSQLRKIKEDGVVFQSHIDGSKHHLTPEKVVDIQQVIGSDILMCLDVCTAPDITYRKAREAWEITRSWAKRSYDHWNSLEGFEGKLFGIVQGNFFKDLRKESALAIAEIDFPGIAIGGLSVGETPEVFSEFLAYTTEYIPTDRPRYVMGIGSPDYILDAVANGIDLFDCVLATRSARNGSVFTDDGMIQMKKAVHEFDTGPLSEGCTCTACTKYSRGYVRHMFKAGEMLGGMLATEHNLTYLYHLMEKTRQAILEDRFLEFKRSYLARYYGK

SEQ ID NO: 60923 - protein, 376 aa, Sphaerospermopsis kisseleviana
  misc_feature (1)..(376): tr|A0A1Z4UHX1|A0A1Z4UHX1_9CYAN Queuine tRNA-ribosyltran sferase OS=Sphaerospermopsis kisseleviana NIES-73 OX=19 73480 GN=tgt PE=3 SV=1
MSKFSFQLLATCSQTKARVGVFSTPHGIVETPRFMPVGTLATVKTITPAQLKDTGAQMVLSNTYHLHLQPGENIVAGGGGLHKFMGWNSPMLTDSGGFQVFSLSEMRKITEEGVTFRSPHDGKIIKLTPERSIEIQNTLGADVIMAFDECPPYPATRQEVEAATDRTYRWLERCIAAHQRTDQALFPIVQGGVYLDLRARAASELAKLDMPGFAIGGVSVGEPPELMAQIVKATTPLLPANKPRYLMGVGTYKEMAIAIASGIDLFDCVIPTRWARHGTAIVNGERWNLKNAKFREDFTPLDENCPCYACTNFTRAYISHLVRSQEILAYTLLSIHNITELIRFTQKIRESILSDRFVEDFGHWLKDDGEEVTGDR

SEQ ID NO: 60924 - protein, 376 aa, Sphaerospermopsis reniformis
  misc_feature (1)..(376): tr|A0A480A831|A0A480A831_9CYAN Queuine tRNA-ribosyltran sferase OS=Sphaerospermopsis reniformis OX=531300 GN=tg t PE=3 SV=1
MSKFSFQLLATCSQTKARVGVFSTPHGIVETPRFMPVGTLATVKTITPAQLKDTGAQMVLSNTYHLHLQPGENIVAGGGGLHKFMGWNNPMLTDSGGFQVFSLSEMRKITEEGVTFRSPHDGKIIKLTPERSIEIQNTLGADVIMAFDECPPYPATRQEVEAATDRTYRWLERCIAAHQRTDQALFPIVQGGVYLDLRARAASELAKLDMPGFAIGGVSVGEPPELMAQIVKATTPLLPANKPRYLMGVGTYKEMAIAIASGIDLFDCVIPTRWARHGTAIVNGERWNLKNAKFREDFTPLDETCPCYACTNFTRAYISHLVRSQEILAYTLLSIHNITELIRFTQKIRESILSDRFVEDFGHWLKDDGEEVTGDR

SEQ ID NO: 60925 - protein, 379 aa, Sphaerotilus hippei
  misc_feature (1)..(379): tr|A0A318H0E4|A0A318H0E4_9BURK Queuine tRNA-ribosyltran sferase OS=Sphaerotilus hippei OX=744406 GN=tgt PE=3 SV =1
MLKFDLLGTDGHARRGRLTLNHGIVETPIFMPVGTYGTVKGVMPRDLEAMGAQIILGNTFHLWMRPGLDVMAQFGGLHRFENWHKPILTDSGGFQVWSLGEMRKISEEGVRFASPVNGDKLFLTPETSVQIQTVLNSDIVMQFDECTPYWQGVKGSGHITTEAEARVSMELSLRWARRSQAEFERLENPNALFGIVQGGMFESLRQESLDALVELDLPGYAIGGVSVGEPKDLMLQIMAHTPHRLPAHKPRYLMGVGTPEDLVEGVACGVDMFDCVMPTRNARNGHLFTRYGDLKIRNARHKSDERPLDETCGCHTCQNFSRAYLHHLDRCGEMLGPMLTSIHNLHYYLNLMKEVRAALDAGTFGAFVQQFKADRARGV

SEQ ID NO: 60926 - protein, 379 aa, Sphaerotilus natans
  misc_feature (1)..(379): tr|A0A059KQJ0|A0A059KQJ0_9BURK Queuine tRNA-ribosyltran sferase OS=Sphaerotilus natans subsp. natans DSM 6575 O X=1286631 GN=tgt PE=3 SV=1
MLQFDLLATEGHARRGRLTLNHGVIQTPIFMPVGTYGTVKGVMPRDLEAMGAQIILGNTFHLWMRPGLDVMKQFGGLHRFENWNKPILTDSGGFQVWSLGDMRKISEEGVKFASPVNGDKLFMTPEVSMQIQTVLNSDIVMQFDECTPYWQGAKGSGHITSEKEARSSMELSMRWAKRSKAEFERLGNPNALFGIVQGGMFENLREESLAGLVEMDFPGYAIGGVSVGEPKDEMLRIMNHTPHRLPAHKPRYLMGVGTPEDLVDGVAAGVDMFDCVMPTRNARNGHLFTRFGDLKIRNARHRSDERPLDETCACHTCQNFSRAYLHHLDRCGEMLGPMLTSIHNLHYYLNLMQEVRDALDAGRFEAFRAQFKADRARGV

SEQ ID NO: 60927 - protein, 379 aa, Sphaerotilus natans
  misc_feature (1)..(379): tr|A0A5C1Q285|A0A5C1Q285_9BURK Queuine tRNA-ribosyltran sferase OS=Sphaerotilus natans subsp. sulfidivorans OX= 639200 GN=tgt PE=3 SV=1
MLQFDLLATEGHARRGRLTLNHGVIQTPIFMPVGTYGTVKGVMPRDLEAMGAQIILGNTFHLWMRPGLDVMKQFGGLHKFENWNKPILTDSGGFQVWSLGDMRKISEEGVKFASPVNGDKLFMTPEVSMQIQTVLNSDIVMQFDECTPYWQGAKGSGHITSEKEARSSMELSMRWAKRSKAEFERLGNPNALFGIVQGGMFENLREESLAGLVEMDFPGYAIGGVSVGEPKDEMLRIMNHTPHRLPAHKPRYLMGVGTPEDLVDGVAAGVDMFDCVMPTRNARNGHLFTRFGDLKIRNARHRSDERPIDETCSCHTCQNFSRAYLHHLDRCGEMLGPMLTSIHNLHYYLNLMQEVRDALDAGRFEAFRAQFKADRARGV

SEQ ID NO: 60928 - protein, 376 aa, Sphingobacteriaceae bacterium
  misc_feature (1)..(376): tr|A0A4Q5SKX8|A0A4Q5SKX8_9SPHI Queuine tRNA-ribosyltran sferase OS=Sphingobacteriaceae bacterium OX=2021370 GN= tgt PE=3 SV=1
MKFSLTAQDKLSKARAGEITTDHGTIQTPIFMPVGTAGTVKAVHQRELNDDIKAQIILGNTYHLYLRPGLDIIEGAGGLHKFNGWDKPILTDSGGYQVYSLTEVRKIKEEGVTFRSHIDGSKHLFTPENVMDIQRVIGADIIMAFDECTPYPCDYSYAKRSIEMTHRWLKRCCDRFDSTEPKYGYNQTLFPIVQGSVYKDLRVRSAEVIASFEREGNAIGGLSVGEPAEEMYAMTEIVCDILPPQKPRYLMGVGTPVNILENIALGIDMFDCVMPTRNARNGMLFTKNGVINMRNKKWENDFSPIETDSDLFADKAYSKAYLRHLIHSGEILGAQIATLHNLHFYLWLVNEAREKIIAGEFYHWKEKMVKQLGQKL

SEQ ID NO: 60929 - protein, 376 aa, Sphingobacteriaceae bacterium
  misc_feature (1)..(376): tr|A0A1X9Z6M7|A0A1X9Z6M7_9SPHI Queuine tRNA-ribosyltran sferase OS=Sphingobacteriaceae bacterium GW460-11-11-14 -LB5 OX=1986952 GN=tgt PE=3 SV=1
MKFSLQANDPLSKARAGTVTTAHGEIQTPIFMPVGTAGTVKAVHQRELKDDIDAKIILGNTYHLYLRPGLDILEKAGGLHQFIGWDRPILTDSGGYQVYSLSKVRKIKEEGVTFHSHIDGSKHLFTPEYAMDIQRTIGADIIMAFDECTPYPCDYTYAAQSIKMTHRWLKRCCARFDSTEPKYGFDQTLFPIVQGSVYKDLRIKSAEFIASMDREGNAIGGLSVGEPAEEMYAMTEVVCNILSEEKPRYLMGVGTPINILENIALGIDMFDCVMPTRNARNGMLFTRNGIINIRNKKWENDFSPLDAESDLHADLVTSKAYLRHLVHSKEMLGAQIATLHNLHFYLWLVKQAREKIIAGEFYEWKNKMVKVLGNKL

SEQ ID NO: 60930 - protein, 376 aa, Sphingobacteriales bacterium
  misc_feature (1)..(376): tr|A0A258WYC7|A0A258WYC7_9SPHI Queuine tRNA-ribosyltran sferase OS=Sphingobacteriales bacterium 16-39-50 OX=197 0581 GN=tgt PE=3 SV=1
MKFKLEASDKSSKARAGEIITDHGIIKTPIFMPVGTAGSVKAVHQHELSEDIKAQIILGNTYHLYLRPGLETLQLAGGLHKFNGWDKPLLTDSGGYQVYSLSGVRKIKEEGVTFRSHIDGSKHLFTPESVMDTQRVIGADIIMAFDECTPYPCEYGYARRSMEMTHRWLKRCCERFDTTLPLYGFDQTLFPIVQGSVYKDLRKQSAEVIASFEREGNAIGGLSVGEPAEEMYEMTDIVTDILPKDKPRYLMGVGTPVNILENIALGIDMFDCVMPTRNARNGMLFTKNGIINIRNERWKNDFSPLEEDSDLFADRNYSKAYLRHLAHSKEILGAQIATLHNLHFYLWLVNEAREKIIAGDFYDWKNKMVVQLAQRL

SEQ ID NO: 60931 - protein, 379 aa, Sphingobacteriales bacterium
  misc_feature (1)..(379): tr|A0A1M3HCJ5|A0A1M3HCJ5_9SPHI Queuine tRNA-ribosyltran sferase OS=Sphingobacteriales bacterium 50-39 OX=189584 1 GN=tgt PE=3 SV=1
MAALTFDLERQCPHSAARAGRIVTDHGEIPTPIFMPVGTVGSVKAVSQQQLKEDVKARIILGNTYHLYLRPGLEVLEAAGGIHRFNGWDRPILTDSGGYQVFSLAGTRKIQEDGVVFQSHIDGSRHLFSPEKVMDIQRVIGGDIIMAFDECPPYPSEYAYAEKSMHLTHRWLDRCFERFNGTPDKYGYTQNLFPIVQGSVFPDLRKASCAYVSGKGAVGNAIGGLSVGEPEAQLYEICEACCTDLPADKPRYLMGVGTPWNILECIARGVDMFDCVMPTRNGRNAMLFTSKGVINIDNKKWEKDFSPIDDGIDSEWSQYYSKAYLRHLVKSKEILGLTIASVHNLAFYLHLVTEARKHIQAGDFVSWKNEQVPLLQTRL

SEQ ID NO: 60932 - protein, 377 aa, Sphingobacteriia bacterium
  misc_feature (1)..(377): tr|A0A258MYX3|A0A258MYX3_9BACT Queuine tRNA-ribosyltran sferase OS=Sphingobacteriia bacterium 35-40-8 OX=197057 6 GN=tgt PE=3 SV=1
MAALRFNLEASAGKARAGTIQTDHGTIQTPIFMPVGTVGTVKAVTQQQLKLDVQAQIILGNTYHLYLRPGTEVLEAAGGLHKFMGWDRPILTDSGGYQVFSLAANRKIKEEGVVFQSHIDGSKHLFSPESVMDIQRNIGADIIMAFDECPPYPSDYAYAKKSMELTHRWLTRCVNRLAETPDKYRYTQNLFPIVQGSTFPDLRKASCEFIASKGAVGNAIGGLSVGEPIEMMYEFTNLCCEILPADKPRYLMGVGTPWNLLECIDIGIDMFDCVMPTRNGRNGMLFTTQGVINIRNKKWYQDFSPIDPGLPSETSQYYTKAYLRHLFVGEEILGLQLASIHNLSFYLWLVGEARRNILEGNYVSWKQQILPILQQRL

SEQ ID NO: 60933 - protein, 379 aa, Sphingobacteriia bacterium
  misc_feature (1)..(379): tr|A0A1G3J6J5|A0A1G3J6J5_9BACT Queuine tRNA-ribosyltran sferase OS=Sphingobacteriia bacterium RIFOXYD2_FULL_35_ 12 OX=1802167 GN=tgt PE=3 SV=1
MAALSFTLNNTANGSAARAGVIETDHGTIQTPIFMPVGTVGSVKAVTQQQLKLDVQAQIILGNTYHLYLRPGTEVLEAAGGLHRFNGWDRPILTDSGGYQVFSLAANRKIKEEGVIFQSHIDGSKHLFSPESVMDIQRSIGADIIMAFDECPPYPSTYEYAKKSMELTHRWLNRCIARLAETPDKYGYTQNLFPIVQGSTYKDLRKASCEFIASRGAVGNAIGGLSVGEPEDMMYEFTALCTEHLPLDKPRYLMGVGTPWNLLECIDLGIDMFDCVMPTRNGRNGMLFTTQGVINIRNKKWYKDFSPIDPGLPSETSQYYTKAYLRHLFVAEEILGLQIASIHNLSFYLWLVGEARKHILDNTFSSWKKEMLEILKRRL

SEQ ID NO: 60934 - protein, 376 aa, Sphingobacterium alimentarium
  misc_feature (1)..(376): tr|A0A4R3W2Z8|A0A4R3W2Z8_9SPHI Queuine tRNA-ribosyltran sferase OS=Sphingobacterium alimentarium OX=797292 GN=t gt PE=3 SV=1
MKFTLQVQDKLSQARAGVLETAHGKIETPIFMPVGTAGTVKAVHQHELVNDIQAQIILGNTYHLYLRPGLDVLNKAGGLHKFNGWDKPILTDSGGYQVYSLTEVRKIREEGVTFRSHVDGSKHLFTPENVMDTQRIIGADIIMAFDECTPYPCDYNYARRSLDMTHRWLKRCCDRFDSTEPLYGYDQTLFPIVQGSVYKDLRAKSAEVIASFEREGNAIGGLSVGEPAEEMYAMTEVVTNILPKDKPRYLMGVGTPINILENIALGIDMFDCVMPTRNARNGMLFTRNGIINIKNEKWKDDFSPIEAESDLMMDQVYSKAYLRHLIRSQEILGAQIASLHNLHFYLWLVKQAREKIIEGTFYEWKEKMVKILGQRL

SEQ ID NO: 60935 - protein, 376 aa, Sphingobacterium alkalisoli
  misc_feature (1)..(376): tr|A0A4U0GYP5|A0A4U0GYP5_9SPHI Queuine tRNA-ribosyltran sferase OS=Sphingobacterium alkalisoli OX=1874115 GN=tg t PE=3 SV=1
MIFTLQAQDKLSQARAGVMETAHGKIETPIFMPVGTAGTVKAVHQHELVNDIQAQIILGNTYHLYLRPGLDVLNKAGGLHKFNGWDKPILTDSGGYQVYSLTEVRKIKEEGVTFRSHIDGSKHLFTPENVMDTQRVIGADIIMAFDECTPYPCDYNYARRSLDMTHRWLKRCCDRFDCTDPLYGYDQTLFPIVQGSVYKDLREKSAEVIASFEREGNAIGGLSVGEPAEEMYAMTEVVTKILPYEKPRYLMGVGTPINILENIALGIDMFDCVMPTRNARNGMLFTRNGIINIKNEKWKDDFSAIEAESDLMMDQVYSKAYLRHLIRSQEILGAQIASLHNLHFYLWLVKQAREKILEGTFYDWKEKMVKVLGQRL

SEQ ID NO: 60936 - protein, 376 aa, Sphingobacterium cellulitidis
  misc_feature (1)..(376): tr|A0A235E4N3|A0A235E4N3_9SPHI Queuine tRNA-ribosyltran sferase OS=Sphingobacterium cellulitidis OX=1768011 GN= tgt PE=3 SV=1
MNFTLQAQDKFSRARAGEIETAHGKIQTPIFMPVGTAGTVKAVHQHELVNDIQAQIILGNTYHLYLRPGLDVLNKAGGLHKFINWDRPILTDSGGYQVYSLTEVRKIKEEGVTFRSHIDGSKHLFTPENVMDTQRIIGADIIMAFDECTPYPCDYRYARRSMEMTHRWLKRCCDRFDSTDPLYGYDQTLFPIVQGSVYKDLREKSAETIASFNREGNAIGGLSVGEPAEEMYAMTEVVTNILPHDKPRYLMGVGTPVNLLENIALGIDMFDCVMPTRNARNGMLFTQNGIINIKNEKWKDDFSPIEAESDLLVDQIHSKAYLRHLIRSQEILGAQIASLHNLHFYLWLVNQAREKIIDGTFYDWKNKMVPVLGQRL

SEQ ID NO: 60937 - protein, 376 aa, Sphingobacterium daejeonense
  misc_feature (1)..(376): tr|A0A4U9JJH8|A0A4U9JJH8_9SPHI Queuine tRNA-ribosyltran sferase OS=Sphingobacterium daejeonense OX=371142 GN=tg t PE=3 SV=1
MNFTLQAQDKFSKARAGEIETAHGKIQTPIFMPVGTAGTVKAVHQHELVNDIQAQIILGNTYHLYLRPGLDVLNKAGGLHKFINWERPILTDSGGYQVYSLTEVRKIKEEGVTFRSHIDGSKHLFTPENVMDTQRIIGADIIMAFDECTPYPCDYRYARKSMEMTHRWLKRCCDRFDSTEPLYGYDQTLFPIVQGSVYKDLREKSAETIASFNREGNAIGGLSVGEPAEEMYAMTEVVTNILPHDKPRYLMGVGTPVNLLENIALGIDMFDCVMPTRNARNGMLFTQNGIINIKNEKWKDDFSPIEAESDLLVDQIHSKAYLRHLIKSQEILGAQIASLHNLHFYLWLMEQARAKILDGTFYDWKNKMVKVLDQRL

SEQ ID NO: 60938 - protein, 376 aa, Sphingobacterium deserti
  misc_feature (1)..(376): tr|A0A0B8T2Q0|A0A0B8T2Q0_9SPHI Queuine tRNA-ribosyltran sferase OS=Sphingobacterium deserti OX=1229276 GN=tgt P E=3 SV=1
MKFTLEAKDKGSNARAGVVETAHGNIQTPIFMPVGTAGTVKAVHQHELVQDIQAQIILGNTYHLYLRPGLDVLQKAGGLHKFNHWDGPILTDSGGYQVYSLTEVRKIREEGVTFRSHIDGSKHLFTPENVMDTQRVIGADIIMAFDECTPYPCEYSYARKSLDMTHRWLKRCVDRFDSTQPLYGYEQTLFPIVQGSVYKDLREKSAEVIASFNRDGNAIGGLSVGEPAEEMYAMTEVVTNILPQDKPRYLMGVGTPINILENIALGIDMFDCVMPTRNARNGMLFTQNGIINIKNEKWKDDFSPIEAESDLLVDQIHTKAYLRHLIRSQEILGAQIASLHNLHFYLWLVKQAREKIIAGTFYDWKEKMVKVLGQRL

SEQ ID NO: 60939 - protein, 376 aa, Sphingobacterium detergens
  misc_feature (1)..(376): tr|A0A420AJB5|A0A420AJB5_9SPHI Queuine tRNA-ribosyltran sferase OS=Sphingobacterium detergens OX=1145106 GN=tgt PE=3 SV=1
MKFTLQAQDTLSKARAGVVETAHGPIQTPIFMPVGTAGTVKAIHQHELKNDIEAQIILGNTYHLYLRPGLDVLNKAGGLHKFNGWDRPILTDSGGYQVYSLTEVRKIKEEGVTFRSHIDGSKHLFTPENVMDTQRIIGADIIMAFDECTPYPCDYGYARRSLDMTHRWLKRCVDRFDSTDPLYGYDQTLFPIVQGSVYKDLRIKSAETIASFNRDGNAIGGLSVGEPAEEMYAMTEVVCDILPQEKPRYLMGVGTPVNILENIALGVDMFDCVMPTRNARNGMLFTQNGIINIKNEKWKDDFSPIEAESDLHTDQFYSKAYLRHLIKSQEILGAQIASLHNLHFYLWLVNQAREKIIDGTFYDWKNKMVKILDQRL

SEQ ID NO: 60940 - protein, 376 aa, Sphingobacterium faecium
  misc_feature (1)..(376): tr|A0A2T5XZW9|A0A2T5XZW9_9SPHI Queuine tRNA-ribosyltran sferase OS=Sphingobacterium faecium OX=34087 GN=tgt PE= 3 SV=1
MKFTLQVQDKFSKARAGVVETAHGKIQTPIFMPVGTAGTVKGVHQHELRNDIKAQIILGNTYHLYLRPGLDVLNKAGGLHKFNGWDRPILTDSGGYQVYSLSDNRKIREEGVTFRSHIDGSKHLFTPENVMDTQRVIGADIIMAFDECTPYPCDYGYARRSIEMTHRWLKRCCDRFDSTEPLYGYDQTLFPIVQGSVYKDLRERSAEKIASFNREGNAIGGLSVGEPAEEMYAMTEVVCNILPEDKPRYLMGVGTPINLLENIALGIDMFDCVMPTRNARNGMIFTRHGTINIKNEKWKDDFSPIDPDSDLYSDQVYTKAYLRHLIRSQELLGAQIASLHNLHFYLWLVNEAREKIVDGTFYDWKNKMVKVLGQRL

SEQ ID NO: 60941 - protein, 376 aa, Sphingobacterium gobiense
  misc_feature (1)..(376): tr|A0A2S9JI79|A0A2S9JI79_9SPHI Queuine tRNA-ribosyltran sferase OS=Sphingobacterium gobiense OX=1382456 GN=tgt PE=3 SV=1
MRFTLQAEDIASKARAGVLETAHGNIQTPIFMPVGTAGTVKAVHQHELVQDIQAQIILGNTYHLYLRPGLDVLRKAGGLHKFNHWDGPILTDSGGYQVYSLTEVRKIREEGVTFRSHIDGSKHLFTPENVMDTQRVIGADIIMAFDECTPYPCEYSYARKSLDMTHRWLKRCIDRFDSTEPLYGYEQTLFPIVQGSVYKDLREKSAEVIASFNRDGNAIGGLSVGEPAEEMYAMTEVVTNILPQDKPRYLMGVGTPINILENIALGIDMFDCVMPTRNARNGMLFTQNGIINIKNEKWKDDFSPIEAESDLLVDQIHTKAYLRHLIRSQEILGAQIASLHNLHFYLWLVKQARDKIIEGTFYEWKEKMVKILGQRL

SEQ ID NO: 60942 - protein, 376 aa, Sphingobacterium haloxyli
  misc_feature (1)..(376): tr|A0A2S9J3B7|A0A2S9J3B7_9SPHI Queuine tRNA-ribosyltran sferase OS=Sphingobacterium haloxyli OX=2100533 GN=tgt PE=3 SV=1
MRFTLQAEDIASKARAGVLETAHGNIQTPIFMPVGTAGTVKAVHQHELVQDIQAQIILGNTYHLYLRPGLDVLHKAGGLHKFNHWNGPILTDSGGYQVYSLTEVRKIREEGVTFRSHIDGSKHLFTPENVMDTQRVIGADIIMAFDECTPYPCEYSYARKSLDMTHRWLKRCIDQFDSTEPLYGYEQTLFPIVQGSVYKDLREKSAEVIASFNRDGNAIGGLSVGEPAEEMYAMTEVVTNILPQDKPRYLMGVGTPINILENIALGIDMFDCVMPTRNARNGMLFTQNGIINIKNEKWKDDFSPIEAESDLLVDQVHTKAYLRHLIRSQEILGAQIASLHNLHFYLWLVKQAREKIIEGTFYDWKEKMVKILGQRL

SEQ ID NO: 60943 - protein, 376 aa, Sphingobacterium lactis
  misc_feature (1)..(376): tr|A0A1H5S7H9|A0A1H5S7H9_9SPHI Queuine tRNA-ribosyltran sferase OS=Sphingobacterium lactis OX=797291 GN=tgt PE= 3 SV=1
MKFTLQAQDKFSRARAGEIETAHGTIQTPIFMPVGTAGTVKAVHQQELVNDIQAQIILGNTYHLYLRPGLDVLNKAGGLHKFINWDRPILTDSGGYQVYSLTEVRKIKEEGVTFRSHIDGSKHLFTPENVMDTQRIIGADIIMAFDECTPYPCDYRYARRSLDMTHRWLKRCCDRFDSTEPLYGYDQTLFPIVQGSVYKDLREKSAETIASFGREGNAIGGLSVGEPAEEMYAMTEVVTNILPHDKPRYLMGVGTPVNILENIALGIDMFDCVMPTRNARNGMLFTQNGIINIKNEKWKDDFSPIEAESDLLVDQIHTKAYLRHLIRSQEILGAQIASLHNLHFYLWLVKQAREKIVDGTFYDWKEKMVKILGQRL

SEQ ID NO: 60944 - protein, 376 aa, Sphingobacterium mizutaii
  misc_feature (1)..(376): tr|A0A239X5V5|A0A239X5V5_9SPHI Queuine tRNA-ribosyltran sferase OS=Sphingobacterium mizutaii OX=1010 GN=tgt PE= 3 SV=1
MNFTLQAQDKFSKARAGEIETAHGKIQTPIFMPVGTAGTVKAVHQHELVNDIQAQIILGNTYHLYLRPGLDVLNKAGGLHKFINWDRPILTDSGGYQVYSLTEVRKIKEEGVTFRSHIDGSKHLFTPENVMDTQRIIGADIIMAFDECTPYPCDYRYARRSMEMTHRWLKRCCDRFDSTDPLYGYDQTLFPIVQGSVYKDLREKSAETIASFNREGNAIGGLSVGEPAEEMYAMTEVVTNILPHDKPRYLMGVGTPVNLLENIALGIDMFDCVMPTRNARNGMLFTQNGIINIKNEKWKDDFSPIEAESDLLVDQIHTKAYLRHLIRSQEILGAQIASLHNLHFYLWLVNQAREKIIDGTFYDWKNKMVPVLGQRL

SEQ ID NO: 60945 - protein, 376 aa, Sphingobacterium multivorum
  misc_feature (1)..(376): tr|A0A380C2J4|A0A380C2J4_SPHMU Queuine tRNA-ribosyltran sferase OS=Sphingobacterium multivorum OX=28454 GN=tgt PE=3 SV=1
MKFTLQAQDKLSKARAGVVETAHGPIQTPIFMPVGTAGTVKAIHQHELKNDIEAQIILGNTYHLYLRPGLNVLNKAGGLHKFNGWDRPILTDSGGYQVYSLTEVRKIKEEGVTFRSHIDGSKHLFTPENVMDTQRIIGADIIMAFDECTPYPCDYGYARRSLDMTHRWLKRCVDRFDSTDPLYGYDQTLFPIVQGSVYKDLRIKSAETIASFNREGNAIGGLSVGEPAEEMYTMTEVVCDILPHDKPRYLMGVGTPVNILENIALGVDMFDCVMPTRNARNGMLFTQNGIINIKNEKWKDDFSPIEAESDLQADQFYSKAYLRHLIKSQEILGAQIASLHNLHFYLWLVNQARERIIDGTFYDWKNKMVKILDQRL

SEQ ID NO: 60946 - protein, 376 aa, Sphingobacterium multivorum
  misc_feature (1)..(376): tr|A0A2X2IVH0|A0A2X2IVH0_SPHMU Queuine tRNA-ribosyltran sferase OS=Sphingobacterium multivorum OX=28454 GN=tgt PE=3 SV=1
MKFTLQAQDKLSKARAGVVETAHGPIQTPIFMPVGTAGTVKAIHQHELKNDIEAQIILGNTYHLYLRPGLNVLNKAGGLHKFNGWDRPILTDSGGYQVYSLTEVRKIKEEGVTFRSHIDGSKHLFTPENVMDTQRIIGADIIMAFDECTPYPCDYGYARRSLDMTHRWLKRCVDRFDSTDPLYGYDQTLFPIVQGSVYKDLRIKSAETIASFNREGNAIGGLSVGEPAEEMYAMTEVVCDILPHDKPRYLMGVGTPVNILENIALGVDMFDCVMPTRNARNGMLFTQNGIINIKNEKWKDDFSPIEAESDLQADQFYSKAYLRHLIKSQEILGAQIASLHNLHFYLWLVNQARERIIDGTFYDWKNKMVKILDQRL

SEQ ID NO: 60947 - protein, 376 aa, Sphingobacterium nematocida
  misc_feature (1)..(376): tr|A0A1T5BC10|A0A1T5BC10_9SPHI Queuine tRNA-ribosyltran sferase OS=Sphingobacterium nematocida OX=1513896 GN=tg t PE=3 SV=1
MKFTLQAQDKLSQARAGVMETAHGKIETPIFMPVGTAGTVKAVHQHELVNDIQAQIILGNTYHLYLRPGLDVLNKAGGLHKFNGWDKPILTDSGGYQVYSLTEVRKIREEGVTFRSHVDGSKHLFTPENVMDTQRVIGADIIMAFDECTPYPCDYQYARRSLDMTHRWLKRCCNRFDSTEPLYGYDQTLFPIVQGSVYKDLRAKSAEVIASFEREGNAIGGLSVGEPADEMYAMTEVVTAILPKEKPRYLMGVGTPINILENIALGIDMFDCVMPTRNARNGMLFTRNGIINIKNEKWKADFSPIEAESDLMMDQFYTKAYLRHLIRSQEILGAQIASLHNLHFYLWLVKQAREKIIEGTFYDWKEKMVKVLGQRL

SEQ ID NO: 60948 - protein, 376 aa, Sphingobacterium paludis
  misc_feature (1)..(376): tr|A0A4R7D6L7|A0A4R7D6L7_9SPHI Queuine tRNA-ribosyltran sferase OS=Sphingobacterium paludis OX=1476465 GN=tgt P E=3 SV=1
MKFTLQAKDKGSSARAGVVETAHGNIQTPIFMPVGTAGTVKAVHQHELVQDIQAQIILGNTYHLYLRPGLDVLQKAGGLHKFNHWDGPILTDSGGYQVYSLTEVRKIREEGVTFRSHIDGSKHLFTPENVMDTQRVIGADIIMAFDECTPYPCEYSYARKSLDMTHRWLKRCVDRFDSTQPLYGYDQTLFPIVQGSVYKDLREKSAEVIASFNRDGNAIGGLSVGEPAEEMYAMTEVVTNILPQDKPRYLMGVGTPINILENIALGIDMFDCVMPTRNARNGMLFTQNGIINIKNEKWKDDFSPIEAESDLLVDQIHTKAYLRHLIRSQEILGAQIASLHNLHFYLWLVKQAREQIIAGTFYDWKEKMVKVLGQRL

SEQ ID NO: 60949 - protein, 376 aa, Sphingobacterium paucimobilis
  misc_feature (1)..(376): tr|U2J6Q9|U2J6Q9_9SPHI Queuine tRNA-ribosyltransferase OS=Sphingobacterium paucimobilis HER1398 OX=1346330 GN= tgt PE=3 SV=1
MKFTLQAQDKLSQARAGVMETAHGKIETPIFMPVGTAGTVKAVHQHELVNDIQAQIILGNTYHLYLRPGLDVLQKAGGLHKFNGWDKPILTDSGGYQVYSLTEVRKIREEGVTFRSHVDGSKHLFTPENVMDTQRVIGADIIMAFDECTPYPCDYNYARRSLDMTHRWLKRCCDRFDSTKPLYGYDQTLFPIVQGSVYKDLRAKSAEVIASFEREGNAIGGLSVGEPAEEMYAMTEVVTAILPKEKPRYLMGVGTPINILENIALGIDMFDCVMPTRNARNGMLFTRNGIINIKNEKWKADFSPIEAESDLMMDQFYTKAYLRHLIRSQEILGAQIASLHNLHFYLWLVKQAREKIIDGTFYEWKEKMVKVLGQRL

SEQ ID NO: 60950 - protein, 376 aa, Sphingobacterium psychroaquaticum
  misc_feature (1)..(376): tr|A0A1X7K2W5|A0A1X7K2W5_9SPHI Queuine tRNA-ribosyltran sferase OS=Sphingobacterium psychroaquaticum OX=561061 GN=tgt PE=3 SV=1
MKFTLQAQDKGSRARAGVLETAHGNIQTPIFMPVGTAGTVKAVHQQELVNDIQAQIILGNTYHLYLRPGLDVLNKAGGLHKFINWDRPILTDSGGYQVYSLTEVRKIREEGVTFRSHVDGSKHLFTPENVMDTQRIIGADIIMAFDECTPYPCEYNYARRSMDMTHRWLKRCVDRFDSTEPLYGYEQTLFPIVQGSVYKDLRAKSAEAIASFNRDGNAIGGLSVGEPAEEMYAMTEVVTNILPYEKPRYLMGVGTPINILENIALGIDMFDCVMPTRNARNGMLFTRNGIINIKNEKWKDDFSPIEAESDLLVDQIHTKAYLRHLIRSQEILGAQIASLHNLHFYLWLVGQAREKIIDGTFYDWKEKMVKVLGQRL

SEQ ID NO: 60951 - protein, 376 aa, Sphingobacterium siyangense
  misc_feature (1)..(376): tr|A0A420G3D5|A0A420G3D5_9SPHI Queuine tRNA-ribosyltran sferase OS=Sphingobacterium siyangense OX=459529 GN=tgt PE=3 SV=1
MKFTLQAQDKLSKARAGVVETAHGPIQTPIFMPVGTAGTVKAIHQHELKNDIEAQIILGNTYHLYLRPGLNVLNKAGGLHKFNGWDRPILTDSGGYQVYSLTEVRKIKEEGVTFRSHIDGSKHLFTPENVMDTQRIIGADIIMAFDECTPYPCDYGYARRSLDMTHRWLKRCVDRFDSTDPLYGYDQTLFPIVQGSVYKDLRIKSAETIASFNREGNAIGGLSVGEPAEEMYAMTEVVCDILPHDKPRYLMGVGTPVNILENIALGVDMFDCVMPTRNARNGMLFTQNGIINIKNEKWKDDFSPIEAESDLHADQFYSKAYLRHLIKSQEILGAQIASLHNLHFYLWLVNQARERIIDGTFYDWKNKMVKILDQRL

SEQ ID NO: 60952 - protein, 376 aa, Sphingobacterium sp.
  misc_feature (1)..(376): tr|A0A4P7DUY4|A0A4P7DUY4_9SPHI Queuine tRNA-ribosyltran sferase OS=Sphingobacterium sp. CZ-2 OX=2557994 GN=tgt PE=3 SV=1
MKFTLQAQDKNSRARAGEIETAHGTIKTPIFMPVGTAGTVKAVHQHELVNDIQAQIILGNTYHLYLRPGLEVLNKAGGLHKFINWDRPILTDSGGYQVYSLTEVRKIKEEGVTFRSHIDGSKHLFTPENVMDTQRVIGADIIMAFDECTPYPCDYRYARRSLDMTHRWLKRCCDRFDSTEPLYGYEQTLFPIVQGSVYKDLREKSAEVIASFEREGNAIGGLSVGEPAEEMYAMTEVVTNILPKEKPRYLMGVGTPVNILENIALGIDMFDCVMPTRNARNGMLFTREGIINIKNEKWKDDFTPIEAESDLLVDQIHTKAYLRHLIRSQEILGAQIASLHNLHFYLWLVNEARERILDGTFYEWKNKMVVKLGQRL

SEQ ID NO: 60953 - protein, 376 aa, Sphingobacterium sp.
  misc_feature (1)..(376): tr|F4CEX1|F4CEX1_SPHS2 Queuine tRNA-ribosyltransferase OS=Sphingobacterium sp. (strain 21) OX=743722 GN=tgt PE =3 SV=1
MKFTLQSTDKNSKARAGELVTAHGTIQTPIFMPVGTAGSVKGVHQHELKQDIQAQIILGNTYHLYLRPGLDVIQAAGGLHKFNGWDKPILTDSGGYQVYSLTEVRKIKEEGVTFRSHIDGSKHLFTPENVMDTQRIIGADIIMAFDECTPYPCDYRYAKRSLDMTHRWLKRCCDRFDNTDPLYGYEQTLFPIVQGSVYRDLREKSAETIASFGRDGNAIGGLSVGEPAEEMYAMTEVVNAILPLDKPRYLMGVGTPINILENIALGIDMFDCVMPTRNARNGMLFTRNGIINIKNKKWEADFSPIDPDSDLHTDLFYSKAYLRHLIHSKELLGAQIATLHNLHFYLWLVQEARTKILEGTFYEWKNKMVKQLGERL

SEQ ID NO: 60954 - protein, 376 aa, Sphingobacterium spiritivorum
  misc_feature (1)..(376): tr|C2FZE3|C2FZE3_9SPHI Queuine tRNA-ribosyltransferase OS=Sphingobacterium spiritivorum ATCC 33300 OX=525372 G N=tgt PE=3 SV=1
MKFTLQANDKFSKARAGEIETAHGKIQTPIFMPVGTAGTVKAVHQHELKQDIEAQIILGNTYHLYLRPGLDVLNKAGGLHKFIGWDLPILTDSGGYQVYSLTEVRKIKEEGVTFRSHVDGSKHLFTPENVMDTQRVIGADIIMAFDECTPYPCDYGYARRSLDMTHRWLKRCCDRFDTTDPLYGYDQTLFPIVQGSVYKDLREKSAEVIASFNREGNAIGGLSVGEPAEEMYAMTEVVCNILPTEKPRYLMGVGTPINLLENIALGIDMFDCVMPTRNARNGMLFTQNGIINIKNEKWKDDFSPIEPESDLMADQVYTKAYLRHLIRSQEILGAQIASLHNLHFYLWLVNQAREKIVDGTFYEWKNKMVKVLGQRL

SEQ ID NO: 60955 - protein, 376 aa, Sphingobacterium spiritivorum
  misc_feature (1)..(376): tr|A0A380BUJ2|A0A380BUJ2_9SPHI Queuine tRNA-ribosyltran sferase OS=Sphingobacterium spiritivorum OX=258 GN=tgt PE=3 SV=1
MKFTLQANDKFSKARAGEIETAHGKIQTPIFMPVGTAGTVKAVHQHELKEDIEAQIILGNTYHLYLRPGLDVLNKAGGLHKFIGWDLPILTDSGGYQVYSLTEVRKIKEEGVTFRSHVDGSKHLFTPENVMDTQRVIGADIIMAFDECTPYPCDYGYARRSLDMTHRWLKRCCDRFDTTDPLYGYDQTLFPIVQGSVYKDLREKSAEVIASFNREGNAIGGLSVGEPAEEMYAMTEVVCNILPTEKPRYLMGVGTPINLLENIALGIDMFDCVMPTRNARNGMLFTQNGIINIKNEKWKDDFSPIEPESDLMADQVYTKAYLRHLIRSQEILGAQIASLHNLHFYLWLVNQAREKIVDGTFYEWKNKMVKVLGQRL

SEQ ID NO: 60956 - protein, 376 aa, Sphingobacterium thalpophilum
  misc_feature (1)..(376): tr|A0A4U9UP13|A0A4U9UP13_9SPHI Queuine tRNA-ribosyltran sferase OS=Sphingobacterium thalpophilum OX=259 GN=tgt PE=3 SV=1
MKFTLQAQDKLSKARAGVVETAHGPIQTPIFMPVGTAGTVKAIHQHELKNDIEAQIILGNTYHLYLRPGLKVLNKAGGLHKFNGWDRPILTDSGGYQVYSLTEVRKIKEEGVTFRSHIDGSKHLFTPENVMDTQRIIGADIIMAFDECTPYPCDYSYARRSLDMTHRWLKRCVDRFDSTDPLYGYEQTLFPIVQGSVYKDLRIKSAETIASFNREGNAIGGLSVGEPAEEMYAMTEVVCDILPKDKPRYLMGVGTPVNILENIALGVDMFDCVMPTRNARNGMLFTQNGIINIKNEKWKDDFSPIEAESDLHADQFYTKAYLRHLIKSQEILGAQIASLHNLHFYLWLVNQAREKIIAGTFYDWKNKMVKILDQRL

SEQ ID NO: 60957 - protein, 376 aa, Sphingobacterium wenxiniae
  misc_feature (1)..(376): tr|A0A1I6RBF6|A0A1I6RBF6_9SPHI Queuine tRNA-ribosyltran sferase OS=Sphingobacterium wenxiniae OX=683125 GN=tgt PE=3 SV=1
MKFTLQAQDTGSRARAGVLHTAHGDIQTPIFMPVGTAGTVKAVHQHELVNDIQAQIILGNTYHLYLRPGLDVLHKAGGLHKFNNWQGPILTDSGGYQVYSLTEVRKIREEGVTFRSHIDGSKHLFTPENVMDTQRVIGADIIMAFDECTPYPCEYSYARKSLDMTHRWLKRCVDRFDSTEPLYGYEQTLFPIVQGSVYKDLREKSAEVIASFNRDGNAIGGLSVGEPAEEMYAMTDVVTNILPKDKPRYLMGVGTPVNILENIALGIDMFDCVMPTRNARNGMLFTQNGIINIKNEKWKDDFSPIEAESDLLVDQIHTKAYLRHLIRSQEILGAQIASLHNLHFYLWLVKQARDKIIEGTFYTWKEKMIKILGQRL

SEQ ID NO: 60958 - protein, 376 aa, Sphingobacterium yanglingense
  misc_feature (1)..(376): tr|A0A4R6WBB7|A0A4R6WBB7_9SPHI Queuine tRNA-ribosyltran sferase OS=Sphingobacterium yanglingense OX=1437280 GN= tgt PE=3 SV=1
MKFTLQAQDKLSQARAGVMETAHGKIETPIFMPVGTAGTVKAVHQHELVNDIQAQIILGNTYHLYLRPGLDVLQKAGGLHKFNGWDKPILTDSGGYQVYSLTEVRKIREEGVTFRSHVDGSKHLFTPENVMDTQRVIGADIIMAFDECTPYPCDYNYARRSLDMTHRWLKRCCNRFDSTEPLYGYNQTLFPIVQGSVYKDLRAKSAEVIASFEREGNAIGGLSVGEPAEEMYAMTEVVTAILPKEKPRYLMGVGTPINILENIALGIDMFDCVMPTRNARNGMLFTRNGIINIKNEKWKADFSPIEAESDLMMDQFYTKAYLRHLIRSQEILGAQIASLHNLHFYLWLVKQAREKIIDGTFYEWKEKMVKVLGQRL

SEQ ID NO: 60959 - protein, 376 aa, Sphingobium algicola
  misc_feature (1)..(376): tr|A0A5J5H588|A0A5J5H588_9SPHN tRNA guanosine(34) trans glycosylase Tgt OS=Sphingobium algicola OX=2048546 GN=t gt PE=4 SV=1
MTKARFSFSIHATDGKARTGAIQMRRGEIRTPAFMPVGTAATVKAMRPAEVRAAGADIILGNTYHLMLRPGAERMARLGGLHGFMGWDRPILTDSGGYQVMSLSALTKMSEEGVAFSSHIDGSKHMLTPERSMEIQRLLDSDIVMAFDECTKNGCTHDEAARSMERSMRWAKRSRDGFDAGGDHADRAALFGIQQGSLDQGLRRISAEKLIEVGFDGYAVGGLAVGEGQEAMFATLDFAPDMLPQDKPRYLMGVGKPDDIVGAVERGIDMFDCVLPTRSGRNGQAFTWAGPLNIRNAKFNEDQGPLDPRCGCPVCATWSRAYLHHLVKAGEMLGAMLMTQHNIHFYQELMQGLRDNIAAGTLASFTADFRRDYRKV

SEQ ID NO: 60960 - protein, 376 aa, Sphingobium algorifonticola
  misc_feature (1)..(376): tr|A0A437J9Z3|A0A437J9Z3_9SPHN Queuine tRNA-ribosyltran sferase OS=Sphingobium algorifonticola OX=2008318 GN=tg t PE=3 SV=1
MTRPRFSFSIAATDGKARTGTLAMRRGDIRTPAFMPVGTAATVKAMRPAEVRTAGADIILGNTYHLMLRPGAERMARLGGLHDFMGWDRPILTDSGGYQVMSLSALTKMSEEGVAFSSHIDGSKHMLSAERSMEIQRLLGSDIVMAFDECTKNGATRDEAALSMERSMRWARRSRDGFDAGADHAERSALFGIQQGALDEDLRLRSAQMLTEIGFDGYAVGGLAVGEGQEAMFATLDFAPNQLPADRPRYLMGVGKPDDIVGAVERGIDMFDCVLPTRSGRNGQAFTWAGPLNIRNARFAEDRAPLDPRCPCPVCTTWSRAYLHHLVKAGEMLGAMLMTQHNIHFYQALMQTMRDAIGEGRFAAFVRAFRADYRRA

SEQ ID NO: 60961 - protein, 376 aa, Sphingobium amiense
  misc_feature (1)..(376): tr|A0A494W130|A0A494W130_9SPHN Queuine tRNA-ribosyltran sferase OS=Sphingobium amiense OX=135719 GN=tgt PE=3 SV =1
MSSPRFAFSVHATDGKARTGVVRMQRGDIRTPAFMPVGTAATVKAMRPAEVRATGADIILGNTYHLMLRPGAERMARLGGLHGFMGWDRPILTDSGGYQVMSLSALTRMSEEGVAFSSHIDGSKHMLSPERSMEIQRLLDSDIVMAFDECTKNGCTHDEAAQSMERSMRWARRSREAFDAGGAHADRAALFGIQQGSLNEDLRRVSAQKLIDIGFDGYAVGGLAVGEGQEAMFATLDFAPAMLPEDRPRYLMGVGKPDDIVGAVERGIDMFDCVLPTRSGRNGQAFTWAGPLNIRNARFAEDREPLDPRCGCPVCATWGRAYLHHLVKAGEMLGAMLMTQHNIHFYQELMQGLRDSIAAGTLRDFAADFRRDYRKA

SEQ ID NO: 60962 - protein, 376 aa, Sphingobium baderi
  misc_feature (1)..(376): tr|T0GWU3|T0GWU3_9SPHN Queuine tRNA-ribosyltransferase OS=Sphingobium baderi LL03 OX=1114964 GN=tgt PE=3 SV=1
MTQPRFSFSVSATDGKARTGVISMRRGEIRTPAFMPVGTAATVKAMRPAEVRAAGADIILGNTYHLMLRPGAERMARLGGLHGFMGWDRPILTDSGGYQVMSLSALTRMSEEGVAFSSHIDGSKHMLSPERSMEIQRLLDSDIVMAFDECTRNGCTHDEAAQSMERSMRWAKRSRDAFDAGGAHADRAALFGIQQGSLDEGLRRVSADRLIDIGFDGYAVGGLAVGEGQEAMFGCLDFAPDMLPPDRPRYLMGVGKPDDIVGAVERGIDMFDCVLPTRSGRNGQAFTWNGPLNIRNARFAEDREPLDPRCACPVCSTWSRAYLHHLVKAGEMLGAMLMTQHNIHFYQDLMRNIRDSIAQGRFAIFAAGFRNEYKRA

SEQ ID NO: 60963 - protein, 376 aa, Sphingobium baderi
  misc_feature (1)..(376): tr|A0A0S3EZA0|A0A0S3EZA0_9SPHN Queuine tRNA-ribosyltran sferase OS=Sphingobium baderi OX=1332080 GN=tgt PE=3 SV =1
MTQSRFSFSVAATDGKARTGVISMRRGDIRTPAFMPVGTAATVKAMRPAEVRAAGADIILGNTYHLMLRPGAERMARLGGLHGFMGWDRPILTDSGGYQVMSLSALTKMSEEGVSFSSHIDGSKHMLSPERSMEIQRLLDSDIVMAFDECTKNGCTHDEAARSMERSMRWAKRSRDAFDAGEAHAERAALFGIQQGSLDEGLRRISADRLIDIGFDGYAVGGLAVGEGQEAMFGCLDSAPDMLPADRPRYLMGVGKPDDIVGAVERGIDMFDCVLPTRSGRNGQAFTWNGPLNIRNARFAEDQGPLDPRCACPVCSTWSRAYLHHLVKAGEMLGAMAMTQHNIHFYQDLMQNIRGSIAEGRFAAFAAGFRSGYKRA

SEQ ID NO: 60964 - protein, 395 aa, Sphingobium barthaii
  misc_feature (1)..(395): tr|A0A4R6FT45|A0A4R6FT45_9SPHN Queuine tRNA-ribosyltran sferase OS=Sphingobium barthaii OX=1054037 GN=tgt PE=3 SV=1
MNPRFAALSGASLDRTARVVTHSRFSFSIAATNGKARTGAIQMRRGEIRTPAFMPVGTAATVKAMRPAEVRATGADIILGNTYHLMLRPGAERVARLGGLHGFMGWDRPILTDSGGYQVMSLSALTKMSEDGVAFSSHIDGSRHMLTPERSMEIQRLLDSDIVMAFDECTRNGCTHDEAAKSMERSMRWAKRSRDGFDAGGEHAERAALFGIQQGSLDEGLRRISAEKLIDIGFDGYAVGGLAVGEGQEAMFATLDFAPGMLPVDKPRYLMGVGKPDDIVGAVERGIDMFDCVLPTRSGRNGQAFTWAGPLNIRNARFAEDRGPLDPRCACPVCATWSRAYLHHLVKAGEMLGAMLMTQHNIHFYQALMQEIRDSIAAGRFARFAADFRRDYQRA

SEQ ID NO: 60965 - protein, 388 aa, Sphingobium chinhatense
  misc_feature (1)..(388): tr|W1KUX7|W1KUX7_9SPHN Queuine tRNA-ribosyltransferase OS=Sphingobium chinhatense IP26 OX=1346790 GN=tgt PE=3 SV=1
MSGAPFDPTARSVTNPRFSFSIAATDGKARTGAIQMRRGEIRTPAFMPVGTAATVKAMRPAEVRAAGADIILGNTYHLMLRPGAERVARLGGLHGFMGWDRPILTDSGGYQVMSLSALTKMSEEGVAFSSHIDGSRHMLTPERSMEIQRLLDSDIVMAFDECTRNGCTHDEAAKSMERSMRWAKRSRDGFDAGGEHAERAALFGIQQGSLDEGLRRISAERLIDIGFDGYAVGGLAVGEGQEAMFATLDFAPAMLPADKPRYLMGVGKPDDIVGAVERGIDMFDCVLPTRSGRNGQAFTWAGPLNIRNARFAEDMGPLDPRCACPVCATWSRAYLHHLVKAGEMLGAMLMTQHNIHFYQALMQEIRDSIAAGRFASFAADFRRDYQRA

SEQ ID NO: 60966 - protein, 376 aa, Sphingobium chlorophenolicum
  misc_feature (1)..(376): tr|A0A081RBD3|A0A081RBD3_SPHCR Queuine tRNA-ribosyltran sferase OS=Sphingobium chlorophenolicum OX=46429 GN=tgt PE=3 SV=1
MTHPRFSFSIAATDGRARTGVIQMRRGDIRTPAFMPVGTAATVKAMRPAEVRAAGADIILGNTYHLMLRPGAERMARLGGLHGFMGWDRPILTDSGGYQVMSLSALTKMSEEGVAFSSHIDGSKHMLTPERSMEIQRLLDSDIVMAFDECTKNGCTHDEAARSMERSMRWAKRSRDGFDAGGEHADRAALFGIQQGSLNEGLRRISAEKLIEIGFDGYAVGGLAVGEGQEAMFATLDFAPDMLPSDKPRYLMGVGKPDDIVGAVERGIDMFDCVLPTRSGRNGQAFTWAGPLNIRNARFAEDMGPLDPRCGCPVCSTWSRAYLHHLVKAGEMLGAMLMTQHNIHFYQALMQEMRDSIAEGRFAHFATDFRRDYQRA

SEQ ID NO: 60967 - protein, 376 aa, Sphingobium chlorophenolicum
  misc_feature (1)..(376): tr|F6EVL8|F6EVL8_SPHCR Queuine tRNA-ribosyltransferase OS=Sphingobium chlorophenolicum L-1 OX=690566 GN=tgt PE =3 SV=1
MIHPRFSFSIAATDGKARTGAIQMRRGDIRTPAFMPVGTAATVKAMRPAEVRAAGADIILGNTYHLMLRPGAERMARLGGLHGFMGWDRPILTDSGGYQVMSLSALTKMSEEGVAFSSHIDGSKHMLTPERSMEIQRLLDSDIVMAFDECTKNGCTHDEAARSMERSMRWAKRSRDGFDAGGEHAERAALFGIQQGSLNENLRRISAERLIEIGFDGYAVGGLAVGEGQEAMFATLDFAPDMLPSDKPRYLMGVGKPDDIVGAVERGIDMFDCVLPTRSGRNGQAFTWAGPLNIRNARFAEDMGPLDPRCGCPVCSTWSRAYLHHLVKAGEMLGAMLMTQHNIHFYQALMQEMRDSIAEGRFAHFATDFRRDYRRA

SEQ ID NO: 60968 - protein, 376 aa, Sphingobium chungbukense
  misc_feature (1)..(376): tr|A0A0M3APU6|A0A0M3APU6_9SPHN Queuine tRNA-ribosyltran sferase OS=Sphingobium chungbukense OX=56193 GN=tgt PE= 3 SV=1
MTNSRFSFSIAATDGKARAGTIRMRRGDIRTPAFMPVGTAATVKAMRPAEVRATGADIILGNTYHLMLRPGAERMARLGGLHGFMGWDRPILTDSGGYQVMSLSALTRMSEEGVAFSSHIDGSKHMLTPERSMEIQRLLDSDIVMAFDECTKNGCTHDEAAKSMERSMRWARRSREGFDAGGEHAERAALFGIQQGSLDEGLRRISAEKLIDIGFDGYAVGGLAVGEGQEAMFATLDFAPGMLPVDKPRYLMGVGKPDDIVGAVERGIDMFDCVLPTRSGRNGQAFTWAGPLNIRNARFAEDMGPLDPRCGCPVCATWSRAYLHHLVKAGEMLGAMLMTQHNIHFYQALMQAIRDSIAEGRFAGFAADFRRDYQRA

SEQ ID NO: 60969 - protein, 376 aa, Sphingobium cloacae
  misc_feature (1)..(376): tr|A0A1E1F1M0|A0A1E1F1M0_9SPHN Queuine tRNA-ribosyltran sferase OS=Sphingobium cloacae OX=120107 GN=tgt PE=3 SV =1
MTQSRFSFSIAATEGKARTGVIAMRRGDIRTPAFMPVGTAATVKAMRPAEVRAAGADIILGNTYHLMLRPGAERMARLGGLHGFMGWERPILTDSGGYQVMSLSALTRMSEEGVSFSSHIDGSKHMLSPERSMEIQRLLDSDIVMAFDECTKNGCTHDEAARSMERSMRWAKRSRDAFDAGGGHAERAALFGIQQGSLDEELRRVSADKLMDIGFDGYAVGGLAVGEGQEAMFGCLDFAPDMLPANRPRYLMGVGKPDDIVGAVERGIDMFDCVLPTRSGRNGQAFTWNGPLNIRNARFAEDQGPLDPRCACPVCSTWSRAYLHHLVKAGEMLGAMLMTQHNIHFYQDLMQNIRDSIAEGRFAAFAAGFRNDYRRA

SEQ ID NO: 60970 - protein, 376 aa, Sphingobium cupriresistens
  misc_feature (1)..(376): tr|A0A4Q4JRX0|A0A4Q4JRX0_9SPHN Queuine tRNA-ribosyltran sferase OS=Sphingobium cupriresistens OX=1132417 GN=tgt PE=3 SV=1
MTKPRFSFAISATDGKARTGAIQMRRGEIRTPAFMPVGTAATVKAMRPAEVRATGADIILGNTYHLMLRPGAERMARLGGLHGFMGWDRPILTDSGGYQVMSLSALTKMSEEGVAFSSHIDGSKHMLTPERSMEIQRLLDSDIVMAFDECTKNGCTHDEAGRSMERSMRWAKRSREGFDAGGDHAERAALFGIQQGSLDEGLRRISAEKLIEIGFDGYAVGGLAVGEGQEAMFATLDFAPAMLPQDKPRYLMGVGKPDDIVGAVERGIDMFDCVLPTRSGRNGQAFTWAGPLNIRNAKFNEDIGPIDPRCGCPVCATWSRAYLHHLVKAGEMLGAMLMTQHNIHFYQELMQGLRDNIAAGTLSRFTADFRRDYQRV

SEQ ID NO: 60971 - protein, 376 aa, Sphingobium czechense; identical to SEQ ID NO: 60970
  misc_feature (1)..(376): tr|A0A0J8AWR4|A0A0J8AWR4_9SPHN Queuine tRNA-ribosyltran sferase OS=Sphingobium czechense LL01 OX=1420583 GN=tgt PE=3 SV=1

SEQ ID NO: 60972 - protein, 376 aa, Sphingobium faniae
  misc_feature (1)..(376): tr|A0A1G4U4X0|A0A1G4U4X0_9SPHN Queuine tRNA-ribosyltran sferase OS=Sphingobium faniae OX=570446 GN=tgt PE=3 SV= 1
MTQSRFSFSIAATDGKARTGVISMRRGDIRTPAFMPVGTAATVKAMRPAEVRAAGADIILGNTYHLMLRPGAERMARLGGLHGFMGWERPILTDSGGYQVMSLSALTKMSEEGVAFSSHIDGSKHMLSPERSMEIQRLLDSDIVMAFDECTKNGCTRDEAARSMERSMRWAKRSRDAFDAGGDHAERAALFGIQQGSLDEGLRRMSADKLTDIGFDGYAVGGLAVGEGQEAMFGCLDFAPDMLPSDKPRYLMGVGKPDDIVGAVERGIDMFDCVLPTRSGRNGQAFTWNGPLNIRNARFAEDQGPLDPRCGCPVCSTWGRAYLHHLVKAGEMLGAMLMTQHNIHFYQDLMQNIRDSIAEQRFAAFAAGFRSDYKRA

SEQ ID NO: 60973 - protein, 376 aa, Sphingobium francense
  misc_feature (1)..(376): tr|A0A4Q4JCA0|A0A4Q4JCA0_9SPHN Queuine tRNA-ribosyltran sferase OS=Sphingobium francense OX=332057 GN=tgt PE=3 SV=1
MTNPRFSFSIAATDGKARTGAIQMRRGEIRTPAFMPVGTAATVKAMRPAEVRAAGADIILGNTYHLMLRPGAERVARLGGLHGFMGWDRPILTDSGGYQVMSLSALTKMSEEGVAFSSHIDGSRHMLTPERSMEIQRLLDSDIVMAFDECTRNGCTHDEAAKSMERSMRWAKRSRDGFDAGGEHAERAALFGIQQGSLDEGLRRISAERLIDIGFDGYAVGGLAVGEGQEAMFATLDFAPDMLPADKPRYLMGVGKPDDIVGAVERGIDMFDCVLPTRSGRNGQAFTWAGPLNIRNARFAEDMGPLDPRCACPVCATWSRAYLHHLVKAGEMLGAMLMTQHNIHFYQALMQEIRDSIAAGRFASFAADFRRDYQRA

SEQ ID NO: 60974 - protein, 376 aa, Sphingobium fuliginis
  misc_feature (1)..(376): tr|A0A5B8CEX4|A0A5B8CEX4_SPHSA Queuine tRNA-ribosyltran sferase OS=Sphingobium fuliginis ATCC 27551 OX=1208342 GN=tgt PE=3 SV=1
MTNSRFSFSIAATDGKARTGAIQMRRGEIRTPAFMPVGTAATVKAMRPAEVRAAGADIILGNTYHLMLRPGAERVARLGGLHAFMGWDRPILTDSGGYQVMSLSALTKMSEEGVAFSSHIDGSRHMLTPERSMEIQRLLDSDIVMAFDECTRNGCTHDEAAKSMERSMRWAKRSRDGFDAGAEHAERAALFGIQQGSLDEGLRRISAEKLIDIGFDGYAVGGLAVGEGQEAMFATLDFAPGMLPADKPRYLMGVGKPDDIVGAVERGIDMFDCVLPTRSGRNGQAFTWAGPLNIRNARFAEDKGPLDPRCGCPVCTTWSRAYLHHLVKAGEMLGAMLMTQHNIHFYQALMQGIRDSIAIGRFQGFAADFRRDYQRA

SEQ ID NO: 60975 - protein, 376 aa, Sphingobium fuliginis
  misc_feature (1)..(376): tr|A0A292ZDW8|A0A292ZDW8_SPHSA Queuine tRNA-ribosyltran sferase OS=Sphingobium fuliginis (strain ATCC 27551) OX =336203 GN=tgt PE=3 SV=1
MTNPRFSFSIAATDGKARTGAIQMRRGEIRTPAFMPVGTAATVKAMRPAEVRAAGADIILGNTYHLMLRPGAERVARLGGLHAFMGWDRPILTDSGGYQVMSLSALTKMSEEGVAFSSHIDGSRHMLTPERSMEIQRLLDSDIVMAFDECTRNGCTHDEAAKSMERSMRWAKRSRDGFDAGAEHAERAALFGIQQGSLDEGLRRISAEKLIDIGFDGYAVGGLAVGEGQEAMFATLDFAPGMLPADKPRYLMGVGKPDDIVGAVERGIDMFDCVLPTRSGRNGQAFTWAGPLNIRNARFAEDKGPLDPRCGCPVCTTWSRAYLHHLVKAGEMLGAMLMTQHNIHFYQALMQGIRDSIAIGRFQGFAADFRRDYQRA

SEQ ID NO: 60976 - protein, 376 aa, Sphingobium herbicidovorans
  misc_feature (1)..(376): tr|A0A086PFC2|A0A086PFC2_SPHHM Queuine tRNA-ribosyltran sferase OS=Sphingobium herbicidovorans (strain ATCC 700 291 / DSM 11019 / NBRC 16415 / MH) OX=1219045 GN=tgt PE =3 SV=1
MTQSRFSFAIAATDGKARTGTIQMRRGEIRTPAFMPVGTAATVKAMRPAEVRATGADIILGNTYHLMLRPGAERVARLGGLHSFMGWDRPILTDSGGYQVMSLSALTKLSEEGVAFASHIDGSRHMLTPERSMEIQRLLDSDIVMAFDECTKNGCTHDEAAHSMERSMRWAKRSRDGFDGGGEHAERAALFGIQQGSLNEDLRRVSAEKLIEIGFDGYAVGGLAVGEGQEAMFGCLDYAPDMLPQDKPRYLMGVGKPDDIVGAVERGIDMFDCVLPTRSGRNGQAFTWAGPLNIRNARFAEDMSPLDPRCTCPVCGTWSRAYLHHLVKSGEMLGAMLMTQHNIHFYQSMMQAIRDSIAQGRFAAFAADFRRDYQRV

SEQ ID NO: 60977 - protein, 376 aa, Sphingobium hydrophobicum
  misc_feature (1)..(376): tr|A0A249MPD1|A0A249MPD1_9SPHN Queuine tRNA-ribosyltran sferase OS=Sphingobium hydrophobicum OX=1673076 GN=tgt PE=3 SV=1
MTQPRFSFSIAATDGKARTGAIQMRRGEIRTPAFMPVGTAATVKAMRPAEVRATGADIILGNTYHLMLRPGAERMARLGGLHGFMGWDRPILTDSGGYQVMSLSALTKMSEQGVAFSSHIDGSKHMLTPERSMEIQRLLDSDIVMAFDECTKNGCTHDEAARSMERSMRWAKRSRDGFDAGGDHAERAALFGIQQGSLDEGLRRQSAQQLIDIGFDGYAVGGLAVGEGQQAMFATLDFAPDMLPQDKPRYLMGVGKPDDIVGAVERGIDMFDCVLPTRSGRNGQAFTWAGPLNIRNARFAEDTGPLDPRCTCPVCTTWSRAYLHHLVKAGEMLGAMLMTQHNIHFYQSLMQAIRDAIAAGQFAAFAADFRRDYQRA

SEQ ID NO: 60978 - protein, 376 aa, Sphingobium indicum; identical to SEQ ID NO: 60973
  misc_feature (1)..(376): tr|A0A1L5BTU6|A0A1L5BTU6_SPHIB Queuine tRNA-ribosyltran sferase OS=Sphingobium indicum (strain DSM 16412 / CCM 7286 / MTCC 6364 / B90A) OX=861109 GN=tgt PE=3 SV=1

SEQ ID NO: 60979 - protein, 376 aa, Sphingobium japonicum
  misc_feature (1)..(376): tr|D4Z0P7|D4Z0P7_SPHJU Queuine tRNA-ribosyltransferase OS=Sphingobium japonicum (strain DSM 16413 / CCM 7287 / MTCC 6362 / UT26 / NBRC 101211 / UT26S) OX=452662 GN=t gt PE=3 SV=1
MTNPRFSFSIAATDGKARTGAIQMRRGEIRTPAFMPVGTAATVKAMRPAEVRAAGADIILGNTYHLMLRPGAERVARLGGLHGFMGWDRPILTDSGGYQVMSLSALMKMSEEGVAFSSHIDGSRHMLTPERSMEIQRLLDSDIVMAFDECTRNGCTHHEAAKSMERSMRWAKRSRDGFDAGGEHAERAALFGIQQGSLDEGLRRISAERLIDIGFDGYAVGGLAVGEGQEAMFATLDFAPAMLPADKPRYLMGVGKPDDIVGAVERGIDMFDCVLPTRSGRNGQAFTWAGPLNIRNARFAEDMGPLDPRCACPVCATWSRAYLHHLVKAGEMLGAMLMTQHNIHFYQALMQEIRDSIAAGRFASFAADFRRDYQRA

SEQ ID NO: 60980 - protein, 376 aa, Sphingobium japonicum
  misc_feature (1)..(376): tr|N1MXQ1|N1MXQ1_9SPHN Queuine tRNA-ribosyltransferase OS=Sphingobium japonicum BiD32 OX=1301087 GN=tgt PE=3 S V=1
MTQTRFSFSIAATDGKARTGAIQMQRGEIRTPAFMPVGTAATVKAMRPAEVRATGADIILGNTYHLMLRPGAERMARLGGLHGFMGWDRPILTDSGGYQVMSLSELTKMSEQGVAFSSHIDGSKHMLTPERSMEIQRLLDSDIVMAFDECTKNGCTHDEAARSMERSMRWARRSRDGFDAGGDHAERAALFGIQQGSLDEGLRRQSAQQLIDIGFDGYAVGGLAVGEGQEAMFATLDFAPDMLPIDKPRYLMGVGKPDDIVGAVERGIDMFDCVLPTRSGRNGQAFTWAGPLNIRNARFAEDTGPLDPRCTCSVCATWGRAYLHHLVKAGEMLGAMLMTQHNIHFYQSLMQAIRDAIAAGQFAAFAADFRRDYQRA

SEQ ID NO: 60981 - protein, 376 aa, Sphingobium lactosutens
  misc_feature (1)..(376): tr|T0J5L4|T0J5L4_9SPHN Queuine tRNA-ribosyltransferase OS=Sphingobium lactosutens DS20 OX=1331060 GN=tgt PE=3 SV=1
MTKPRFSFSLSAVDGKARTGTIQMRRGDIRTPAFMPVGTAATVKAMRPAEVRATGADIILGNTYHLMLRPGAERMARLGGLHGFMGWDRPILTDSGGYQVMSLSALTKMSEEGVAFSSHIDGSKHLLTPERSMEIQRLLDTDIVMAFDECTKNGCTHDEAAKSMERSMRWAKRSRDGFDAGGEHAERAALFGIQQGSLNEELRRVSAEKLIDIGFDGYAVGGLAVGEGQEAMFATLDFAPDMLPLDKPRYLMGVGKPDDIVGAVERGIDMFDCVLPTRSGRNGQAFTWGGPLNIRNAKFNEDMGPLDARCGCPVCATWSRAYLHHLVKAGEMLGAMLMTQHNIHFYQEMMEAIRDAIGAGRFAAFAAEFRRNYQRV

SEQ ID NO: 60982 - protein, 376 aa, Sphingobium limneticum
  misc_feature (1)..(376): tr|A0A5J5GWB0|A0A5J5GWB0_9SPHN tRNA guanosine(34) trans glycosylase Tgt OS=Sphingobium limneticum OX=1007511 GN =tgt PE=4 SV=1
MTKARFSFSIHATDGKARTGAIQMRRGEIRTPAFMPVGTAATVKAMRPAEVRATGADIILGNTYHLMLRPGAERMARLGGLHGFMGWDRPILTDSGGYQVMSLSALTKMSEEGVAFSSHIDGSKHMLTPERSMEIQRLLDSDIVMAFDECTKNGCTHDEAARSMERSMRWAKRSRDGFDAGGDHAARAALFGIQQGSLDEGLRRISAEKLIEVGFDGYAVGGLAVGEGQEAMFATLDFAPDMLPQDKPRYLMGVGKPDDIVGAVERGIDMFDCVLPTRSGRNGQAFTWAGPLNIRNAKFNEDQGPLDPRCGCPVCATWSRAYLHHLVKAGEMLGAMLMTQHNIHFYQELMQGLRDNIAAGTLASFTADFRRDYRKV

SEQ ID NO: 60983 - protein, 376 aa, Sphingobium lucknowense
  misc_feature (1)..(376): tr|A0A081T047|A0A081T047_9SPHN Queuine tRNA-ribosyltran sferase OS=Sphingobium lucknowense F2 OX=1450518 GN=tgt PE=3 SV=1
MTNPRFSFSIAATDGKARTGAIQMRRGEIRTPAFMPVGTAATVKAMRPAEVRAAGADIILGNTYHLMLRPGAERVARLGGLHGFMGWDRPILTDSGGYQVMSLSALTKMSEEGVAFSSHIDGSRHMLTPERSMEIQRLLDSDIVMAFDECTRNGCTHDEAAKSMERSMRWAKRSRDGFDAGGEHAERAALFGIQQGSLDEGLRRISAERLIDIGFDGYAVGGLAVGEGQEAMFATLDFAPAMLPADKPRYLMGVGKPDDIVGAVERGIDMFDCVLPTRSGRNGQAFTWAGPLNIRNARFAEDMGPLDPRCACPVCATWSRAYLHHLVKAGEMLGAMLMTQHNIHFYQALMQEIRDSIAAGRFASFAADFRRDYQRA

SEQ ID NO: 60984 - protein, 376 aa, Sphingobium paulinellae; identical to SEQ ID NO: 60959
  misc_feature (1)..(376): tr|A0A5J5HZA8|A0A5J5HZA8_9SPHN tRNA guanosine(34) trans glycosylase Tgt OS=Sphingobium paulinellae OX=2048545 G N=tgt PE=4 SV=1

SEQ ID NO: 60985 - protein, 376 aa, Sphingobium quisquiliarum
  misc_feature (1)..(376): tr|T0IGH4|T0IGH4_9SPHN Queuine tRNA-ribosyltransferase OS=Sphingobium quisquiliarum P25 OX=1329909 GN=tgt PE=3 SV=1
MTQNRFSFTIAATDGKARTGSIQMRRGDIRTPAFMPVGTAATVKAMRPAEVRAAGADIILGNTYHLMLRPGAERVARLGGLHGFMGWDRPILTDSGGYQVMSLSALTKMSEEGVAFASHIDGSRHMLTPERSMEIQRLLDSDIVMAFDECTRNGCTHEEAAHSMERSMRWAKRSRDAFDQGGDHAERAALFGIQQGSLNEDLRRVSAEKLIEIGFDGYAVGGLAVGEGQEAMFACLDYAPGMLPAGKPRYLMGVGKPDDIVGAVERGIDMFDCVLPTRSGRNGQAFTWAGPLNIRNARFAEDLSPLDPRCGCPVCATWSRAYLHHLVKAGEMLGAMLMTQHNISFYQALMQAIRDSIAQGRFAAFAAEFREGYRRA

SEQ ID NO: 60986 - protein, 380 aa, Sphingobium sp.
  misc_feature (1)..(380): tr|A0A2A3MW77|A0A2A3MW77_9SPHN Queuine tRNA-ribosyltran sferase OS=Sphingobium sp. D43FB OX=2017595 GN=tgt PE=3 SV=1
MTQPRFSFSIAATDGKARTGAISMRRGEIRTPAFMPVGTAATVKAMRPAEVRAAGADIILGNTYHLMLRPGAERMARLGGLHGFMGWDRPILTDSGGYQVMSLSALTKMSEQGVAFSSHIDGSKHMLTPERSMEIQRLLDSDIVMAFDECTKNGCTHEEATKSMERSMRWAKRSRDGFDAGGDHADRAALFGIQQGSLDEGLRRESAQQLIDIGFDGYAVGGLAVGEGQQAMFATLDFAPDMLPADKPRYLMGVGKPDDIVGAVERGIDMFDCVLPTRSGRNGQAFTWAGPLNIRNARFAEDQGPLDPRCACPVCTTWSRAYLHHLVKAGEMLGAMLMTQHNIHFYQALMQGMRDAIAAGQFTAFTAAFRRDYQRVTSKE

SEQ ID NO: 60987 - protein, 376 aa, Sphingobium sp.
  misc_feature (1)..(376): tr|A0A197C1X6|A0A197C1X6_9SPHN Queuine tRNA-ribosyltran sferase OS=Sphingobium sp. 20006FA OX=2056888 GN=tgt PE =3 SV=1
MTNPRFSFSIAATDGKARTGAIQMRRGEIRTPAFMPVGTAATVKAMRPAEVRAAGADIILGNTYHLMLRPGAERVARLGGLHAFMGWDRPILTDSGGYQVMSLSALTKMSEEGVAFSSHIDGSRHMLTPERSMEIQRLLDSDIVMAFDECTRNGCTHDEAAKSMERSMRWAKRSRDGFDAGAEHAERAALFGIQQGSLDEGLRRISAEKLIDISFDGYAVGGLAVGEGQEAMFATLDFAPGMLPADKPRYLMGVGKPDDIVGAVERGIDMFDCVLPTRSGRNGQAFTWAGPLNIRNARFAEDKGPLDPRCGCPVCTTWSRAYLHHLVKAGEMLGAMLMTQHNIHFYQALMQGIRDSIAIGRFQGFAADFRRDYQRA

SEQ ID NO: 60988 - protein, 381 aa, Sphingobium ummariense
  misc_feature (1)..(381): tr|T0IY71|T0IY71_9SPHN Queuine tRNA-ribosyltransferase OS=Sphingobium ummariense RL-3 OX=1346791 GN=tgt PE=3 S V=1
MTNPRFSFSIAATDGKARTGAIAMRRGEIRTPAFMPVGTAATVKAMRPAEVRAAGADIILGNTYHLMLRPGAERVARLGGLHGFMGWDRPILTDSGGYQVMSLSALTKLSEEGVAFSSHIDGSKHMLTPERSMEIQRLLDSDIVMAFDECTRNGCTRDEAAKSMERSMRWAKRSRDAFDAGGKHAAQDHPERAALFGIQQGSLDEGLRRESAQKLIEIGFDGYAVGGLAVGEGQDAMFATLDFAPDMLPADRPRYLMGVGKPDDIVGAVERGIDMFDCVLPTRSGRNGQAFTWQGPLNIRNAKFAEDKAPLDPRCDCPVCVTWGRAYLHHLVKAGEMLGAMLMTQHNIHFYQALMQATRSAIEQGRFASFVSEFRRDYLRR

SEQ ID NO: 60989 - protein, 376 aa, Sphingobium wenxiniae
  misc_feature (1)..(376): tr|A0A562K4U5|A0A562K4U5_SPHWJ Queuine tRNA-ribosyltran sferase OS=Sphingobium wenxiniae (strain DSM 21828 / JZ -1) OX=595605 GN=tgt PE=3 SV=1
MTQPRFSFSVSATDGKARTGVISMRRGEIRTPAFMPVGTAATVKAMRPAEVRAAGADIILGNTYHLMLRPGAERMARLGGLHGFMGWDRPILTDSGGYQVMSLSALTRMSEEGVAFSSHIDGSKHMLSPERSMEIQRLLDSDIVMAFDECTRNGCTHDEAAQSMERSMRWAKRSRDAFDAGGAHADRAALFGIQQGSLDEGLRRVSADRLIDIGFDGYAVGGLAVGEGQEAMFGCLDFAPDMLPPDRPRYLMGVGKPDDIVGAVERGIDMFDCVLPTRSGRNGQAFTWNGPLNIRNARFAEDREPLDPRCACPVCSTWSRAYLHHLVKAGEMLGAMLMTQHNIHFYQDLMRNIRDSIAQGRFAVFAAGFRNEYKRA

SEQ ID NO: 60990 - protein, 376 aa, Sphingobium xenophagum; identical to SEQ ID NO: 60977
  misc_feature (1)..(376): tr|A0A401J0Z2|A0A401J0Z2_SPHXE Queuine tRNA-ribosyltran sferase OS=Sphingobium xenophagum OX=121428 GN=tgt PE=3 SV=1

SEQ ID NO: 60991 - protein, 376 aa, Sphingobium yanoikuyae
  misc_feature (1)..(376): tr|K9CMX4|K9CMX4_SPHYA Queuine tRNA-ribosyltransferase OS=Sphingobium yanoikuyae ATCC 51230 OX=883163 GN=tgt P E=3 SV=1
MTKPRFSFSIAATDGKARTGAIQMRRGEIRTPAFMPVGTAATVKAMRPAEVRATGADIILGNTYHLMLRPGAERMARLGGLHGFMGWDRPILTDSGGYQVMSLSALTKMSEEGVAFSSHLDGSKHMLSPERSMEIQRLLDSDIVMAFDECTKNGCTHDEAARSMERSMRWAKRSRDGFDAGGDHADRAALFGIQQGSLDEGLRKISAEKLIEIGFDGYAVGGLAVGEGQEAMFATLDFAPDMLPQDKPRYLMGVGKPDDIVGAVERGIDMFDCVLPTRSGRNGQAFTWAGPLNIRNAKFNEDLGPLDPRCGCPVCATWSRAYLHHLVKSGEMLGAMLMTQHNIHFYQELMQGLRDNIAAGTLSTFTADFRRDYQRV

SEQ ID NO: 60992 - protein, 376 aa, Sphingobium yanoikuyae
  misc_feature (1)..(376): tr|A0A0J9CVM4|A0A0J9CVM4_SPHYA Queuine tRNA-ribosyltran sferase OS=Sphingobium yanoikuyae OX=13690 GN=tgt PE=3 SV=1
MTKPRFSFSIAATDGKARTGAIQMRRGEIRTPAFMPVGTAATVKAMRPAEVRATGADIILGNTYHLMLRPGAERMARLGGLHGFMGWDRPILTDSGGYQVMSLSALTKMSEEGVAFSSHLDGSKHMLSPERSMEIQRLLDSDIVMAFDECTKNGCTHDEAAKSMERSMRWAKRSRDGFDAGGDHAERAALFGIQQGSLNEGLRKISAEKLIEIGFDGYAVGGLAVGEGQEAMFATLDFAPDMLPQDKPRYLMGVGKPDDIVGAVERGIDMFDCVLPTRSGRNGQAFTWAGPLNIRNAKFNEDLGPLDPRCGCPVCATWSRAYLHHLVKSGEMLGAMLMTQHNIHFYQELMQGLRDNIAAGTLSTFTADFRRDYQRV

SEQ ID NO: 60993 - protein, 379 aa, Sphingomonadaceae bacterium
  misc_feature (1)..(379): tr|A0A257DKV1|A0A257DKV1_9SPHN Queuine tRNA-ribosyltran sferase OS=Sphingomonadaceae bacterium PASS1 OX=2015579 GN=tgt PE=3 SV=1
MTTRFQFSISATDGKARTGSIQMMRGEIRTPAFMPVGTAATVKAMRPAEVRATGADIILGNTYHLMLRPGAERVARLGGLHQFSGWDRPILTDSGGYQVMSLSALRKITEEGVAFQSHLDGSKHMLSPERSMEIQRLLGSDIVMAFDECPANGVSRDEAIKSMELSMRWAKRSRDGFDSGGEHAARAALFGIQQGSLNEELRKRSADALIDIGFDGYAVGGLAVGEGQEAMFGCLDYAPDQLPAERPRYLMGVGKPDDLLGAVERGIDMFDCVLPTRSGRNGQAFTHHGPINIRNAKFAEDQGPIDDQCTCPVCATWTRAYVHHLIRSGEILGAMLMTQHNLHYYQMLMAGMRAAISQGRFTAFASDFRRDYVRGKDQG

SEQ ID NO: 60994 - protein, 374 aa, Sphingomonadaceae bacterium
  misc_feature (1)..(374): tr|A0A2D6UQ15|A0A2D6UQ15_9SPHN Queuine tRNA-ribosyltran sferase OS=Sphingomonadaceae bacterium OX=1930536 GN=tg t PE=3 SV=1
MSERFAFTIDATDGAARTGSIAMRRGTIRTPAFMPVGTAATVKAMKPETVRKTGADIILGNTYHLMLRPGAERVARLGGLHQFMNWDRPILTDSGGYQGMSLSDLRKLTEKGVEFRSHIDGSKHMLTPERSMEIQRLLGSDIVMAFDECPRADRPRDEIAASMEMSMRWAKRSRDGFDSGGDHAGRSALFGIQQGALDEDLRQISAEKLTEIGFDGYAIGGLAVGEGQEAMFATLDFAPRQLPHDRPRYLMGVGKPDDLVGAVERGVDMFDCVLPSRSGRNGQAFTWNGPINLRNARFAEDQELLDSRCACDTCGTYTRAYLHHLIKSQEILGAMLMTEHNIAFYQQLMQAMRDAIAEGRFAAFAAQFRSDYLG

SEQ ID NO: 60995 - protein, 379 aa, Sphingomonadales bacterium
  misc_feature (1)..(379): tr|A0A258J8N0|A0A258J8N0_9SPHN Queuine tRNA-ribosyltran sferase OS=Sphingomonadales bacterium 32-65-25 OX=19705 94 GN=tgt PE=3 SV=1
MTRFAFSIHARDGKARTGTITMRRGEIRTPAFMPVGTAATVKAMRASEVRAAGADIILGNTYHLMLRPTAERIHRLGGLHSFMGWNRPILTDSGGYQVMSLSSLTKRTEEGVTFASHLDGSRHLMSPERSMEIQRLLGSDIVMAFDELVALPAPREVVKDAMDRSMRWAARSRAAFDAGGEHAAGAALFGIQQGGLDERLRAESATALRAIGFDGYAIGGLAVGEGQPAMFGVLDYATGQLPEDAPRYLMGVGKPDDIVGAVVRGVDMFDCVLPTRSGRNGQAFTHDGPLNLRNAVHGEDLSPLDADCRCPVCHGPEAASRAYLHHLIKAGEMLGAMLLTQHNIGFYQQLMAGLRAAIAEQQLGDFAAAFLARYHANRR

SEQ ID NO: 60996 - protein, 374 aa, Sphingomonadales bacterium
  misc_feature (1)..(374): tr|A0A1B6ZD74|A0A1B6ZD74_9SPHN Queuine tRNA-ribosyltran sferase OS=Sphingomonadales bacterium EhC05 OX=1849171 GN=tgt PE=3 SV=1
MTDRFRFSISATDGKARTGKITMQRGDIRTPAFMPVGTAATVKAMKPETVRATGADIILGNTYHLMLRPGAERVARLGGLHRFMNWDRPILTDSGGYQVMSLSDLTKLTEDGVEFRSHLDGSRHMLTPERSMEIQRLLGSDIVMAFDECTKNGASRDEALASMERSMRWAKRSRDGFDSDAVHASKAALFGIQQGSLDQEIRSASAAALIDIGFDGYAIGGLAVGEGQEAMFDVLDYAPDQLPSDKPRYLMGVGKPDDLVGAVERGVDMFDCVLPSRSGRNGQAFTARGPLNIRNAKFAEDMEPLDGSCACPVCEKYSRAYLHHLIRAKEILGAMLMTEHNIAYYQSLMAGMRAAIAAGTFGSFAKSFRADYLP

SEQ ID NO: 60997 - protein, 383 aa, Sphingomonas adhaesiva
  misc_feature (1)..(383): tr|A0A2A4I746|A0A2A4I746_9SPHN Queuine tRNA-ribosyltran sferase OS=Sphingomonas adhaesiva OX=28212 GN=tgt PE=3 SV=1
MSAPRFAFTIAATDGAARTGTIAMERGTIRTPAFMPVGTAATVKAMKPADVERAGADIILGNTYHLMLRPGAERVARLGGLHAFMGWERPILTDSGGYQVMSLSELTKRSEEGVAFASHLDGTRHLITPERSIEIQRLLGSNITMAFDELVPTTSTREVQAAAMERSMRWARRSRDAFHDADGGVHAAHNAIFGIQQGALDEGLRRASADALIDIGFDGYAIGGLAVGEGQEAMFGCLDYAPGQLPADRPRYLMGVGKPDDIVGAVERGVDMFDCVMPTRSGRTGQAFTRTGPINIRNARFNEDQGPLDPECGCAVCATWSRAYLHHLVRSGEILGAMLMTEHNIAFYEALMADLRGAIAEQRLAAFASGFRARYGAGKGGQG

SEQ ID NO: 60998 - protein, 381 aa, Sphingomonas aerolata
  misc_feature (1)..(381): tr|A0A2T4YQI3|A0A2T4YQI3_9SPHN Queuine tRNA-ribosyltran sferase OS=Sphingomonas aerolata OX=185951 GN=tgt PE=3 SV=1
MDHPVSPRFDFTISSTDGAARTGQIAMQRGVIRTPAFMPVGTAATVKAMKPDDVAAAGADIILGNTYHLMLRPGAERVARLGGLHGFMGWSKPILTDSGGYQVMSLADLTKRSEEGVSFKSHLDGTRHLLSPERSIEIQRLLGSNIVMAFDELVPTTSTREVQAAAMERSMRWAKRSRDAFDAGGAHADNNAIFGIQQGALNESFRKSSADALINIGFDGYAVGGLAVGEGQEAMFGCLDFAPGQLPADKPRYLMGVGKPDDIVGAVERGIDMFDCVMPTRSGRTGQAFTRNGPINIRNARFAEDQLPLAADCACPVCATWSRAYLHHLVRAGEMLGAMLMTEHNIWFYETLMADLRAAIAAGTLTKFANDFRAEYGRKSS

SEQ ID NO: 60999 - protein, 378 aa, Sphingomonas aquatilis
  misc_feature (1)..(378): tr|A0A511Q7L0|A0A511Q7L0_9SPHN Queuine tRNA-ribosyltran sferase OS=Sphingomonas aquatilis NBRC 16722 OX=1219039 GN=tgt PE=3 SV=1
MSSRFAFTIAATDGRARTGTIQMQRGVIRTPAFMPVGTAATVKAMKPADVANAGADIILGNTYHLMLRPGAERVARLGGLHGFMGWDKPILTDSGGYQVMSLADLTKRSEEGVSFKSHLDGTRHLLSPERSIEIQRLLGSNIVMAFDELVPTTSTREVQAAAMERSMRWAKRSRDAFNGGGEHAENNAIFGIQQGALDESLRKASADALIDIGFDGYAVGGLAVGEGQEAMFGCLDFAPGQLPQDKPRYLMGVGKPDDIVGAVERGIDMFDCVMPTRSGRTGQAFTRNGPINLRNAKFGEDQAPLDPTCGCPVCATWSRAYIHHLVRAGEILGAMLMTEHNIWFYEALMADLRAAIAAGELTSFANGFRAAYQRGKGE

SEQ ID NO: 61000 - protein, 382 aa, Sphingomonas aurantiaca
  misc_feature (1)..(382): tr|A0A2T5GMA0|A0A2T5GMA0_9SPHN Queuine tRNA-ribosyltran sferase OS=Sphingomonas aurantiaca OX=185949 GN=tgt PE= 3 SV=1
MTRPRFDFTISATDGKARTGVIAMQRGDIRTPAFMPVGTAATVKGMKPADVVGAGADIILGNTYHLMLRPGAERVARLGGLHAFSGWSKPILTDSGGYQVMSLADLTKRSEEGVSFKSHLDGTRHLLSPERSIEIQRLLGSNIVMAFDELVPTTSTREVQAAAMERSMRWARRSRAAFDSGEAHAENNAIFGIQQGALNEGFRKSSADALIDIGFDGYAVGGLAVGEGQEAMFGCLDFAPDQLPVDKPRYLMGVGKPDDIVGAVERGIDMFDCVMPTRSGRTGQAFTRTGPINIRNAKFGEDTGPLDPACPCPVCATWSRAYLHHLVRSGEMLGAMLMTEHNIWFYETLMADLRAAIAASALTQFANAFRAQYVRKSEGEQT

SEQ ID NO: 61001 - protein, 296 aa, Sphingomonas bacterium
  misc_feature (1)..(296): tr|A0A3D0W9X7|A0A3D0W9X7_9SPHN Queuine tRNA-ribosyltran sferase (Fragment) OS=Sphingomonas bacterium OX=1895847 GN=DEP91_04130 PE=3 SV=1
ILTDSGGYQVMSLAELTKRSEEGVAFKSHLDGSRHLISPERSMEIQRLLGSDIVMAFDELVPTTSTREVQAAAMERSMRWAQRSREGFDAGGDHAERAALFGIQQGALDEGLRRESADALKHIGFDGYAVGGLAVGEGQEAMFGVLDYAPGQLDPAKPRYLMGVGKPDDIVGAVERGIDMFDCVLPTRSGRTGQAFTRGGPINIRNARFAEDQGPLDPACPCPVCGTWSRAYLHHLVRAGEILGAMLMTEHNLWFYQTLMADLRAAIGAGTLADFAATFRTNYYAERPAAAGVSKA

SEQ ID NO: 61002 - protein, 380 aa, Sphingomonas carotinifaciens
  misc_feature (1)..(380): tr|A0A1G7L3L3|A0A1G7L3L3_9SPHN Queuine tRNA-ribosyltran sferase OS=Sphingomonas carotinifaciens OX=1166323 GN=t gt PE=3 SV=1
MTRFAFSIHATDGPARTGAIAMERGTIRTPAFMPVGTAATVKAMKPGDVAASGADIILGNTYHLMLRPGAERVARLGGLHDFMGWDKPILTDSGGYQVMSLAELTKRSEDGVAFKSHLDGTRHLLSPERSIEIQRLLGSNIVMAFDELVPTTSTREVQAAAMERSMRWAKRSRDAFDGGGAHAEHNAIFGIQQGALDEGLRKASADALIDIGFDGYAVGGLAVGEGQEAMFGCLDFAPGQLPVDKPRYLMGVGKPTDIVGAVERGIDMFDCVLPTRSGRTGQAFTRTGPLNLRNARHGEDQGPLDPSCGCPVCRTWSRAYLHHLVRAGEILGAMLMTEHNIWFYETLMADLRAAISEGRLRAFANAFRARYAGNPTGEMQ

SEQ ID NO: 61003 - protein, 376 aa, Sphingomonas changbaiensis
  misc_feature (1)..(376): tr|A0A0E9MKB1|A0A0E9MKB1_9SPHN Queuine tRNA-ribosyltran sferase OS=Sphingomonas changbaiensis NBRC 104936 OX=12 19043 GN=tgt PE=3 SV=1
MADRFAFSIHATDGAARTGTIHMLRGEIRTPAFMPVGTAATVKAMKPADVRAAGADIILGNTYHLMLRPGAERVARLGGLHGFMGWERPILTDSGGYQVMSLAELTKRSEEGVAFKSHLDGARHLITPERSTEIQRLLGSDIVMAFDELVPTTSPRDVQAAAMERSMRWARRSRDAFLGGGDHAARAAQFGIQQGALDRDLRQVSAERLIEIGFDGYAVGGLAVGEGQDAMFGVLDYAPGQLPVDRPRYLMGVGKPDDIVGAVERGIDMFDCVLPTRSGRTGQAFTWDGPINIRNARFGEDQDPLDPECGCSVCATWSRAYLHHLVRAGEILGAMLMTEHNLSFYQQLMERLRQAIGAGQLAPFAATFRDRYHRAG

SEQ ID NO: 61004 - protein, 376 aa, Sphingomonas desiccabilis
  misc_feature (1)..(376): tr|A0A4Q2IQF5|A0A4Q2IQF5_9SPHN Queuine tRNA-ribosyltran sferase OS=Sphingomonas desiccabilis OX=429134 GN=tgt P E=3 SV=1
MSPRFDFTIHATDGRARTGAIAMRRGTIRTPAFMPVGTAATVKAVKPADVRASGADILLGNTYHLMLRPGAERVHRLGGLHGFMGWDRPILTDSGGYQVMSLSDLTKRSEDGVEFKSHLDGSRHLLSPERSMEIQRLLGSDIVMAFDELVPTTATRDVQARAMERSMRWAKRSRDGFDSGGAHAEGAALFGIQQGALDQVLRRESADALKDIGFDGYAIGGLAVGEGQEAMFGVLDYAPGQLDAARPRYLMGVGKPDDIVGAVERGVDMFDCVLPTRSGRTGQAFTRTGPINIRNARFAEDTGPLDPECPCPSCTGWSRAYIHHLVRAGEILGAMLMTEHNLWFYQRLMADLRAAIAAGSLSMFANDFRTRYSSRG

SEQ ID NO: 61005 - protein, 378 aa, Sphingomonas dokdonensis
  misc_feature (1)..(378): tr|A0A245ZIA1|A0A245ZIA1_9SPHN Queuine tRNA-ribosyltran sferase OS=Sphingomonas dokdonensis OX=344880 GN=tgt PE =3 SV=1
MTSRFAFTIAATDGAARTGSIAMQRGTIRTPAFMPVGTAATVKAMKPADVEAAGADIILGNTYHLMLRPGAERVARLGGLHRFMGWDKPILTDSGGYQVMSLSDLTKRSEEGITFKSHLDGTRHLLSPERSIEIQRLLGSNIIMAFDELVPTTSTREVQAAAMERSMRWAKRSRDAFDGGGDHAANNAIFGIQQGALDEGFRKASADALIDIGFDGYAIGGLAVGEGQEAMFGCLDFAPGQLPADKPRYLMGVGKPDDIVGAVERGVDMFDCVLPTRSGRTGQAFTRTGPINIRNARFNEDQGPLDPECTCPTCTTWSRAYLHHLVRAGEILGAMLMTEHNIFFYEMLMADLRAAIAERRLKAFADAFRSRYQRGKGE

SEQ ID NO: 61006 - protein, 378 aa, Sphingomonas edaphi
  misc_feature (1)..(378): tr|A0A418Q1T5|A0A418Q1T5_9SPHN Queuine tRNA-ribosyltran sferase OS=Sphingomonas edaphi OX=2315689 GN=tgt PE=3 S V=1
MTRFQFQIAATDGAARTGTIQMQRGEIRTPAFMPVGTAATVKAMKPESVRATGADIILGNTYHLMLRPGAERVAKLGGLHKFMNWQRPILTDSGGYQVMSLSELTKVTDQGVSFRSHLDGSRHMLSPERSIEVQRLLGSDIVMQFDELVRPDVPPKKQREAMDRSIRWARRSRDEFDRGGEHAERSAIFGIQQGVLDMALRKESADALVDIGFDGYAVGGLAVGEGQEAMLGCLDFAPGQLPADKPRYLMGVGKPDDIVEAVRRGIDMFDCVLPTRSGRTGQAFTADGPINIRNARFAEDQEPLDPDCSCPTCTTYSRAYVHHLVRSGEILGAMLMTEHNLWFYQQMMKGLRDAIAEARFTAHASAFLDRYLRGRKGA

SEQ ID NO: 61007 - protein, 376 aa, Sphingomonas elodea
  misc_feature (1)..(376): tr|A0A495EXJ4|A0A495EXJ4_SPHEL Queuine tRNA-ribosyltran sferase OS=Sphingomonas elodea OX=179878 GN=tgt PE=3 SV =1
MPRFQFTIHATDGKARRGTIAMQRGEIRTPAFMPVGTAATVKAVKPQDVRASGADILLGNTYHLMLRPTAERVARLGGLHKFMGWDRPILTDSGGYQVMSLSELTKRSEEGVAFASHLDGSRHMMSPERSMEIQRLLGSDIVMAFDELVPTTSTREVQAKAMERSMRWAKRSRAGFDSGEEHAARAALFGIQQGALDEGLRKASADALKDIGFDGYAVGGLAVGEGQEAMFGVLDYAPGQLDETKPRYLMGVGKPDDIVGAVERGIDMFDCVLPTRSGRTGQAFTRTGPINIRNAKFAEDQGPLDPACPCPVCGTWSRAYIHHLVRAGEILGAMLMTEHNLWFYQALMADLRAAIEEQRLTAFANDFRAKYQAAKG

SEQ ID NO: 61008 - protein, 377 aa, Sphingomonas endophytica
  misc_feature (1)..(377): tr|A0A147I9W9|A0A147I9W9_9SPHN Queuine tRNA-ribosyltran sferase OS=Sphingomonas endophytica OX=869719 GN=tgt PE =3 SV=1
MTRFAFSIAATDGAARTGTITMQRGVIRTPAFMPVGTAATVKAMKPADVERAGADIILGNTYHLMLRPGAERVARLGGLHGFMGWNKPILTDSGGYQVMSLSALTKRSEEGVAFASHLDGTRHMITPERSIEIQRLLGSNIVMAFDELVPTTSTREVQAAAMERSMRWAKRSRDAFDGGGDHAADNAIFGIQQGALDEGLRKASADALIDIGFDGYAIGGLAVGEGQAAMFGCLDYAPGQLPADKPRYLMGVGKPTDIVGAVERGIDMFDCVMPTRSGRTGQAFTRTGPINIRNARFAEDQGPLDPECACAVCSTWSRAYVHHLVRAGEMLGAMLMTEHNIAFYEALMADLRAAIADGRLAAFANDFRARYDAPKGE

SEQ ID NO: 61009 - protein, 382 aa, Sphingomonas faeni
  misc_feature (1)..(382): tr|A0A2T5UBU2|A0A2T5UBU2_9SPHN Queuine tRNA-ribosyltran sferase OS=Sphingomonas faeni OX=185950 GN=tgt PE=3 SV= 1
MTRPRFDFTISATDGKARTGVIAMQRGDIRTPAFMPVGTAATVKGMKPADVVGAGADIILGNTYHLMLRPGAERVARLGGLHAFSGWSKPILTDSGGYQVMSLADLTKRSEEGVSFKSHLDGTRHLLSPERSIEIQRLLGSNIVMAFDELVPTTSTREVQAAAMERSMRWAKRSRAAFDAGEDHAENNAIFGIQQGALNEGFRKSSADALIDIGFDGYAVGGLAVGEGQEAMLGCLDFAPDQLPVDKPRYLMGVGKPDDIVGAVERGIDMFDCVMPTRSGRTGQAFTRTGPINIRNAKFAEDMGPLDPACPCPVCATWGRAYLHHLVRSGEMLGAMLMTEHNIWFYETLMADLRAAIASGTLTQFANDFRGVYARKSEGEPK

SEQ ID NO: 61010 - protein, 376 aa, Sphingomonas fennica
  misc_feature (1)..(376): tr|A0A2T4HPC2|A0A2T4HPC2_9SPHN Queuine tRNA-ribosyltran sferase OS=Sphingomonas fennica OX=114404 GN=tgt PE=3 S V=1
MTDRPRFQFSVAATDGAARTGTLAMRRGDIRTPAFMPVGTAATVKGMKPEGVRAIGADIILGNTYHLMLRPGAERMARLGGLHDFMQWDRPILTDSGGYQVMSLSDLAKITEEGVAFKSHLDGSRHMLTPERSMEIQRLLGADIVMAFDECTPFPATRDRAESSMERSMRWAKRSRDAFDAGGDHAASSALFGIQQGSMEEDLRRRSSEALTGIGFDGYAIGGLAVGEGQAEMFRVLDFAVDMLPADRPRYLMGVGKPDDIVGAVERGIDMFDCVLPTRSGRNGQAFTWDGPINIRNAKYAEDLAPIDPESPIAPWSRAYLHHLVKSGEMLGAMLMTEHNLWFYQRLMAELRAAIAEGRLTAFADGFRARYKGNKA

SEQ ID NO: 61011 - protein, 383 aa, Sphingomonas gei
  misc_feature (1)..(383): tr|A0A4S1XDZ0|A0A4S1XDZ0_9SPHN Queuine tRNA-ribosyltran sferase OS=Sphingomonas gei OX=1395960 GN=tgt PE=3 SV=1
MASSAPRFQFTIHATDGKARLGTITMQRGEIRTPAFMPVGTAATVKAVKPQDVRASGADILLGNTYHLMLRPTAERVHKLGGLHKFMGWDRPILTDSGGYQVMSLSELTKRSEEGIVFKSHLDGSRHMLSPERSMEIQRLLGSNIVMAFDELVPTTSPREVQAAAMERSMRWARRSRAGFDAGGDHAENNALFGIQQGALDESFRKASADALLDIGFDGYAIGGLAVGEGQEAMFGVLDYAPGQLDPVKPRYLMGVGKPDDVVGAVERGVDMFDCVLPTRSGRTGQAFTRTGPINIRNAKFAEDQGPLDPACACATCAGWSRAYVHHLVRAGEILGAMLMTEHNLWFYQQLMADLRSAIGDGRLTDFANAFRRDYRAVPKPLA

SEQ ID NO: 61012 - protein, 383 aa, Sphingomonas ginsenosidimutans
  misc_feature (1)..(383): tr|A0A2A4HZ22|A0A2A4HZ22_9SPHN Queuine tRNA-ribosyltran sferase OS=Sphingomonas ginsenosidimutans OX=862134 GN= tgt PE=3 SV=1
MSAPRFAFTIAATDGAARTGAIAMERGTIRTPAFMPVGTAATVKAMKPADVARAGADIILGNTYHLMLRPGAERVARLGGLHAFMGWERPILTDSGGYQVMSLSELTKRSEEGVAFASHLDGTRHLITPERSIEIQRLLGSNITMAFDELVPTTSTREVQAAAMERSMRWAKRSRDAFHDADGGVHAAHNAIFGIQQGALDEGLRKASADALIDIGFDGYAIGGLAVGEGQEAMFACLDYAPGQLPADRPRYLMGVGKPDDIVGAVERGVDMFDCVMPTRSGRTGQAFTRSGPINIRNARFNEDQGPLDPECGCAVCATWSRAYLHHLVRSGEILGAMLMTEHNIAFYEALMADLRAAIAEQRLAAFASGFRARYGAGKGGQG

SEQ ID NO: 61013 - protein, 377 aa, Sphingomonas ginsenosidivorax
  misc_feature (1)..(377): tr|A0A5C6UI68|A0A5C6UI68_9SPHN Queuine tRNA-ribosyltran sferase OS=Sphingomonas ginsenosidivorax OX=862135 GN=t gt PE=3 SV=1
MTPRFAFTIAATDGAARTGAIEMHRGTIRTPAFMPVGTAATVKAMKPRDVEAAGADIILGNTYHLMLRPGAERVARMGGLHGFMGWNRPILTDSGGYQVMSLADLTKRSEEGVAFKSHLDGTRHLLSPERSIEIQRLLGSDIVMAFDELVPTTSTREVQAAAMERSMRWARRSRAAFDSGAEHAAGAAIFGIQQGALDRTLRGDSAAALTDIGFDGYAVGGLAVGEGQDAMFGCLDFAPAQLPADKPRYLMGVGKPDDIVGAVERGIDMFDCVMPTRSGRTGQAFTRDGPINIRNAKFNEDPAPIDAACGCPTCATWSRAYLHHLVRAGEMLGAMLMTEHNIWFYETLMADLRAAIASGTLKTYADEFRLRYKRPAL

SEQ ID NO: 61014 - protein, 385 aa, Sphingomonas glacialis
  misc_feature (1)..(385): tr|A0A502G370|A0A502G370_9SPHN Queuine tRNA-ribosyltran sferase OS=Sphingomonas glacialis OX=658225 GN=tgt PE=3 SV=1
MNDKPRFDFTIHATDGKARTGEIAMRRGTIRTPAFMPVGTAATVKGVKPADVRATGADIILGNTYHLMLRPGAERVARLGGLHGFMGWDRPILTDSGGYQVMSLSDLTKRDENGVTFKSHLDGSRHTLSPERSIEIQRLLGSDIVMAFDELVPTTSTPEVQAAAMARSMRWAKRSRDAFDAGGVHAEGAAIFGIQQGALDQTLRGDSAGALIDIGFDGYAVGGLAVGEGQEAMFACLDFAPGQLPADKPRYLMGVGKPTDIVGAVERGIDMFDCVLPTRSGRTGQAFTRNGPLNIRNAKFAEDTGPLDPACGCPTCAHPEHGGSRAYLHHLVRSGEILGAMLMTEHNLWFYQAMMADLRAAIGEGRLKAFADAFRQAYDSHAERV

SEQ ID NO: 61015 - protein, 375 aa, Sphingomonas guangdongensis
  misc_feature (1)..(375): tr|A0A285R749|A0A285R749_9SPHN Queuine tRNA-ribosyltran sferase OS=Sphingomonas guangdongensis OX=1141890 GN=tg t PE=3 SV=1
MPPRFDFTITASDGRARTGIIATRRGEIRTPAFMPVGTAATVKAMKPADVRAGGADIILGNTYHLMLRPGAERVARLGGLHAFMRWDRPILTDSGGYQVMSLSELTTRSENGVAFRSHLDGSRHLLTPERSIEIQRLLGSTITMAFDELVPTTSPREVQAAAMERSMRWAKRSHDAFFGAEAHAADNAIFGIQQGALDEGLRRASADALTDIGFDGYAIGGLAVGEGQEAMFACLDYAPAQLPTGQPRYLMGVGKPDDIVGAVERGVDMFDCVLPTRSGRTGQAFTRNGPINIRNARFAEDQAPLDPASPTAGWSKGYLHHLVKSGEMLGAMLMTEHNLWFYQQLMADLRAAISAGRLAAFASAFRAAYRGGQGE

SEQ ID NO: 61016 - protein, 376 aa, Sphingomonas haloaromaticamans
  misc_feature (1)..(376): tr|A0A1S1HGY1|A0A1S1HGY1_9SPHN Queuine tRNA-ribosyltran sferase OS=Sphingomonas haloaromaticamans OX=653954 GN= tgt PE=3 SV=1
MTDRPRFQFSVAATDGAARTGTLAMRRGDIRTPAFMPVGTAATVKGMKPEGVRAIGADIILGNTYHLMLRPGAERMARLGGLHDFMQWDRPILTDSGGYQVMSLSDLAKITEEGVAFKSHLDGSRHMLTPERSMEIQRLLGSDIVMAFDECTPFPATRDRAESSMERSMRWAKRSRDAFDAGGDHAASSALFGIQQGSMEEDLRRRSSEALTGIGFDGYAIGGLAVGEGQAEMFRVLDFAVDMLPADRPRYLMGVGKPDDIVGAVERGIDMFDCVLPTRSGRNGQAFTWDGPINIRNAKYAEDLAPIDPESPIAPWSRAYLHHLVKSGEMLGAMLMTEHNLWFYQRLMAELRAAIAEGRLTAFADGFRARYKGNKA

SEQ ID NO: 61017 - protein, 377 aa, Sphingomonas hengshuiensis
  misc_feature (1)..(377): tr|A0A2W4Z8N3|A0A2W4Z8N3_9SPHN Queuine tRNA-ribosyltran sferase OS=Sphingomonas hengshuiensis OX=1609977 GN=tgt PE=3 SV=1
MAPRFAFTVTATSGRARTGTIAMRRGEIRTPAFMPVGTAATVKAMKPGDVRATGADILLGNTYHLMLRPSAERVARLGGLHAFMGWDRPILTDSGGYQVMSLSELTRRSEDGVEFKSHLDGTRHLMSPERSMEIQRLLDSDIVMAFDELVPTTATREVQARAMERSMRWARRSRAGFDSGGEHASRAALFGIQQGALDKGLRKASADALVDIGFDGYAVGGLAVGEGQEAMFGVLDYAPQQLPSDRPRYLMGVGKPDDIVGAVERGIDMFDCVLPTRSGRTGQAFTRHGPINIRNARFAEDVGPVDPDCACPVCHDHSRAYLHHLVRAGEILGAMLMTEHNLYFYQALMADLRAAIAGDTLTAFADDFRARYAGPAR

SEQ ID NO: 61018 - protein, 402 aa, Sphingomonas histidinilytica
  misc_feature (1)..(402): tr|A0A1T5A063|A0A1T5A063_9SPHN Queuine tRNA-ribosyltran sferase OS=Sphingomonas histidinilytica OX=439228 GN=tg t PE=3 SV=1
MPQGATERKPWQYGAAPLWPAAMTAPRFHFSIAATDGKARTGTIRMQRGDIRTPAFMPVGTAATVKAMKPADVRATGADIILGNTYHLMLRPGAERVARLGGLHRFMRWDRPILTDSGGYQVMSLSALTRRSEEGVSFKSHLDGSAHMLSPERSIEIQRLLGSDIVMAFDELVPTTTTVQQQAEAMERSMRWAKRSRDAFDAGGEHAGRAALFGIQQGALDEKLRKASADALLAIGFDGYAVGGLAVGEGQEAMFATLDFAPGQLDPDKPRYLMGVGKPDDIVGAVERGIDMFDCVLPTRSGRNGQAFTRRGPINLRNARFGEDERPLDESCACAVCGQFSRAYLHHLIRAGEILGAMLMTEHNLSFYQGLMEDLRAAIATGTLSSFAADFRAAYHGGGTGD

SEQ ID NO: 61019 - protein, 394 aa, Sphingomonas indica
  misc_feature (1)..(394): tr|A0A1X7FZH6|A0A1X7FZH6_9SPHN Queuine tRNA-ribosyltran sferase OS=Sphingomonas indica OX=941907 GN=tgt PE=3 SV =1
MRTFRCITHQGDSGLGRKDESLAERFSFSIRATDGAARTGTIAMRRGEIRTPAFMPVGTAATVKAMKPADVRAAGADIILGNTYHLMLRPGAERVAKLGGLHRFMGWDRPILTDSGGYQVMSLSELTKVSEEGVAFASHLDGSRYMLSPERSMEIQTLLGSDIVMAFDQLVKTTDTADAQQAAMERSTRWARRSRVAFDALGNEGALFGIQQGGLDEGWRRASADALIDIGFDGYAVGGLAVGEGQEAMFGCLDFAPGQLPADRPRYLMGVGKPDDIVGAVERGIDMFDCVLPTRSGRTGQAFTWSGPINIRNAKFAEDAAPIDADCACPVCATWSRAYLHHLVRSGEILGAMLMTEHNISFYQQLMAGLRDAIAESRLTAWADQFRARYRGGR

SEQ ID NO: 61020 - protein, 381 aa, Sphingomonas jatrophae
  misc_feature (1)..(381): tr|A0A1I6LCR3|A0A1I6LCR3_9SPHN Queuine tRNA-ribosyltran sferase OS=Sphingomonas jatrophae OX=1166337 GN=tgt PE= 3 SV=1
MTPDRPRFEFRLHKTDGKARLGTLALKRGDIRTPAFMPVGTAATVKAMKPQDVRATGADIILGNTYHLMLRPGAERVARLGGLHGFMGWDRPILTDSGGYQVMSLSELTKRSEEGVSFASHLDGSRHMMSPERSMEIQRLLGSDIVMAFDELVPTTSTREVQDAAMERSMRWAVRSREAFLSGHDHAQQAAQFGIQQGALDPELRGRSAEALLKLGFDGYAVGGLAVGEGQAAMFGVLDYAPDMLPADRPRYLMGVGKPDDIVGAVERGIDMFDCVLPTRSGRTGQAFTREGPINIRNARFAEDQGPLDPECACPVCKGWSRAYLHHLVRAGEILGAMLMTEHNLAFYQALMADLRAAIGAGTLTAFATTFRARYGAARGS

SEQ ID NO: 61021 - protein, 374 aa, Sphingomonas jeddahensis
  misc_feature (1)..(374): tr|A0A1V2ES01|A0A1V2ES01_9SPHN Queuine tRNA-ribosyltran sferase OS=Sphingomonas jeddahensis OX=1915074 GN=tgt P E=3 SV=1
MSTRFVFTIAATDGAARTGSIAMHRGTIRTPAFMPVGTAATVKAMKPKDVEAAGADIILGNTYHLMLRPGAERVARLGGLHRFMGWDRPILTDSGGYQVMSLSDLTKRSEEGITFKSHLDGTRHLLSPERSIEIQRLLGSNIVMAFDELVPTTSTREVQAAAMERSMRWAKRSRDAFDGGGDHAAQNAIFGIQQGALDQGFRKASADALIDIGFDGYAIGGLAVGEGQEAMFICLDFAPGQLPADKPRYLMGVGKPDDIVGAVERGVDMFDCVLPTRSGRTGQAFTRDGPINIRNARFNEDQGPLDPECGCPTCATWSRAYLHHLVRAGEILGAMLMTEHNIFFYEKLMADLRAAIAEGRLKAFADAFRARYQR

SEQ ID NO: 61022 - protein, 375 aa, Sphingomonas koreensis
  misc_feature (1)..(375): tr|A0A1L6J9Z3|A0A1L6J9Z3_9SPHN Queuine tRNA-ribosyltran sferase OS=Sphingomonas koreensis OX=93064 GN=tgt PE=3 SV=1
MPRFDFTIHATDGKARTGTIAMQRGEIRTPAFMPVGTAATVKAMKPQDVRASGADILLGNTYHLMLRPGAERVDRLGGLHGFMGWDRPILTDSGGYQVMSLSELTKRSEEGIVFKSHLDGTRHMLSPERSMEIQRLLGSNIVMAFDELVPTTSTREVQAAAMERSMRWARRSRQGFDAGGAHAQNNALFGIQQGALDEGLRKASADALLDIGFDGYAVGGLAVGEGQEAMFACLDYAPGQLDPAKPRYLMGVGKPDDIVGAVERGIDMFDCVLPTRSGRTGQAFTRQGPINIRNAKFAEDQGPLDPACACPTCGTFTRAYVHHLVRAGEILGAMLMTEHNLWFYQALMADLRAAIAQGRLTPFANDFRATYYGKG

SEQ ID NO: 61023 - protein, 375 aa, Sphingomonas koreensis
  misc_feature (1)..(375): tr|A0A2M8WA65|A0A2M8WA65_9SPHN Queuine tRNA-ribosyltran sferase OS=Sphingomonas koreensis OX=93064 GN=tgt PE=3 SV=1
MPRFDFTIHATDGKARTGTIAMQRGEIRTPAFMPVGTAATVKAMKPQDVRASGADILLGNTYHLMLRPGAERVDRLGGLHGFMGWDRPILTDSGGYQVMSLSELTKRSEEGIVFKSHLDGTRHMLSPERSMEIQRLLGSNIVMAFDELVPTTSTREVQAAAMERSMRWARRSRQGFDAGGAHAQNNALFGIQQGALDEGLRKASADALLDIGFDGYAVGGLAVGEGQEAMFACLDYAPGQLDPAKPRYLMGVGKPDDIVGAVERGIDMFDCVLPTRSGRTGQAFTRQGPINIRNAKFAEDQGPLDPACACPTCGTFTRAYVHHLVRAGEILGAMLMTEHNLWFYQALMADLRAAIGQGRLTAFANDFRATYYGKG

SEQ ID NO: 61024 - protein, 376 aa, Sphingomonas laterariae
  misc_feature (1)..(376): tr|A0A239EBF0|A0A239EBF0_9SPHN Queuine tRNA-ribosyltran sferase OS=Sphingomonas laterariae OX=861865 GN=tgt PE= 3 SV=1
MTDRPRFQFSVAATDGAARTGTISMRRGDIRTPAFMPVGTAGTVKGMKPADVRGIGADIILGNTYHLMLRPGAERMARLGGLHGFMRWERPILTDSGGYQVMSLSDLAKITEDGVAFKSHLDGSRHMITPERSMEIQRLLGSDIVMAFDECTPFPATRDRAASSMERSMRWAKRSRDGFDSGVDHAAGAALFGIQQGSMEEDLRRQSSQALLDIGFDGYAVGGLAVGEGQDEMFRVLDFAVDMLPTDKPRYLMGVGKPDDIVGAVERGIDMFDCVLPTRSGRNGQAFTWDGPINIRNAKFAEDLAPIDPESPIAPWSRAYLHHLVKSGEMLGAMLMTEHNLWFYQQLMAELRAAIAEGRLKAFADGFRARYKGNKA

SEQ ID NO: 61025 - protein, 378 aa, Sphingomonas melonis
  misc_feature (1)..(378): tr|A0A175Y2E3|A0A175Y2E3_9SPHN Queuine tRNA-ribosyltran sferase OS=Sphingomonas melonis TY OX=621456 GN=tgt PE= 3 SV=1
MSSRFAFTIAATDGRARTGTIQMQRGVIRTPAFMPVGTAATVKAMKPADVANAGADIILGNTYHLMLRPGAERVARLGGLHGFMGWDKPILTDSGGYQVMSLADLTKRSEEGVSFKSHLDGTRHLLSPERSIEIQRLLGSNIVMAFDELVPTTSTREVQAAAMERSMRWAKRSRDAFNSGGEHAENNAIFGIQQGALDEGLRKASADALIDIGFDGYAVGGLAVGEGQEAMFGCLDFAPGQLSQDKPRYLMGVGKPDDIVGAVERGIDMFDCVMPTRSGRTGQAFTRNGPINLRNAKFGEDQAPLDPTCGCPVCATWSRAYIHHLVRAGEILGAMLMTEHNIWFYEALMADLRAAIAAGELTSFANGFRAAYQRGKGE

SEQ ID NO: 61026 - protein, 378 aa, Sphingomonas melonis
  misc_feature (1)..(378): tr|A0A0D1JY87|A0A0D1JY87_9SPHN Queuine tRNA-ribosyltran sferase OS=Sphingomonas melonis OX=152682 GN=tgt PE=3 S V=1
MSSRFAFTIAATDGRARTGTIQMQRGVIRTPAFMPVGTAATVKAMKPADVANAGADIILGNTYHLMLRPGAERVARLGGLHGFMGWDKPILTDSGGYQVMSLADLTKRSEEGVSFKSHLDGTRHLLSPERSIEIQRLLGSNIVMAFDELVPTISTREVQAAAMERSMRWAKRSRDAFNSGGEHAENNAIFGIQQGALDESLRKASADALIDIGFDGYAVGGLAVGEGQEAMFGCLDFAPGQLPQDKPRYLMGVGKPDDIVGAVERGIDMFDCVMPTRSGRTGQAFTRNGPINLRNAKFGEDQAPLDPTCGCPVCATWSRAYIHHLVRAGEILGAMLMTEHNIWFYEALMADLRAAIAAGELTSFANGFRAAYQRGKGE

SEQ ID NO: 61027 - protein, 378 aa, Sphingomonas mucosissima
  misc_feature (1)..(378): tr|A0A245ZRN2|A0A245ZRN2_9SPHN Queuine tRNA-ribosyltran sferase OS=Sphingomonas mucosissima OX=370959 GN=tgt PE =3 SV=1
MTDRFAFTIAATDGAARTGSIAMHRGTIRTPAFMPVGTAATVKAMKPADVEAAGADIILGNTYHLMLRPGAERVARLGGLHRFMGWDKPILTDSGGYQVMSLSDLTKRSEEGITFKSHLDGTRHLLSPERSIEIQRLLGSNIIMAFDELVPTTSTREVQAAAMERSMRWAKRSRDAFDSGGEHAANNAIFGIQQGALDEGLRRTSADALIDIGFDGYAIGGLAVGEGQEAMFACLDFAPNQLPADRPRYLMGVGKPDDIVGAVERGVDMFDCVLPTRSGRTGQAFTRSGPINIRNARFNEDEGPLDPECACPTCATWSRAYLHHLVRAGEILGAMLMTEHNIFFYEKLMADLRAAIAEQRLKAFADAFRARYQRAKGE

SEQ ID NO: 61028 - protein, 382 aa, Sphingomonas naasensis
  misc_feature (1)..(382): tr|A0A4S1WKD6|A0A4S1WKD6_9SPHN Queuine tRNA-ribosyltran sferase OS=Sphingomonas naasensis OX=1344951 GN=tgt PE= 3 SV=1
MSLPRFQFTIHATDGKARLGTIAMQRGEIRTPAFMPVGTAATVKAVKPQDVRASGADILLGNTYHLMLRPSAERVHRLGGLHKFMGWDRPILTDSGGYQVMSLSELTKRSEEGIVFKSHLDGSRHMLSPERSMEIQRLLGSNIVMAFDELVPTTSTREVQAAAMERSMRWAKRSRAGFDAGGAHAESNALFGIQQGALDEGLRKASADALLDIGFDGYAIGGLAVGEGQEAMFGVLDYAPGQLDAARPRYLMGVGKPDDIVGAVERGVDMFDCVLPTRSGRTGQAFTRSGPINIRNAKFAEDQGPLDPACACPTCAGWSRAYVHHLVRAGEILGAMLMTEHNLYFYQQLMADLRAAIGEGRLAAFADAFRAAYRAAGDAPKA

SEQ ID NO: 61029 - protein, 378 aa, Sphingomonas olei
  misc_feature (1)..(378): tr|A0A4S4G438|A0A4S4G438_9SPHN Queuine tRNA-ribosyltran sferase OS=Sphingomonas olei OX=1886787 GN=tgt PE=3 SV= 1
MTDRFAFTIAATDGAARTGSIAMHRGTIRTPAFMPVGTAATVKAMKPADVEAAGADIILGNTYHLMLRPGAERVARLGGLHRFMGWNKPILTDSGGYQVMSLSDLTKRSEEGITFKSHLDGTRHLLSPERSIEIQRLLGSNIVMAFDELVPTTSTREVQAAAMERSMRWARRSRDAFDSGSDHAAQNAIFGIQQGALDEGLRRTSADALIDIGFDGYAIGGLAVGEGQEAMFACLDFAPGQLPPDRPRYLMGVGKPDDIVGAVERGIDMFDCVLPTRSGRTGQAFTRAGPINIRNARFNEDQGPLDPECGCPTCATWSRAYLHHLVRAGEILGAMLMTEHNIFFYETLMADLRSAIAEQRLKAFADAFRSRYQRGKGE

SEQ ID NO: 61030 - protein, 374 aa, Sphingomonas oleivorans
  misc_feature (1)..(374): tr|A0A2T5G010|A0A2T5G010_9SPHN Queuine tRNA-ribosyltran sferase OS=Sphingomonas oleivorans OX=1735121 GN=tgt PE =3 SV=1
MTDRPRFSYAISATDGRARTGVVSMKRGDIRTPAFMPVGTAATVKAMKPAEVRATGADIILGNTYHLMLRPGAERVARLGGLHDFMQWKRPILTDSGGYQVMSLSALTKTSEEGVAFKSHLDGSRHMLSPERSMEIQRLLGSDIVMAFDECTAYPCTRDKAAKSMERSMRWAKRSRDGFDAGGDHAACSALFGIQQGSMEEDLRRQSSDALRAIGFDGYAVGGLAVGEGQEEMFRVLDFAVDMLPADRPRYLMGVGKPDDIVGAVERGIDMFDCVLPTRSGRNGQAFTREGPLNIRNARFAEDQRPLEPDSPTANWSRAYLHHLVRSGEMLGAMLMTEHNLWFYQRLMEDLRAAIAEGRLAAFADDFRARYRRA

SEQ ID NO: 61031 - protein, 378 aa, Sphingomonas oligophenolica
  misc_feature (1)..(378): tr|A0A502CU90|A0A502CU90_9SPHN Queuine tRNA-ribosyltran sferase OS=Sphingomonas oligophenolica OX=301154 GN=tgt PE=3 SV=1
MTADRFAFTIAATDGAARTGSIAMRRGTIRTPAFMPVGTAATVKAMKPADVAAAGADIILGNTYHLMLRPGAERVARLGGLHDFMGWSKPILTDSGGYQVMSLADLTKRSEAGVSFKSHLDGSRHLLSPERSIEIQRLLDSDIVMAFDELVPTTSTRDVRAAAMERSMRWARRSRDAFDGGGEHPTRTAIFGIQQGALDEDLRRSSADALIEIGFDGYAVGGLAVGEGQEAMFACLDFAPGQLPADKPRYLMGVGKPDDIVGAVERGIDMFDCVMPTRSGRTGQAFTRTGPINIRNAKFAEDQIPLDPACDCPVCSTWTRAYLHHLVRAGEMLGAMLMTEHNVWFYEALMADLRHAIAAQALSSFANMFRERYRGTKE

SEQ ID NO: 61032 - protein, 381 aa, Sphingomonas panacis
  misc_feature (1)..(381): tr|A0A1B3Z5Y7|A0A1B3Z5Y7_9SPHN Queuine tRNA-ribosyltran sferase OS=Sphingomonas panacis OX=1560345 GN=tgt PE=3 SV=1
MTAPRFEFTISATDGKARTGTIQMRRGEIRTPAFMPVGTAATVKAMKPADVRAAGADIILGNTYHLMLRPGAERVARLGGLHRFMGWDRPILTDSGGYQVMSLSDLTKRDENGVTFKSHLDGTRHTLSPERSIEIQRLLGSDIVMAFDELVPTTSTPEVQAAAMARSMRWAKRSRDAFDGGGEHAENAAIFGIQQGALDQTLRGDSAATLIDIGFDGYAVGGLAVGEGQEAMFGCLDFAPGQLPADKPRYLMGVGKPDDIVGAVERGIDMFDCVLPTRSGRTGQAFTREGPINLRNAKFAEDTGPLDPACACPVCATWNRAYIHHLVRAGEILGAMLMTEHNLYFYQALMADLRDATAAGTLTAFADRFRSEYGRHKERVT

SEQ ID NO: 61033 - protein, 376 aa, Sphingomonas parapaucimobilis
  misc_feature (1)..(376): tr|A0A0A1WBQ4|A0A0A1WBQ4_9SPHN Queuine tRNA-ribosyltran sferase OS=Sphingomonas parapaucimobilis NBRC 15100 OX= 1219049 GN=tgt PE=3 SV=1
MTARFSFSIHATDGRARTGTITMKRGEIRTPAFMPVGTAATVKAMKPGDVRASGADIILGNTYHLMLRPGAERVNRLGGLHGFMGWDRPILTDSGGYQVMSLAELTKRSEDGVAFKSHLDGTRHLLSPERSIEIQRLLGSNIVMAFDELVPTTSTREVQASAMERSMRWAKRSRDAFDAGGQHAEDNAIFGIQQGALDEGFRKASADALIDIGFDGYAIGGLAVGEGQEAMFGCLDFAPGQLPVEKPRYLMGVGKPTDIVGAVERGVDMFDCVLPTRSGRTGQAFTRQGPINIRNARFTEDQGPLDPACGCPVCSTWSRAYLHHLVRAGEILGAMLMTEHNIWFYQQMMADLRAAIVEGRLTAFADDFRARYAAGQ

SEQ ID NO: 61034 - protein, 376 aa, Sphingomonas paucimobilis
  misc_feature (1)..(376): tr|A0A0C9MMQ1|A0A0C9MMQ1_SPHPI Queuine tRNA-ribosyltran sferase OS=Sphingomonas paucimobilis NBRC 13935 OX=1219 050 GN=tgt PE=3 SV=1
MTARFSFAIHATDGRARTGTITMKRGEIRTPAFMPVGTAATVKAMKPGDVRASGADIILGNTYHLMLRPGAERVNRLGGLHGFMGWDRPILTDSGGYQVMSLAELTKRSEDGVAFKSHLDGTRHLLSPERSIEIQRLLGSNIVMAFDELVPTTSTREVQASAMERSMRWAKRSRDAFDAGGQHAEDNAIFGIQQGALDEGFRKASADALIDIGFDGYAIGGLAVGEGQEAMFGCLDFAPGQLPASKPRYLMGVGKPTDIVGAVERGVDMFDCVLPTRSGRTGQAFTRQGPINIRNARFAEDQGPLDPACGCPVCATWSRAYLHHLVRAGEILGAMLMTEHNIWFYQQMMADLRAAIGEGRLTAFADDFRARYAAGH

SEQ ID NO: 61035 - protein, 376 aa, Sphingomonas paucimobilis
  misc_feature (1)..(376): tr|A0A031JIH7|A0A031JIH7_SPHPI Queuine tRNA-ribosyltran sferase OS=Sphingomonas paucimobilis OX=13689 GN=tgt PE =3 SV=1
MTQNRFSFTIAATDGKARTGSIQMRRGDIRTPAFMPVGTAATVKAMRPAEVRAAGADIILGNTYHLMLRPGAERVARLGGLHGFMGWDRPILTDSGGYQVMSLSALTKMSEEGVAFASHIDGSRHMLTPERSMEIQRLLDSDIVMAFDECTRNGCTHEEAGHSMERSMRWAKRSRDAFDQGGDHAERAALFGIQQGSLNEDLRRVSAEKLIEIGFDGYAVGGLAVGEGQEAMFACLDYAPGMLPAGKPRYLMGVGKPDDIVGAVERGIDMFDCVLPTRSGRNGQAFTWAGPLNIRNARFAEDLSPLDPRCGCPVCATWSRAYLHHLVKAGEMLGAMLMTQHNISFYQALMQAIRDSIAQGRFAAFAAEFREGYRRA

SEQ ID NO: 61036 - protein, 376 aa, Sphingomonas pokkalii
  misc_feature (1)..(376): tr|A0A2U0SEY0|A0A2U0SEY0_9SPHN Queuine tRNA-ribosyltran sferase OS=Sphingomonas pokkalii OX=2175090 GN=tgt PE=3 SV=1
MPRFQFTIHATDGKARRGTIAMQRGEIRTPAFMPVGTAATVKAVKPQDVRASGADILLGNTYHLMLRPTAERVARLGGLHKFMGWDRPILTDSGGYQVMSLSELTKRSEEGVAFASHLDGSRHMMSPERSMEIQRLLGSDIVMAFDELVPTTSTREVQAKAMERSMRWAKRSRAGFDSGEEHAARAALFGIQQGALDEGLRKASADALKDIGFDGYAVGGLAVGEGQEAMFGVLDYAPGQLDETKPRYLMGVGKPDDIVGAVERGIDMFDCVLPTRSGRTGQAFTRGGPINIRNAKFAEDQGPLDPACSCPVCSTWSRAYLHHLVRAGEILGAMLMTEHNLWFYQNLMADLRAAIEEQRLTAFANDFRAKYQVKQG

SEQ ID NO: 61037 - protein, 379 aa, Sphingomonas rubra
  misc_feature (1)..(379): tr|A0A1I5QIP8|A0A1I5QIP8_9SPHN Queuine tRNA-ribosyltran sferase OS=Sphingomonas rubra OX=634430 GN=tgt PE=3 SV= 1
MTRFGFRIDATDGRARTGVIDTLRGAIRTPAFMPVGTAATVKAMKPADVRASGADIILGNTYHLMLRPGAERVAKLGGLHRLMGWDRPILTDSGGYQVMSLADLTKRSEEGVSFKSHLDGSRHLLSPERSIEIQRLLGSTIVMAFDELVPTTSSREVQAAAMERSMRWARRSRAAFDAGGDHAANNAIFGIQQGALDEGLRKSSADALIDIGFDGYAVGGLAVGEGQEAMFACLDFAPGQLPADKPRYLMGVGKPTDIVGAVERGIDMFDCVLPTRSGRTGQAFTRAGPLNLRNARFAEDDGPLDPACPCPVCATWSRAYLHHLVRSQEILGAMLMTEHNIWFYQVMMADLRAAIAEGRLAAFADAFRASYAGEQGERR

SEQ ID NO: 61038 - protein, 376 aa, Sphingomonas sanguinis
  misc_feature (1)..(376): tr|A0A147I9L6|A0A147I9L6_9SPHN Queuine tRNA-ribosyltran sferase OS=Sphingomonas sanguinis OX=33051 GN=tgt PE=3 SV=1
MTARFSFAIHATDGRARTGTITMKRGEIRTPAFMPVGTAATVKAMKPGDVRASGADIILGNTYHLMLRPGAERVNRLGGLHGFMGWDRPILTDSGGYQVMSLAELTKRSEDGVAFKSHLDGTRHLLSPERSIEIQRLLGSNIVMAFDELVPTTSTREVQASAMERSMRWAKRSRDAFNAGGQHAEDNAIFGIQQGALDEGFRKSSADALIDIGFDGYAIGGLAVGEGQEAMFGCLDFAPSQLPVEKPRYLMGVGKPTDIVGAVERGVDMFDCVLPTRSGRTGQAFTRQGPINIRNARFAEDQGPLDPACGCPVCATWSRAYLHHLVRAGEILGAMLMTEHNIWFYQQMMADLRAAIAEGRLTAFADDFRSRYAAGQ

SEQ ID NO: 61039 - protein, 383 aa, Sphingomonas sanguinis
  misc_feature (1)..(383): tr|A0A147J5J9|A0A147J5J9_9SPHN Queuine tRNA-ribosyltran sferase OS=Sphingomonas sanguinis OX=33051 GN=tgt PE=3 SV=1
MTARFSFAIHATDGRARTGTITMKRGEIRTPAFMPVGTAATVKAMKPGDVRASGADIILGNTYHLMLRPGAERVNRLGGLHGFMGWDRPILTDSGGYQVMSLAELTKRSEDGVAFKSHLDGTRHLLSPERSIEIQRLLGSNIVMAFDELVPTTSTREVQASAMERSMRWAKRSRDAFNAGGQHAEDNAIFGIQQGALDEGFRKSSADALIDIGFDGYAIGGLAVGEGQEAMFGCLDFAPGQLPVEKPRYLMGVGKPTDIVGAVERGVDMFDCVLPTRSGRTGQAFTRQGPINIRNARFAEDQGPLDPACGCPVCATWSRAYLHHLVRAGEILGAMLMTEHNIWFYQQMMADLRAAITEGRLTAFADDFRARYAAREQSGRVGE

SEQ ID NO: 61040 - protein, 373 aa, Sphingomonas sanxanigenens
  misc_feature (1)..(373): tr|A0A2W5C7E7|A0A2W5C7E7_9SPHN Queuine tRNA-ribosyltran sferase OS=Sphingomonas sanxanigenens OX=397260 GN=tgt PE=3 SV=1
MTDRFSFSIAATDGAARTGVISMRRGDIRTPAFMPVGTAGTVKAVKPADVRAAGADIILGNTYHLMLRPGAERVARLGGLHGFMGWDRPILTDSGGYQVMSLSDLTKVSEEGVSFKSHLDGSRHMLSPERSMEIQRLLGSDIVMAFDELVPTTATREVQAAAMERSMRWARRSREGFDAGGAHAEGAALFGIQQGALDEGLRRASADALRDIGFDGYAIGGLAVGEGQEAMFGVLDYAPAMLPVDRPRYLMGVGKPDDIVGAVERGVDMFDCVMPTRSGRTGQAFTWDGPINIRNARFAEDQSPLDPESPVAGWSKAYIHHLVRSNEILGAMLMTEHNLWFYQRLMQHLRDAIAEGGLKAFADSFRARYLGGR

SEQ ID NO: 61041 - protein, 373 aa, Sphingomonas sanxanigenens
  misc_feature (1)..(373): tr|W0ANS5|W0ANS5_9SPHN Queuine tRNA-ribosyltransferase OS=Sphingomonas sanxanigenens DSM 19645 = NX02 OX=11232 69 GN=tgt PE=3 SV=1
MTERFSFSITATDGAARTGSIQMLRGEIRTPAFMPVGTAATVKAMKPEAVRAIGADIILGNTYHLMLRPGAERMDRLGGLHDFMQWDRPILTDSGGYQVMSLSALTKKTEEGVAFRSHLDGSRHMLTPERSMEIQRLLGSDIVMAFDECTSFPATWEEAKASMERSMRWAQRSRDGFDSGGAHAARSALFGIQQGSMFRDLRQISSDALMAVGFDGYAVGGLAVGEGQETMFGVLDYAPAMLPADRPRYLMGVGKPDDIVGAVERGIDMFDCVLPTRSGRNGQAFTWDGPVNIRNAKYAEDRTPIDPDSPIGGWSRAYLHHLVKSGEMLGAMLMTEHNLWFYQQVMAGLRGAIAEGRLTAWADAFRRRYRGGK

SEQ ID NO: 61042 - protein, 379 aa, Sphingomonas sp.
  misc_feature (1)..(379): tr|A0A2U1G318|A0A2U1G318_9SPHN Queuine tRNA-ribosyltran sferase OS=Sphingomonas sp. URHD0007 OX=1298856 GN=tgt PE=3 SV=1
MAREVTRFAFTIAATDGAARTGKIAMERGEICTPAFMPVGTAATVKAMRPEEVRASGADIILGNTYHLMLRPGAERVAKLGGLHAFMGWERLILTDSGGYQVMSLSELTKVSEDGVAFASHLDGSRHMLSPERSIEVQRLLGSDVVMAFDQLVPTTSTAEQQREAMERSMRWAKRSKDEFDRGGEHAERSALFGIQQGALDQPLRRASADALIDIGFDGYAVGGLAVGEGQEAMLGCLDFAVPMLPADKARYLMGVGKPDDVVEAVVRGIDMFDCVLPTRSGRTGQAFTADGPLNLRNARFAEDADPIESGCTCPACTTFSRAYVHHLVKSGEILGAMLMTQHNLWFYQRLMQGLREAIAEQRLSAFATTFLDRYRGAR

SEQ ID NO: 61043 - protein, 375 aa, Sphingomonas sp.
  misc_feature (1)..(375): tr|A0A258RGE4|A0A258RGE4_9SPHN Queuine tRNA-ribosyltran sferase OS=Sphingomonas sp. 28-62-11 OX=1970432 GN=tgt PE=3 SV=1
MNERFAFTIAATDGRARTGQIAMQRGIIRTPAFMPVGTAATVKAMKPADVRASGADIILGNTYHLMLRPGAERVAKLGGLHGFMGWDRPILTDSGGYQVMSLSDLTTRSEDGVTFKSHLDGSRHTLSPERSIEIQRLLGSDIVMAFDELVPTTSTPEVQQAAMARSMRWAKRSRAAFDGGGAHAERAAIFGIQQGALDERLRKASADALIEIGFDGYAVGGLAVGEGQPAMFACLDFAPGQLPEDKPRYLMGVGKPDDIVGAVERGIDMFDCVLPTRSGRTGQAFTRHGAINICNAKFAEDLGPIDPSCACPVCKGWSRAYLHHLVRSAEILGAMLMTEHNLWFYETLMDDLRRAIAEQRLTSFAQGFRTDYAGA

SEQ ID NO: 61044 - protein, 386 aa, Sphingomonas spermidinifaciens
  misc_feature (1)..(386): tr|A0A2A4B333|A0A2A4B333_9SPHN Queuine tRNA-ribosyltran sferase OS=Sphingomonas spermidinifaciens OX=1141889 GN =tgt PE=3 SV=1
MTPPRFTFTIHATDGRARLGEIAMRRGTIRTPAFMPVGTAATVKAMKPADVRASGADILLGNTYHLMLRPSAERVARLGGLHGFMGWDRPILTDSGGYQVMSLAELTSRSEEGVAFKSHLDGSRHLISPERSMEIQRLLGSDIVMAFDELVPTTSTREVQAAAMERSMRWAQRSRDAFDAGGDHAAGAALFGIQQGALDEGLRKASADALKAIEFDGYAVGGLAVGEGQEAMFGVLDYAPGQLDAARPRYLMGVGKPDDIVGAVERGIDMFDCVLPTRSGRTGQAFTRAGPINIRNARFAEDQGPLDPACPCPVCATWSRAYLHHLVRAGEILGAMLMTEHNLWFYQTLMADLRAAIGAGTLRDFASAFRATYYAERPATAGVSKG

SEQ ID NO: 61045 - protein, 383 aa, Sphingomonas taxi
  misc_feature (1)..(383): tr|A0A2W4YZJ0|A0A2W4YZJ0_9SPHN Queuine tRNA-ribosyltran sferase OS=Sphingomonas taxi OX=1549858 GN=tgt PE=3 SV= 1
MTTRPRFDFTISATDGKARTGVIAMQRGDIRTPAFMPVGTAATVKGMKPADVVGAGADIILGNTYHLMLRPGAERVARLGGLHAFSGWSKPILTDSGGYQVMSLADLTKRSEEGVSFKSHLDGTRHLLSPERSIEIQRLLGSNIVMAFDELVPTTSTREVQAAAMERSMRWAKRSRAAFDGGEEHAENNAIFGIQQGALNEDFRKSSADALIDIGFDGYAVGGLAVGEGQEAMFGCLDFAPDQLPVDKPRYLMGVGKPDDIVGAVERGIDMFDCVMPTRSGRTGQAFTRTGPINIRNAKFAEDMGPLDPACPCPVCATWGRAYLHHLVRSGEMLGAMLMTEHNIWFYETLMADLRAAIAAGTLTQFANDFRAVYARKSEGEPK

SEQ ID NO: 61046 - protein, 381 aa, Sphingomonas taxi
  misc_feature (1)..(381): tr|A0A2W5PB60|A0A2W5PB60_9SPHN Queuine tRNA-ribosyltran sferase OS=Sphingomonas taxi OX=1549858 GN=tgt PE=3 SV= 1
MTAPRFAFAIHATDGAARTGAITMQRGVIRTPAFMPVGTAATVKAMKPADVERAGADIILGNTYHLMLRPGAERVARLGGLHRFMGWNRPILTDSGGYQVMSLSALTKRSEEGVAFASHLDGTRHLITPERSIEIQRLLGSNIVMAFDELVPTTSTREVQAAAMERSMRWARRSRDAFDAGGDHAAANAIFGIQQGALDEGLRRVSADALVDIGFDGYAIGGLAVGEGQAAMFGCLDYAPAQLPADRPRYLMGVGKPDDIVGAVERGVDMFDCVMPTRSGRTGQAFTRTGPINIRNARFAEDQGPLDPECACAVCATWTRAYVHHLVRAGEMLGAMLMTEHNIAFYEALMADLRAAIADGRLTAFANGFRGRYAGGKGETM

SEQ ID NO: 61047 - protein, 376 aa, Sphingomonas trueperi
  misc_feature (1)..(376): tr|A0A543LVH5|A0A543LVH5_9SPHN Queuine tRNA-ribosyltran sferase OS=Sphingomonas trueperi OX=53317 GN=tgt PE=3 S V=1
MPRFQFTIHATDGKARRGTIAMQRGEIRTPAFMPVGTAATVKAVKPQDVRASGADILLGNTYHLMLRPTAERVARLGGLHKFMGWDRPILTDSGGYQVMSLSELTKRSEEGVAFASHLDGSRHMMSPERSMEIQRLLGSDIVMAFDELVPTTSTREVQAKAMERSMRWAKRSRAGFDSGEEHAARAALFGIQQGALDEGLRKASADALKDIGFDGYAVGGLAVGEGQEAMFGVLDYAPGQLDETKPRYLMGVGKPDDIVGAVERGIDMFDCVLPTRSGRTGQAFTRTGPINIRNAKFAEDQGPLDPTCACPVCSTWSRAYMHHLVRAGEILGAMLMTEHNLWFYQTLMADLRAAIEEQRLTAFANDFRAKYQATKA

SEQ ID NO: 61048 - protein, 377 aa, Sphingomonas turrisvirgatae
  misc_feature (1)..(377): tr|A0A1E3LZY9|A0A1E3LZY9_9SPHN Queuine tRNA-ribosyltran sferase OS=Sphingomonas turrisvirgatae OX=1888892 GN=tg t PE=3 SV=1
MLPRFDFTIAATDGKARTGVIAMRRGEIRTPAFMPVGTAATVKAMKQQDVRASGADIILGNTYHLMLRPGAERVHRLGGLHGFMGWDRPILTDSGGYQVMSLSELTKRSEDGIVFKSHLDGSRHLLSPERSMEIQRLLGSNIVMAFDELVPTTSTREVQAAAMERSMRWARRSRAGFDAGGEHAEHNAIFGIQQGALDEGLRQWSADALLDIGFDGYAVGGLAVGEGQEAMFACLDYAPGQLDAAKPRYLMGVGKPDDIVGAVERGIDMFDCVLPTRSGRTGQAFTARGPVNIRNARHAEDQGPLDPSCPCPTCSTYSRAYLHHLVRAGEILGAMLMTEHNLWFYQQLMAGLRGAIAAGRLTEHANAFRAAYYGGEG

SEQ ID NO: 61049 - protein, 414 aa, Sphingomonas wittichii
  misc_feature (1)..(414): tr|A0A1X9UM10|A0A1X9UM10_SPHSD Queuine tRNA-ribosyltran sferase OS=Sphingomonas wittichii (strain DC-6 / KACC 1 6600) OX=1283312 GN=tgt PE=3 SV=1
MDRPCRRARRSASPRAQALPGPWQCGAAPLWPAAMTAPRFHFSIAATDGKARTGTIRMQRGDIRTPAFMPVGTAATVKAMKPADVRATGADIILGNTYHLMLRPGAERVARLGGLHRFMRWDRPILTDSGGYQVMSLSALTRRSEEGVSFKSHLDGSAHMLSPERSIEIQRLLGSDIVMAFDELVPTTTTMQQQAEAMERSMRWAKRSRDAFDAGGEHAQRAALFGIQQGALDERLRKASADALLAIGFDGYAVGGLAVGEGQEAMFATLDFAPGQLDPAKPRYLMGVGKPDDIVGAVERGIDMFDCVLPTRSGRNGQAFTRRGPINLRNARFGEDERPLDESCACPVCGQFSRAYIHHLIRAGEILGAMLMTEHNLSFYQALMADLRAAIAAGTLSAFAADFRAAYHGGGAGD

SEQ ID NO: 61050 - protein, 414 aa, Sphingomonas wittichii
  misc_feature (1)..(414): tr|A5V2I8|A5V2I8_SPHWW Queuine tRNA-ribosyltransferase OS=Sphingomonas wittichii (strain RW1 / DSM 6014 / JCM 10273) OX=392499 GN=tgt PE=3 SV=1
MDRPCRRARRSASPRARALPGPWQCGAAPLWPAAMTAPRFHFSIAATDGKARTGTIRMQRGDIRTPAFMPVGTAATVKAMKPADVRATGADIILGNTYHLMLRPGAERVARLGGLHRFMRWDRPILTDSGGYQVMSLSALTRRSEEGVSFKSHLDGSAHMLSPERSIEIQRLLGSDIVMAFDELVPTTTTMQQQAEAMERSMRWAKRSRDAFDAGGEHAQRAALFGIQQGALDERLRKASADALLAIGFDGYAVGGLAVGEGQEAMFATLDFAPGQLDPAKPRYLMGVGKPDDIVGAVERGIDMFDCVLPTRSGRNGQAFTRRGPINLRNARFGEDERPLDESCACPVCGQFSRAYIHHLIRAGEILGAMLMTEHNLSFYQALMADLRAAIAAGTLSAFAADFRAAYHGGGAGD

SEQ ID NO: 61051 - protein, 376 aa, Sphingomonas yabuuchiae
  misc_feature (1)..(376): tr|A0A147ILJ3|A0A147ILJ3_9SPHN Queuine tRNA-ribosyltran sferase OS=Sphingomonas yabuuchiae OX=172044 GN=tgt PE= 3 SV=1
MTARFSFAIHATDGRARTGTITMKRGEIRTPAFMPVGTAATVKAMKPGDVRASGADIILGNTYHLMLRPGAERVDRLGGLHGFMGWDRPILTDSGGYQVMSLAELTKRSEDGVAFKSHLDGTRHLLSPERSIEIQRLLGSNIVMAFDELVPTTSTREVQASAMERSMRWAKRSRDAFDAGGQHAEDNAIFGIQQGALDEGFRKSSADALIDIGFDGYAIGGLAVGEGQEAMFGCLDFAPGQLPVEKPRYLMGVGKPTDIVGAVERGVDMFDCVLPTRSGRTGQAFTRQGPINIRNARFAEDQGPLDPACGCPVCGTWSRAYLHHLVRAGEILGAMLMTEHNIWFYQQMMADLRAAIGEGRLTAFADDFRSRYAAGQ

SEQ ID NO: 61052 - protein, 375 aa, Sphingopyxis alaskensis
  misc_feature (1)..(375): sp|Q1GR26|TGT_SPHAL Queuine tRNA-ribosyltransferase OS= Sphingopyxis alaskensis (strain DSM 13593 / LMG 18877 / RB2256) OX=317655 GN=tgt PE=3 SV=1
MKPRFAFSISATDGAARAGVIAMQRGEIRTPAFMPVGTAATVKAMRPAEVRAAGADIILGNTYHLMLRPTAERMARFGGLHKFMGWDRPILTDSGGYQVMSLSALTKQSEEGVAFKSHLDGSRHMLTPERSMEIQRLLGSDIVMAFDECPPAGVDARRAEASMERSMRWAARSRAGFDAGEEHAARSALFGIQQGSLDEKLRARSAATLIDIGFDGYAIGGLAVGEGQAAMFGVLDFAPAQLPADRPRYLMGVGKPDDLVGAVARGVDMFDCVLPTRSGRNGQAFTWDGPLNIRNAKFADDQEPLDASCGCPVCTIWSRGYLHHLVRAGEMLGAMLMTQHNIHFYQDLMQAMRDAITTGRFAAFRSDFAARYRRA

SEQ ID NO: 61053 - protein, 374 aa, Sphingopyxis bauzanensis
  misc_feature (1)..(374): tr|A0A246K3T3|A0A246K3T3_9SPHN Queuine tRNA-ribosyltran sferase OS=Sphingopyxis bauzanensis OX=651663 GN=tgt PE =3 SV=1
MTDRFTFSIAATDGAARTGTIAMQRGEIRTPAFMPVGTAATVKAMRPAEVRATGADIILGNTYHLMLRPTAERMARLGGLHNFMGWDRPILTDSGGYQVMSLSALTKQSEEGVAFKSHLDGSKHMLTPERSMEIQRLLGSDIVMAFDECPPNGVDAKRAEASMERSMRWAARSRAGFDAGGEHAARSALFGIQQGSLDEKLRARSAAALIDIGFDGYAIGGLAVGEGQAAMFGVLDYAPAQLPADRPRYLMGVGKPDDLVGAVARGVDMFDCVLPTRSGRNGQAFTWDGPINIRNAKFAEDQAPLDVSCDCPVCTTWSRAYLHHLVRSGEMLGAMLMTQHNLHFYQALMQAMRDAIGAGTFAAFQRGFEARYQR

SEQ ID NO: 61054 - protein, 374 aa, Sphingopyxis flava
  misc_feature (1)..(374): tr|A0A1T5DH56|A0A1T5DH56_9SPHN Queuine tRNA-ribosyltran sferase OS=Sphingopyxis flava OX=1507287 GN=tgt PE=3 SV =1
MTDRFAFQLAATDGAARTGVIRMMRGEIRTPAFMPVGTAATVKAMRPAEVRATGADIILGNTYHLMLRPGAERMARLGGLHGFMGWDRPILTDSGGYQVMSLAALTKQSEEGVTFKSHLDGSRHMLTAERSMEIQRLLGSDIVMAFDECPPAGVDAKRAEASMERSMRWAARSRAGFEAGEEHASRSALFGIQQGSLDEKLRARSAAALVDIGFDGYAIGGLAVGEGQEAMFAVLDFAPAQLPADKPRYLMGVGKPDDLVGAVARGVDMFDCVLPTRSGRNGQAFTWEGPVNIRNAKHAEDPGPLDASCACPVCTTWSRAYLHHLVRAGEMLGAMLMTEHNLHFYQALMQAMRDSIAAGRFSAFQADFETRYRR

SEQ ID NO: 61055 - protein, 373 aa, Sphingopyxis fribergensis
  misc_feature (1)..(373): tr|A0A0A7PI97|A0A0A7PI97_9SPHN Queuine tRNA-ribosyltran sferase OS=Sphingopyxis fribergensis OX=1515612 GN=tgt PE=3 SV=1
MTRFAFSIAAADGAARTGVIRMQRGEIRTPAFMPVGTAATVKAMRPAEVRATGADIILGNTYHLMLRPTAERMARLGGLHKFMGWDRPILTDSGGYQVMSLSALTKQSEEGVAFQSHLDGSRHMLTPERSMEIQRLLGSDIVMAFDECPPNGVDAKRAEASMERSMRWAARSRAGFDTGEEHAERSALFGIQQGSLDETLRGRSAAALTDIGFDGYAIGGLAVGEGQEAMFGVLDYAPAQLPADKPRYLMGVGKPDDLVGAVARGVDMFDCVLPTRSGRNGQAFTRDGPLNIRNAKFAEDEAPLDADCHCPVCTTWSRAYLHHLVRSGEMLGAMLMTQHNLHFYQDLMQGMRDAIGAGTFAVFQRDFEARYKR

SEQ ID NO: 61056 - protein, 374 aa, Sphingopyxis granuli
  misc_feature (1)..(374): tr|A0A120LTY7|A0A120LTY7_9SPHN Queuine tRNA-ribosyltran sferase OS=Sphingopyxis granuli OX=267128 GN=tgt PE=3 S V=1
MTDRFAFTVAATDGPARTGVIRMARGEIRTPAFMPVGTAATVKAMRPAEVRASGADIILGNTYHLMLRPGAERMARLGGLHDFMDWERPILTDSGGYQVMSLSALTKQSEEGVAFKSHLDGSRHLLTPERSMEIQRLLGSDIVMAFDECPPAGVDAKRAEASMERSMRWAARSRAGFDAGEAHAARAALFGIQQGSLDERLRKRSAEALIDIGFDGYAIGGLAVGEGQAAMFGVLDFAPAQLPADRPRYLMGVGKPDDLVGAVARGVDMFDCVLPTRSGRNGQAFTWDGPVNIRNAKHAEDLGPLDTSCGCPVCTTWSRAYLHHLVRAGEMLGAMLMTQHNLHFYQALMQAMRDAIAAGRFAAFQTGFTARYRK

SEQ ID NO: 61057 - protein, 374 aa, Sphingopyxis indica
  misc_feature (1)..(374): tr|A0A239H3P3|A0A239H3P3_9SPHN Queuine tRNA-ribosyltran sferase OS=Sphingopyxis indica OX=436663 GN=tgt PE=3 SV =1
MTTRFAFSIAATDGAARTGTIRMMRGDIRTPAFMPVGTAATVKAMRPDEVRATGADIILGNTYHLMLRPGAERVARLGGLHGFMGWERPILTDSGGYQVMSLSALTRQSEEGVAFQSHLDGSRHMLTPERSMEIQRLLGSDIVMAFDECPPNGVDAKRAEASMERSMRWAARSRAGFDAGEDHAARSALFGIQQGSLDEALRQRSADALIDIGFDGYAIGGLAVGEGQEAMFGVLDYAPAQLPAGKPRYLMGVGKPDDLVGAVARGVDMFDCVLPTRSGRNGQAFTWNGPVNIRNARHAEDPGPLDAACDCPVCSSWSRAYLHHLVRSGEMLGAMLMTQHNLHFYQALMQAMREAIAAGRFKEFQSDFAARYRR

SEQ ID NO: 61058 - protein, 374 aa, Sphingopyxis lindanitolerans
  misc_feature (1)..(374): tr|A0A2S8B6X1|A0A2S8B6X1_9SPHN Queuine tRNA-ribosyltran sferase OS=Sphingopyxis lindanitolerans OX=2054227 GN=t gt PE=3 SV=1
MTDRFTFQLAATDGAARTGVIRMARGDIRTPAFMPVGTAATVKAMRPADVRATGADIILGNTYHLMLRPGAERMARLGGLHDFMGWDRPILTDSGGYQVMSLSALTKQSEEGVTFKSHLDGSRHVLTPERSMEIQRLLGSDIVMAFDECPPNGVDAKRAEASMERSMRWAARSRAGFDAGGEHASRAALFGIQQGSLDERLRARSAAALTDIGFDGYAIGGLAVGEGQEAMFAVLDYAPGQLPADRPRYLMGVGKPDDLVGAVARGVDMFDCVLPTRSGRNGQAFTWDGPVNIRNAKHAEDLGPLDAACDCPVCTIWSRAYLHHLVRAGEMLGAMLMTQHNLHFYQALMQAMRDAITTGRFAAFQKDFAARYRK

SEQ ID NO: 61059 - protein, 374 aa, Sphingopyxis macrogoltabida
  misc_feature (1)..(374): tr|A0A0N9URI2|A0A0N9URI2_SPHMC Queuine tRNA-ribosyltran sferase OS=Sphingopyxis macrogoltabida OX=33050 GN=tgt PE=3 SV=1
MTDRFAFRVAATDGAARTGVIAMRRGEIRTPAFMPVGTAATVKAMRPAEVRATGADIILGNTYHLMLRPGAERMARLGGLHNFMGWDRPILTDSGGYQVMSLSALTKQSEEGVAFKSHLDGSRHMLTPERSMEIQRLLGSDIVMAFDECPPNGVDAKRAEASMERSMRWAARSRAGFDAGVEHAERAALFGIQQGSLDETLRARSAAALTDIGFDGYAIGGLAVGEGQEAMFGVLDYAPGQLPADKPRYLMGVGKPDDLVGAVARGVDMFDCVLPTRSGRNGQAFTWDGPVNIRNAKHAEDMAPLDADCYCPVCMTWSRAYLHHLVRAGEMLGAMLMTQHNLHFYQALMQRMRDAIAAGSFAAFRQDFEARYRR

SEQ ID NO: 61060 - protein, 374 aa, Sphingopyxis macrogoltabida
  misc_feature (1)..(374): tr|A0A0P0CX63|A0A0P0CX63_SPHMC Queuine tRNA-ribosyltran sferase OS=Sphingopyxis macrogoltabida OX=33050 GN=tgt PE=3 SV=1
MTDRFAFRVAATDGAARTGVIAMQRGEIRTPAFMPVGTAATVKAMRPAEVRATGADIILGNTYHLMLRPGAERMARLGGLHNFMGWDRPILTDSGGYQVMSLSALTKQSEEGVAFKSHLDGSRHMLTPERSMEIQRLLGSDIVMAFDECPPNGVDAKRAEASMERSMRWAARSRAGFDAGGEHAERAALFGIQQGSLDETLRARSAAALTDIGFDGYAIGGLAVGEGQDAMFGVLDYAPGQLPADKPRYLMGVGKPDDLVGAVARGVDMFDCVLPTRSGRNGQAFTWDGPVNIRNAKHAEDMAPLDADCSCPVCTTWSRAYLHHLVRAGEMLGAMLMTQHNLHFYQVLMQRMRDAIAAGSFAAFRSDFEARYRR

SEQ ID NO: 61061 - protein, 374 aa, Sphingopyxis sp.
  misc_feature (1)..(374): tr|A0A2L0VL82|A0A2L0VL82_9SPHN Queuine tRNA-ribosyltran sferase OS=Sphingopyxis sp. MG OX=1866325 GN=tgt PE=3 S V=1
MTDRFAFTVAATDGPARTGVIRMARGEIRTPAFMPVGTAATVKAMRPAEVRASGADIILGNTYHLMLRPGAERMARLGGLHDFMGWDRPILTDSGGYQVMSLSALTKQSEEGVAFKSHLDGSRHLLTPERSMEIQRLLGSDIVMAFDECPPAGVDAKRAEASMERSMRWAARSRAGFDAGEAHAARAALFGIQQGSLDERLRKRSAEALIEIGFDGYAIGGLAVGEGQAAMFGVLDFAPAQLPADRPRYLMGVGKPDDLVGAVARGVDMFDCVLPTRSGRNGQAFTWDGPVNIRNAKHAEDLGSLDASCGCPVCTTWSRAYLHHLVRAGEMLGAMLMTQHNLHFYQALMQAMRDAIAAGRFAAFRTDFTARYRK

SEQ ID NO: 61062 - protein, 374 aa, Sphingopyxis sp.
  misc_feature (1)..(374): tr|A0A0W1DLS8|A0A0W1DLS8_9SPHN Queuine tRNA-ribosyltran sferase OS=Sphingopyxis sp. H050 OX=1759072 GN=tgt PE=3 SV=1
MTDRFAFQVAATDGDARTGVIRMERGEIRTPAFMPVGTAATVKAMRPAEVRATGADIILGNTYHLMLRPGAERMARLGGLHSFMGWDRPILTDSGGYQVMSLSALTKQSEEGVSFKSHLDGSRHMLTPERSMEIQRLLGSDIVMAFDECPPNGVDAKRAAASMERSMRWAARSRAGFDAGEDHAARSALFGIQQGSLDERLRARSAEALIDLGFDGYAIGGLAVGEGQEAMFGVLDYAPGQLPADKPRYLMGVGKPDDLVGAVARGVDMFDCVLPTRSGRNGQAFTWDGPVNIRNAKHAEDMGPLDASCDCPVCTTWSRAYLHHLVRAGEMLGAMLMTQHNLHFYQALMQRMREAIAGGGFAAFQSDFADRYKK

SEQ ID NO: 61063 - protein, 374 aa, Sphingopyxis terrae
  misc_feature (1)..(374): tr|A0A142VUX2|A0A142VUX2_9SPHN Queuine tRNA-ribosyltran sferase OS=Sphingopyxis terrae subsp. terrae NBRC 15098 OX=1219058 GN=tgt PE=3 SV=1
MTDRFAFQVAATDGAARTGVIRMQRGDIRTPAFMPVGTAATVKAMRPAEVRATGADIILGNTYHLMLRPGAERMARLGGLHDFMGWDRPILTDSGGYQVMSLSALTKQSEEGVAFKSHLDGSRHMLTPERSMEIQRLLGSDIVMAFDECPPNGVDAKRAEASMERSMRWAARSRVGFDAGEAHAARSALFGIQQGSLDEKLRARSAEALIDIGFDGYAIGGLAVGEGQEAMFGVLDFAPGQLPADKPRYLMGVGKPDDLVGAVARGIDMFDCVLPTRSGRNGQAFTWDGPLNIRNAKYAEDLGPLDASCDCPVCTTWSRAYLHHLVRSGEMLGAMLMTQHNLHFYQALMQAMRDAIAEGCFAAFQSDFAARYHR

SEQ ID NO: 61064 - protein, 374 aa, Sphingopyxis terrae
  misc_feature (1)..(374): tr|A0A1Y6FQ93|A0A1Y6FQ93_9SPHN Queuine tRNA-ribosyltran sferase OS=Sphingopyxis terrae subsp. ummariensis OX=42 9001 GN=tgt PE=3 SV=1
MTDRFAFQVAATDGAARTGVIRMQRGDIRTPAFMPVGTAATVKAMRPAEVRATGADIILGNTYHLMLRPGAERMARLGGLHDFMGWDRPILTDSGGYQVMSLSALTKQSEEGVAFKSHLDGSRHMLTPERSMEIQRLLGSDIVMAFDECPPNGVDAKRAEASMERSMRWAARSRAGFDAGEAHAARSALFGIQQGSLDEKLRARSAEALIDIGFDGYAIGGLAVGEGQEAMFGVLDFAPGQLPADKPRYLMGVGKPDDLVGAVARGVDMFDCVLPTRSGRNGQTFTWDGPLNIRNAKYAEDLGPLDASCDCPVCTTWSRAYLHHLVRSGEMLGAMLMTQHNLHFYQALMQAMRDAIAEGRFAAFQNDFAARYRR

SEQ ID NO: 61065 - protein, 374 aa, Sphingopyxis witflariensis
  misc_feature (1)..(374): tr|A0A2D0AMW0|A0A2D0AMW0_9SPHN Queuine tRNA-ribosyltran sferase OS=Sphingopyxis witflariensis OX=173675 GN=tgt PE=3 SV=1
MTDRFTFSIAATDGAARTGTIAMKRGEIRTPAFMPVGTAATVKAMRPAEVRATGADIILGNTYHLMLRPTAERMARLGGLHNFMGWDRPILTDSGGYQVMSLSALTKQSEEGVAFKSHLDGSRHMLTPERSMEIQRLLGSDIVMAFDECPPNGVDAKRAEASMDRSMRWAARSRAGFDAGGEHAERSALFGIQQGSLDETLRARSAAALTDIGFDGYAIGGLAVGEGQEAMFGVLDFAPAQLPADKPRYLMGVGKPDDLVGAVARGVDMFDCVLPTRSGRNGQAFTWDGPVNIRNAKHAEDMGPLDASCACPVCTTWSRAYLHHLVRSGEMLGAMLMTQHNLHFYQDLMQGMRDAIAAGRFTSFQSDFDARYKR

SEQ ID NO: 61066 - protein, 375 aa, Sphingorhabdus contaminans
  misc_feature (1)..(375): tr|A0A553WAL8|A0A553WAL8_9SPHN Queuine tRNA-ribosyltran sferase OS=Sphingorhabdus contaminans OX=1343899 GN=tgt PE=3 SV=1
MKSRFQFSISATSGKARTGTIQMMRGEIRTPAFMPVGTAATVKAMRPAEVRATGADIILGNTYHLMLRPGAERVARLGGLHKFSGWDRPILTDSGGYQVMSLSALRKITEEGVAFSSHLDGSKHMLSPERSMEIQRLLGSDIVMAFDECPANGVSRDEAIKSMELSMRWAKRSRDAFDAGGEHAGVAALFGIQQGSLDEELRKRSADALIDIGFDGYAVGGLAVGEGQEAMFACLDYAPDQLPADRPRYLMGVGKPDDLVGAVERGIDMFDCVLPTRSGRNGQAFTHSGPINIRNAKFAEDQGPIDDRCTCPVCATWTRAYVHHLIRSGEILGAMLMTQHNLHYYQMLMADMRGAIAEDRFAAFASDFRRDYLGS

SEQ ID NO: 61067 - protein, 374 aa, Sphingorhabdus marina
  misc_feature (1)..(374): tr|A0A1N6CLT4|A0A1N6CLT4_9SPHN Queuine tRNA-ribosyltran sferase OS=Sphingorhabdus marina DSM 22363 OX=1123272 G N=tgt PE=3 SV=1
MTDRFRFSISATDGRSRLGTIHMQRGEIRTPAFMPVGTAATVKAMKPESVRAAGADIILGNTYHLMLRPGAERVARLGGLHSFMNWDRPILTDSGGYQVMSLSELTRMSEDGVEFQSHLDGSRHMLTPERSMEIQRLLGSDIVMAFDECTKNGATRDEALESMERSMRWAKRSRGGFDSGEEHAARSALFGIQQGALDPDIRAASAEALIDIGFDGYAIGGLAVGEGQEAMFGVLDYAPDQLPQDKPRYLMGVGKPDDLVGAVERGVDMFDCVLPSRSGRNGQAFTADGALNIRNARFAEDLEPLDSECPCPVCQTYSRAYLHHLIKAKEILGAMLMTEHNIAWYQALMANMRSAIGEGRFAAFASAFRSRYLG

SEQ ID NO: 61068 - protein, 375 aa, Sphingorhabdus sp.
  misc_feature (1)..(375): tr|A0A220W734|A0A220W734_9SPHN Queuine tRNA-ribosyltran sferase OS=Sphingorhabdus sp. SMR4y OX=2584094 GN=tgt P E=3 SV=1
MAERFSFSIAATDGKARTGTISMLRGDIRTPAFMPVGTAATVKALKPETVRATGADIILGNTYHLMLRPGAERVARLGGLHKFMNWDRPILTDSGGYQVMSLSELTKLSEDGVEFQSHLDGSRHMLTPERSMEIQRLLGSDIVMAFDECTKNGATREEALASMERSMRWAKRSRDGFDSGEEHAARAALFGIQQGSLDKDMRAASAEALIDIGFDGYAIGGLAVGEGQEAMFDVLDYAPGQLPADKPRYLMGVGKPDDLVGAVERGVDMFDCVLPSRSGRNGQAFTAQGPINIRNAKFAEDLAPLDENCACSVCQNHSRAYLHHLIRAKEILGAMLMTEHNIAYYQSLMAGMREAIAAGTFADFAKNFRSAYLKS

SEQ ID NO: 61069 - protein, 377 aa, Sphingorhabdus sp.
  misc_feature (1)..(377): tr|A0A5C6U6F4|A0A5C6U6F4_9SPHN Queuine tRNA-ribosyltran sferase OS=Sphingorhabdus sp. D-2Q-5-6 OX=2601267 GN=tg t PE=3 SV=1
MTHSPPFAFSIAATDGAARTGTIGMARGDIRTPAFMPVGTAATVKAMRPAEVRASGADIILGNTYHLMLRPGAERIARLGGLHAFMAWDRPILTDSGGYQVMSLSDLAKVTEDGVSFKSHLDGARHMITPERSIEIQRLLGSDIVMAFDELVRTDSSREAQAAAMERSMRWARRSREAFDTIDTGLPRGAIFGIQQGALDEGLRRASADALTAIGFDGYAIGGLAVGEGQEAMFGVLDYAPGQLPADAPRYLMGVGKPDDIVGAVLRGVDMFDCVLPTRSGRNGQAFTWGGPVNIRNARHAEDQAPLDARCNCPVCTTWSRAYLHHLVKSGEMLGAMLMTQHNLHFYQALMQALRDAIAQARIGEFARSFVADYRGG

SEQ ID NO: 61070 - protein, 375 aa, Sphingorhabdus wooponensis
  misc_feature (1)..(375): tr|A0A3R8Q2U0|A0A3R8Q2U0_9SPHN Queuine tRNA-ribosyltran sferase OS=Sphingorhabdus wooponensis OX=940136 GN=tgt PE=3 SV=1
MTTRFKFSISATDGKARTGSIQMLRGEIRTPAFMPVGTAATVKAMRPAEVRATGADIILGNTYHLMLRPGAERVARLGGLHQFSGWDRPILTDSGGYQVMSLSALRKITEEGVSFQSHLDGSKHMLSPERSMEIQRLLGSDIVMAFDECPANGVSRDAAIKSMELSMRWAKRSRDGFDSGGEHAARAALFGIQQGSLDEELRKRSADALIDIGFDGYAVGGLAVGEGQEAMFGCLDYAPDQLPADRPRYLMGVGKPDDLVGAVERGIDMFDCVLPTRSGRNGQAFTHHGPINIRNAKFAEDQGPIDDRCTCPVCATWTRAYVHHLIRSGEILGAMLMTQHNLHYYQMLMADMRAAIAQGRFAAFAQEFRRDYLKA

SEQ ID NO: 61071 - protein, 370 aa, Sphingosinicella ginsenosidimutans
  misc_feature (1)..(370): tr|A0A5C6TPT0|A0A5C6TPT0_9SPHN Queuine tRNA-ribosyltran sferase OS=Sphingosinicella ginsenosidimutans OX=117653 9 GN=tgt PE=3 SV=1
MTSPRFEFSISATDGKARTGTIRMRRGEIRTPAFMPVGTAATVKAVKPADVRASGADILLGNTYHLMLRPGAERVARLGGLHALMGWDRPILTDSGGYQVMSLSELTKVSEEGVAFASHLDGSRHMLSPERSMEVQTLLGSDIVMAFDQLVKTTDTAAAQRAAMERSMRWAKRSRAAFDALGNEGALFGIQQGGLDEGMRAASAAALREIGFDGYAVGGLAVGEGQAAMFACLDFAPGQLPEDAPRYLMGVGKPDDIVGAVERGIDMFDCVLPTRSGRTGQAFTWDGPINIRNAKFAEDPAPIDPESPAGGWSKAYLHHLVRSGEILGAMLMTEHNLWFYQQLMERLRAAIAEGRLADFAEAFRARYRGR

SEQ ID NO: 61072 - protein, 374 aa, Sphingosinicella microcystinivorans
  misc_feature (1)..(374): tr|A0A495RN90|A0A495RN90_SPHMI Queuine tRNA-ribosyltran sferase OS=Sphingosinicella microcystinivorans OX=33540 6 GN=tgt PE=3 SV=1
MTRFDFSIHARDGKARTGTIRMMRGDIRTPAFMPVGTAATVKAMKPADVRAGGADIILGNTYHLMLRPGDERMARLGGLHRFMGWDRPILTDSGGYQVMSLSDLTKVTEEGVRFASHLDGSRHLLTPERSMEIQRNLGSDIVMAFDECTAFPAPHAVAAKSMEMSMRWAKRSRDGFDGHEHAGRAALFGIQQGSMFEDLRRASSQALTEIGFDGYAIGGLAVGEGQPQMFEVLDYAPGLLPEDRPRYLMGVGKPDDIVGAVQRGIDMFDCVLPTRSGRNGQAFTHDGPINLRNARFAEDTGPLDPDCACPVCHGWSRAYIHHLIRSGEILGAMLMTEHNLSFYQQLMAGLREAIGEGRLETFARAFVGRYRKDG

SEQ ID NO: 61073 - protein, 376 aa, Sphingosinicella sp.
  misc_feature (1)..(376): tr|A0A2P7QYN0|A0A2P7QYN0_9SPHN Queuine tRNA-ribosyltran sferase OS=Sphingosinicella sp. GL-C-18 OX=2116704 GN=t gt PE=3 SV=1
MTSSRFSFSIAATDGAARTGTISMLRGDIRTPAFMPVGTAATVKAMKPADVRAAGADIILGNTYHLMLRPGAERVARLGGLHKFMQWDRPILTDSGGYQVMSLSELTKKSEDGVRFKSHIDGSAHMITPERSMEIQRLLGSDIVMAFDECTSYPSTRDSAAASMERSMRWARRSRDGFDSGGEHAARSALFGIQQGAMEEDLRKISAEKLIEIGFDGYAVGGLAVGEGQEIMFRTLDFAAPMLPADRPRYLMGVGKPDDIVGAVERGIDMFDCVLPTRSGRTGQAFTRSGPINIKNAKFGEDERPLDPDCACPVCAIWSRAYIHHLVRAGEILGAMLMTEHNIQFYQALMADLRAAIAGGRLTPFADDFRARYLGR

SEQ ID NO: 61074 - protein, 377 aa, Sphingosinicella sp.
  misc_feature (1)..(377): tr|A0A2U2J0A0|A0A2U2J0A0_9SPHN Queuine tRNA-ribosyltran sferase OS=Sphingosinicella sp. QZX222 OX=2068657 GN=tg t PE=3 SV=1
MSDRPRFSFSISATDGAGRTGVIAMKRGDIRTPAFMPVGTAATVKAMKPQDVRASGADIILGNTYHLMLRPGAERVARLGGLHAFMGWERPILTDSGGYQVMSLSDLRKMSEEGVSFKSHLDGSAHMLTPERSMEIQRLLGSDIVMAFDECTPFPATRDEAALSMERSMRWARRSRDGFDAGQDHASVSALFGIQQGSMHEDLRRISADRLTDIGFDGYAVGGLAVGEGQDEMFRVLDFAVGMLPADRPRYLMGVGKPDDIVGAVERGIDMFDCVLPTRSGRTGQAFTRDGPINIKNAKHAEDPEPLDPDCHCPVCGQWSRAYLHHLIRSGEILGAMLMTEHNLNFYQALMADLRAAIAEGRLRAFADDFRARYLRG

SEQ ID NO: 61075 - protein, 369 aa, Spiribacter aquaticus
  misc_feature (1)..(369): tr|A0A557RJY8|A0A557RJY8_9GAMM Queuine tRNA-ribosyltran sferase OS=Spiribacter aquaticus OX=1935996 GN=tgt PE=3 SV=1
MTLRLTLSAADGWARRGRLEFARGTIDTPAFMPVGTYGTVKGMTPEEVAGSGAQILLGNTFHLMLRPGTSIIAEHGDLHDFMHWPSPILTDSGGFQVFSLAEGRRLTEAGVEFRSPVDGSRVFLDAERSMAVQRALGSDIVMIFDECTAWPAEWSEAKRSMERSLRWAERSREAHGDSEAALFGIVQGGMYDDLRAASLAGLESIGFDGMAVGGLSVGEPPAERLRVLDALAPQLPTDKPRYLMGVGRPEDLVDCVARGIDMFDCVLPTRNARNGYLFTDTGTLRLRNARFAHDTRPIEADCDCYTCRHYSRAYLRHLDRCGEMLGGRLNTIHNLRYFQRLMQAIREAIEAQAFNEFARAFHARRADMT

SEQ ID NO: 61076 - protein, 369 aa, Spiribacter curvatus
  misc_feature (1)..(369): tr|U5T634|U5T634_9GAMM Queuine tRNA-ribosyltransferase OS=Spiribacter curvatus OX=1335757 GN=tgt PE=3 SV=1
MTMQFETLASDGWARRGRLHFPRGVIDTPAFMPVGTYGTIKGMTPDEVAGSGAQILLGNTFHLMLRPGTEIIAAHGDLHDFMNWQAPILTDSGGFQVFSLAEGRRLTEAGVEFRSPVDGSRVFLDAERSMAVQRALGSDIVMIFDECTAWPAAWSEAKRSMERSLRWAERSRAAHGDSDAALFGIVQGGMYNDLRAESLAGLEAIGFDGMAIGGLSVGEPPEERLRVLDALAPQLPADKPHYLMGVGRPEDLVDCVARGVDMFDCVLPTRNARNGYLYTDTGTLRLRNARFADDTRPIEPGCDCYTCQHYSRAYLRHLDRCREMLGARLNTVHNLRYFQRLMARIRAAIETQAFDEFAQSFHARRADMT

SEQ ID NO: 61077 - protein, 376 aa, Spiribacter salinus
  misc_feature (1)..(376): tr|A0A540VVQ9|A0A540VVQ9_9GAMM Queuine tRNA-ribosyltran sferase OS=Spiribacter salinus OX=1335746 GN=tgt PE=3 S V=1
MAKDFGFQLKATSGAARSGKISTPRGEIRTPAFMPVGTAATVKAMLPESVRETGADILLGNTYHLMLRPTAERIAALGGLHRFMNWERPILTDSGGFQVMSLAGLRKLTEEGVSFKSHIDGSKHMLSPERSMEIQALLGSDIVMCFDECPALPATRDEIARSMELSMRWARRSRVAFGARPGHALFGIQQGGLEEDLRRESAEALQDIGFEGYAVGGLAVGEGQEAMFGVLDFAPGQLPQDKPRYLMGVGKPDDIVGAVARGIDMMDCVLPSRSGRTGQVFTRRGVLNIKNARHQDDPRPLDEDCTCPACTSYSRAYLHHVFRSQEIISSMLLTWHNLHYYQELMQQMREAIAEDRFAAFERSFHAAREQGDIDPL

SEQ ID NO: 61078 - protein, 369 aa, Spiribacter salinus
  misc_feature (1)..(369): tr|A0A540VN47|A0A540VN47_9GAMM Queuine tRNA-ribosyltran sferase OS=Spiribacter salinus OX=1335746 GN=tgt PE=3 S V=1
MTLRFESLAHDGLARRGQLHFGRGVVDTPAFMPVGTYGTVKGVTPEEVAASGAQILLGNTFHLMLRPGTEIITEHGDLHDFMHWPNPILTDSGGFQVFSLTEGRRITEAGVRFRSPVDGSEVFLDPERSMAVQRALGSDVVMIFDECTPWPIDHQGAQESMALSLRWAERSKEAHGDNPAALFGIVQGGMYEDLRAESLAGLMDIGFDGFAVGGLSVGEPPEDRLRVLDALAPSLPADKPRYLMGVGRPEDLVECVARGIDMFDCVMPTRNARNGFLFTDAGTLRLRNARFAHDTRPIEPGCDCTTCAHYSRAYLRHLDRCGEMLGSRLNTLHNLRYFQRLMASLREAIAAGCLEEFTREFYARRTGVT

SEQ ID NO: 61079 - protein, 367 aa, Spiribacter sp.
  misc_feature (1)..(367): tr|A0A2U2N519|A0A2U2N519_9GAMM Queuine tRNA-ribosyltran sferase OS=Spiribacter sp. E85 OX=2182432 GN=tgt PE=3 S V=1
MRFETLARSGAARRGRLHFSRGTVETPAFMPVGTYGTVKGVTPEEVRASGAEILLGNTFHLMLRPGPEIIAAHGDLHDFMHWDGPILTDSGGFQVFSLAEGRRITEEGVSFRSPVDGSRVFLDPERSMAVQRALGSDIVMVFDECTPYPVDEATAEASMALSLRWAARSREAHGDSPAALFGIVQGGMYPGLREASLEGLQAIGFEGYAIGGLSVGEPPEERLRVLEHIVPRLPAERPRYLMGVGRPEDLVDSVCRGVDMFDCVLPTRNARNAFLYTPQGTLRLRNARFADDTRPVDPDCDCYTCRHYSRAYLRHLDRCREMLGARLNTLHNLRYFQRLMAELRDAIAEDRLAEYAEAFRRRRTGVT

SEQ ID NO: 61080 - protein, 423 aa, Spirobacillus cienkowskii
  misc_feature (1)..(423): tr|A0A369KWU0|A0A369KWU0_9PROT Queuine tRNA-ribosyltran sferase OS=Spirobacillus cienkowskii OX=495820 GN=tgt P E=3 SV=1
MFSQRNLINFKKIKSLPLSPEFWSGHFDTENLKSSDFEQEFNQVLSKGIARNEDLQRVKQVGPRITKMTFGDIEIETPIFMPVGTLGSVKSLSPEDVYGIGYKIILGNTYHLNLRPGMELMKEFNGLHEFMRWPGAILTDSGGFQVMSLAKIRKLTEEGVTFANHINGAKVTLTPEKVVAIQEDIDSDIQMVLDECTPYPATYEEALSSMQRSMRWAKRARLARSKQNRAQFGIVQGGMYGDLRVQSVLQLIENDFEGYAIGGLSVGESKREMRRLLSATIPWMPDNKPRYLMGVGAPDDLIDAILLGVDMFDCVMPTRNARNGSVFVRSSASATGKIQIKNAIHKMSKAPLDSLCSCYTCKNYSRAYLRHLFVAEELLVFRLLSIHNLQFLYDLTSELREAIRSGDIFDQVKRIRGDYAPGS

SEQ ID NO: 61081 - protein, 369 aa, Spirobacillus cienkowskii
  misc_feature (1)..(369): tr|A0A369KRX6|A0A369KRX6_9PROT Queuine tRNA-ribosyltran sferase OS=Spirobacillus cienkowskii OX=495820 GN=tgt P E=3 SV=1
MGLKFEYIAKDKHSEARRTRLHTSHGIIETPVFMPVGTFGAVRTLDHIELENMGVQIILGNTYHLYLRPGPEILKELKGYHKFICWDKPILTDSGGFQIFSLPHQRIISEKGVTFKSYVDQSYKKMTPESTIAFQEIIGSDIMMALDVCVPSTSKYDACASAMERTHRWAKRCKLSKSKDENSLFGIVQGAVFENLRKESAETLINLDFDGYAIGGLAVGETDEERIHFTEFTAKLLPNNKPRYLMGVGTPHDLVRGVMSGVDMFDCIIPTNHARQGVAYTFIGKQKLRRTIYAKDTNPIDENCSCYVCNKFTRAYLHQLCKCEEPTGWKLISYHNTWFYEKLMQKMRKTIEEGTFSNFANDFLKNVKE

SEQ ID NO: 61082 - protein, 375 aa, Spirochaeta africana
  misc_feature (1)..(375): tr|H9UJ97|H9UJ97_SPIAZ Queuine tRNA-ribosyltransferase OS=Spirochaeta africana (strain ATCC 700263 / DSM 8902 / Z-7692) OX=889378 GN=tgt PE=3 SV=1
MITIEHNDRGSAARTGRLKLPHGDVATPAFMPVGTAATVKGMYPGQVADLGYSLILANTYHLLLRPGIDTVYSLGGIRGFSTWKGNILTDSGGYQVFSLSGLRKIEETGVYFRSHIDGSPHTLTPELVVQAQARLGSDIQMVLDVCTPPDIPLQDARDAMDRTTRWLKRAIAEWQGTRDWYPGQLFSIVQGNFYPDLRREHAETLAEMETPGIAIGGLSVGETYSQFADILAHTAQYLPADRPRYVMGIGTPDFILAAVANGIDMFDCVLPTRVARNGSIFTRHGLVSLKRAAHRGSDQPIDPAGDTAPDLQGFSRGYLHHLFNAREMLGPMIATRHNLYFMQQFMNEVRASIRKDRFREYAAGFMEKFATGEQR

SEQ ID NO: 61083 - protein, 370 aa, Spirochaeta lutea
  misc_feature (1)..(370): tr|A0A098R5E5|A0A098R5E5_9SPIO Queuine tRNA-ribosyltran sferase OS=Spirochaeta lutea OX=1480694 GN=tgt PE=3 SV= 1
MKHRDEFCQARRGEIQLPHGRVQTPVFMPVGTQGTVKALSHQMVEDIGFEIILGNTYHLYLRPGTEVIADFGGLHEFSTWNRNILTDSGGFQVFSLSPFRKITDEGVQFRSHIDGSKHMLTPESVVEIQRVLGSDIQMVLDVCTEHGIDKKSAHKALTTTTRWAKRAKDAWQQSLGDYRGAAFGIVQGNFFEDLRAQSAQELSELDFPGYAIGGLSVGEPPEVFEHFLHYTAPLLPTGKPKYVMGIGTPDYILSAVEAGIDMFDCVFPTRVARNGYFFSRDGRINIKNERYRRDTQPIDLDSPISMYSRAYLRHLFKAGEMLGPMLATRHNLWFLHTFMTEIRTAIEENRFLEYKNTFLERYGRGMGNTI

SEQ ID NO: 61084 - protein, 371 aa, Spirochaeta perfilievii
  misc_feature (1)..(371): tr|A0A5C1QDT2|A0A5C1QDT2_9SPIO Queuine tRNA-ribosyltran sferase OS=Spirochaeta perfilievii OX=252967 GN=tgt PE= 3 SV=1
MFTQLERDKNTNARNGIMHLPHGDVLTPAFMPVGTNGAVKALHHKSLKEMGYDLILGNTYHLYLRPGLDVIRNAGSLHDFTTWDKNILTDSGGFQVFSLSEFRKISEEGVKFRSHIDGSYHMFTPENVIEKQEVFRSDILMMLDVCTPPGIGEREAREALDITTRWAKRGTKRWHERIDGYDGKLFAIVQGNFYKELRKRSALELLELDTPGIAIGGLSVGETPAEFHEYLSYTAEFLPLEKPKYVMGIGTPDYILSAVENGIDIFDCVYPTRIARNGTAFTRDGLIMLKNAKHELSLLPLDPECNCPVCKKYTRSYIRHLVKAKEILAPMLVTEHNLYFLANMMEEIRESIKVGNFYLYKQNFLKRYKGL

SEQ ID NO: 61085 - protein, 373 aa, Spirochaeta sp.
  misc_feature (1)..(373): tr|A0A1W9NA13|A0A1W9NA13_9SPIO Queuine tRNA-ribosyltran sferase OS=Spirochaeta sp. LUC14_002_19_P3 OX=1940821 G N=tgt PE=3 SV=1
MLTVIHRDNTTQARSGFLKLPHGKVEIPAFMPVGTNGTVKAILHSALSEIGFNLILGNTYHLYLRPGMDVIERYQSLHRFSSWKGNILTDSGGYQIFSLAQFRKIREEGAEFRSHIDGSLHQLSPESAVDIQCTLNSDIQMQLDVCTAPGISEKEAAQAMELSSRWALRAKRRWMEKEDYRGVLFAIVQGNFFRNLREESAHQLVDMSLPGYAIGGLSVGEEPEVFKEFLHFTAPLLPDNKPKYVMGIGTPDYMLEAIEAGIDLFDCVHPTRAARNGSCFTPDGMLNLRNARFQNDTSPLVENCPCPACRLYSRGYLRHLFTAREILGTLLATHHNLQFVYSLIQNARTAISKGSFSPFKKDFLARFGTQLHE

SEQ ID NO: 61086 - protein, 379 aa, Spirochaeta sp.
  misc_feature (1)..(379): tr|A0A3C0T3W9|A0A3C0T3W9_9SPIO Queuine tRNA-ribosyltran sferase OS=Spirochaeta sp. OX=28185 GN=tgt PE=3 SV=1
MKFKITAKDKDSAARNAVLELPHGDLETPVFMPVGTNAAVKGVHHESLDRTGFKIILANTYHLYLRPGMDIIDEFGGIHKFSNWKHNILTDSGGFQVFSLAPFRKIKEEGVYFRSHIDGSYHTLTPEKVVQLQKAFRSDIMMQLDVCTPPEITYRKALEALELTTRWAQRSKTEWIKETPGYEGVLFGIVQGNFYKDLRKRSAEEITALNLPGIAIGGLSVGEEYNAFTDFLSYTAEFLPEEKPRYLMGIGTPEYILDAVENGIDLFDCVLPTRIARNGTVFTPEGTIQLKKAKHASSHEAIVDGCGCHACQNYSRAYLRHLFKAGEMLGPMLASEHNLFFLNKLILEIRESIKENRFTEYKKDFLKQYNSAGSTGKAG

SEQ ID NO: 61087 - protein, 381 aa, Spirochaeta thermophila
  misc_feature (1)..(381): tr|E0RSR8|E0RSR8_SPITD Queuine tRNA-ribosyltransferase OS=Spirochaeta thermophila (strain ATCC 49972 / DSM 619 2 / RI 19.B1) OX=665571 GN=tgt PE=3 SV=1
MHGIFSITHRDPSCLARTGRLLLPHGEVETPVFMPVGTNGSVKAVDFSVLDEMGIRLILSNTYHLFLRPGVDIIREAGGLHSFIGWQGNILTDSGGYQVFSLAPFRKIREEGIYFRSHIDGSYHTLTPEGVVDIQTAFGSDVMMPLDVCTPPGISKKEAEEALEITTAWARRSKERWESLREETGGLLFGIVQGNFFHDLRRRSVEEICALDLPGTAIGGLSVGESFPVFQEFLAFTAALLPPEVPHYLMGIGTPEYILEAVEQGIDMFDCVFPTRTARNASVFTRSGRISLRRERFTRDFSPLDPECSCYTCRRYTRAYLRHLFKTQEIMGPVLATIHNLHFLFTMVEEIRESIREGNFSRYKRAFLARYQEGTRADENE

SEQ ID NO: 61088 - protein, 382 aa, Spirochaeta thermophila
  misc_feature (1)..(382): tr|G0GE58|G0GE58_SPITZ Queuine tRNA-ribosyltransferase OS=Spirochaeta thermophila (strain ATCC 700085 / DSM 65 78 / Z-1203) OX=869211 GN=tgt PE=3 SV=1
MMHGIFSITHRDPSCLARTGRLLLPHGEVETPVFMPVGTNGSVKAVDFSVLDDMGIRLILSNTYHLFLRPGVDIIREAGGLHSFIGWQGNILTDSGGYQVFSLAPFRKIREEGVYFRSHIDGSYHTLTPEGVVDIQTAFGSDVMMPLDVCTPPGISKKEAEEALEITTAWARRSKERWESLREESGGLLFGIVQGNFFHDLRRRSVEEICALELPGTAIGGLSVGESFPVFQEFLAFTAALLPSEVPHYLMGIGTPEYILEAVEQGIDMFDCVFPTRTARNASVFTRSGRISLRRERFTRDFGPLDPECTCYTCRRYTRAYLRHLFKAQEIMGPVLATIHNLHFLFTMVEEIRESIREGRFSRYKRAFLARYQEGTRADENE

SEQ ID NO: 61089 - protein, 374 aa, Spirochaetaceae bacterium; identical to SEQ ID NO: 56930
  misc_feature (1)..(374): tr|A0A2E8PTD3|A0A2E8PTD3_9SPIO Queuine tRNA-ribosyltran sferase OS=Spirochaetaceae bacterium OX=1898206 GN=tgt PE=3 SV=1

SEQ ID NO: 61090 - protein, 372 aa, Spirochaetaceae bacterium
  misc_feature (1)..(372): tr|A0A1W9VEC0|A0A1W9VEC0_9SPIO Queuine tRNA-ribosyltran sferase OS=Spirochaetaceae bacterium 4572_59 OX=1971727 GN=tgt PE=3 SV=1
MISIQYKDSETNARTGILSLPHGDVEIPAFMPVGTNGTVKAIKHNSVDDMGYKLILANTYHLYLRPGMEVMENAGGLHKFSGWKHNILTDSGGFQVFSLAPFRKIREEGVRFRSHIDGAYHVFTPEKVVEIQQIIGSDIQMVLDVCTPPDISHKEALEALNLTTNWARRARKRWDKRNEGYEGLLFGIIQGNFYEDLRKQSAEEILALDTPGIAIGGLSVGEPPEMFRDYLHYTAQFLPEDKPRYVMGIGTPDYMLEAVEAGIDMFDCVYPTRIARNGTCFTKDGLIALKNQRFGMDNLPIDPECDCPVCKQYSRSYLRHLFKAKEILGPMLVTEHNLHFLYRFMAEIRLSIREDRFKAFKRDFMKRYNKEI

SEQ ID NO: 61091 - protein, 373 aa, Spirochaetae bacterium
  misc_feature (1)..(373): tr|A0A2N1T8T5|A0A2N1T8T5_9SPIR Queuine tRNA-ribosyltran sferase OS=Spirochaetae bacterium HGW-Spirochaetae-1 OX =2013832 GN=tgt PE=3 SV=1
MYRMKFTVMHNDYTSAARTGEITTSRGCIRTPVFMPVATRGAIRALTNRDIEEIGFDIILSNTYHLYIRPGTQVLEEAGGLHAFMNYKNPILTDSGGFQVFSLSDLCKVYDHGVEFRSHLDGSKHLFTPEKVLDIQGVIGSDIMMVLDQCTEYPIEKKDARAALIRTVDWAGKSFRYWKEHFNPEKQSLFAIVQGSVFGDLRRECVERLTEMDFPGFAIGGLSVGEPKELYQEITGFTMQYMPVEKPRYMMGVGSPLEIIFAIKNGVDMFDCVMPTRIARNGTLYTSQGRINIKAARFEKEYGPLDPNCSCYVCRNFSRAYLRHIFRAGEIASLIYNTYHNLFFMKTFMEEIRQSIAADTFLDTEKKWTGIFG

SEQ ID NO: 61092 - protein, 373 aa, Spirochaetae bacterium
  misc_feature (1)..(373): tr|A0A2N1RJZ7|A0A2N1RJZ7_9SPIR Queuine tRNA-ribosyltran sferase OS=Spirochaetae bacterium HGW-Spirochaetae-8 OX =2013840 GN=tgt PE=3 SV=1
MQKIHHLTHQDAHSLARCGTLSLPHGEVLTPTFMPVGTNGTVKGMYHDDVSAIGYNLILGNTYHLYLRPGMAVMEKFGGLHKFSNWNHNILTDSGGFQVFSLAHFRKIKEEGVTFQSHIDGSKHHLTPEKVVDIQRIIGSDILMCLDVCTPPDLEYKKAREAWEITKRWAERSLKRRSELEDFKGNLFGIVQGNFYQDLRKESAETISSMDFPGIAIGGLSVGEEPQVFSDFLAYTTQFISLEKPRYVMGIGSPDYILDAVANGIDLFDCVLATRTARNGSVFTNEGMIQLKRAEHEFKDEPLVPGCTCTACTKYSKGYMRHLFKAGEMLGGMMATEHNLTFLYRMMEQVRQAINEDRFLDYKREFLSRYYGR

SEQ ID NO: 61093 - protein, 369 aa, Spirochaetales bacterium
  misc_feature (1)..(369): tr|A0A2E9KUU6|A0A2E9KUU6_9SPIR Queuine tRNA-ribosyltran sferase OS=Spirochaetales bacterium OX=2026792 GN=tgt P E=3 SV=1
MSFIVKYKDSNSNARVGTLRTSSGEIKTPVFMPVCTGGVPKALRIDALSSIGFNLIVVNAYHLFLRPGHKEIKDFGGLHSFLNWKDTILTDSGGFQIFSLSSSATIKDEGVSFKSFIDGSTNLITPELSIEIQESLGSDLMMILDDCPKSDSEYSRILSSIKRTQQWALRSKKAKKTKNQLFGIVQGGIYKDLRKLSINHMLDIDFDGYAIGGLGLGEGQDTTYEITDYVCSFLPTNKPRYSMGIGKPEDIINSVEKGVDIFDCVVPTRNARNGTLYTSNGKINIKNSIYSMSDEPIDSDCDCYICKNYSIGYIRYLYMSGEIAALSLMSSSNLYFYKQLIDSIRKSIKDGSFMDFKKTFLERYKDEEN

SEQ ID NO: 61094 - protein, 380 aa, Spirochaetales bacterium
  misc_feature (1)..(380): tr|A0A524KE80|A0A524KE80_9SPIR Queuine tRNA-ribosyltran sferase OS=Spirochaetales bacterium OX=2026792 GN=tgt P E=3 SV=1
MSETSRSIFTLGVRDATTRARTGVIDLPHGRVHTPVFMPVGTNATVKAVSKDSLEEIGFEIILANTYHLYLRPGHDLIHEAGGLHGFTGWKGNFLTDSGGFQVFSLAPFRKISEEGVKFQSHIDGSRHMLTPELAVDIQTAFRSDIFMQLDVCSSYGVERKEAINALRLTTAWAARSRRRWMDTRGEFEGKLFGIVQGNFFEDLRDQSAQEIIALDLPGIAIGGLSVGEPFNVFSDFLAFTAGLLPEGKPRYVMGIGTPEYILEAVEQGIDMFDCVFPTRTARNGLLFTSYGPISIKQAQYTRDFSPTDPECSCRVCTDYSRAYLRHLYKNNEILFSMLASYHNLAFLHEFIHKIRYSIEERRFSEFKREYLAKYRSRAG

SEQ ID NO: 61095 - protein, 324 aa, Spirochaetes bacterium
  misc_feature (1)..(324): tr|A0A1G3QW30|A0A1G3QW30_9SPIR Queuine tRNA-ribosyltran sferase (Fragment) OS=Spirochaetes bacterium RBG_13_68_ 11 OX=1802194 GN=A2177_09380 PE=3 SV=1
  misc_feature (291)..(293): Xaa can be any naturally occurring amino acid
MAFTIAAVDRGSAARAGSLSLNHGTVETPCFMPVGTNATVKAMSVADLEDLGVRLILGNAYHLLLRPGPDVIRAAGGLHRFMGWPHDILTDSGGYQVFSLAQFRRLEEGGVSFRSHLDGSSRRLTPEDVIDLEVLACGSDVLMPLDVCTAPGITRGEAEEALALTTRWLARSRDRWRSLEAPLKGELFGIMQGNFHRDLREASAAGIASLDLPGYAIGGLSVGEEFAVFREFTHLSAGLLPADKPRYLMGIGTPAYVLEAVEAGVDLFDCVFPTRTARNALVFTPDGPLNXXXEANREDFGPIDPACRCTACRAHSKAYLRHLF

SEQ ID NO: 61096 - protein, 372 aa, Spirochaetes bacterium
  misc_feature (1)..(372): tr|A0A1V5W581|A0A1V5W581_9SPIR Queuine tRNA-ribosyltran sferase OS=Spirochaetes bacterium ADurb.Bin218 OX=18529 06 GN=tgt PE=3 SV=1
MNFKLIKKDNNSAARACEITTGHSVIKTPVFMPVATRAAIRAMTLSDLQSIGFDIILSNTYHLYMRPGMDVIAAAGGLHNFMNYHGSFLTDSGGFQVFSLSNLCKVRDDGVDFNSHLDGSKHFFTPEKVLDIQRIIGSDIMMVLDQCSDYPIEKAQARAAMERTIDWAKKSARYYKETFDTESQACFAIIQGSVYSDLRKECAERLAELDLPGYAIGGLSVGEPKELYREITEYLLPFMPYDRPRYMMGVGSPMEILFAIKQGVDMFDCVMPTRIARNGTLYTSQGRVNIKASQYEKDFTSLDPLCDCYVCKNFTKAYLRHIFKAGEIASLIYNTYHNLYFMKTFMDEIRTSILSDTFNETYCKWSKVFASE

SEQ ID NO: 61097 - protein, 368 aa, Spirochaetia bacterium
  misc_feature (1)..(368): tr|A0A352VV19|A0A352VV19_9SPIR Queuine tRNA-ribosyltran sferase OS=Spirochaetia bacterium OX=2053615 GN=tgt PE= 3 SV=1
MSFSLLAQDGAARAGILSVPHGNIAAPVFMPVGTQSAVKAVTFDKLAECGASIMLANTYHLYLRPGLATIKAMGGLHEFSNWRLPILTDSGGFQIFSLSSLAKISDEGFSFQSHIDGSRHFLSPEDVIDCQCIFGSDIIMQLDQCVPFRSDEQKIRESSRRSYAWAERSLLHFQKHESDSLLFGIVQGASNREYRRESAEKLVALEFPGYAIGGLSVGESREEMIDMTGFCASLLPENKPRYLMGVGTPEDIINAVAAGVDMFDCVLPTRNARNATVYNRRGKLLLRNRANKNDKGPIDPECTCYTCTNFSRAYLRHLFKAGEINALILASIHNLHFYIDFINRIRQSILAKKFEAFRRKYFSDAVIS

SEQ ID NO: 61098 - protein, 372 aa, Spirochaetia bacterium
  misc_feature (1)..(372): tr|A0A354G9I7|A0A354G9I7_9SPIR Queuine tRNA-ribosyltran sferase OS=Spirochaetia bacterium OX=2053615 GN=tgt PE= 3 SV=1
MFIIEKKDSSSHGRAGKLSLYHGEVLTPVFMPVGTNGPVKSFLPYEIKEMGIKIMLSNSYHLYLRPGMDVMEKLGGLHNFTGFDGNILTDSGGFQIFSLSSLTKIKKDGIEFRSHIDGSKHFLSPENVVSVQKSIGSDIMMVLDQCTSPDISYNDAVKALETTTRWAAKSREFYKQTIDTEKQKQFGIIQGNIFKDLRKKSTEEIVSIGFDGYAIGGLSVGETKDVFKDILSYTAPLLPEDKPRYLMGVGTPEDLFTGVESGIDMFDCVFPTRIARNGTVFTNHGRINLKNEKFKYDNLPLDPECDCYMCKNFSRSYIRHLFKAKEISGARITSYHNVYYMKKIMDRIRLSIFNNDFQYLKKDFLKTYKDEN

SEQ ID NO: 61099 - protein, 376 aa, Spirosoma endophyticum
  misc_feature (1)..(376): tr|A0A1I2FYX0|A0A1I2FYX0_9BACT Queuine tRNA-ribosyltran sferase OS=Spirosoma endophyticum OX=662367 GN=tgt PE=3 SV=1
MTFSITAHDPQSKARTGTLTTDHGPIQTPIFMPVGTAGTVKAVHQRELETDINAEIILGNTYHLYLRPGLDVLSQAGGLHGFNGWRRPILTDSGGYQVYSLSNTRKIKEEGVTFKSHIDGSKHTFTPEGVMDIQRIIGADIIMAFDECTPYPCEYGYARQSMDMTHRWLGRCIDRFDQAEGHYGYQQTLFPIVQGSTYADLRRQSAEVIASKEREGNAIGGLAVGEPAEEMYAMIELVNGILPADKPRYLMGVGTPANILEAIALGVDMFDCVMPTRNARHGLLFTTEGIINIKNEKWNKDFSPIDAGLGGYASTFYSKAYLRHLVKSEELLGGQIASLHNLTFYLWLVRQAREHIVVGDFIAWKNEMVIKLMQRL

SEQ ID NO: 61100 - protein, 376 aa, Spirosoma fluviale
  misc_feature (1)..(376): tr|A0A286G3V0|A0A286G3V0_9BACT Queuine tRNA-ribosyltran sferase OS=Spirosoma fluviale OX=1597977 GN=tgt PE=3 SV =1
MTFSISAQDTQSKARTGTLTTDHGPIQTPIFMPVGTAGTVKAVHQRELETDINAEIILGNTYHLYLRPGLDVLGQAGGLHAFNGWRRPILTDSGGYQVYSLSQTRKIKEEGVTFKSHIDGSKHTFTPEGVMDIQRIIGADIIMAFDECTPYPCDYGYARQSMEMTHRWLGRCIDRFDATEGHYGYRQTLFPIVQGSTYADLRRQSAEVIASKEREGNAIGGLAVGEPAEEMYAMIELVNGILPVDKPRYLMGVGTPANILEAIALGVDMFDCVMPTRNARHGLLFTTEGIINIKNEKWNRDFSPIDAGLGGYASTFYSKAYLRHLIKSEELLGGQIASLHNLTFYLWLVRQARTHIAAGDFVAWKNEMVVRLMQRL

SEQ ID NO: 61101 - protein, 376 aa, Spirosoma linguale
  misc_feature (1)..(376): tr|D2QJM0|D2QJM0_SPILD Queuine tRNA-ribosyltransferase OS=Spirosoma linguale (strain ATCC 33905 / DSM 74 / LMG 10896) OX=504472 GN=tgt PE=3 SV=1
MTFSISAHDPQSKARTGTLTTDHGPIQTPIFMPVGTAGTVKAVHQRELETDINAEIILGNTYHLYLRPGLEVLSQAGGLHAFNGWRRPILTDSGGYQVYSLSQTRKIKEEGVTFKSHIDGSKHTFTPEGVMDIQRIIGADIIMAFDECTPYPCDYGYARQSMEMTHRWLGRCIDRFDATEGHYGYRQTLFPIVQGSTYADLRRQSAEVIASKEREGNAIGGLAVGEPAEEMYAMIDLVNAILPADKPRYLMGVGTPANILEAIALGVDMFDCVMPTRNARHGLLFTTEGIINIKNEKWSRDFSPIDAGLGGYASTFYSKAYLRHLIKSEELLGGQIASLHNLTFYLWLVRQARMHIATGDFVSWKNEMVVRLMQRL

SEQ ID NO: 61102 - protein, 376 aa, Spirosoma montaniterrae
  misc_feature (1)..(376): tr|A0A1P9WRP7|A0A1P9WRP7_9BACT Queuine tRNA-ribosyltran sferase OS=Spirosoma montaniterrae OX=1178516 GN=tgt PE =3 SV=1
MTFSITAHDPQSKARTGTLTTDHGPIQTPIFMPVGTAGTVKAVHQRELETDVNAEIILGNTYHLYLRPGLDVLNGAGGLHGFNGWQRPILTDSGGYQVYSLSNTRKIKEEGVTFKSHIDGSSHRFTPEGVMDIQRTIGADIIMAFDECTPYPCEYGYARQSMEMTHRWLDRCIARFDGTDGYYGYRQTLFPIVQGSTYPDLRRQSAEVIASKEREGNAIGGLAVGEPAEEMYAMIELVNEILPADKPRYLMGVGTPANILEAIARGVDMFDCVMPTRNARHGLLFTTAGIINIKNEKWSRDYSPIDAELGGYASTFYSKSYLRHLFKADELLGGQIASLQNLTFYLWLVRQARTHIAAGDFISWKNEMVVRLMQRL

SEQ ID NO: 61103 - protein, 376 aa, Spirosoma oryzae
  misc_feature (1)..(376): tr|A0A2T0T8P6|A0A2T0T8P6_9BACT Queuine tRNA-ribosyltran sferase OS=Spirosoma oryzae OX=1469603 GN=tgt PE=3 SV=1
MTFSITARDTESQARTGVFTTDHGPVQTPIFMPVGTAGTVKAVHQRELETDVNAEIILGNTYHLYLRPGLDVLQRAGGLHAFNGWRRPILTDSGGYQVYSLSNTRKIKEEGVTFKSHIDGSKHTFTPEGVMDIQRVIGADIMMAFDECTPYPCDYTYARQSMEMTHRWLDRCIARFDATEGAYGYRQTLFPIVQGSTYADLRRQSAETIASKEREGNAIGGLAVGEPAEEMYETIELVNGILPADKPRYLMGVGTPANILEAIGLGVDMFDCVMPTRNARHGLLFTTAGIINIKNEKWSRDFSPIDAGLGGYASTFYTKAYLRHLFKADELLGGQIASLQNLTFYLWLVRQARIHIEAGDYVSWKNGIVGQLMQRL

SEQ ID NO: 61104 - protein, 376 aa, Spirosoma pollinicola
  misc_feature (1)..(376): tr|A0A2K8Z6Q4|A0A2K8Z6Q4_9BACT Queuine tRNA-ribosyltran sferase OS=Spirosoma pollinicola OX=2057025 GN=tgt PE=3 SV=1
MTFSITAQDPQSKARTGTLITDHGPIQTPIFMPVGTAGTVKAVHQRELETDVNAEIILGNTYHLYMRPGLDVLSQAGGLHAFNGWKRPILTDSGGYQVYSLSGTRKIKEEGVTFKSHIDGSKHTFTPEGVMDIQRTIGADIVMAFDECTPYPCDYEYARKSMDMTHRWLDRCINRFDATEGHYGFNQTLFPIVQGSTYADLRRQSAEMIASKEREGNAIGGLAVGEPAEEMYAMIELVNGILPVDKPRYLMGVGTPANILEAIALGVDMFDCVMPTRNARHGLLFTTEGIINIKNEKWNRDFSPIDAGLGGYASTFYSKAYLRHLIKSEELLGGQIASLHNLTFYLWLVRQARAHIAVGDFVSWKNEMVVHLMQRL

SEQ ID NO: 61105 - protein, 376 aa, Spirosoma radiotolerans
  misc_feature (1)..(376): tr|A0A0E3V8P7|A0A0E3V8P7_9BACT Queuine tRNA-ribosyltran sferase OS=Spirosoma radiotolerans OX=1379870 GN=tgt PE =3 SV=1
MTFSITANDPQSKARTGTLTTEHGPIQTPIFMPVGTAGTVKAVHQRELETDIDAEIILGNTYHLYMRPGLEVLNQAGGLHGFNGWRRPILTDSGGYQVYSLSNTRKIKEEGVTFKSHIDGSKHTFTPEGVMDIQRTIGADIIMAFDECTPYPCEYGYARQSMEMTHRWLGRCIDRFDSTEGLYGYKQTLFPIVQGSTYADLRRQSAEVIASKEREGNAIGGLAVGEPAEEMYAMIELVNEILPADKPRYLMGVGTPANILEAIALGVDMFDCVMPTRNARHGLLFTTEGIMNIKNEKWSRDFSPIDAGLGGYASTFYSKAYLRHLVKSEELLGGQIASLHNLTFYLWLVRQAREHIAAGDFVAWKNEMVVRLMQRL

SEQ ID NO: 61106 - protein, 376 aa, Spirosoma sp.
  misc_feature (1)..(376): tr|A0A4Q2UW77|A0A4Q2UW77_9BACT Queuine tRNA-ribosyltran sferase OS=Spirosoma sp. TY50 OX=2502893 GN=tgt PE=3 SV =1
MNFSITAHDPQSKARTGLLTTDHGPIQTPIFMPVGTAGTVKAVHQRELETDINAEIILGNTYHLYLRPGLDVLGQAGGLHAFNGWRRPILTDSGGYQVYSLSGTRKIKEEGVTFMSHIDGSKHHFSPEGVMDIQRTIGADIIMAFDECTPYPCEYGYARASMEMTHRWLDRCIDRFDSTEGHYGYKQTLFPIVQGSTYPDLRKQSATFIASKEREGNAIGGLAVGEPAEAMYETIELVNEILPADKPRYLMGVGTPANILEAIARGVDMFDCVMPTRNARHGLLFTTEGIMNIKNEKWSRDFSPIDAGLGGYASTFYSKAYLRHLFKADELLSGQIASLHNLTFYLWLVRQARAHIEAGDFLSWKNEMVVRLMQRM

SEQ ID NO: 61107 - protein, 376 aa, Spirosoma sp.
  misc_feature (1)..(376): tr|A0A515A714|A0A515A714_9BACT Queuine tRNA-ribosyltran sferase OS=Spirosoma sp. KCTC 42546 OX=2520506 GN=tgt P E=3 SV=1
MTFSITAHDPQSKARTGTLTTDHGPIQTPIFMPVGTAGTVKAVHQRELEADINADIILGNTYHLYLRPGLEVLSQAGGLHGFNGWKRPILTDSGGYQVYSLSNTRKIKEEGVTFKSHIDGSKHTFTPEVVMDIQRVIGADIMMAFDECTPYPCEYGYARQSMEMTHRWLDRCIGRFDATEGHYGYRQTLFPIVQGSTYKDLRRQSAETIASKEREGNAIGGLAVGEPAEEMYTTIELVNSILPADKPRYLMGVGTPANILEAIALGVDMFDCVMPTRNARHGLLFTTEGIINIKNEKWSRDFSPIDAGLGGYASTFYSKAYLRHLVKSEELLGGQIASLHNLTFYLWLVRQARAHIEAGDFVSWKNEMVVRLMQRL

SEQ ID NO: 61108 - protein, 369 aa, Spongiibacter sp.
  misc_feature (1)..(369): tr|A0A2D7WFE2|A0A2D7WFE2_9GAMM Queuine tRNA-ribosyltran sferase OS=Spongiibacter sp. OX=2024860 GN=tgt PE=3 SV= 1
MQFSRSAQDGLARRGELSFPRGKVQTPAFMPVGTYGTVKGMLPRDIHEIGAEIILGNTFHLMLRPGTEVVKAHGDLHDFIGWEGPILTDSGGFQVWSLGKLRKISEEGVSFQSPVDGSKVYMDPERSMEVQRELGSDIVMIFDECTPYPATEAEARSSMELSLRWAGRSKSAHEGNDAALFGIIQGGMYPELRRESLAGLQDIGFDGYAIGGLSVGEPKEEMLKVLDSLADHLPEQQPRYLMGVGKPSDILEAVMRGVDMFDCVMPTRNARNGHLFTSTGVIKIRNAVHRHSDQPLDANCDCYTCQNFSRAYLHHLDKCREILGAQLNTIHNLRYYQNHMAAIRQAIEQGRLAEFAEEFYASQDGRADV

SEQ ID NO: 61109 - protein, 369 aa, Spongiibacter sp.
  misc_feature (1)..(369): tr|A0A2E2KBQ7|A0A2E2KBQ7_9GAMM Queuine tRNA-ribosyltran sferase OS=Spongiibacter sp. OX=2024860 GN=tgt PE=3 SV= 1
MSFTLSGQDGLARRGELDFPRGKVQTPAFMPVGTYGTVKGMLPRDIHEIGAEIILGNTFHLMLRPGTEVVKAHGDLHDFIGWEGPILTDSGGFQVWSLGKLRKISEEGVSFQSPVDGSKVYMDPERSMEVQRELGSDIVMIFDECTPYPATEDEARKSMELSLRWAARSKAAHAGNDAALFGIIQGGMYPNLRSESLAGLREIGFDGYAIGGLSVGEPKDEMLKVLDGLAPELPQDRPRYLMGVGKPSDILEAVMRGVDMFDCVMPTRNARNGHLFTSTGVIKIRNAVHRYSDQPLDANCDCYTCQNFSRAYLHHLDKCREILGAQLNTIHNLRYYQNHMAGIRKAIEENRLGAFADEFYASQDGRADV

SEQ ID NO: 61110 - protein, 371 aa, Spongiibacteraceae bacterium
  misc_feature (1)..(371): tr|A0A2E2JZY5|A0A2E2JZY5_9GAMM Queuine tRNA-ribosyltran sferase OS=Spongiibacteraceae bacterium OX=2026793 GN=t gt PE=3 SV=1
MSFSVSGSDGEARRGELTFSRGTVQTPAFMPVGTYGTVKGMLPRDIKEIGAEIILGNTFHLMLRPGTEVVKAHGDLHDFSGWQGPILTDSGGFQVWSLGKLRKITEEGVSFQSPVDGSKVYLDPETSIDVQHELGADIVMIFDECTPYPATEKQARDSMELSQRWARRSRDAHGDHPSALFGIVQGGMYPNLREESLKGLAEIGFDGYAIGGLSVGEPKEDMLNVLDHLAHAMPADKPRYLMGVGKPEDILEAVRRGVDMFDCVMPTRNARNGHLFTSGGVVKIRNSRHKHSTAPLDENCDCYTCENFSRAYLHHLDRCKEILGAQLNTIHNLRFYQTHMAGICSAIENNSLDAFADQFYQSQQREERCTS

SEQ ID NO: 61111 - protein, 371 aa, Spongiibacteraceae bacterium
  misc_feature (1)..(371): tr|A0A2E7INX2|A0A2E7INX2_9GAMM Queuine tRNA-ribosyltran sferase OS=Spongiibacteraceae bacterium OX=2026793 GN=t gt PE=3 SV=1
MQFSLASTDGEARRGELSFPRGKVQTPAFMPVGTYGTVKGMLPRDIHEIGAEIILGNTFHLMLRPGTEVVKAHGDLHDFSGWQGPILTDSGGFQVWSLGKLRKITEEGVRFQSPVDGSPVYLDPETSIGVQHDLGADIVMIFDECTPYPATEQQARESMELSQRWAGRSRAAHGDHPSALFGIVQGGMYPALRTESLNALVNIGFDGYAIGGLSVGEPKDDMLNVLDHLANTMPADKPRYLMGVGKPEDILEAVRRGVDMFDCVMPTRNARNGHLFTSGGVIKIRNARHRHSTVPLDAECDCYTCQNFSRSYLHHLDRCKEILGAQLNTIHNLRYYQNHMAAIREAIEAGRLDAFADDFYEAQKREEQCTN

SEQ ID NO: 61112 - protein, 371 aa, Sporanaerobacter acetigenes
  misc_feature (1)..(371): tr|A0A1M5XTY7|A0A1M5XTY7_9FIRM Queuine tRNA-ribosyltran sferase OS=Sporanaerobacter acetigenes DSM 13106 OX=112 3281 GN=tgt PE=3 SV=1
MAVRFELLKESSECNARLGKLYTPHGVIETPIFMPVGTRATVKAMTPEEVKDLGAQIILSNTYHLYLKPGHKLIEEAGGLHKFMNWDKPILTDSGGFQVFSLGKLRKISEEGVEFRSHIDGSKHFISPEKSIEIQNSLGSDIMMALDECTPYPSDYEYTKESLERTTRWAKRCKEYHKDWDRQALFGIVQGGMYKDLREQSIKEITDLDLPGYAIGGLSVGEPKELYRDMLSFTAPKLPKNKARYLMGVGSPDYLFDAVISGIDMADCVLPTRIARNGTVLTSHGKLVIKNAEYKRDFGKLDPECDCYTCKNYSRAYIRHLFNVDEILAARLATIHNLYFLIKLMENIRTAIKEDRLLEYREQFYKKYGYI

SEQ ID NO: 61113 - protein, 371 aa, Sporanaerobacter sp.
  misc_feature (1)..(371): tr|A0A410QC16|A0A410QC16_9FIRM Queuine tRNA-ribosyltran sferase OS=Sporanaerobacter sp. JN28 OX=2507161 GN=tgt PE=3 SV=1
MAAKFEVIKESQECKARLGKLYTPHGIVETPVFMPVGTQATVKAMTPEEVKTLGAQIILANTYHLYLRPGHELIREAGGIHKFMNWNGPILTDSGGFQVFSLGDLRKITEEGVEFRSYIDGSKHFLRPEDSIEIQNCLGSDIIMAFDECTPYPSTWEYTKESMERTGRWAERCKEYHEDWDKQSLFGIVQGGMYKDLREKSAEQITSLNLPGYAIGGLSVGEPKELMYDILEFTTLLLPENKPRYLMGVGSPDYLFESVIRGVDMADCVLPTRIGRNGTVLTSRGKIIIKNGIYKRDFGKLDEECDCYTCTHYSRAYIRHLFNVHEILGARLTTIHNLYFLLKLMENIREAIKQDRLLEYRDEFYKKFGYV

SEQ ID NO: 61114 - protein, 371 aa, Sporanaerobacter sp.
  misc_feature (1)..(371): tr|A0A1G4FPQ2|A0A1G4FPQ2_9FIRM Queuine tRNA-ribosyltran sferase OS=Sporanaerobacter sp. PP17-6a OX=1891289 GN=t gt PE=3 SV=1
MAAKFEVIKESQECKARLGKLYTPHGIVETPVFMPVGTQATVKAMTPEEVKALGAQIILANTYHLYLRPGHELIKEAGGIHKFMNWNGPILTDSGGFQVFSLGDLRKITEEGVEFRSYIDGSKHFLRPEDSIEIQNCLGSDIIMAFDECTPYPSTWEYTKESMERTGRWAERCKEYHEDWDKQSLFGIVQGGMYKDLREKSAEQITSLNLPGYAIGGLSVGEPKELMYDILEFTTLLLPENKPRYLMGVGSPDYLFESVIRGVDMADCVLPTRIGRNGTVLTSRGKIIIKNGIYKRDFGKLDEECDCYTCTHYSRAYIRHLFNVHEILGARLTTIHNLYFLLKLMENIREAIKQDRLLEYRDEFYKKFGYV

SEQ ID NO: 61115 - protein, 376 aa, Sporobacter termitidis
  misc_feature (1)..(376): tr|A0A1M5TF60|A0A1M5TF60_9FIRM Queuine tRNA-ribosyltran sferase OS=Sporobacter termitidis DSM 10068 OX=1123282 GN=tgt PE=3 SV=1
MFRLIAKEGRARRGEFTTAHGVVQTPVFMNVGTQAAIKGALSSEDLERIGCQIELSNTYHLHLRPGDMLIRAQGGLHKFMSWDRPILTDSGGFQIFSLAGLRKISEEGVTFSSHIDGRRIFMSPEDCMRIQANLGSDIAMAFDECVEIPSPRDYVEKSCDRTYRWLVRCRDEMRRQMEQPDAVNRGELLFGINQGAVFPELRIRHMRQIAELDLPGYAIGGLAVGETVGEMYDIIETVEEHMPADKPRYLMGVGTPANILEGVARGVDFFDCVMPARNGRHGHLYTWSGVINMNNEKHAGDSRPIDETCACPVCQRYSRAYLRHLFKAEEMLALRLAVMHNLYFYNALMQKIRDALDCGEFHAFRARHAEILSNRI

SEQ ID NO: 61116 - protein, 376 aa, Sporocytophaga myxococcoides
  misc_feature (1)..(376): tr|A0A098LCB3|A0A098LCB3_9BACT Queuine tRNA-ribosyltran sferase OS=Sporocytophaga myxococcoides OX=153721 GN=tg t PE=3 SV=1
MVFKIQSTDKKSKARTGTIQTDHGEIKTPIFMPVGTAGTVKSIHQRELESDINAQIILGNTYHLYLRPGLDVLSQAGGIHKFNGWNRPILTDSGGYQVYSLSGTRKIKEEGVTFASHIDGSKHTFTPENVMDIQRTIGADIIMAFDECTPYPCEYKYARKSMEMTHRWLKRCCDRFDSTEPKYGYGQTLFPIVQGSCFKDLRLASAEKIASFNREGNAIGGLSVGEPAEIMYEMTEIVCSVLPWEKPRYLMGVGTPANLLESIALGIDMFDCVMPTRNARNGMIFTTEGIINIKNEKWKSDFSEIDPGLPSFLKNYYSKAYLRHLVASKEILGAQIATLQNLTFYLWLMNEARTKIEEGTFSEWKDLTVKKIMTRL

SEQ ID NO: 61117 - protein, 381 aa, Sporolactobacillus inulinus
  misc_feature (1)..(381): tr|A0A0U1QRV8|A0A0U1QRV8_9BACL Queuine tRNA-ribosyltran sferase OS=Sporolactobacillus inulinus CASD OX=1069536 GN=tgt PE=3 SV=1
MSQPAVTYELIKTDKKTGARLGKLHTPHGTFDTPMFMPVGTQATVKTMSPEELKEMGAGVILSNTYHLWLRPGEDIVQEAGGLHPFMNWDQGILTDSGGFQVFSLSKLRDISEEGVRFRNHLNGEKLFLSPEKSIAIQNALGSDIMMAFDECPPFDSSFDYMKTSVERTSRWAARCLEANANPDRQALFGIVQGGGNKELRMQSARDLTSLDFPGYAIGGLSVGEPKEKMNEMLTYTTPLLPADKPRYLMGVGSPDSLIDGVIRGIDMFDCVLPTRIARNGTCMTEHGRIVIRNAKFAHDFRPIDESCDCKVCRNYSRAYIRHLVKANETFGFRLTTYHNLYFLIKLMKRVRSAIREDRLLEFKASFFESYGFNKPGAKNF

SEQ ID NO: 61118 - protein, 381 aa, Sporolactobacillus inulinus; identical to SEQ ID NO: 61117
  misc_feature (1)..(381): tr|A0A4Y1ZJ48|A0A4Y1ZJ48_9BACL Queuine tRNA-ribosyltran sferase OS=Sporolactobacillus inulinus OX=2078 GN=tgt P E=3 SV=1

SEQ ID NO: 61119 - protein, 381 aa, Sporolactobacillus laevolacticus
  misc_feature (1)..(381): tr|V6J0J6|V6J0J6_9BACL Queuine tRNA-ribosyltransferase OS=Sporolactobacillus laevolacticus DSM 442 OX=1395513 GN=tgt PE=3 SV=1
MSNAAVTYELIKTDKQTGARLGKLHTPHGTFDTPMFMPVGTQATVKTMSPEELKEMGAGVILSNTYHLWLRPGEEIVEEAGGLHKFMNWDQGILTDSGGFQVFSLSKLRDISEEGVHFRNHLNGAKLFLTPEKSIAIQNALGSDIMMAFDECPPFDSSFDYMKTSVERTSRWAERCLAANSHPDRQALFGIVQGGGFKELREQSARDLTSLDFPGYAIGGLSVGEPKDKMNEMLSYTTPLLPSGKPRYLMGVGSPDSLIDGAIRGIDMFDCVLPTRIARNGTCMTEHGRLVIRNAKYAHDFGPIDESCDCKVCRTYSRAYIRHLVKANETFGFRLTTYHNLYFLIKLMERVRSAIKEDRLLEFRESFFESYGFNKPDAKNF

SEQ ID NO: 61120 - protein, 381 aa, Sporolactobacillus nakayamae
  misc_feature (1)..(381): tr|A0A1I2NS14|A0A1I2NS14_9BACL Queuine tRNA-ribosyltran sferase OS=Sporolactobacillus nakayamae OX=269670 GN=tg t PE=3 SV=1
MSHAAVTYELIKTDKQTGARLGKLHTPHGTFDTPMFMPVGTQATVKTMSPEELKEMGAGVILSNTYHLWLRPGEDIVQEAGGLHHFMNWDQGILTDSGGYQVFSLSKLRDISEEGVHFRNHLNGEKLFLSPEKSIAIQNALGSDIIMAFDECPPFDSTFDYMKASVERTSRWAERCLAANVNPDRQALFGIVQGGGYKELRELSARTLTSLDFPGYAIGGLSVGEPKDKMNEMLTYTTPLLPSDKPRYLMGVGSPDSLIDGAIRGIDMFDCVLPTRIARNGTCMTEHGRLVIRNAKYAHDFGPIDESCDCKVCRNYSRAYIRHLVKANETFGFRLTTYHNLYFLIKLMERVRSAIKEDRLLEFREAFFEAYGFNKPGAKNF

SEQ ID NO: 61121 - protein, 380 aa, Sporolactobacillus shoreae
  misc_feature (1)..(380): tr|A0A4Z0GS82|A0A4Z0GS82_9BACL Queuine tRNA-ribosyltran sferase OS=Sporolactobacillus shoreae OX=1465501 GN=tgt PE=3 SV=1
MTVPVTYELIKTDRQTGARLGRLHTPHGVFDTPMFMPVGTQATVKTMSPRELKEMGAGVILSNTYHLWLRPGEDIIEEAGGLHQFMNWDQGILTDSGGFQVFSLSKLRDITEEGVHFRNHLNGAKMFLTPEKSIAIQNALGSDIMMSFDECPPYPATYEYMKQSVERTSRWAERCLAANSHPDRQALFGIVQGGVFKELRKQSAQELTSLDFPGYSIGGLSVGEPKPAMNEMLAYTTPFLPADKPRYLMGVGSPDSLIDGAIRGIDMFDCVLPTRIARNGTCMTSHGRLVIKNAEFARDFGPIDDQCDCEVCRNYSRAYIRHLVKANETFGFRLTSYHNLYFLIKLMEHVRSAIREDRLLEFREQFFESYGFNKPDAKNF

SEQ ID NO: 61122 - protein, 380 aa, Sporolactobacillus sp.
  misc_feature (1)..(380): tr|A0A4Q4IN35|A0A4Q4IN35_9BACL Queuine tRNA-ribosyltran sferase OS=Sporolactobacillus sp. THM19-2 OX=2511171 GN =tgt PE=3 SV=1
MSDPVTYELIKTDRRTGARLGRLHTPHGTFDTPMFMPVGTQATVKTMSPRELKEIGAGVILSNTYHLWLRPGEDIVREAGGLHRFMNWDRGILTDSGGFQVFSLSKIRDITEEGVHFRNHLNGAKMFLSPEKAIAIQNALGSDIMMSLDECPPYPSTWDYMKKSVERTSRWAERGLNANRNPETQALFGIVQGGVFKDLRKQSAEELTSLDFPGYSIGGLSVGEPKADMNQMLEFTVPLLPSGKPRYLMGVGSPDSLIDGVIRGIDMFDCVLPTRIARNGTCMTEHGRLVIKNAQYAHDFGPIDADCDCAVCRNYSRAYIRHLIKANETFGFRLTTYHNLYFLLKLMRRVRSAIKADRLLDFREDFFESYGFNKPDAKNF

SEQ ID NO: 61123 - protein, 380 aa, Sporolactobacillus sp.
  misc_feature (1)..(380): tr|A0A4Q4JIU9|A0A4Q4JIU9_9BACL Queuine tRNA-ribosyltran sferase OS=Sporolactobacillus sp. THM7-7 OX=2511172 GN= tgt PE=3 SV=1
MTDAVTYELVKKEKHTGARLGRLRTPHGTFATPMFMPVGTQATVKTMSPRELKEMGAGVILSNTYHLWLRPGEDIVKEAGGLHRFMNWDRGILTDSGGFQVFSLSKLRDITEEGVHFRNHLNGAKLFLTPEKSVAIQQALGSDIMMAFDECPPYPCAYDYMKESTERTSRWAERCLSANSRPDRQSLFGIVQGGTFKDLRQQSARDLTALDFPGYAVGGLSVGEPKQEMNEMLEETTPLLPENKPRYLMGVGSPDSLIDGAIRGIDMFDCVLPTRIARNGTCMTEHGRLVIRNAQYARDFRPIDEHCDCLVCRTYSRAYIRHLVKANETFGFRLTTYHNLYFLLKLMERVRSAIMEDRLLDFREQFFESYGFNKPNAKNF

SEQ ID NO: 61124 - protein, 381 aa, Sporolactobacillus terrae
  misc_feature (1)..(381): tr|A0A410D9W6|A0A410D9W6_9BACL Queuine tRNA-ribosyltran sferase OS=Sporolactobacillus terrae OX=269673 GN=tgt P E=3 SV=1
MSQPAVTYELIKTDKKTGARLGKLHTPHGTFDTPMFMPVGTQATVKTMSPEELKEMGAGVILSNTYHLWLRPGEDIVQEAGGLHPFMNWDQGILTDSGGFQVFSLSKLRDISEEGVHFRNHLNGEKLFLSPEKSIAIQNALGSDIMMAFDECPPFDSSFDYMKASVERTSRWAARCLEANVNPDRQSLFGIVQGGGFKALRMQSARDLTSLDFPGYAIGGLSVGEPKEKMNEMLTYTTPLLPADKPRYLMGVGSPDSLIDGVIRGIDMFDCVLPTRIARNGTCMTEHGRLVIRNAKFAHDFRPIDESCDCKVCRNYSRAYIRHLVKANETFGFRLTTYHNLYFLIKLMKRVRSAIREDRLLELKASFFESYGFNKPGAKNF

SEQ ID NO: 61125 - protein, 370 aa, Sporolituus thermophilus
  misc_feature (1)..(370): tr|A0A1G7IFF8|A0A1G7IFF8_9FIRM Queuine tRNA-ribosyltran sferase OS=Sporolituus thermophilus DSM 23256 OX=112328 5 GN=tgt PE=3 SV=1
MAITFELIKQCSKTGARAGRLYTPHGVFETPIFMPVGTQATVKAMSPDELKAMGAGIILSNTYHLYLRPGHELVAEAGGLHGFMHWDRGILTDSGGFQVFSLGPLRKITEEGVAFRSHIDGSKHFLSPEKATEIQMALGADIIMAFDECVPYPAEYDYAKASTERTTRWAERCKKAHTRKDQALFGIVQGGMYKDLRAMSARDLVAMDFPGYAVGGLSVGEPKPLMYEMLEHTVPLLPANKPRYLMGVGTPDCLVEGVMYGIDMFDCVFPTRVARNGTVMTSRGKLVVKNAEYARDFRPIDPDCDCYTCRNFSRAYIRHLLKAEEIFGLRLTTIHNLHFLLNFMRNMRKAILEDRFLAFRQEFRAQYQLH

SEQ ID NO: 61126 - protein, 369 aa, Sporomusa acidovorans
  misc_feature (1)..(369): tr|A0A259US00|A0A259US00_9FIRM Queuine tRNA-ribosyltran sferase OS=Sporomusa acidovorans DSM 3132 OX=1123286 GN =tgt PE=3 SV=1
MAVTYELIKRCSKTGARAGRLYTPHGVFDTPIFMPVGTQATVKAMSPDELKAMGAGIILSNTYHLYLRPGHDLVAEAGGLHKFMQWDRGILTDSGGFQVFSLGPLRKITEDGVTFRSHIDGSKHFLSPEKATEVQMALGSDIIMAFDECVPFPADHEYARESTERTTRWAERCREAHTRNDQALFGIVQGGMYKDLRAMSAKDLVSLDFPGYAIGGLSVGEPKTLMYEMLEHTVPLLPENKPRYLMGVGTPDCLVEGVMRGIDMFDCVFPTRVARNGTVMTTHGRLVVKNAEFARDFRPIDPECGCYACKNFSRAYIRHLLKTEEIFGLRLTTTHNLHFLLNFMREMRNSILEDRFLAFQEEFWAHYRK

SEQ ID NO: 61127 - protein, 369 aa, Sporomusa malonica
  misc_feature (1)..(369): tr|A0A1W2AGX6|A0A1W2AGX6_9FIRM Queuine tRNA-ribosyltran sferase OS=Sporomusa malonica OX=112901 GN=tgt PE=3 SV= 1
MAITYELIKRCSKTGARVGRLYTPHGVFDTPIFMPVGTQATVKAMSPDELKAMGAGIILSNTYHLYLRPGHDLVAEAGGLHKFMQWDRGILTDSGGFQVFSLGPLRKITEDGVTFRSHIDGSKHFLSPEKATEVQMALGADIIMAFDECVPYPADHEYARQSTERTTRWAERCKKAHTRKDQALFGIVQGGMYRDLRAMSAKDLISLDFPGYAVGGLSVGEPKPLMYEMLEHTVPLLPENKPRYLMGVGTPDCLVEGVMYGIDMFDCVFPTRVARNGTVMTSRGRLVVKNAEFARDFRPIDPDCGCYACRNFSRAYIRHLLKTEEIFGMRLTTTHNLHFLLNFMKDMRKAILEDRFLAFREEFWAHYRK

SEQ ID NO: 61128 - protein, 369 aa, Sporomusa silvacetica
  misc_feature (1)..(369): tr|A0A259UVC4|A0A259UVC4_9FIRM Queuine tRNA-ribosyltran sferase OS=Sporomusa silvacetica DSM 10669 OX=1123289 G N=tgt PE=3 SV=1
MAITYELIKQCSKTGARVGRLYTPHGVFDTPIFMPVGTQATVKAMSPDELKDMGAGIILSNTYHLYLRPGHDLVAEAGGLHKFMQWDRGILTDSGGFQVFSLGPLRKITEEGVTFHSHIDGSKHFLSPEKATEVQMALGADIIMAFDECVPYPADHEYARQSTQRTTRWAERCKKAHTRKDQALFGIVQGGMYKDLRTMSAQDLISLDFSGYAIGGLSVGEPKPLMYEMLDHTVPLLPSNKPRYLMGVGTPDCLLEGVMYGIDMFDCVFPTRVARNGTVMTNRGRLIIKNAEFSRDFRPIDPECGCYTCRNFSRAYIRHLLKTEEIFGLRLTTTHNLYFLLNFMKEMRKAILDDRFLAFREEFWAHYRK

SEQ ID NO: 61129 - protein, 369 aa, Sporomusa sp.
  misc_feature (1)..(369): tr|A0A0U1L2X4|A0A0U1L2X4_9FIRM Queuine tRNA-ribosyltran sferase OS=Sporomusa sp. An4 OX=411922 GN=tgt PE=3 SV=1
MAITYELIKQCSKTGARVGRLYTPHGVFDTPIFMPVGTQATVKAMSPDELKEMGAGIILSNTYHLYLRPGHDLVAEAGGLHKFMQWDRGILTDSGGFQVFSLGPLRKITEEGVTFRSHIDGSKHFLSPEKATEVQMALGADIIMAFDECVPYPADHEYARQSTQRTTRWAERCKKAHTRKDQALFGIVQGGMYKDLRTMSVQDLIALDFSGYAIGGLSVGEPKPLMYEMLDHTVPLLPSNKPRYLMGVGTPDCLLEGVMYGIDMFDCVFPTRVARNGTVMTSRGRLVIKNAEFSRDFRPIDPECGCYTCRNFSRAYIRHLLKTEEIFGLRLTTTHNLHFLLNFMKEMRKAILDDRFLAFREEFWTHYRK

SEQ ID NO: 61130 - protein, 369 aa, Sporomusa sp.
  misc_feature (1)..(369): tr|A0A562GRC3|A0A562GRC3_9FIRM Queuine tRNA-ribosyltran sferase OS=Sporomusa sp. KB1 OX=943346 GN=tgt PE=3 SV=1
MAITYELIKQCSKTGARVGRLYTPHGVFDTPIFMPVGTQATVKAMSPDELKDMGAGIILSNTYHLYLRPGHDLVAEAGGLHKFMQWDRGILTDSGGFQVFSLGPLRKITEEGVTFRSHIDGSKHFLSPEKATEVQMALGADIIMAFDECVPYPADHEYARQSTQRTTRWAERCKKAHTRKDQALFGIVQGGMYKDLRTMSAQDLIALDFSGYAIGGLSVGEPKPLMYEMLDHTVPLLPANKPRYLMGVGTPDCLLEGVMYGIDMFDCVFPTRVARNGTVMTNRGRLVIKNAEFSRDFRPIDPECGCYTCRNFSRAYIRHLLKTEEIFGLRLTTTHNLYFLLNFMKEMRKAILDDRFLAFREEFWAHYRK

SEQ ID NO: 61131 - protein, 369 aa, Sporomusa sphaeroides
  misc_feature (1)..(369): tr|A0A1U7MLK8|A0A1U7MLK8_9FIRM Queuine tRNA-ribosyltran sferase OS=Sporomusa sphaeroides DSM 2875 OX=1337886 GN =tgt PE=3 SV=1
MAITYELIKRCSKTGARAGRIHTPHGVFDTPIFMPVGTQATVKAMSPDELKAMGAGIILSNTYHLYLRPGHDLVAEAGGLHKFMQWDRAILTDSGGFQVFSLGPLRKITEDGVTFRSHIDGSKHFLSPEKATEVQMALGADIIMAFDECVPYPAEHEYARQSTERTTRWAERCRKAHTRKDQALFGIVQGGMYKDLRTMSARDLVSLDFPGYAIGGLSVGEPKPLMYEMLEHTVPLLPQNKPRYLMGVGTPDCLLEGVMYGIDMFDCVFPTRVARNGTVMTNKGRLVVKNAEFARDFRPIDPDCNCYTCRNFSRAYIRHLLKTEEIFGLRLTTTHNLHFLVNFMKEMRQSILDERFLEFREEFWAYYHK

SEQ ID NO: 61132 - protein, 369 aa, Sporomusa termitida
  misc_feature (1)..(369): tr|A0A517DU77|A0A517DU77_9FIRM Queuine tRNA-ribosyltran sferase OS=Sporomusa termitida OX=2377 GN=tgt PE=3 SV=1
MAITYELIKRCPQTGARAGRLYTPHGVFDTPIFMPVGTQATVKAMSPDELKAMGAGIILSNTYHLYLRPGHDLVAEAGGLHKFMQWDRGILTDSGGFQVFSLGPLRKITEEGVTFRSHIDGSKHFLSPEKAVEVQMALGADIIMAFDECVPYPADHAYARQSTERTTRWAERCRQAHTRKDQALFGIVQGGMYKDLRSLSVTDLISLNFPGYAVGGLSVGEPKPLMYEMLEHTVPLLPANKPRYLMGVGTPDCLLEGVMYGIDMFDCVFPTRVARNGTVMTSRGRLVVKNAEFARDFQPLDPDCGCYTCRNFSRAYIRHLLKTEEIFGLRLTTTHNLHFLLNFMQDMRKSILEDRFLAFREEFWSHYRK

SEQ ID NO: 61133 - protein, 370 aa, Sporomusaceae bacterium
  misc_feature (1)..(370): tr|A0A402BPI1|A0A402BPI1_9FIRM Queuine tRNA-ribosyltran sferase OS=Sporomusaceae bacterium OX=1917525 GN=tgt PE =3 SV=1
MAITFELVKRCSKTGARAGRLYTPHGVFDTPIFMPVGTQATVKAMSPDELKAMGAGIILSNTYHLYLRPGHDLVAEAGGLHNFMQWDRGILTDSGGFQVFSLGPLRKITEDGVTFRSHLDGSKHFLSPEKAIEVQMALGADIIMAFDECVPHPAEHDYARQSTERTTRWAERCKKAHTRKDQALFGIVQGGMYKDLRSMSVRDLVSLDFPGYAVGGLSVGEPKPLMYEMLEHTVPQLPINKPRYLMGVGTPDCLVEGVMYGIDMFDCVFPTRVARNGTVMTSRGRLVVKNAEYARDFRPIDPECGCYTCRNFSRAYVRHLLKTEEIFGLRLTTMHNLHFLLDFMKRMRQAIIEDRFVAFRQEFLAHYQLR

SEQ ID NO: 61134 - protein, 379 aa, Sporosarcina globispora
  misc_feature (1)..(379): tr|A0A0M0GBL9|A0A0M0GBL9_SPOGL Queuine tRNA-ribosyltran sferase OS=Sporosarcina globispora OX=1459 GN=tgt PE=3 SV=1
MTAIRYELIKTCKQTGARLGRVHTPHGSFETPVFMPVGTLATVKTMSPEELVEMGAGIILSNTYHLWLRPGQEIVEEAGGLHKFMNWDRAILTDSGGFQVFSLSEFRKIEEEGVHFRNHLNGDKLFLSPEKAMAIQNSLGSDIMMAFDECPPYPASFDYMKKSVERTSRWAERCLQAHKRQNDQGLFGIVQGGEYEELRKQSARDLTSLDFPGYAVGGLSVGEPKDVMNRVLEFTTPLLPSDKPRYLMGVGSPDSLIDGSIRGIDMFDCVLPTRIARNGTLMTSNGRLVVKNAKFARDFGPIDENCDCYTCRNYSRAYIRHLIRCDETFGIRLTTYHNLYFLLKLMEQVRQAIREDRLGDFREEFFERYGFNKPNAKNF

SEQ ID NO: 61135 - protein, 379 aa, Sporosarcina luteola
  misc_feature (1)..(379): tr|A0A511Z4J6|A0A511Z4J6_9BACL Queuine tRNA-ribosyltran sferase OS=Sporosarcina luteola OX=582850 GN=tgt PE=3 S V=1
MAAITYEHIKTCKQTGARLGIVHTPHGSFETPAFMPVGTQATVKTMSPEELKEMGAGIILSNTYHLWLRPGHDIIKEAGGLHKFMNWDRPILTDSGGFQVFSLSDFRKIEEEGVHFRHHLNGSKLFLSPEKAMEIQNALGSDIMMAFDECPPYPATYEYMKASVERTSRWAERCLKAHARPEDQGLFGIVQGGEFEELRKQSAKDLVSLDFPGYAIGGLSVGEPKDVMNRALEFTTPLLPENKPRYLMGVGSPDSLIDGAIRGVDMFDCVLPTRIARNGTLMTSEGRLVVKNAKYERDFGPLDPNCDCYACKNYSRAYIRHLIRANETFGIRLTSYHNLHFLLRLMEQIRDAIRNDRLGDFREEFFEQYGFNKPNAKNF

SEQ ID NO: 61136 - protein, 379 aa, Sporosarcina newyorkensis
  misc_feature (1)..(379): tr|F9DVG8|F9DVG8_9BACL Queuine tRNA-ribosyltransferase OS=Sporosarcina newyorkensis 2681 OX=1027292 GN=tgt PE= 3 SV=1
MAAITYEHIKTCKQTGARLGIVHTPHGSFETPAFMPVGTQASVKTMAPEELKEMGAGIILSNTYHLWLRPGHEIVKEAGGLHKFMNWDRPILTDSGGFQVFSLSKFRDIKEEGVHFRNHINGDKLFLSPEKAMEIQNALGSDIMMAFDECPPFPATHEYMKASVERTSRWAERCLEAHQRSGDQGLFGIVQGGEYEDLRKQSAKDLVSLDFPGYAIGGLSVGEPKDVMNRALEFTTPLLPENKPRYLMGVGSPDSLIDGAIRGIDMFDCVLPTRIARNGTLMTSEGRLVVKNAKYERDFGPLDPNCDCYACKNYSRAYIRHLIRAGETFGIRLTSYHNLHFLLNLMEQVRQAIREDRLGDFREEFFEQYGFNKPNAKNF

SEQ ID NO: 61137 - protein, 379 aa, Sporosarcina newyorkensis; identical to SEQ ID NO: 61136
  misc_feature (1)..(379): tr|A0A1T4XM53|A0A1T4XM53_9BACL Queuine tRNA-ribosyltran sferase OS=Sporosarcina newyorkensis OX=759851 GN=tgt P E=3 SV=1

SEQ ID NO: 61138 - protein, 379 aa, Sporosarcina pasteurii
  misc_feature (1)..(379): tr|A0A380BTZ5|A0A380BTZ5_SPOPA Queuine tRNA-ribosyltran sferase OS=Sporosarcina pasteurii OX=1474 GN=tgt PE=3 S V=1
MTAIRYEHIKTCKQTGARLGIVHTPHGSFETPAFMPVGTQATVKTMSPEELKAMDAGIILSNTYHLWLRPGHDIVKEAGGLHKFMNWDRPILTDSGGFQVFSLSKFRTIEEEGVHFRHHLNGSKLFLSPEKATEIQNALGADIMMAFDECPPYPATYDYMKASVERTSRWAERCLNAHGRPHDQALFGIVQGGEFEALRKQSAKDLISMDFPGYAIGGLSVGESKEVMNEVLEFTTPLLPEDKPRYLMGVGSPRSLIDGAIRGVDMFDCVLPTRIARNGTLMTSKGRLVVRNATYKRDYGPIDENCTCYTCQNYSRAYIHHLIRADETFGLRLTSYHNLHFLLNMMEQVREAIRQDRLGDFRDEFFEQYGFNKPNAKNF

SEQ ID NO: 61139 - protein, 379 aa, Sporosarcina psychrophila
  misc_feature (1)..(379): tr|A0A127VXL7|A0A127VXL7_SPOPS Queuine tRNA-ribosyltran sferase OS=Sporosarcina psychrophila OX=1476 GN=tgt PE= 3 SV=1
MTAVTYEHIKTCKQTGARLGIVHTPHGSFETPAFMPVGTQATVKTLSPEELKEVGAGIILSNTYHLWLRPGQDIIEEAGGLHKFMNWDRPILTDSGGFQVFSLSEFRKIEEEGVHFRHHLNGSKLFLSPEKAMEIQNSLGADIMMAFDECPPFPATREYMKASVERTSRWAERCLGAHARPADQALFGIIQGGEFEDLRAQSAKDLVSLDFPGYAIGGLSVGEPKDIMNRILEHTTPLLPQDKPRYLMGVGSPDSLIDGAIRGIDMFDCVLPTRIARNGTLMTSEGRLNIRNAKFERDFRPLDEKCSCHVCKTYSRAYIRHLIRADETFGIRLTSYHNLHFLLNLMEQVRDAIRHDRLGDFREEFFESYGFNKPNAKNF

SEQ ID NO: 61140 - protein, 379 aa, Sporosarcina sp.
  misc_feature (1)..(379): tr|A0A3D8YUZ3|A0A3D8YUZ3_9BACL Queuine tRNA-ribosyltran sferase OS=Sporosarcina sp. BI001-red OX=2282866 GN=tgt PE=3 SV=1
MPAVTYEHIKTCKQTGARLGIVHTPHGSFETPAFMPVGTMATVKTMSPEELKEIGAGIILSNTYHLWLRPGHEIIREAGGLHKFMNWDRPILTDSGGFQVFSLSDMRKIEEEGVHFRHHLNGSKLFLSPEKAMDIQNALGSDIMMAFDECPPFPATYEYMKSSVERTSRWAERCLNAHQRPNDQGLFGIVQGGEFEELRKQSAKDLTSLDFPGYAIGGLSVGEPKDIMNRVLEFTTPLLPADKPRYLMGVGSADSLIDGAIRGVDMFDCVLPTRIARNGTLMTSNGRVVIKNAKYERDFGPIDENCDCHTCKNYSRAYIRHLIKCNETFGLRLASYHNLYFLLNLMEQIRDAIRNDRLGDFREEFFEQYGFNKPNAKNF

SEQ ID NO: 61141 - protein, 379 aa, Sporosarcina sp.
  misc_feature (1)..(379): tr|A0A5B0DER3|A0A5B0DER3_9BACL Queuine tRNA-ribosyltran sferase OS=Sporosarcina sp. ANT_H38 OX=2597358 GN=tgt P E=3 SV=1
MTAVTYEHIKTCKQTGARLGIVHTPHGSFETPAFMPVGTQATVKTLSPEELKEVGAGIILSNTYHLWLRPGQDIIEEAGGLHKFMNWDRPILTDSGGFQVFSLSEFRKIEEEGVHFRHHLNGSKLFLSPEKAMEIQNSLGADIMMAFDECPPFPATREYMKASVERTSRWAERCLGAHARPADQALFGIIQGGEFEELRAQSAKDLVSLDFPGYAIGGLSVGEPKDIMNRILEHTTPLLPQDKPRYLMGVGSPDSLIDGAIRGIDMFDCVLPTRIARNGTLMTSEGRLNIRNAKFERDFRPLDEKCSCHVCKTYSRAYIRHLIKADETFGIRLTSYHNLHFLLNLMEQVRDAIRHDRLGDFREEFFESYGFNKPNAKNF

SEQ ID NO: 61142 - protein, 381 aa, Unknown
  misc_feature (1)..(381): tr|A0A328EFR6|A0A328EFR6_9BACT Queuine tRNA-ribosyltran sferase OS=SR1 bacterium human oral taxon HOT-345 OX=15 40874 GN=tgt PE=3 SV=1
MSKLNFKILKQKGKARVGEITLNGISLKTPIFMPVGTKATIKGLILDLLQDSHYIGNQIEPIKLILANTFHLYLRPGSKIVQAAGGLHQFENWKDGLILTDSGGFQVFSLGLANQKFNDQKHTHKVGIKLTEEGVKFRSPYDGSKHIFTPENVVDTQCELGSDIMMVLDVCSPTGSDKKTIEKHIAMTHRRAKRAFEHFKPKYEEARGVLFPIVQGGTYLDLRTQSAEYLSQFARDGIAIGGVSVGESRELIEQVIAHTAPLLPNEKPRYLMGVGTPEDLRFAIEQGVDMFDCVAATRLGRHGIAFSDQGNIKITNSDFRTDFSPLTENCDCYTCRNFSKAYLCHLIREQETLGGSLVGLHNIVYLNRILEGRKKRFLEEN

SEQ ID NO: 61143 - protein, 378 aa, Stakelama pacifica
  misc_feature (1)..(378): tr|A0A4V3BTK2|A0A4V3BTK2_9SPHN Queuine tRNA-ribosyltran sferase OS=Stakelama pacifica OX=517720 GN=tgt PE=3 SV= 1
MTSRFDFQIAATDGAARTGTITMQRGTIRTPAFMPVGTAATVKAMKPADVRAGGADIILGNTYHLMLRPTAERIDRLGGLHKFMGWDRPILTDSGGYQVMSLSELTKRSEEGVVFKSHLDGSRHLMSPERSMEIQRLLGSDIVMAFDELVPTDTTRDIQAKAMERSMRWAKRSREGFDSGEAHAARAALFGIQQGALDEGLRKTSADALIDIGFDGYAIGGLAVGEGQEAMFGVLDYAPGQLPADKPRYLMGVGKPDDIVGAVERGVDMFDCVMPTRSGRTGQAFTREGPINIRNARFAEDTGPLDPECRCPACQGWSRAYIHHLVRAGEILGAMLMTEHNLFFYQALMADLRDAIAGGALKTFANDFRARYIREKQQ

SEQ ID NO: 61144 - protein, 368 aa, Stanieria cyanosphaera
  misc_feature (1)..(368): tr|K9XW52|K9XW52_STAC7 Queuine tRNA-ribosyltransferase OS=Stanieria cyanosphaera (strain ATCC 29371 / PCC 7437 ) OX=111780 GN=tgt PE=3 SV=1
MGFSFECQASCSHTQARVGLFHTPHGVVETPRFMPVGTLATVKGITPRQLKDAQAQMILANTYHLHLQPGEKIIEQAGGLHRFMAWKRPILTDSGGFQVFSLSQLRKITETGVVFRSPRDGSMIELTPEKSIQIQNALGADVIMAFDECPPADASKSELEASTDRTYRWLERCIQAHQRPQEQALFGIVQGGIHLDLRAKSARKLVALDLPGYAIGGVSVGEAPELINATVKYTTPLLPKEKPRYLMGVGTYREMVNAIASGVDLFDCVIPTRFGRHGTALVNGTRINIKNAQYREDFTPLDPTCPCYTCQNFSRAYLNHLVRSREMLGYILLSLHNITELIRFTQRIRDAIKSDRFVAEFSYWLNDY

SEQ ID NO: 61145 - protein, 368 aa, Stanieria sp.
  misc_feature (1)..(368): tr|A0A140KAM4|A0A140KAM4_9CYAN Queuine tRNA-ribosyltran sferase OS=Stanieria sp. NIES-3757 OX=1807358 GN=tgt PE =3 SV=1
MGFSFECQASCSHTQARVGLFHTPHGVVETPRFMPVGTLATVKGITPRQLKDAQAQMILANTYHLHLQPGENIVAQAGGLHRFMAWDRPILTDSGGFQVFSLSQLRKITEAGVVFRSPRDGSIIELTPEKSIQIQNALGADVIMAFDECPPGNASKSEIETSTERTYRWLERCIQAHQRPQEQALFGIVQGGVHLDLRAKSASQLVALDLPGYAIGGVSVGEAPELINATVRHTTPLLPKEKPRYLMGVGTYREMVNAIAFGVDLFDCVIPTRFGRHGTALVNGTRINIKNAQYREDFTPLDSTCPCYACQNFSRAYLNHLVRSREMLGYILLSLHNVNELIRFTQRIRDAIKSDRFVAEFSNWLDDC

SEQ ID NO: 61146 - protein, 379 aa, Staphylococcus agnetis
  misc_feature (1)..(379): tr|A0A2T4MJB4|A0A2T4MJB4_9STAP Queuine tRNA-ribosyltran sferase OS=Staphylococcus agnetis OX=985762 GN=tgt PE=3 SV=1
MPAVTYEHIKTCKQSGARLGIVHTPHGSFETPMFMPVGTKATVKTMSPEDLKAMEAKIILSNTYHLWLQPGNDIVKKAGGLHKFMNWDGPILTDSGGFQVFSLSDLRKISEEGVEFRHHANGSKLFLSPEDSIKIQNDLGSDIIMAFDECPPMPAEYQYVKDSIERTTRWAKRCKDAHQRPEDQALFGIIQGGEYKDLRQQSAEDLVKLDFPGYAIGGLSVGEPKPVMYDMVEHTVQFMPENKPRYLMGVGSPDALIECSIRGMDMFDCVLPTRIARNGTCMTSHGRLVVKNAKFKDDFRPLDENCDCYTCKNYTRAYLRHLIKADETFGIRLTTYHNLHFLLKLMENIRQAIREDRLLDFKEEFFEQYGLNVENPKNF

SEQ ID NO: 61147 - protein, 379 aa, Staphylococcus agnetis
  misc_feature (1)..(379): tr|A0A2T4MNN3|A0A2T4MNN3_9STAP Queuine tRNA-ribosyltran sferase OS=Staphylococcus agnetis OX=985762 GN=tgt PE=3 SV=1
MPAVTYEHIKTCKQSGARLGIVHTPHGSFETPMFMPVGTKATVKTMSPEDLKAMEAKIILSNTYHLWLQPGNDIVKKAGGLHKFMNWDGPILTDSGGFQVFSLSDLRKISEEGVEFRHHANGSKLFLSPEDSIKIQNDLGSDIIMAFDECPPMPAEYQYVKDSIERTTRWAKRCKDAHQRPEDQALFGIIQGGEYKDLRQQSAEELVKLDFPGYAIGGLSVGEPKPVMYDMVEHTVQFMPKNKPRYLMGVGSPDALIECSIRGMDMFDCVLPTRIARNGTCMTSHGRLVVKNAKFKDDFSPLDENCDCYTCKNYTRAYLRHLIKADETFGIRLTTYHNLHFLLKLMENIRQAIREDRLLDFKEEFFEQYGLNVENPKNF

SEQ ID NO: 61148 - protein, 379 aa, Staphylococcus argensis
  misc_feature (1)..(379): tr|A0A2K4FFM9|A0A2K4FFM9_9STAP Queuine tRNA-ribosyltran sferase OS=Staphylococcus argensis OX=1607738 GN=tgt PE =3 SV=1
MPAVTYEHIKTCKQSGARLGIVHTPHGSFETPMFMPVGTKATVKTMSPEELHQMEAKIILGNTYHLWLQPGNDIIRKSGGLHQFMNWDGPILTDSGGYQVFSLSNLRQISEEGVAFRHHKNGSKLFLSPEKSMAIQNDLGSDIMMAFDECPPMPAEYQYVKDSIERTSRWAKRCLEAHQRPEEQALFGIIQGGEYKDLRKQSAEELVALDFPGYAIGGLSVGEPKPTMYEMVEYTEQFMPFDKPRYLMGVGSPDALIECSIRGMDMFDCVLPTRIARNGTCMTSEGRLVIKNAKYKDDLGSLDSNCDCYTCRNYSRAYIRHLVKAEETFGIRLTTYHNLHFLLKLMEQIRQAIREDRLLDFKEEFFEQYGLNVDNPKNF

SEQ ID NO: 61149 - protein, 379 aa, Staphylococcus argenteus
  misc_feature (1)..(379): tr|A0A5B8LB35|A0A5B8LB35_9STAP Queuine tRNA-ribosyltran sferase OS=Staphylococcus argenteus OX=985002 GN=tgt PE =3 SV=1
MPAVTYEHIKTCKQSGARLGIVHTPHGSFETPMFMPVGTKATVKTMSPEELRQIEAKIILGNTYHLWLQPGNDIIKHAGGLHKFMNWDGPILTDSGGFQVFSLSNLRKITEEGVEFRHHTNGSKLFLSPEKSMQIQNDLGSDIMMAFDECPPMPAEYNYVKKSIERTTRWAKRCLDAHQRPEDQALFGIIQGGEYEDLREQSAKDLVELDFPGYAIGGLSVGEPKPVMYKMVEHTEQFMPKDKPRYLMGVGSPDALIECSIRGMDMFDCVLPTRIARNGTCMTSQGRLVIKNAKFADDLRPLDENCDCYTCQNYSRAYIRHLIKAEETFGIRLTTIHNLHFLLKLMEDIRQAIREDRLLDFKDEFFEQYGLNVENPKNF

SEQ ID NO: 61150 - protein, 379 aa, Staphylococcus argenteus
  misc_feature (1)..(379): tr|A0A380CC12|A0A380CC12_9STAP Queuine tRNA-ribosyltran sferase OS=Staphylococcus argenteus OX=985002 GN=tgt PE =3 SV=1
MPAVTYEHIKTCKQSGARLGIVHTPHGSFETPMFMPVGTKATVKTMSPEELRQIEAKIILGNTYHLWLQPGNDIIKHAGGLHKFMNWDGPILTDSGGFQVFSLSNLRKITEEGVEFRHHTNGSKLFLSPEKSMQIQNDLGSDIMMAFDECPPMPAEYDYVKKSIERTTRWAKRCLDAHQRPEDQALFGIIQGGEYEDLREQSAKDLVELDFPGYAIGGLSVGEPKPVMYKMVEHTEQFMPKDKPRYLMGVGSPDALIECSIRGMDMFDCVLPTRIARNGTCMTSQGRLVIKNAKFADDLRPLDENCDCYTCQNYSRAYIRHLIKAEETFGIRLTTIHNLHFLLKLMEDIRQAIREDRLLDFKDEFFEQYGLNVENPKNF

SEQ ID NO: 61151 - protein, 379 aa, Staphylococcus arlettae
  misc_feature (1)..(379): tr|A0A2T7BWZ8|A0A2T7BWZ8_9STAP Queuine tRNA-ribosyltran sferase OS=Staphylococcus arlettae OX=29378 GN=tgt PE=3 SV=1
MPAVTYEHIKTCKQSGARLGIVHTPHGSFETPMFMPVGTKATVKTMSPEELHNMEAKIILGNTYHLWLQPGNDIIRKSGGLHQFMNWNGPILTDSGGFQVFSLSNLRNISEEGVEFRHHTNGSKLFLSPEKAMQIQNDLGSDIMMAFDECPPMPAEYKYVKDSIERTTRWAERCLQAHSRPEDQALFGIIQGGEYKDLRQQSAEELVALDFPGYAIGGLSVGEPKPVMYDMVEHTEQFMPKDKPRYLMGVGSPDALIECSIRGMDMFDCVLPTRIARNGTCMTSEGRVVIKNAKYAEDFGPLDPDCDCYTCKNYSRAYLRHLIKAEETFGIRLTTYHNLHFLLKLMENVRQAIREDRLLDFKEEFFEQYGLNVDNPKNF

SEQ ID NO: 61152 - protein, 379 aa, Staphylococcus aureus
  misc_feature (1)..(379): sp|Q2FXT6|TGT_STAA8 Queuine tRNA-ribosyltransferase OS= Staphylococcus aureus (strain NCTC 8325) OX=93061 GN=tg t PE=3 SV=1
MPAVTYEHIKTCKQSGARLGIVHTPHGSFETPMFMPVGTKATVKTMSPEELRQIEAKIILGNTYHLWLQPGNDIIKHAGGLHKFMNWDGPILTDSGGFQVFSLSNLRKITEEGVEFRHHTNGSKLFLSPEKSMQIQNDLGSDIMMAFDECPPMPAEYDYVKKSIERTTRWAKRCLDAHQRPEDQALFGIIQGGEYEDLREQSAKDLVELDFPGYAIGGLSVGEPKPVMYKMVEHTEQFMPKDKPRYLMGVGSPDALIECSIRGMDMFDCVLPTRIARNGTCMTSQGRLVIKNAKFADDLRPLDENCDCYTCQNYSRAYIRHLIKAEETFGIRLTTIHNLHFLLKLMEDIRQAIREDRLLDFKEEFFEQYGLNVENPKNF

SEQ ID NO: 61153 - protein, 379 aa, Staphylococcus aureus; identical to SEQ ID NO: 61152
  misc_feature (1)..(379): sp|Q6GG65|TGT_STAAR Queuine tRNA-ribosyltransferase OS= Staphylococcus aureus (strain MRSA252) OX=282458 GN=tgt PE=3 SV=1

SEQ ID NO: 61154 - protein, 379 aa, Staphylococcus auricularis
  misc_feature (1)..(379): tr|A0A2T4M6C4|A0A2T4M6C4_9STAP Queuine tRNA-ribosyltran sferase OS=Staphylococcus auricularis OX=29379 GN=tgt P E=3 SV=1
MPAVTYEHIKTCKQSGARLGIVHTPHGSFETPMFMPVGTQATVKTMSPEELHEMNTKIILGNTYHLWLQPGNDIVRKSGGLHQFMNWDGPILTDSGGFQVFSLSNLRKISEKGVEFRHHKNGSKLFLSPEKSMQIQNDLGSDIMMAFDECPPMPSEYQYVKDSLERTTRWAKRCLEAHQRPEDQALFGIIQGGEYKDLRKQSAEELVALDFPGYAIGGLSVGEPKPVMYDMVEYTQQFMPKDKPRYLMGVGSPDALIECSIRGMDMFDCVLPTRIARNGTCMTSHGRVVIKNAKYADDLGPLDDNCDCYTCRNYSRAYLRHLIKAEETFGIRLTTYHNLYFLLKLMENIRQAIREDRLLDFKETFFEQYGLNVDNPKNF

SEQ ID NO: 61155 - protein, 379 aa, Staphylococcus auricularis
  misc_feature (1)..(379): tr|A0A2T4MG44|A0A2T4MG44_9STAP Queuine tRNA-ribosyltran sferase OS=Staphylococcus auricularis OX=29379 GN=tgt P E=3 SV=1
MPAVTYEHIKTCKQSGARLGIVHTPHGSFETPMFMPVGTQATVKTMSPEELHEMNTKIILGNTYHLWLQPGNDIVTKSGGLHQFMNWDGPILTDSGGFQVFSLSNLRKISEKGVEFRHHKNGSKLFLSPEKSMQIQNDLGSDIMMAFDECPPMPSEYQYVKDSLERTTRWAKRCLEAHQRPEDQALFGIIQGGEYKDLRKQSAEELVALDFPGYAIGGLSVGEPKPVMYDMVEYTQQFMPKDKPRYLMGVGSPDALIECSIRGMDMFDCVLPTRIARNGTCMTSHGRVVIKNAKYADDLGPLDDNCDCYTCRNYSRAYLRHLIKAEETFGIRLTTYHNLYFLLKLMENIRQAIREDRLLDFKETFFEQYGLNVDNPKNF

SEQ ID NO: 61156 - protein, 379 aa, Staphylococcus capitis
  misc_feature (1)..(379): tr|A0A341EQ25|A0A341EQ25_STACP Queuine tRNA-ribosyltran sferase OS=Staphylococcus capitis subsp. capitis OX=727 58 GN=tgt PE=3 SV=1
MPAVTYEHIKTCKQSGARLCIVHTPHGSFETPMFMPVGTKATVKTMSPEELKDIEAKIILGNTYHLWLQPGNDIIKQAGGLHQFMNWDGPILTDSGGFQVFSLSNLRKITEEGVEFRHHTNGSKLFLSPEKSMQIQNDLGSDIMMAFDECPPMPSEYDYVKNSIERTTRWAERCLKAHQRPEEQALFGIIQGGEYKDLREQSAKELVDLDFPGYAIGGLSVGEPKPVMYDMVEHTEQFMPKDKPRYLMGVGSPDALIECSIRGMDMFDCVLPTRIARNGTCMTSKGRVVIKNAKYADDLGPLDDNCDCYTCRNYSRAYIRHLIKAEETFGIRLTTIHNLHFLLKLMEDIRQAIREDRLLDFKDAFFEQYGLNVENPKNF

SEQ ID NO: 61157 - protein, 379 aa, Staphylococcus capitis
  misc_feature (1)..(379): tr|A0A0S4MH24|A0A0S4MH24_STACP Queuine tRNA-ribosyltran sferase OS=Staphylococcus capitis OX=29388 GN=tgt PE=3 SV=1
MPAVTYEHIKTCKQSGARLGIVHTPHGSFETPMFMPVGTKATVKTMSPEELKDIEAKIILGNTYHLWLQPGNDIIKHAGGLHQFMNWDGPILTDSGGFQVFSLSNLRKITEEGVEFRHHTNGSKLFLSPEKSMQIQNDLGSDIMMAFDECPPMPSEYDYVKNSIERTTRWAERCLKAHQRPEDQALFGIIQGGEYKDLREQSAKELVDLDFPGYAIGGLSVGEPKPVMYDMVEHTEQFMPKDKPRYLMGVGSPDALIECSIRGMDMFDCVLPTRIARNGTCMTSKGRVVIKNAKYADDLGPLDDNCDCYTCRNYSRAYIRHLIKAEETFGIRLTTIHNLHFLLKLMEDIRQAIREDRLLDFKDAFFEQYGLNVENPKNF

SEQ ID NO: 61158 - protein, 379 aa, Staphylococcus caprae
  misc_feature (1)..(379): tr|C5QT25|C5QT25_9STAP Queuine tRNA-ribosyltransferase OS=Staphylococcus caprae M23864:W1 OX=525378 GN=tgt PE= 3 SV=1
MPAVTYEHIKTCKQSGARLGIVHTPHGSFETPMFMPVGTKATVKTMSPEELRDIEAKIILGNTYHLWLQPGNDIIKRAGGLHQFMNWDGPILTDSGGFQVFSLSNLRKITEEGVEFRHHTNGSKLFLSPEKSMQIQNDLGSDIMMAFDECPPMPSEYDYVKNSIERTTRWAERCLKAHQRPEDQALFGIIQGGEYKDLREQSARELVDLDFPGYAIGGLSVGEPKPVMYEMVEHTEQFMPKDKPRYLMGVGSPDALIECSIRGMDMFDCVLPTRIARNGTCMTTKGRVVIKNAKYADDLGPLDEHCDCYTCRNYTRAYIRHLIKAEETFGIRLTTIHNLHFLLKLMEDIRQAIREDRLLDFKDEFFEQYGLNVENPKNF

SEQ ID NO: 61159 - protein, 380 aa, Staphylococcus carnosus
  misc_feature (1)..(380): sp|B9DNG7|TGT_STACT Queuine tRNA-ribosyltransferase OS= Staphylococcus carnosus (strain TM300) OX=396513 GN=tgt PE=3 SV=1
MKPAVTYEHIKTCKQSGARLGIVHTPHGSFETPMFMPVGTKATVKTMSPEELHDINAKIILGNTYHLWLQPGNELIKRAGGLHQFMNWDGPILTDSGGFQVFSLSNLRKITEEGVYFRHHKNGSKLFLSPEKSMEIQNDLGSDIMMAFDECPPMPAEYKYVKDSIERTTRWAERCLKAHARPEDQALFGIIQGGEYKDLRQQSAEELVKLDFPGYAIGGLSVGEPKPVMYDMVEHTEQFMPKDKPRYLMGVGSPDALIECSIRGMDMFDCVLPTRIARNGTCMTSEGRVVIKNAKYADDLGPLDPNCDCYTCRNYSRAYLRHLIKAEETFGIRLTTYHNLYFLLKLMEDIRQAIREDRLLDFKEEFFEQYGLNVENPKNF

SEQ ID NO: 61160 - protein, 380 aa, Staphylococcus carnosus; identical to SEQ ID NO: 61159
  misc_feature (1)..(380): tr|A0A380F4Y6|A0A380F4Y6_STACA Queuine tRNA-ribosyltran sferase OS=Staphylococcus carnosus subsp. utilis OX=147 449 GN=tgt PE=3 SV=1

SEQ ID NO: 61161 - protein, 379 aa, Staphylococcus chromogenes
  misc_feature (1)..(379): tr|A0A4U0DKX5|A0A4U0DKX5_STACR Queuine tRNA-ribosyltran sferase OS=Staphylococcus chromogenes OX=46126 GN=tgt P E=3 SV=1
MSAVTYEHIKTCKQSGARLGIVHTPHGSFETPMFMPVGTKATVKTMSPEELKQMEAKIILGNTYHLWLQPGNDIVKKAGGLHQFMNWDGPILTDSGGFQVFSLSDLRKITEEGVEFRHHANGSKLFLSPEDSIRIQNDLGSDIIMAFDECPPMPAEYKYVKDSIERTTRWAERCKKAHQRPEDQALFGIIQGGEYKDLRQQSAEDLVKLDFPGYAIGGLSVGEPKPVMYDMVEHTVQFMPENKPRYLMGVGSPDALIECSIRGMDMFDCVLPTRIARNGTCMTSEGRLVVKNAKFKDDFRPLDENCDCYTCKNYTRAYLRHLIKADETFGIRLTTYHNLHFLLKLMENIRQAIREDRLLDFKEEFFEQYGLNVENPKNF

SEQ ID NO: 61162 - protein, 379 aa, Staphylococcus chromogenes
  misc_feature (1)..(379): tr|A0A2T4M1T7|A0A2T4M1T7_STACR Queuine tRNA-ribosyltran sferase OS=Staphylococcus chromogenes OX=46126 GN=tgt P E=3 SV=1
MPAVTYEHIKTCKQSGARLGIVHTPHGSFETPMFMPVGTKATVKTMSPEELKQMEAKIILGNTYHLWLQPGNDIVKKAGGLHQFMNWDGPILTDSGGFQVFSLSDLRKITEEGVEFRHHANGSKLFLSPEDSIRIQNDLGSDIIMAFDECPPMPAEYKYVKDSIERTTRWAERCKKAHQRPEDQALFGIIQGGEYKDLRQQSAEDLVKLDFPGYAIGGLSVGEPKPVMYDMVEHTVQFMPENKPRYLMGVGSPDALIECSIRGMDMFDCVLPTRIARNGTCMTSEGRLVVKNAKFKDDFRPLDENCDCYTCKNYTRAYLRHLIKADETFGIRLTTYHNLHFLLKLMENIRQAIREDRLLDFKEEFFEQYGLNVKNPKNF

SEQ ID NO: 61163 - protein, 379 aa, Staphylococcus cohnii; identical to SEQ ID NO: 52313
  misc_feature (1)..(379): tr|A0A3A0JDK4|A0A3A0JDK4_9STAP Queuine tRNA-ribosyltran sferase OS=Staphylococcus cohnii OX=29382 GN=tgt PE=3 S V=1

SEQ ID NO: 61164 - protein, 379 aa, Staphylococcus cohnii; identical to SEQ ID NO: 52313
  misc_feature (1)..(379): tr|A0A0M2NUY9|A0A0M2NUY9_STACC Queuine tRNA-ribosyltran sferase OS=Staphylococcus cohnii subsp. cohnii OX=74704 GN=tgt PE=3 SV=1

SEQ ID NO: 61165 - protein, 380 aa, Staphylococcus condimenti; identical to SEQ ID NO: 61159
  misc_feature (1)..(380): tr|A0A143P7Y6|A0A143P7Y6_9STAP Queuine tRNA-ribosyltran sferase OS=Staphylococcus condimenti OX=70255 GN=tgt PE =3 SV=1

SEQ ID NO: 61166 - protein, 379 aa, Staphylococcus delphini
  misc_feature (1)..(379): tr|A0A2A4GWR5|A0A2A4GWR5_9STAP Queuine tRNA-ribosyltran sferase OS=Staphylococcus delphini OX=53344 GN=tgt PE=3 SV=1
MPAVTYEHIKTCKQSGARLGIVHTPHGSFETPMFMPVGTKATVKTMSPEELKQMNTKILLGNTYHLWLQPGNDIVKQAGGLHKFMNWDGPILTDSGGFQVFSLSNLRKITEEGVEFRHHTNGSKLFLSPEDSIKIQNDLGSDIIMAFDECPPMPAEYDYVKNSLERTTRWAERCLAAHQRPEDQALFGIIQGGEYKDLRQQSAEELVKLDFPGYAIGGLSVGEPKPVMYEMVEHTEQFMPKDKPRYLMGVGSPDALIECSIRGMDMFDCVLPTRIARNGTCMTSTGRLVVKNAQFKDDFRPLDENCDCYTCQNYTRAYLRHLIKADETFGIRLTTYHNLHFLLKLMENIRQAIREDRLLDFKEEFFEQYGLNVDNPKNF

SEQ ID NO: 61167 - protein, 379 aa, Staphylococcus delphini
  misc_feature (1)..(379): tr|A0A2A4HE35|A0A2A4HE35_9STAP Queuine tRNA-ribosyltran sferase OS=Staphylococcus delphini OX=53344 GN=tgt PE=3 SV=1
MPAVTYEHIKTCKQSGARLGIVHTPHGSFETPMFMPVGTKATVKTMSPEELKQMNTKILLGNTYHLWLQPGNDIVKQAGGLHKFMNWDGPILTDSGGFQVFSLSNLRKITEEGVEFRHHTNGSKLFLSPEDSIKIQNDLGSDIIMAFDECPPMPAEYDYVKNSLERTTRWAERCLAAHQRPEDQALFGIIQGGEYKDLRQQSAEELVKLDFPGYAIGGLSVGEPKPVMYEMVEHTEKFMPKDKPRYLMGVGSPDALIECSIRGMDMFDCVLPTRIARNGTCMTSTGRLVVKNAQFKDDFRPLDENCDCYTCQNYTRAYLRHLIKADETFGIRLTTYHNLHFLLKLMENIRQAIREDRLLDFKEEFFEQYGLNVDNPKNF

SEQ ID NO: 61168 - protein, 379 aa, Staphylococcus devriesei
  misc_feature (1)..(379): tr|A0A2K4DMK0|A0A2K4DMK0_9STAP Queuine tRNA-ribosyltran sferase OS=Staphylococcus devriesei OX=586733 GN=tgt PE =3 SV=1
MPAVTYEHIKTCKQSGARLGIVHTPHGSFETPMFMPVGTKATVKTMSPEELRQMEAQIILGNTYHLWLQPGNDIIKQAGGLHKFMNWNGPILTDSGGFQVFSLSNLRKISEEGVEFRHHTNGSKLFLSPEKSMEIQNDLGSDIMMAFDECPPMPSEYNYVKDSIERTTRWAARCLKAHKRPEDQALFGIIQGGEYKDLREQSAKELVDLDFPGYAIGGLSVGEPKPVMYDMVEHTVQYMPEDKPRYLMGVGSPDALIECSIRGMDMFDCVLPTRIARNGTCMTSSGRLVIKNAKYANDFGPLDENCDCYTCKNYSRAYIRHLIKAEETFGIRLTTIHNLHFLLKLMENIRQAIREDRLLDFKEEFFEQYGLNVDNPKNF

SEQ ID NO: 61169 - protein, 379 aa, Staphylococcus devriesei
  misc_feature (1)..(379): tr|A0A2T4KA18|A0A2T4KA18_9STAP Queuine tRNA-ribosyltran sferase OS=Staphylococcus devriesei OX=586733 GN=tgt PE =3 SV=1
MPAVTYEHIKTCKQSGARLGIVHTPHGSFETPMFMPVGTKATVKTMSPEELRQMEAQIILGNTYHLWLQPGNDIIKQAGGLHKFMNWNGPILTDSGGFQVFSLSNLRKISEEGVEFRHHTNGSKLFLSPEKSMEIQNDLGSDIMMAFDECPPMPSEYKYVKDSIERTTRWAARCLKAHKRPEDQALFGIIQGGEYKDLREQSAKELVDLDFPGYAIGGLSVGEPKPVMYDMVEHTVQYMPEDKPRYLMGVGSPDALIECSIRGMDMFDCVLPTRIARNGTCMTSSGRLVIKNAKFANDFGPLDENCDCYTCKNYSRAYIRHLIKAEETFGIRLTTIHNLHFLLKLMENIRQAIREDRLLDFKEEFFEQYGLNVDNPKNF

SEQ ID NO: 61170 - protein, 379 aa, Staphylococcus edaphicus
  misc_feature (1)..(379): tr|A0A2C6WSA3|A0A2C6WSA3_9STAP Queuine tRNA-ribosyltran sferase OS=Staphylococcus edaphicus OX=1955013 GN=tgt P E=3 SV=1
MPAVTYEHIKTCKQSGARLGIVHTPHGSFETPMFMPVGTKATVKTMSPEELHQMETKIILGNTYHLWLQPGNDIIRKSGGLHQFMNWNGPILTDSGGFQVFSLSNLRKITEEGVEFRHHTNGSKLFLSPEKSMQIQNDLGSDIMMAFDECPPMPAEYKYVKDSIERTTRWAARCLKAHERPEDQALFGIIQGGEYKDLRKQSAEELVALDFPGYAIGGLSVGEPKPVMYDMVHHTEQFMPKDKPRYLMGVGSPDALIECSIRGMDMFDCVLPTRIARNGTCMTSHGRVIIKNAKYADDLGPLDDNCDCYTCKNYSRAYIRHLIKAEETFGIRLTTYHNLHFLLKLMENIRQAIREDRLLDFKETFFEQYGLNVENPKNF

SEQ ID NO: 61171 - protein, 379 aa, Staphylococcus epidermidis
  misc_feature (1)..(379): sp|Q5HNR2|TGT_STAEQ Queuine tRNA-ribosyltransferase OS= Staphylococcus epidermidis (strain ATCC 35984 / RP62A) OX=176279 GN=tgt PE=3 SV=1
MPAVTYEHIKTCKQSGARLGIVHTPHGSFETPMFMPVGTKATVKTMSPEELRNIEAKIILGNTYHLWLQPGNDIIKHAGGLHKFMNWDGPILTDSGGFQVFSLSNLRKISEEGVEFRHHTNGSKLFLSPEKSMQIQNDLGSDIMMAFDECPPMPAEYDYVKDSIERTTRWAARCLKAHQRPGDQALFGIIQGGEYKDLREQSAKELVSLDFPGYAIGGLSVGEPKPVMYDMVEHTEQFMPKDKPRYLMGVGSPDALIECSIRGMDMFDCVLPTRIARNGTCMTSNGRLVVKNAKYADDLRPLDEQCDCYTCQHYTRAYIRHLVKAEETFGIRLTTIHNLHFLLKLMEDIRQAIREDRLLDFKDEFFEQYGLNVENPKNF

SEQ ID NO: 61172 - protein, 379 aa, Staphylococcus epidermidis; identical to SEQ ID NO: 51997
  misc_feature (1)..(379): tr|A0A3S4K9P4|A0A3S4K9P4_STAEP Queuine tRNA-ribosyltran sferase OS=Staphylococcus epidermidis OX=1282 GN=tgt PE =3 SV=1

SEQ ID NO: 61173 - protein, 379 aa, Staphylococcus equorum
  misc_feature (1)..(379): tr|A0A1B1G7C4|A0A1B1G7C4_9STAP Queuine tRNA-ribosyltran sferase OS=Staphylococcus equorum OX=246432 GN=tgt PE=3 SV=1
MPAVTYEHIKTCKQSGARLGIVHTPHGSFETPMFMPVGTKATVKTMSPEELHQMEAKIILGNTYHLWLQPGNDIIKKSGGLHQFMNWNGPILTDSGGFQVFSLSNLRNITEKGVEFRHHKNGSKLFLSPEKATEIQNDLGSDIMMAFDECPPMPAEYKYVKDSIERTTRWAERCLKAHKRPEDQALFGIIQGGEYKDLRKQSAEELVALDFPGYAIGGLSVGEPKPVMYDMVTHTEQFMPKDKPRYLMGVGSPDALIECSIRGIDMFDCVLPTRIARNGTCMTSHGRVTIKNAKYAEDLGPLDENCDCYTCKNYSRAYIRHLIKAEETFGIRLTTYHNLHFLLKLMENVRQAIREDRLLDFKGEFFEQYGLNVDNPKNF

SEQ ID NO: 61174 - protein, 379 aa, Staphylococcus equorum
  misc_feature (1)..(379): tr|A0A1E5TJI5|A0A1E5TJI5_9STAP Queuine tRNA-ribosyltran sferase OS=Staphylococcus equorum OX=246432 GN=tgt PE=3 SV=1
MPAVTYEHIKTCKQSGARLGIVHTPHGSFETPMFMPVGTKATVKTMSPEELHQMEAKIILGNTYHLWLQPGNDIIKKSGGLHQFMNWNGPILTDSGGFQVFSLSNLRNITEKGVEFRHHKNGSKLFLSPEKATEIQNDLGSDIMMAFDECPPMPAEYKYVKDSIERTTRWAERCLKAHKRPEDQALFGIIQGGEYKDLRKQSAEELVALDFPGYAIGGLSVGEPKPVMYDMVTHTEQFMPKDKPRYLMGVGSPDALIECSIRGIDMFDCVLPTRIARNGTCMTSHGRVTIKNAKYAEDLGPLDENCDCYTCKNYSRAYIRHLIKAEETFGIRLTTYHNLHFLLKLMENVRQAIREDRLLDFKEEFFEQYGLNVDNPKNF

SEQ ID NO: 61175 - protein, 379 aa, Staphylococcus felis
  misc_feature (1)..(379): tr|A0A2K3ZI47|A0A2K3ZI47_9STAP Queuine tRNA-ribosyltran sferase OS=Staphylococcus felis OX=46127 GN=tgt PE=3 SV =1
MPAVTYEHIKTCKQSGARLGIVHTPHGSFETPMFMPVGTKATVKTMSPEELKAMNTKILLGNTYHLWLQPGNDIVKKAGGLHQFMNWDGPILTDSGGFQVFSLSNLRKISEEGVEFRHHTNGSKLFMSPEDSIQIQNDLGSDIIMAFDECPPMPAEYDYVKDSLERTTRWAKRCLKAHQRPDEQALFGIIQGGEYKDLRKQSAQELVELDFPGYAIGGLSVGEPKPVMYEMVKYTEQFMPKDKPRYLMGVGSPDALIECSILGMDMFDCVLPTRIARNGTCMTSKGRLVVKNAQFKDDFRPLDENCDCYTCRHYTRAYLRHLIKADETFGIRLTTYHNLHFLLKLMEDVRQAIREDRLLDFKEAFYEQYGLNVENPKNF

SEQ ID NO: 61176 - protein, 379 aa, Staphylococcus fleurettii
  misc_feature (1)..(379): tr|A0A3S0KHF0|A0A3S0KHF0_9STAP Queuine tRNA-ribosyltran sferase OS=Staphylococcus fleurettii OX=150056 GN=tgt P E=3 SV=1
MPAVTYEHIKTCKQSGARLGIVHTPHGSFETPMFMPVGTKATVKTMSPEELKQMNTKILLGNTYHLWLQPGNDIVKKAGGLHQFMNWDGPILTDSGGFQVFSLSNLRKITEEGVEFRHHTNGSKLFLSPEDSIKIQNDLGSDIIMAFDECPPMPAEYDYVKNSIERTTRWAERCLQAHQRPNDQALFGIIQGGEYKDLRQQSAEELVKLDFPGYAIGGLSVGEPKPVMYEMVEFTEQFMPKDKPRYLMGVGSPDALIECSIRGMDMFDCVLPTRIARNGTCMTSHGRVVVKNAQYKEDFRPLDENCDCYTCKNYSRAYLRHLIKADETFGIRLTTYHNLHFLLKLMENIRQAIREDRLLDFKEEFFEQYGLNVDNPKNF

SEQ ID NO: 61177 - protein, 379 aa, Staphylococcus fleurettii
  misc_feature (1)..(379): tr|A0A380FQE4|A0A380FQE4_9STAP Queuine tRNA-ribosyltran sferase OS=Staphylococcus fleurettii OX=150056 GN=tgt P E=3 SV=1
MPAVTYEHIKTCKQSGARLGIVHTPHGSFETPMFMPVGTKATVKTMSPEELKQMEAKIILSNTYHLWLQPGSDIISKVGGLHKFMNWDGPILTDSGGFQVFSLSDMRKIEEEGVHFRHHLNGSKLFLSPEKAMHIQNDLGSDIMMAFDECPPMPSEYEYVKNSIERTSRWAERCLEAHQRPEDQALFGIIQGGEYKDLREQSAKDLVSLDFPGYAIGGLSVGEPKPVMYRMVEHTAPLMPFNKPRYLMGVGSPDALIECSIRGIDMFDCVLPTRIARNGTCMTSQGRVVIKNAKYQQDLSPLDPECDCYTCRNYTKAYLRHLIKADETFGIRLTTYHNLYFLLKLMENIRQAIREDRLLDFKDEFFEQYGLNVDNPKNF

SEQ ID NO: 61178 - protein, 65 aa, Staphylococcus gallinarum
  misc_feature (1)..(65): tr|A0A380FGR9|A0A380FGR9_STAGA Queuine tRNA-ribosyltran sferase OS=Staphylococcus gallinarum OX=1293 GN=tgt_2 P E=4 SV=1
MSPEELKQMEAKIILGNTYHLWLQPGNDIIRKSGGLHQFMNWDGPILTDSGGFQVFSLSNLRKYY

SEQ ID NO: 61179 - protein, 379 aa, Staphylococcus gallinarum
  misc_feature (1)..(379): tr|A0A3A0W2L9|A0A3A0W2L9_STAGA Queuine tRNA-ribosyltran sferase OS=Staphylococcus gallinarum OX=1293 GN=tgt PE= 3 SV=1
MPAVTYEHIKTCKQSGARLGIVHTPHGSFETPMFMPVGTKATVKTMSPEELKQMEAKIILGNTYHLWLQPGNDIIRKSGGLHQFMNWDGPILTDSGGFQVFSLSNLRNITEKGVEFRHHTNGSKLFLSPEKSMEIQNDLGSDIMMAFDECPPMPAEYQYVKDSIERTTRWAERCLKAHKRPEDQALFGIIQGGEYKDLRQQSAEELVALDFPGYAIGGLSVGEPKPVMYDMVEHTEQFMPEDKPRYLMGVGSPDALIECSIRGMDMFDCVLPTRIARNGTCMTSEGRLIIKNAKYAEDLRPLDENCDCYTCKNYSRAYIRHLIKAEETFGIRLTTYHNLHFLLKLMENIRQAIREDRLLDFKEEFFEQYGLNVENPKNF

SEQ ID NO: 61180 - protein, 379 aa, Staphylococcus haemolyticus
  misc_feature (1)..(379): sp|Q4L6Y4|TGT_STAHJ Queuine tRNA-ribosyltransferase OS= Staphylococcus haemolyticus (strain JCSC1435) OX=279808 GN=tgt PE=3 SV=1
MPAVTYEHIKTCKQSGARLGIVHTPHGSFETPMFMPVGTKATVKTMSPEELRQIEAKIILGNTYHLWLQPGNDIIKQVGGLHNFMNWDGPILTDSGGFQVFSLSNLRKITEESVEFRHHTNGLKLFLSPEKSMEIQNDLGSDIMMAFDECPPMPSEYKYVKDSIERTTRWAERCLNAHKRPEDQALFGIIQGGEYKDLREQSAKELVALDFPGYAIGGLSVGEPKPVMYEMVEHTVQYMPDDKPRYLMGVGSPDALIECSIRGMDMFDCVLPTRIARNGTCMTSNGRLVIKNAKYANDFKPLDENCDCYTCKNYSRAYIRHLIKAEETFGIRLTTIHNLHFLLKLMEDIRQAIREDRLLDFKDEFFEQYGLNVENPKNF

SEQ ID NO: 61181 - protein, 379 aa, Staphylococcus haemolyticus
  misc_feature (1)..(379): tr|A0A2K0A7J4|A0A2K0A7J4_STAHA Queuine tRNA-ribosyltran sferase OS=Staphylococcus haemolyticus OX=1283 GN=tgt P E=3 SV=1
MPAVTYEHIKTCKQSGARLGIVHTPHGSFETPMFMPVGTKATVKTMSPEELRQIEAKIILGNTYHLWLQPGNDIIKQAGGLHKFMNWDGPILTDSGGFQVFSLSNLRKITEEGVEFRHHTNGSKLFLSPEKSMEIQNDLGSDIMMAFDECPPMPSEYKYVKDSIERTTRWAERCLNAHKRPEDQALFGIIQGGEYKDLREQSAKELVALDFPGYAIGGLSVGEPKPVMYEMVEHTVQYMPDDKPRYLMGVGSPDALIECSIRGMDMFDCVLPTRIARNGTCMTSNGRLVIKNAKYANDFKPLDENCDCYTCKNYSRAYIRHLIKAEETFGIRLTTIHNLHFLLKLMEDIRQAIREDRLLDFKDEFFEQYGLNVENPKNF

SEQ ID NO: 61182 - protein, 379 aa, Staphylococcus hominis
  misc_feature (1)..(379): tr|A0A4Q9WR46|A0A4Q9WR46_STAHO Queuine tRNA-ribosyltran sferase OS=Staphylococcus hominis OX=1290 GN=tgt PE=3 S V=1
MPAVTYEHIKTCKQSGARLGIVHTPHGSFETPMFMPVGTKATVKTMSPEELRQIEARIILGNTYHLWLQPGNDIIKQAGGLHKFMNWDGPILTDSGGFQVFSLSNLRKISEEGVEFRHHTNGSKLFLSPEKSMQIQNDLGSDIMMAFDECPPMPAEYKYVKDSIERTTRWAKRCLEAHQRPEDQALFGIIQGGEYKDLREQSAKELVSLDFPGYAIGGLSVGEPKPVMYDMVEHTVQFMPEDKPRYLMGVGSPDALIECSIRGMDMFDCVLPTRIARNGTCMTSQGRLVIKNAKYADDFSPIDANCDCYTCKNYTRAYIRHLIKAEETFGIRLTTIHNLHFLLKLMEDIRQAIREDRLLDFKEEFFEQYGLNVENPKNF

SEQ ID NO: 61183 - protein, 379 aa, Staphylococcus hominis
  misc_feature (1)..(379): tr|A0A533IYG3|A0A533IYG3_STAHO Queuine tRNA-ribosyltran sferase OS=Staphylococcus hominis OX=1290 GN=tgt PE=3 S V=1
MPAVTYEHIKTCKQSGARLGIIHTPHGSFETPMFMPVGTKATVKTMSPEELRQIEARIILGNTYHLWLQPGNDIIKQAGGLHKFMNWDGPILTDSGGFQVFSLSNLRKISEEGVEFRHHTNGSKLFLSPEKSMQIQNDLGSDIMMAFDECPPMPAEYKYVKDSIERTTRWAKRCLEAHQRPEDQALFGIIQGGEYKDLREQSAKELVSLDFPGYAIGGLSVGEPKPVMYDMVDHTVQFMPEDKPRYLMGVGSPDALIECSIRGMDMFDCVLPTRIARNGTCMTSQGRLVIKNAKYADDFSPIDANCDCYTCKNYTRAYIRHLIKAEETFGIRLTTIHNLHFLLKLMEDIRQAIREDRLLDFKEEFFEQYGLNVENPKNF

SEQ ID NO: 61184 - protein, 379 aa, Staphylococcus hyicus
  misc_feature (1)..(379): tr|A0A0A8HPP7|A0A0A8HPP7_STAHY Queuine tRNA-ribosyltran sferase OS=Staphylococcus hyicus OX=1284 GN=tgt PE=3 SV =1
MPAVTYEHIKTCKQSGARLGIVHTPHGSFETPMFMPVGTKATVKTMSPEDLKAMEAKIILSNTYHLWLQPGNDIVKKAGGLHKFMNWDGPILTDSGGFQVFSLSDLRKITEEGVEFRHHANGSKLFLSPEDSIKIQNDLGSDIIMAFDECPPMPAEYQYVKDSIERTTRWAKRCKEAHQRPDDQALFGIIQGGEYKDLRQQSAEDLVKLDFPGYAIGGLSVGEPKPVMYDMVEHTVQFMPENKPRYLMGVGSPDALIECSIRGMDMFDCVLPTRIARNGTCMTSHGRLVVKNAKFKDDFRPLDENCDCYTCKNYTRAYLRHLIKADETFGIRLTTYHNLHFLLKLMENIRQAIREDRLLDFKEEFFEQYGLNVENPKNF

SEQ ID NO: 61185 - protein, 379 aa, Staphylococcus hyicus; identical to SEQ ID NO: 61152
  misc_feature (1)..(379): tr|A0A4U9YNZ5|A0A4U9YNZ5_STAHY Queuine tRNA-ribosyltran sferase OS=Staphylococcus hyicus OX=1284 GN=tgt PE=3 SV =1

SEQ ID NO: 61186 - protein, 379 aa, Staphylococcus intermedius
  misc_feature (1)..(379): tr|A0A380G8G1|A0A380G8G1_STAIN Queuine tRNA-ribosyltran sferase OS=Staphylococcus intermedius NCTC 11048 OX=114 1106 GN=tgt PE=3 SV=1
MPAVTYEHIKTCKQSGARLGIVHTPHGSFETPMFMPVGTKATVKTMSPEELKQMNTKILLGNTYHLWLQPGNEIVKKAGGLHKFMNWDGPILTDSGGFQVFSLSNLRKITEEGVEFRHHTNGSKLFLSPEDSIKIQNDLGSDIIMAFDECPPMPAEYDYVKNSLERTTRWAERCLAAHQRPEDQALFGIIQGGEYKDLRQQSAEELVKLDFPGYAIGGLSVGEPKPVMYEMVEHTEQFMPKDKPRYLMGVGSPDALIECSIRGMDMFDCVLPTRIARNGTCMTSTGRLVVKNAQFKDDFRPLDENCDCYTCQNYTRAYLRHLIKADETFGIRLTTYHNLHFLLKLMENIRQAIREDRLLDFKEEFFEQYGLNVDNPKNF

SEQ ID NO: 61187 - protein, 379 aa, Staphylococcus kloosii
  misc_feature (1)..(379): tr|A0A151A4P1|A0A151A4P1_9STAP Queuine tRNA-ribosyltran sferase OS=Staphylococcus kloosii OX=29384 GN=tgt PE=3 SV=1
MPAVTYEHIKTCKQSGARLGIVHTPHGSFETPMFMPVGTKATVKTMSPEELHQMEAKIILGNTYHLWLQPGNDIIRKSGGLHQFMNWDGPILTDSGGFQVFSLSNLRKISEEGVEFRHHTNGSKLFLSPEKAMQIQNDLGSDIMMAFDECPPMPSEYKYVKDSIERTTRWAERCLKAHNRKEDQALFGIIQGGEYKDLRQQSAEELVALDFPGYAIGGLSVGEPKPVMYDMVEHTEQYMPKDKPRYLMGVGSPDALIECSIRGMDMFDCVLPTRIARNGTCMTSEGRVVIKNAKYAEDFGPLDPNCDCYTCKNYSRAYLRHLIKAEETFGIRLTTYHNLQFLLKLMENIRQAIREDRLLDFKEEFFEQYGLNVDNPKNF

SEQ ID NO: 61188 - protein, 379 aa, Staphylococcus lentus
  misc_feature (1)..(379): tr|A0A4Y9KDR2|A0A4Y9KDR2_STALE Queuine tRNA-ribosyltran sferase OS=Staphylococcus lentus OX=42858 GN=tgt PE=3 S V=1
MPAVTYEHIKTCKQSGARLGIVHTPHGSFETPMFMPVGTKATVKTMSPEELKQMEAKIILSNTYHLWLQPGSDIISKVGGLHKFMNWDGPILTDSGGFQVFSLSDMRKIEEEGVHFRHHLNGSKLFLSPEKATHIQNDLGSDIMMAFDECPPMPSEYDYVKKSIERTSRWAERCLEAHKHPEDQALFGIIQGGEYNDLREQSAKDLVSLDFPGYAIGGLSVGEPKPVMYRMVEHTTPLMPFNKPRYLMGVGSPDALIECSIRGIDMFDCVLPTRIARNGTCMTSQGRVVIKNAKYQTDLSPLDPECDCYTCRNYTKAYLRHLIKADETFGIRLTTYHNLYFLLKLMENVRQAIREDRLLDFKDEFFEQYGLNVDNPKNF

SEQ ID NO: 61189 - protein, 379 aa, Staphylococcus lentus
  misc_feature (1)..(379): tr|A0A178PIW0|A0A178PIW0_STALE Queuine tRNA-ribosyltran sferase OS=Staphylococcus lentus OX=42858 GN=tgt PE=3 S V=1
MPAVTYEHIKTCKQSGARLGIVHTPHGSFETPMFMPVGTKATVKTMSPEELKQMEAKIILSNTYHLWLQPGSDIISKVGGLHKFMNWDGPILTDSGGFQVFSLSDMRKIEEEGVHFRHHLNGSKLFLSPEKATHIQNDLGSDIMMAFDECPPMPSEYDYVKKSIERTSRWAERCLEAHKRPEDQALFGIIQGGEYNDLREQSAKDLVSLDFPGYAIGGLSVGEPKPVMYRMVEHTTPLMPFNKPRYLMGVGSPDALIECSIRGIDMFDCVLPTRIARNGTCMTSQGRVVIKNAKYQTDLSPLDPECDCYTCRNYTKAYLRHLIKADETFGIRLTTYHNLYFLLKLMENVRQAIREDRLLDFKDEFFEQYGLNVDNPKNF

SEQ ID NO: 61190 - protein, 380 aa, Staphylococcus lugdunensis
  misc_feature (1)..(380): tr|A0A133Q2E6|A0A133Q2E6_STALU Queuine tRNA-ribosyltran sferase OS=Staphylococcus lugdunensis OX=28035 GN=tgt P E=3 SV=1
MPAVTYEHIKTCKQSGARLGIVHTPHGSFETPMFMPVGTKATVKTMSPEELTDNIEAKIILGNTYHLWLQPGNDIIKQAGGLHKFMNWNGPILTDSGGFQVFSLSNLRKISEEGVEFRHHTNGSKLFLSPEKSMEIQNDLGSDIMMAFDECPPMPSEYKYVKDSIERTSRWAERCLKAHKRPDDQALFGIIQGGEYKDLREQSAKELVALDFPGYAIGGLSVGEPKPVMYDMVKHTEQFMPKDKPRYLMGVGSPDALIECSIRGMDMFDCVLPTRIARNGTCMTSIGRLVIKNAQFANDFRPLDENCDCYTCKNYSRAYIRHLIKAEETFGIRLTTIHNLHFLLKLMEDIRQAIREDRLLDFKEAFFEQYGLNVENPKNF

SEQ ID NO: 61191 - protein, 379 aa, Staphylococcus lugdunensis
  misc_feature (1)..(379): tr|A0A4Q9W9Z3|A0A4Q9W9Z3_STALU Queuine tRNA-ribosyltran sferase OS=Staphylococcus lugdunensis OX=28035 GN=tgt P E=3 SV=1
MPAVTYEHIKTCKQSGARLGIVHTPHGSFETPMFMPVGTKATVKTMSPEELTDIEAKIILGNTYHLWLQPGNDIIKQAGGLHKFMNWNGPILTDSGGFQVFSLSNLRKISEEGVEFRHHTNGSKLFLSPEKSMEIQNDLGSDIMMAFDECPPMPSEYKYVKDSIERTSRWAERCLKAHKRPDDQALFGIIQGGEYKDLREQSAKELVALDFPGYAIGGLSVGEPKPVMYDMVKHTEQFMPKDKPRYLMGVGSPDALIECSIRGMDMFDCVLPTRIARNGTCMTSIGRLVIKNAQFANDFRPLDENCDCYTCKNYSRAYIRHLIKAEETFGIRLTTIHNLHFLLKLMEDIRQAIREDRLLDFKEAFFEQYGLNVENPKNF

SEQ ID NO: 61192 - protein, 379 aa, Staphylococcus lutrae
  misc_feature (1)..(379): tr|A0A1W6BJE8|A0A1W6BJE8_9STAP Queuine tRNA-ribosyltran sferase OS=Staphylococcus lutrae OX=155085 GN=tgt PE=3 SV=1
MPAVTYEHIKTCKQSGARLGIVHTPHGSFETPMFMPVGTKATVKTMSPEELKQMHTQILLGNTYHLWLQPGNDIIKQAGGLHKFMNWDGPILTDSGGFQVFSLSNLRKITEEGVEFRHHTNGSKLFLSPEDSIKIQNDLGSDIIMAFDECPPMPAEYDYVKQSLERTTRWAERCLNAHQRPHDQALFGIIQGGEYKDLRQQSAEALVKLDFPGYAIGGLSVGEPKPVMYDMVEHTVQFMPENKPRYLMGVGSPDALIECSIRGMDMFDCVLPTRIARNGTCMTSTGRLVVKNAQYKNDFRPLDANCDCYTCRNYSRAYLRHLIKADETFGIRLTTYHNLHFLLKLMENIRQAIREDRLLDFKEEFFEQYGLNVDNPKNF

SEQ ID NO: 61193 - protein, 379 aa, Staphylococcus massiliensis
  misc_feature (1)..(379): tr|K9B583|K9B583_9STAP Queuine tRNA-ribosyltransferase OS=Staphylococcus massiliensis S46 OX=1229783 GN=tgt PE =3 SV=1
MPAVTYEHIKTCKQSGARLGIVHTPHGSFETPMFMPVGTKATVKTMSPEDLTNMEAKIILGNTYHLWLQPGNDIIKKAGGLHKFMNWDKPILTDSGGFQVFSLSNLREIKEEGVHFRHHANGSKLFLSPEKSMEIQNDLGSDIMMAFDECPPMPAEYEYVKKSIERTTRWAERCLKAHKRPEDQALFGIIQGGEYKDLREQSAKELVALDFPGYAIGGLSVGEPKPVMYDMVEHTVKYMPHDKPRYLMGVGSPDALIECSIRGMDMYDCVLPTRIARNGTCMTSNGRLVIKNAKFQDDLRPLDENCDCYTCRNYSRAYIRHLIKAEETFGIRLTTYHNLHFLLKLMENIRQAIRDDRLLDFKEEFFEQYGLNKENPKNF

SEQ ID NO: 61194 - protein, 379 aa, Staphylococcus microti
  misc_feature (1)..(379): tr|A0A0D6XPN5|A0A0D6XPN5_9STAP Queuine tRNA-ribosyltran sferase OS=Staphylococcus microti OX=569857 GN=tgt PE=3 SV=1
MPAVTYEHIKTCKQSGARLGIVHTPHGSFETPMFMPVGTKATVKTMSPEELKQMNTKILLGNTYHLWLQPGNDIVKQAGGLHKFMNWDGPILTDSGGFQVFSLSNLRKITEEGVEFRHHTNGSKLFLSPEDSIKIQNDLGSDIIMAFDECPPMPAEYKYVKDSLERTTRWAERCKKAHQRPEDQALFGIIQGGEYKDLRQQSAEALVALDFPGYAIGGLSVGEPKPVMYDMVSHTVQFMPEDKPRYLMGVGSPDALIECSIRGMDMFDCVLPTRIARNGTCMTSHGRLVVKNAQFKDDFRPLDENCDCYTCKNYTRAYLRHLIKADETFGIRLTTYHNLHFLLKLMENIRQAIREDRLLDFKEEFFEQYGLNVENPKNF

SEQ ID NO: 61195 - protein, 379 aa, Staphylococcus muscae
  misc_feature (1)..(379): tr|A0A240C2Y4|A0A240C2Y4_9STAP Queuine tRNA-ribosyltran sferase OS=Staphylococcus muscae OX=1294 GN=tgt PE=3 SV =1
MPAVTYEHIKTCKQSGARLGIVHTPHGSFETPMFMPVGTKATVKTMSPEELKQMNTKILLGNTYHLWLQPGNDIVKQAGGLHKFMNWDGPILTDSGGFQVFSLSNLRKITEEGVEFRHHTNGSKLFLSPEDSIKIQNDLGSDIIMAFDECPPMPAEYDYVKNSLERTTRWAERCKKAHQRPEDQALFGIIQGGEYKDLRQQSAEALVALDFPGYAIGGLSVGEPKPVMYDMVEHTVQYMPEDKPRYLMGVGSPDALIECSIRGMDMFDCVLPTRIARNGTCMTSHGRLVVKNAQFKDDFRPLDENCDCYTCKNYTRAYLRHLIKADETFGIRLTTYHNLHFLLKLMEDIRQAIREDRLLDFKEEFFEQYGLNVENPKNF

SEQ ID NO: 61196 - protein, 379 aa, Staphylococcus nepalensis; identical to SEQ ID NO: 53995
  misc_feature (1)..(379): tr|A0A291JK28|A0A291JK28_9STAP Queuine tRNA-ribosyltran sferase OS=Staphylococcus nepalensis OX=214473 GN=tgt P E=3 SV=1

SEQ ID NO: 61197 - protein, 379 aa, Staphylococcus pasteuri; identical to SEQ ID NO: 51997
  misc_feature (1)..(379): tr|A0A269XLD4|A0A269XLD4_9STAP Queuine tRNA-ribosyltran sferase OS=Staphylococcus pasteuri OX=45972 GN=tgt PE=3 SV=1

SEQ ID NO: 61198 - protein, 379 aa, Staphylococcus pasteuri
  misc_feature (1)..(379): tr|A0A0M2NWX5|A0A0M2NWX5_9STAP Queuine tRNA-ribosyltran sferase OS=Staphylococcus pasteuri OX=45972 GN=tgt PE=3 SV=1
MPAVTYEHIKTCKQSGARLGIVHTPHGSFETPMFMPVGTKATVKTMSPEELRQIEAQIILGNTYHLWLQPGNDIIKHAGGLHKFMNWNGPILTDSGGFQVFSLSNLRKISEEGVEFRHHTNGSKLFLSPEKSMQIQNDLGSDIMMAFDECPPMPSEYEYVKNSIERTTRWAERCLKAHARPEEQSLFGIIQGGEYKDLREQSAKELVELDFPGYAIGGLSVGEPKPVMYEMVEHTEQFMPKDKPRYLMGVGSPDALIECSIRGMDMFDCVLPTRIARNGTCMTSNGRLVIKNAKFADDLRPLDENCDCYTCKNYSRAYIRHLIKAEETFGIRLTTIHNLHFLLKLMEDIRQAIREDRLLDFKAEFFEQYGLNVDNPKNF

SEQ ID NO: 61199 - protein, 379 aa, Staphylococcus petrasii
  misc_feature (1)..(379): tr|A0A5F1B623|A0A5F1B623_9STAP Queuine tRNA-ribosyltran sferase OS=Staphylococcus petrasii subsp. petrasii OX=1 276937 GN=tgt PE=3 SV=1
MPAVTYEHIKTCKQSGARLGIVHTPHGSFETPMFMPVGTKATVKTMSPEELREIEAKIILGNTYHLWLQPGNDIIKQAGGLHKFMNWNGPILTDSGGFQVFSLSNLRKITEEGVEFRHHTNGSKLFLSPEKSMEIQNDLGSDIMMAFDECPPMPSEYKYVKDSIERTTRWAERCLKAHKRPEDQALFGIIQGGEYKDLREQSAKDLVKLDFPGYAIGGLSVGEPKPVMYDMVEHTVQYMPEDKPRYLMGVGSPDALIECSIRGMDMFDCVLPTRIARNGTCMTSNGRLVIKNAKFTEDFRPLDENCDCYTCKNYTRAYIRHLIKAEETFGIRLTTIHNLHFLLKLMEDIRQAIREDRLLDFKEEFFEQYGLNVENPKNF

SEQ ID NO: 61200 - protein, 379 aa, Staphylococcus petrasii
  misc_feature (1)..(379): tr|A0A380FZR2|A0A380FZR2_9STAP Queuine tRNA-ribosyltran sferase OS=Staphylococcus petrasii subsp. jettensis OX= 1077965 GN=tgt PE=3 SV=1
MPAVTYEHIKTCKQSGARLGIVHTPHGSFETPMFMPVGTKATVKTMSPEELREIEAKIILGNTYHLWLQPGNDIIKQAGGLHKFMNWNGPILTDSGGFQVFSLSNLRKITEEGVEFRHHTNGSKLFLSPEKSMEIQNDLGSDIMMAFDECPPMPSEYKYVKDSIERTTRWAERCLKAHKRPEDQALFGIIQGGEYKDLREQSAKDLVKLDFPGYAIGGLSVGEPKPVMYDMVEHTVQYMPEDKPRYLMGVGSPDALIECSIRGMDMFDCVLPTRIARNGTCMTSNGRLVIKNAKFAEDFRPLDENCDCYTCKNYTRAYIRHLIKVEETFGIRLTTIHNLHFLLKLMEDIRQAIREDRLLDFKEEFFEQYGLNVENPKNF

SEQ ID NO: 61201 - protein, 379 aa, Staphylococcus pettenkoferi
  misc_feature (1)..(379): tr|A0A1Z3TZ96|A0A1Z3TZ96_9STAP Queuine tRNA-ribosyltran sferase OS=Staphylococcus pettenkoferi OX=170573 GN=tgt PE=3 SV=1
MPAVTYEHIKTCKQSGARLGIVHTPHGSFETPMFMPVGTKATVKTMSPEELHQMEAKIILGNTYHLWLQPGNDIIRKSGGLHQFMNWDGPILTDSGGYQVFSLSNLRQISEEGVAFRHHKNGSKLFLSPEKSMAIQNDLGSDIMMAFDECPPMPAEYQYVKDSIERTSRWAKRCLEAHQRPEDQALFGIIQGGEYKDLRKQSAEELVALDFPGYAIGGLSVGEPKPTMYEMVEYTEQFMPFDKPRYLMGVGSPDALIECSIRGMDMFDCVLPTRIARNGTCMTSNGRLVIKNAKYKDDLGPLDSNCDCYTCRNYSRAYIRHLVKAEETFGIRLTTYHNLHFLLKLMEQIRQAIREDRLLDFKEEFFEQYGLNVDNPKNF

SEQ ID NO: 61202 - protein, 379 aa, Staphylococcus piscifermentans; identical to SEQ ID NO: 61174
  misc_feature (1)..(379): tr|A0A431Z2Z7|A0A431Z2Z7_9STAP Queuine tRNA-ribosyltran sferase OS=Staphylococcus piscifermentans OX=70258 GN=t gt PE=3 SV=1

SEQ ID NO: 61203 - protein, 379 aa, Staphylococcus piscifermentans
  misc_feature (1)..(379): tr|A0A239U370|A0A239U370_9STAP Queuine tRNA-ribosyltran sferase OS=Staphylococcus piscifermentans OX=70258 GN=t gt PE=3 SV=1
MPAVTYEHIKTCKQSGARLGIVHTPHGSFETPMFMPVGTKATVKTMSPEELHDINAKIILGNTYHLWLQPGNELIKRAGGLHRFMNWDGPILTDSGGFQVFSLSNLRKITEEGVYFRHHKNGSKLFLSPEKSMEIQNDLGSDIMMAFDECPPMPAEYKYVKDSIERTTRWAERCLKAHARPEDQALFGIIQGGEYKDLRQQSAEELVKLDFPGYAIGGLSVGEPKPVMYDMVKHTEQFMPKDKPRYLMGVGSPDALIECSIRGMDMFDCVLPTRIARNGTCMTSEGRVVIKNAKYADDLGPLDPNCDCYTCRNYSRAYLRHLIKAEETFGIRLTTYHNLYFLLKLMEDIRQAIREDRLLDFKEEFFEQYGLNVENPKNF

SEQ ID NO: 61204 - protein, 255 aa, Staphylococcus pseudintermedius
  misc_feature (1)..(255): tr|A0A317Z9H8|A0A317Z9H8_STAPS Queuine tRNA-ribosyltran sferase (Fragment) OS=Staphylococcus pseudintermedius O X=283734 GN=DD924_06565 PE=3 SV=1
MPAVTYEHIKTCKQSGARLGIVHTPHGSFETPMFMPVGTKATVKTMSPEELKQMNTKILLGNTYHLWLQPGNDIVKQAGGLHKFMNWDGPILTDSGGFQVFSLSNLRKITEEGVEFRHHTNGSKLFLSPEDSIKIQNDLGSDIIMAFDECPPMPAEYDYVKNSLERTTRWAERCLAAHQRPEDQALFGIIQGGEYKDLRQQSAEELVKLDFPGYAIGGLSVGEPKPVMYEMVEHTEQFMPKDKPRYLMGVGSPDA

SEQ ID NO: 61205 - protein, 379 aa, Staphylococcus pseudintermedius; identical to SEQ ID NO: 61166
  misc_feature (1)..(379): tr|A0A166PAU7|A0A166PAU7_STAPS Queuine tRNA-ribosyltran sferase OS=Staphylococcus pseudintermedius OX=283734 GN =tgt PE=3 SV=1

SEQ ID NO: 61206 - protein, 379 aa, Staphylococcus rostri
  misc_feature (1)..(379): tr|A0A2K3YHR9|A0A2K3YHR9_9STAP Queuine tRNA-ribosyltran sferase OS=Staphylococcus rostri OX=522262 GN=tgt PE=3 SV=1
MPAVTYEHIKTCKQSGARLGIVHTPHGSFETPMFMPVGTKATVKTMSPEELKQMNTKILLGNTYHLWLQPGNDIVKQAGGLHKFMNWDGPILTDSGGFQVFSLSNLRKITEEGVEFRHHTNGSKLFLSPEDSIKIQNDLGSDIIMAFDECPPMPAEYDYVKKSLERTTRWAERCKKAHQRPEDQALFGIIQGGEYKDLRQQSAEALVDLDFPGYAIGGLSVGEPKPVMYEMVEHTVQYMPEDKPRYLMGVGSPDALIECSIRGMDMFDCVLPTRIARNGTCMTSHGRLVVKNAQFKDDFRPLDENCDCYTCKNYTRAYLRHLIKADETFGIRLTTYHNLHFLLKLMENIRQAIREDRLLDFKEEFFEQYGLNVENPKNF

SEQ ID NO: 61207 - protein, 379 aa, Staphylococcus saccharolyticus; identical to SEQ ID NO: 61198
  misc_feature (1)..(379): tr|A0A431YL56|A0A431YL56_9STAP Queuine tRNA-ribosyltran sferase OS=Staphylococcus saccharolyticus OX=33028 GN=t gt PE=3 SV=1

SEQ ID NO: 61208 - protein, 379 aa, Staphylococcus saccharolyticus
  misc_feature (1)..(379): tr|A0A4Q8N110|A0A4Q8N110_9STAP Queuine tRNA-ribosyltran sferase OS=Staphylococcus saccharolyticus OX=33028 GN=t gt PE=3 SV=1
MPAVTYEYIKTCKQSGARLGIVHTSHGSFETPIFMPVGTKATVKTMSPEELKDIQAKIILGNTYHLWLQPGNDIIKHAGGLHQFMNWDGPILTDSGGFQVFSLSNLRKITEEGVEFRHHTNGSKLFLSPEKSMQIQNDLGSDIMMAFDECPPMPSEYNYVKNSIERTTRWAERCLKAHQRPEDQALFGIIQGGEYKDLREQSVKELVSLDFPGYAIGGLSVGEPKPVMYDMVEHTEQFMPKDKPRYLMGVGSPDVLIECSVRGMDMFDCVLPTRIARNGTCMTSTGRLVVKNAKYADDLRPLDEHCECYTCRNYTRAYIRHLVKAEETFGIRLTTIHNLHFLLKLMEDIRQAIREDRLLDFKDEFFEQYGLNVENPKNF

SEQ ID NO: 61209 - protein, 381 aa, Staphylococcus saprophyticus
  misc_feature (1)..(381): tr|Q49Y77|Q49Y77_STAS1 Queuine tRNA-ribosyltransferase OS=Staphylococcus saprophyticus subsp. saprophyticus (s train ATCC 15305 / DSM 20229 / NCIMB 8711 / NCTC 7292 / S-41) OX=342451 GN=tgt PE=3 SV=1
MPTPAVTYEHIKTCKQSGARLGIVHTPHGSFETPMFMPVGTKATVKTMSPEELHQMETKIILGNTYHLWLQPGNDIIRKSGGLHQFMNWNGPILTDSGGFQVFSLSNLRKITEEGVEFRHHTNGSKLFLSPEKSMQIQNDLGSDIMMAFDECPPMPAEYKYVKDSIERTTRWAERCLKAHSRPEDQALFGIIQGGEYKDLRKQSAEELVALDFPGYAIGGLSVGEPKPVMYDMVHHTEQFMPKDKPRYLMGVGSPDALIECSIRGMDMFDCVLPTRIARNGTCMTSHGRVIIKNAKYAEDLGPLDDNCDCYTCKNYSRAYIRHLIKAEETFGIRLTTYHNLHFLLKLMENIRQAIREDRLLDFKEEFFEQYGLNVENPKNF

SEQ ID NO: 61210 - protein, 381 aa, Staphylococcus saprophyticus
  misc_feature (1)..(381): tr|A0A380HMK2|A0A380HMK2_STASA Queuine tRNA-ribosyltran sferase OS=Staphylococcus saprophyticus subsp. saprophy ticus OX=147452 GN=tgt PE=3 SV=1
MPTPAVTYEHIKTCKQSGARLGIVHTPHGSFETPMFMPVGTKATVKTMSPEELHQMETKIILGNTYHLWLQPGNDIIRMSGGLHQFMNWNGPILTDSGGFQVFSLSNLRKITEEGVEFRHHTNGSKLFLSPEKSMQIQNDLGSDIMMAFDECPPMPAEYKYVKDSIERTTRWAERCLKAHSRPEDQALFGIIQGGEYKDLRKQSAEELVALNFPGYAIGGLSVGEPKPVMYDMVHHTEQFMPKDKPRYLMGVGSPDALIECSIRGMDMFDCVLPTRIARNGTCMTSHGRVIIKNAKYAEDLGPLDDNCDCYTCKNYSRAYIRHLIKAEETFGIRLTTYHNLHFLLKLMENIRQAIREDRLLDFKEEFFELYGLNVENPKNF

SEQ ID NO: 61211 - protein, 379 aa, Staphylococcus schleiferi
  misc_feature (1)..(379): tr|A0A3S0LVV7|A0A3S0LVV7_9STAP Queuine tRNA-ribosyltran sferase OS=Staphylococcus schleiferi subsp. schleiferi OX=74707 GN=tgt PE=3 SV=1
MPAVTYEHIKTCKQSGARLGIVHTPHGSFETPMFMPVGTKATVKTMSPEELKQMEAKIILSNTYHLWLQPGSDIISKVGGLHKFMNWDGPILTDSGGFQVFSLSDMRKIEEEGVHFRHHLNGSKLFLSPEKAMHIQNDLGSDIMMAFDECPPMPSEYEYVKNSIERTSRWAERCLEAHRRPEDQALFGIIQGGEYKDLREQSAKDLVSLDFPGYAIGGLSVGEPKPVMYRMVEHTTPLMPFNKPRYLMGVGSPDALIECSIRGIDMFDCVLPTRIARNGTCMTSQGRVVIKNAKYQQDLSPLDPECDCYTCRNYTKAYLRHLIKADETFGIRLTTYHNLYFLLKLMENIRQAIREDRLLDFKDEFFEQYGLNVDNPKNF

SEQ ID NO: 61212 - protein, 379 aa, Staphylococcus schleiferi
  misc_feature (1)..(379): tr|A0A0M5MYU6|A0A0M5MYU6_9STAP Queuine tRNA-ribosyltran sferase OS=Staphylococcus schleiferi OX=1295 GN=tgt PE= 3 SV=1
MPAVTYEHIKTCKQSGARLGIVHTPHGSFETPMFMPVGTKATVKTMSPEELKQMNTKILLGNTYHLWLQPGNDIVKKAGGLHQFMNWDGPILTDSGGFQVFSLSNLRKITEEGVEFRHHTNGSKLFLSPEDSIKIQNDLGSDIIMAFDECPPMPAEYDYVKNSIERTTRWAERCLQAHQRPNDQALFGIIQGGEYKDLRQQSAEELVKLDFPGYAIGGLSVGEPKPVMYDMVEFTEQFMPKDKPRYLMGVGSPDALIECSIRGMDMFDCVLPTRIARNGTCMTSHGRVVVKNAQYKDDFRPLDENCDCYTCKNYSRAYLRHLIKADETFGIRLTTYHNLHFLLKLMENIRQAIREDRLLDFKEEFFEQYGLNVDNPKNF

SEQ ID NO: 61213 - protein, 379 aa, Staphylococcus schweitzeri; identical to SEQ ID NO: 61150
  misc_feature (1)..(379): tr|A0A2K4AHL8|A0A2K4AHL8_9STAP Queuine tRNA-ribosyltran sferase OS=Staphylococcus schweitzeri OX=1654388 GN=tgt PE=3 SV=1

SEQ ID NO: 61214 - protein, 379 aa, Staphylococcus sciuri; identical to SEQ ID NO: 61184
  misc_feature (1)..(379): tr|A0A3S0K0P9|A0A3S0K0P9_STASR Queuine tRNA-ribosyltran sferase OS=Staphylococcus sciuri subsp. rodentium OX=14 7469 GN=tgt PE=3 SV=1

SEQ ID NO: 61215 - protein, 379 aa, Staphylococcus sciuri
  misc_feature (1)..(379): tr|A0A1X0TU10|A0A1X0TU10_STASC Queuine tRNA-ribosyltran sferase OS=Staphylococcus sciuri OX=1296 GN=tgt PE=3 SV =1
MPAVTYEHIKTCKQSGARLGIVHTPHGSFETPMFMPVGTKATVKTMSPEELKQMEAKIILSNTYHLWLQPGSDIISKVGGLHKFMNWDGPILTDSGGFQVFSLSDMRKIEEEGVHFRHHLNGSKLFLSPEKAMHIQNDLGSDIMMAFDECPPMPSEYEYVKNSIERTSRWAERCLEAHRRPEDQALFGIIQGGEYKDLREQSAKDLVSLDFPGYAIGGLSVGEPKPVMYRMVEHTAPLMPFNKPRYLMGVGSPDALIECSIRGIDMFDCVLPTRIARNGTCMTSQGRVVIKNAKYQQDLSPLDPECDCYTCRNYTKAYLRHLIKADETFGIRLTTYHNLYFLLKLMENIRQAIREDRLLDFKDEFFEQYGLNVDNPKNF

SEQ ID NO: 61216 - protein, 379 aa, Staphylococcus simiae
  misc_feature (1)..(379): tr|G5JHN7|G5JHN7_9STAP Queuine tRNA-ribosyltransferase OS=Staphylococcus simiae CCM 7213 = CCUG 51256 OX=91123 8 GN=tgt PE=3 SV=1
MPAVTYEHIKTCKQSGARLGIVHTPHGSFETPMFMPVGTKATVKTLSPEELRQINAKIILGNTYHLWLQPGNDIIKHAGGLHKFMNWDGPILTDSGGFQVFSLSNLRKITEEGVEFRHHTNGSKLFLSPEKSMQIQNDLGSDIMMAFDECPPMPAEYDYVKKSIERTTRWAERCLKAHQRPEDQALFGIIQGGEYEDLREQSAKDLVELDFPGYAIGGLSVGEPKPVMYKMVEHTEQFMPKDKPRYLMGVGSPDALIECSIRGMDMFDCVLPTRIARNGTCMTSNGRLVIKNAKFADDLRPLDENCDCYTCQNYSRAYIRHLIKAEETFGIRLTTIHNLHFLLKLMEDVRQAIREDRLLDFKEEFFEQYGLNVENPKNF

SEQ ID NO: 61217 - protein, 379 aa, Staphylococcus simulans
  misc_feature (1)..(379): tr|A0A2T4QQ84|A0A2T4QQ84_STASI Queuine tRNA-ribosyltran sferase OS=Staphylococcus simulans OX=1286 GN=tgt PE=3 SV=1
MPAVTYEHIKTCKQSGARLGIVHTPHGSFETPMFMPVGTQATVKTMSPEELRDINAQIILGNTYHLWLQPGNDIIKRAGGLHKFMNWNGPILTDSGGFQVFSLSNLRKITEEGVHFRHHKNGSKLFLSPEKATEIQNDLGSDIMMAFDECPPMPAEYEYVKDSIERTTRWAERCLKAHKRPEDQALFGIIQGGEYKDLRQQSAEELVKLDFPGYAIGGLSVGEPKPVMYDMVEFTEQFMPKDKPRYLMGVGSPDALIECSIRGMDMFDCVLPTRIARNGTCMTSKGRVVIKNAKYADDLSPLDENCDCYTCRNYTKAYLRHLIKAEETFGIRLTTYHNLYFLLKLMEDIRQAIREDRLLDFKEEFFEQYGLNEENPKNF

SEQ ID NO: 61218 - protein, 379 aa, Staphylococcus simulans
  misc_feature (1)..(379): tr|A0A133QDW8|A0A133QDW8_STASI Queuine tRNA-ribosyltran sferase OS=Staphylococcus simulans OX=1286 GN=tgt PE=3 SV=1
MPAVTYEHIKTCKQSGARLGIVHTPHGSFETPMFMPVGTQATVKTMSPEELREINAQIILGNTYHLWLQPGNDIIKRAGGLHKFMNWNGPILTDSGGFQVFSLSNLRKITEEGVHFRHHKNGSKLFLSPEKATEIQNDLGSDIMMAFDECPPMPAEYKYVKDSIERTTRWAERCLKAHKRPEDQALFGIIQGGEYKDLRQQSAEELVKLDFPGYAIGGLSVGEPKPVMYDMVEFTEQFMPKDKPRYLMGVGSPDALIECSIRGMDMFDCVLPTRIARNGTCMTSNGRVVIKNAKYADDLSPLDENCDCYTCRNYTKAYLRHLIKAEETFGIRLTTYHNLYFLLKLMEDIRQAIREDRLLDFKEEFFEQYGLNEENPKNF

SEQ ID NO: 61219 - protein, 377 aa, Staphylococcus sp.
  misc_feature (1)..(377): tr|R6TFV3|R6TFV3_9STAP Queuine tRNA-ribosyltransferase OS=Staphylococcus sp. CAG:324 OX=1262969 GN=tgt PE=3 SV =1
MVIKYELIKKDENSMARVGKITTPHSIIDTPCFMPVGTQATIKALSKEEVVATGAQIILGNTYHLWNQPGHKLIEKAGGLHKFMNWDQSILTDSGGFQVFSLAKLRDIKEEGVYFKHHKSGKPLFLSPELAIEIQNSLGSDIMMSFDECPPYPSTRDYMEKSVERTIRWAKRGLEAHQNKDSQGVFGIIQGGDFEDIRIYCANELTKLPFDGFSIGGLSVGEPKYIQNKVLSYTTPHLPPNKPRYLMGVGSPGAILDGVERGIDMFDCVLPTRIARHSCAMTSRGRMILKNQEFEDDFRPLDEECDCYTCKNYTRAYLRHLVKANEILGARLISIHNIQFLENLMKNIRFSIMENKFLEFKQKFYDKYGLNESDKDF

SEQ ID NO: 61220 - protein, 379 aa, Staphylococcus sp.
  misc_feature (1)..(379): tr|A0A1F2L291|A0A1F2L291_9STAP Queuine tRNA-ribosyltran sferase OS=Staphylococcus sp. HMSC14D01 OX=1581101 GN=t gt PE=3 SV=1
MPAVTYEHIKTCKQSGARLGIVHTPHGSFETPMFMPVGTKATVKTMSPEELRQIEAKIILGNTYHLWLQPGNDIIKQVGGLHNFMNWDGPILTDSGGFQVFSLSNLRKITEEGVEFRHHTNGSKLFLSPEKSMEIQNDLGSDIMMAFDECPPMPSEYKYVKDSIERTTRWAERCLNAHKRPEDQALFGIIQGGEYKDLREQSAKELVALDFPGYAIGGLSVGEPKPVMYEMVEHTVQYMPDDKPRYLMGVGSPDALIECSIRGMDMFDCVLPTRIARNGTCMTSNGRLVIKNAKYANDFKPLDENCDCYTCKNYSRAYIRHLIKAEETFGIRLTTIHNLHFLLKLMEDIRQAIREDRLLDFKDEFFEQYGLNVENPKNF

SEQ ID NO: 61221 - protein, 379 aa, Staphylococcus stepanovicii
  misc_feature (1)..(379): tr|A0A239Z3G7|A0A239Z3G7_9STAP Queuine tRNA-ribosyltran sferase OS=Staphylococcus stepanovicii OX=643214 GN=tgt PE=3 SV=1
MPAVTYEHIKTCKQSGARLGIVHTPHGSFETPMFMPVGTKATVKTMSPEELKEMEAKIILSNTYHLWLQPGSDIISKVGGLHKFMNWDGPILTDSGGFQVFSLSDMRKIEEEGVHFRHHLNGSKLFLSPEKATHIQNDLGSDIMMAFDECPPMPSEYEYVKKSIERTSRWAERCLKAHKRPEDQALFGIIQGGEYNDLREQSAKDLVSLDFPGYAIGGLSVGEPKPVMYRMVEHTAPLMPFNKPRYLMGVGSPDALIECSIRGIDMFDCVLPTRIARNGTCMTSQGRVVIKNAKYQQDLSPLDPECDCYTCRNYTKAYLRHLIKADETFGIRLTTYHNLYFLLKLMENIRQAIREDRLLDFKDEFFEQYGLNVDNPKNF

SEQ ID NO: 61222 - protein, 379 aa, Staphylococcus succinus
  misc_feature (1)..(379): tr|A0A2T4Q5W8|A0A2T4Q5W8_9STAP Queuine tRNA-ribosyltran sferase OS=Staphylococcus succinus OX=61015 GN=tgt PE=3 SV=1
MPAVTYEHIKTCKQSGARLGIVHTPHGSFETPMFMPVGTKATVKTMSPEELHQMESKIILGNTYHLWLQPGNDIIKKSGGLHQFMNWNGPILTDSGGFQVFSLSNLRNITEKGVEFRHHTNGSKLFLSPEKSMQIQNDLGSDIMMAFDECPPMPAEYKYVKDSIERTTRWAERCLEAHKRPEDQALFGIIQGGEYKDLRQQSAEDLVALDFPGYAIGGLSVGEPKPVMYDMVQHTEQFMPKDKPRYLMGVGSPDALIECSIRGMDMFDCVLPTRIARNGTCMTSHGRLTVKNAKYADDLRPIDDNCDCYACKNYSRAYIRHLIKAEETFGIRLTTYHNLHFLLKLMENIRQAIREDRLLDFKEEFFEQYGLNVENPKNF

SEQ ID NO: 61223 - protein, 379 aa, Staphylococcus vitulinus
  misc_feature (1)..(379): tr|A0A2T4PV26|A0A2T4PV26_9STAP Queuine tRNA-ribosyltran sferase OS=Staphylococcus vitulinus OX=71237 GN=tgt PE= 3 SV=1
MPAVTYEHIKTCKQSGARLGIVHTPHGSFETPMFMPVGTKATVKTMSPEELKQMEAKIILSNTYHLWLQPGSDIISKVGGLHKFMNWDGPILTDSGGFQVFSLSDMRKIEEEGVHFRHHLNGSKLFLSPEKAMHIQNDLGSDIMMAFDECPPMPAEYEYVKNSIERTSRWAERCLEAHQRPEDQALFGIIQGGEYKDLREQSAKDLVSLDFPGYAIGGLSVGEPKPVMYKMVEHTAPLMPFNKPRYLMGVGSPDALIECSIRGIDMFDCVLPTRIARNGTCMTSQGRVVIKNAKYQQDLSPLDPECDCYTCRNYTKAYLRHLIKADETFGIRLTTYHNLYFLLKLMENVRQAIREDRLLDFKDEFFEQYGLNVDNPKNF

SEQ ID NO: 61224 - protein, 379 aa, Staphylococcus warneri; identical to SEQ ID NO: 51997
  misc_feature (1)..(379): tr|A0A5F0TZF6|A0A5F0TZF6_STAWA Queuine tRNA-ribosyltran sferase OS=Staphylococcus warneri OX=1292 GN=tgt PE=3 S V=1

SEQ ID NO: 61225 - protein, 379 aa, Staphylococcus warneri
  misc_feature (1)..(379): tr|A0A2T4PZK9|A0A2T4PZK9_STAWA Queuine tRNA-ribosyltran sferase OS=Staphylococcus warneri OX=1292 GN=tgt PE=3 S V=1
MPAVTYEHIKTCKQSGARLGIVHTPHGSFETPMFMPVGTKATVKTMSPEELSQIEAKIILGNTYHLWLQPGNDIIKHAGGLHKFMNWNGPILTDSGGFQVFSLSNLRKISEEGVEFRHHTNGSKLFLSPEKSMEIQNDLGSDIMMAFDECPPMPSEYKYVKDSIERTTRWAERCLKAHARPEDQALFGIIQGGEYKDLREQSAKELVELDFPGYAIGGLSVGEPKPVMYEMVEHTEQFMPKDKPRYLMGVGSPDALIECSIRGMDMFDCVLPTRIARNGTCMTSNGRLVIKNAKFADDLRPLDENCDCYTCKNYSRAYIRHLIKAEETFGIRLTTIHNLHFLLKLMEDIRQAIREDRLLDFKAEFFEQYGLNVDNPKNF

SEQ ID NO: 61226 - protein, 379 aa, Staphylococcus xylosus
  misc_feature (1)..(379): tr|A0A418IAA9|A0A418IAA9_STAXY Queuine tRNA-ribosyltran sferase OS=Staphylococcus xylosus OX=1288 GN=tgt PE=3 S V=1
MPAVTYEHIKTCKQSGARLGIVHTPHGSFETPMFMPVGTKATVKTMSPEELNQMEAKIILGNTYHLWLQPGNDIIKKSGGLHQFMNWNGPILTDSGGFQVFSLSNLRKISEKGVEFRHHTNGSKLFLSPEKAMQIQNDLGSDIMMAFDECPPMPAEYKYVKDSIERTTRWAERCLKAHKRPDDQALFGIIQGGEYKDLRKQSAEELVALDFPGYAIGGLSVGEPKPVMYDMVKHTEQFMPKDKPRYLMGVGSPDALIECSIRGMDMFDCVLPTRIARNGTCMTSHGRVTIKNAKYAEDLGPLDENCDCYTCKNYSRAYIRHLIKAEETFGIRLTTYHNLHFLLKLMENIRQAIREDRLLDFKEEFFEQYGLNVENPKNF

SEQ ID NO: 61227 - protein, 379 aa, Staphylococcus xylosus
  misc_feature (1)..(379): tr|A0A418IEF4|A0A418IEF4_STAXY Queuine tRNA-ribosyltran sferase OS=Staphylococcus xylosus OX=1288 GN=tgt PE=3 S V=1
MPAVTYEHIKTCKQSGARLGIVHTPHGSFETPMFMPVGTKATVKTMSPEELNQMEAKIILGNTYHLWLQPGNDIIRKSGGLHQFMNWNGPILTDSGGFQVFSLSNLRKISEKGVEFRHHTNGSKLFLSPEKAMEIQNDLGSDIMMAFDECPPMPAEYKYVKDSIERTTRWAERCLKAHKRPEDQALFGIIQGGEYKDLRKQSAEELVALDFPGYAIGGLSVGEPKPVMYDMVKHTEQFMPKDKPRYLMGVGSPDALIECSIRGMDMFDCVLPTRIARNGTCMTSHGRVTIKNAKYAEDLGPLDENCDCYTCKNYSRAYIRHLIKAEETFGIRLTTYHNLHFLLKLMENIRQAIREDRLLDFKEEFFEQYGLNVENPKNF

SEQ ID NO: 61228 - protein, 381 aa, Stappia indica
  misc_feature (1)..(381): tr|A0A285S7N7|A0A285S7N7_9RHOB Queuine tRNA-ribosyltran sferase OS=Stappia indica OX=538381 GN=tgt PE=3 SV=1
MTAPFSFRLLANDGMARRGEIVTPHGRVATPAFMPVGTQATVKAMYPGQVRELGADVVLGNTYHLMLRPGAERIARLGGLHTFMNWPHTILTDSGGFQVMSLAQLRKLTEEGVTFQSHIDGSRHVMTPERSVEIQQLLGSDIQMQLDECIALPAPREDVERAMRLSLRWAERSRAQFETMGGPGRGQALYGIVQGGDVPDLRIASAQALGEMPFEGYSVGGLAVGEPQDVMLAMLDVTTPAMPVDKPRYLMGVGTPEDILESVARGIDQFDCVMPTRAGRHGLAYTRYGKVNLKNARHADDPRPLDEASDCPAARDYSRAYLHHLVKAGEGLAAMLLTWTNLAYYQTLMREMRAAIEEGRFEDFRAKTREDWARGDLAPLD

SEQ ID NO: 61229 - protein, 380 aa, Stappia sp.
  misc_feature (1)..(380): tr|A0A2E6Y7V5|A0A2E6Y7V5_9RHOB Queuine tRNA-ribosyltran sferase OS=Stappia sp. OX=1870903 GN=tgt PE=3 SV=1
MTAPFSFRLLATDGMARRGEITTPHGTVATPAFMPVGTQATVKAMYPEQVRELGADVVLGNTYHLMLRPGAERIARLGGLHKFMNWNHTILTDSGGFQVMSLAQLRKLTEEGVTFQSHVDGSRHVMSPERSVEIQQLLGSDIQMQLDECIALPAPREDVERAMRLSLRWAERSRAKFEDMGGPGRGQALYGIVQGGDVPDLRVASAQALGEMPFEGYSVGGLAVGEPQDVMLKMLEVTTPAMPVDKPRYLMGVGTPEDILESVARGIDQFDCVMPTRAGRHGLAYTRYGKVNLKNARHAEDHRPLDEAADCPAARDYSRAYLHHLVKAGEGLAAMLLTWTNLAYYQTLMREMRGAIKEGRFEDFRARTREDWARGDIAPL

SEQ ID NO: 61230 - protein, 369 aa, Stappia sp.
  misc_feature (1)..(369): tr|A0A1Y1STQ6|A0A1Y1STQ6_9RHOB Queuine tRNA-ribosyltran sferase OS=Stappia sp. 22II-S9-Z10 OX=1317123 GN=tgt PE =3 SV=1
MSFQLLTTDGGARRGRLVTPHGLVETPAFMPVGTQATVKTMLMRDVESTGAQVVLGNTYHLMLRPGADRVASFGGLHEFMRWPHTILTDSGGFQVMSLSALRKIDDDGVTFKSHVDGSMHRLTPESAVEIQLKLGSDIQMQLDECVRLPATPEEIARSVTISLEWGARARRTFLEAQSGRLQFGIVQGGTDPSERQRSAEGLVGIGFDGYAIGGLAVGEPQDEMFATIDVTAPHLPATHARYLMGVGTPGDLIGAVARGIDMFDCVMPTRAGRHGLAYTTTGKVNLKNARFATDDAPLDPDLDCHASRDFSRGYLHHLVKVGEPLAATLISWNNIAFYQRLMADLRAAITAGRFAEERARLAEIWGGGA

SEQ ID NO: 61231 - protein, 381 aa, Starkeya novella
  misc_feature (1)..(381): tr|A0A2W5QSA7|A0A2W5QSA7_STANO Queuine tRNA-ribosyltran sferase OS=Starkeya novella OX=921 GN=tgt PE=3 SV=1
MTELDPTDFHYRLKATDGAARLGEVVTPRGIVNTPAFMPVGTAATVKGMYPQQVRELGADIVLGNTYHLMLRPTAERVAELGGLHEFMRWPHPILTDSGGFQIMSLASLRKMNEKGVTFRSHIDGSYHELSPERSVEIQGLLGSDIQMQLDECVRLPASREEIARALRLSLRWAERSKKAFELQPKGRALFGIVQGGDDPELREESARGLIDIDFPGYSIGGLAVGEPQAVMLGMIDVVAPILPAHKPRYLMGVGTPDDIIESVARGVDMFDCVMPTRAGRHAQAFTRFGKINLKNARHANDPRPLDEESDCPAARDYSRAYLHHLIRCDEMLGSMLLTWVNLAYYQSLMKGIRTAIGEGRFEAHKAEVKEGWAKGDIPAR

SEQ ID NO: 61232 - protein, 371 aa, Starkeya novella
  misc_feature (1)..(371): tr|A0A2W5MKE0|A0A2W5MKE0_STANO Queuine tRNA-ribosyltran sferase OS=Starkeya novella OX=921 GN=tgt PE=3 SV=1
MSKIPFNLLATDGAARTGELVFPRGTIRTPAFMPVGTAGTVKALYADQVAATGADVVLGNVYHLMLRPGAERVAALGGLHAFMRWDKPILTDSGGFQVMSLSALRKLDRDGVTFQSHIDGSTHRLTPERSIEIQRLLGADVSMQFDECVRLPAPREDVERAMRLSLDWAERSKAAFGAPEGRALFGIVQGGDLPDLRRVSARALVDIGFDGYAVGGLAVGEPQDVMLATLAETTPELPAGRPRYLMGVGTPDDILKSIALGIDMFDCVMPTRAGRHGQAFTRFGRMNLKNARFAEDPRPLDETSDCPAARDYSRAYLHHLVKSGEILGMMLLSWANVAYYQSLTAGARAAVTEERYADYMAETTERWNAGG

SEQ ID NO: 61233 - protein, 379 aa, Starkeya sp.
  misc_feature (1)..(379): tr|A0A556PAZ6|A0A556PAZ6_9RHIZ Queuine tRNA-ribosyltran sferase OS=Starkeya sp. 3C OX=2597768 GN=tgt PE=3 SV=1
MIEQTEFQYRLKATDGAARLGEVLTPRGVIRTPAFMPVGTAGTVKGMYPSQVRELGADILLGNTYHLMLRPGAERVAKLGGLHELMRWPHPILTDSGGFQVMSLAALRKMSENGVTFRSHIDGSYYELTPERSVEIQGLLGSDIQMQLDECVRLPASREEIARALRLSLRWAERSKKAFESQPKGRALFGIVQGGDDPALREESARGLVDIDFPGYSIGGLAVGEPQDVMLRMLEVVNPILPADKPRYLMGVGTPDDIIESVARGVDMFDCVMPTRAGRHAQAFTRFGKINLKNARHAEDSRPLDEESDCPAARDYSRAYLHHLIRSDEMLGSMLLTWVNLAYYQSLTAGIRAAIAEGRFEDFKAGVKEGWARGDIPAL

SEQ ID NO: 61234 - protein, 383 aa, Stella humosa
  misc_feature (1)..(383): tr|A0A3N1M1J7|A0A3N1M1J7_9PROT Queuine tRNA-ribosyltran sferase OS=Stella humosa OX=94 GN=tgt PE=3 SV=1
MTGLSFALLATDGAARRGRISTAHGTVETPAFMPVGTAGTVKAMTADAVRSTGAEIVLGNTYHLMLRPGAERVGRLGGLHRFMGWQGPILTDSGGFQVMSLAGLRKIDENGVTFRSHIDGSAHALTPERSIQIQHLLDADITMAFDECTPFPATEEQAAASMRLSMRWAARSRDAFVERPGYGLFGIVQGSTFRDLRAESAAALQEIGFHGYAIGGLAVGEGQAAMFETVGFTTPMLPADRPRYLMGVGRPEDIVGAVQRGIDMFDCVMPTRSGRTAQGFTRHGTVNIRNARHAEDPRPLDAACGCPACCDHSRAYLHHLFKANEILGSMLLTWHNIQYYQDLMAGLRQAIADGRLDAHVGELQQGWVAGDIAALPPSSTDAP

SEQ ID NO: 61235 - protein, 376 aa, Stenotrophomonas acidaminiphila
  misc_feature (1)..(376): tr|A0A0S1AZB8|A0A0S1AZB8_9GAMM Queuine tRNA-ribosyltran sferase OS=Stenotrophomonas acidaminiphila OX=128780 GN =tgt PE=3 SV=1
MSRLQFTLQATDGNARRGQLSFPRGTVQTPAFMPVGTYGSVKGVLPEQIRALGAEIILGNTFHLYLRPGLEVIGDHGGLHGFCRWNGPILTDSGGFQVFSLAHRRKITEQGVTFASPTDGARVFLGPEESMKIQKVLDSDVVMIFDECTPYPATEDVARRSMELSLRWARRSRDAHDALGNDAALFGIVQGGVHTDLRSRSAEGLQQIGFDGYAIGGLAVGEPEHERNAMLEHMHPILPADRPRYLMGVGRPEDLVEGVARGVDMFDCVMPTRNARNGHYFTSTGTVRIRNARYERDMDTIEPGCGCHACSSGYTRAYLRHLDRCNEMLAPMLGTLHNLYYYEKLMADMRAAIEAGTFLAFRESFYAARGAVAPAL

SEQ ID NO: 61236 - protein, 376 aa, Stenotrophomonas acidaminiphila
  misc_feature (1)..(376): tr|A0A0R0DRW0|A0A0R0DRW0_9GAMM Queuine tRNA-ribosyltran sferase OS=Stenotrophomonas acidaminiphila OX=128780 GN =tgt PE=3 SV=1
MSRLQFTLQATDGNARRGQLSFPRGIVQTPAFMPVGTYGSVKGVLPEQIRALGAEIILGNTFHLYLRPGLEVIGDHGGLHGFCRWNGPILTDSGGFQVFSLAHRRKITEQGVTFASPTDGARVFLGPEESMKIQKVLDSDVVMIFDECTPYPATEDVARRSMELSLRWARRSRDAHDALGNDAALFGIVQGGVHTDLRSRSAEGLQQIGFDGYAIGGLAVGEPEHERNAMLEHMHPILPADRPRYLMGVGRPEDLVEGVARGVDMFDCVMPTRNARNGHYFTSTGTVRIRNARYERDMDTIEPGCGCHACSSGYTRAYLRHLDRCNEMLAPMLGTLHNLYYYEKLMADMRAAIEAGTFLAFRESFYAARGAVAPAL

SEQ ID NO: 61237 - protein, 376 aa, Stenotrophomonas chelatiphaga
  misc_feature (1)..(376): tr|A0A0R0CUQ4|A0A0R0CUQ4_9GAMM Queuine tRNA-ribosyltran sferase OS=Stenotrophomonas chelatiphaga OX=517011 GN=t gt PE=3 SV=1
MSRLQFQLQTTDGRARRGRLTFPRGTVETPAFMPVGTYGSVKGIFPDQVRALGAEIILGNTFHLYLRPGLDVIADHGGLHGFARWDGPILTDSGGFQVFSLAHRRKITEQGVTFASPTDGARVFLGPEESMKIQKVLDSDVVMIFDECTPYPATEDVARRSMELSLRWAQRSRDAHDALGNDAALFGIVQGGVHTDLRSRSADALQQIGFDGYAIGGLAVGEPEHERNAMLDHLNPVLPADRPRYLMGVGRPEDLVEGVARGVDMFDCVMPTRNARNGHYFTSFGTVRIRNARYERDMDPIEPGCGCFACSGGYTRSYLRHLDRCNEMLAPMLGTLHNLFYYEKLMADMRAAIAAGTFEAFRGSFYAARGAAVPPL

SEQ ID NO: 61238 - protein, 375 aa, Stenotrophomonas daejeonensis
  misc_feature (1)..(375): tr|A0A0R0DP76|A0A0R0DP76_9GAMM Queuine tRNA-ribosyltran sferase OS=Stenotrophomonas daejeonensis OX=659018 GN=t gt PE=3 SV=1
MSRLQFTLQTTDGNARRGQLSFPRGTVQTPAFMPVGTYGSVKGVLPEQVRALGAEIILGNTFHLYLRPGLDVIADHGGLHGFCRWNGPILTDSGGFQVFSLAHRRKITEQGVTFASPTDGARVFLGPEESMKIQKVLDSDVVMIFDECTPYPATEDVARRSMELSLRWAQRSRDAHDALGNDAALFGIVQGGVHTDLRSRSAEGLQQIGFDGYAIGGLAVGEPEHERNAMLEHMHPILPADRPRYLMGVGRPEDLVEGVARGVDMFDCVMPTRNARNGHYFTSFGTVRIRNARYERDMDPIEPGCGCHACSSGYTRSYLRHLDRCNEMLAPMLGTLHNLYYYEKLMADMRAAIEAGTFGAFRESFYAARGATAPA

SEQ ID NO: 61239 - protein, 377 aa, Stenotrophomonas ginsengisoli
  misc_feature (1)..(377): tr|A0A0R0DIZ6|A0A0R0DIZ6_9GAMM Queuine tRNA-ribosyltran sferase OS=Stenotrophomonas ginsengisoli OX=336566 GN=t gt PE=3 SV=1
MSRLTFSLFSRDGRARRGQLSFPRGTVQTPAFMPVGTYGTVKGVLPEQIRALGAEIILGNTFHLWLRPGLDVIGDHGGLHGFCQWNGPILTDSGGFQVFSLAHRRKITEEGVTFAAPTDGARVFLSPEVSMHIQKVLDSDVVMIFDECTPYPATEQVARTSMELSLRWAQRSRNEHDRLGNDAALFGIVQGGVHPELRTRSIDGLREIGFDGYAIGGLAVGEPEHERNAMLEHLDPQLPEERPRYLMGVGRPEDLVEGVARGVDMFDCVMPTRNARNGHFFTSTGTIRIRNAQYARDMDPIEPGCGCHACTGGYTRSYIRHLDRCNEMLAPMLGTLHNLFYYEKLMADIRAAIEAGNFQQFRAEFYAKRGGIAPELP

SEQ ID NO: 61240 - protein, 379 aa, Stenotrophomonas humi
  misc_feature (1)..(379): tr|A0A0R0CM88|A0A0R0CM88_9GAMM Queuine tRNA-ribosyltran sferase OS=Stenotrophomonas humi OX=405444 GN=tgt PE=3 SV=1
MSRLQFKLQNTDGRARRGQLSFPRGTVQTPAFMPVGTYGSVKGILPEQVRALGAEIILGNTFHLYLRPGLDVIADHGGLHGFCRWDGPILTDSGGFQVFSLAHRRKITEEGVTFASPTDGARVFLGPEESMKIQKVLDSDIVMIFDECTPYPATEPVARTSMELSLRWAQRSRNAHEALGNDAALFGIVQGGVHTDLRSRSAEGLQQIGFDGYAIGGLAVGEPEHERNAMLDHMHPILPADRPRYLMGVGRPEDLVEGVARGVDMFDCVMPTRNARNGHYFTSFGTVRIRNAKYERDMNPIEPGCGCHACTSGYTRSYLRHLDRCNEMLAPMLGTMHNLFYYEKLMADMRAAIESGTFLAFRESFYAARGASVPALSGE

SEQ ID NO: 61241 - protein, 377 aa, Stenotrophomonas koreensis
  misc_feature (1)..(377): tr|A0A0R0BZG0|A0A0R0BZG0_9GAMM Queuine tRNA-ribosyltran sferase OS=Stenotrophomonas koreensis OX=266128 GN=tgt PE=3 SV=1
MSRLTFSLYSRDGRARRGQLSFPRGTVQTPAFMPVGTYGSVKGVLPEQIRALGAEIILGNTFHLYLRPGLEVIADHGGLHGFCQWNGPILTDSGGFQVFSLAHRRKITEQGVTFNAPTDGSKVFLGPEESMKIQKVLDSDIVMIFDECTPYPASEEVARKSMELSLRWARRSRDAHDALGNDAALFGIVQGGVHPELRSRSIDGLQAIGFDGYAIGGLAVGEPEHERNAMLEHLDPQLPADRPRYLMGVGRPEDLVEGVARGVDMFDCVMPTRNARNGHYFTSTGTVRIRNARYERDMDPIEPGCGCHACTGGYTRSYLRHLDRCNEMLAPMLGTLHNLFYYEKLMADIRAAIEDGRFLQFRADFYARRGAVAPPLP

SEQ ID NO: 61242 - protein, 376 aa, Stenotrophomonas lactitubi
  misc_feature (1)..(376): tr|A0A2M9QVA1|A0A2M9QVA1_9GAMM Queuine tRNA-ribosyltran sferase OS=Stenotrophomonas lactitubi OX=2045214 GN=tgt PE=3 SV=1
MSRLQFQLQTRDGRARRGRLTFPRGTVETPAFMPVGTYGSVKGILPDHVRALGAEIILGNTFHLYLRPGLDVIADHGGLHGFCRWDGPILTDSGGFQVFSLAHRRKITEQGVTFASPTDGARVFLGPEESMKIQKVLDSDVVMIFDECTPYPATEDVARRSMELSLRWAQRSRNAHDELGNDAALFGIVQGGVHTDLRSRSAEALQGIGFDGYAIGGLAVGEPEDERNAMLDHLDPELPADRPRYLMGVGRPEDLVEGVARGVDMFDCVMPTRNARNGHYFTSFGTVRIRNSQYARDMDPIEPGCGCVACAGGYTRSYLRHLDRCNEMLAPMLGTQHNLFYYEKLMADIRAAIEAGTFLAFRESFYAARGAVAPPL

SEQ ID NO: 61243 - protein, 376 aa, Stenotrophomonas maltophilia
  misc_feature (1)..(376): sp|B2FN00|TGT_STRMK Queuine tRNA-ribosyltransferase OS= Stenotrophomonas maltophilia (strain K279a) OX=522373 G N=tgt PE=3 SV=1
MSRLQFQLQTRDGRARRGRLTFPRGTVETPAFMPVGTYGSVKGILPDDVRALGAEIILGNTFHLYLRPGLDIIADHGGLHGFCRWDGPILTDSGGFQVFSLAHRRKITEQGVTFASPTDGARVFLGPEESMKIQKVLDSDVVMIFDECTPYPATEDVARRSMELSLRWAQRSRNAHDELGNDAALFGIVQGGVHTDLRSRSAEALQAIGFDGYAVGGLAVGEPEHERNAMLDHLDPELPSDRPRYLMGVGRPEDLVEGVARGVDMFDCVMPTRNARNGHYFTSFGTVRIRNSQYARDMDPIEPGCGCVACTGGYTRSYLRHLDRCNEMLAPMLGTLHNLFYYEKLMADIRAAIEAGTFLAFRESFYAARGAVAPPL

SEQ ID NO: 61244 - protein, 376 aa, Stenotrophomonas maltophilia
  misc_feature (1)..(376): tr|T5KZE7|T5KZE7_STEMA Queuine tRNA-ribosyltransferase OS=Stenotrophomonas maltophilia MF89 OX=1333853 GN=tgt PE=3 SV=1
MSRLQFQLQTRDGRARRGRLTFPRGTVETPAFMPVGTYGSVKGILPDQVRALGAEIILGNTFHLYLRPGLDIIADHGGLHGFCRWDGPILTDSGGFQVFSLAHRRKITEQGVTFASPTDGARVFLGPEESMKIQKVLDSDVVMIFDECTPYPATEDVARRSMELSLRWAQRSRNAHDELGNDAALFGIVQGGVHTDLRSRSAEALQAIGFDGYAIGGLAVGEPEHERNAMLDHLDPELPSDRPRYLMGVGRPEDLVEGVARGVDMFDCVMPTRNARNGHYFTSFGTVRIRNSQYARDMDPIEPGCGCVACTGGYTRSYLRHLDRCNEMLAPMLGTLHNLFYYEKLMADIRAAIEAGTFLAFRESFYAARGAVAPPL

SEQ ID NO: 61245 - protein, 381 aa, Stenotrophomonas panacihumi
  misc_feature (1)..(381): tr|A0A0R0AMI5|A0A0R0AMI5_9GAMM Queuine tRNA-ribosyltran sferase OS=Stenotrophomonas panacihumi OX=676599 GN=tgt PE=3 SV=1
MSRLQFQLQTTDGHARRGRLTFPRGTVETPAFMPVGTYGSVKGVLPHQIRELGAEIILGNTFHLYLRPGLDVIADHGGLHGFTRWNGPILTDSGGFQVFSLAHRRKITEQGVTFASPTDGARVFLGPEESMKIQKVLDSDVVMIFDECTPYPATEDVARRSMELSLRWARRSRDAHDALGNDAALFGIVQGGVHPGLRSRSLDGLQQIGFDGYAIGGLAVGEPEHERNAMLEHLHPLLPADRPRYLMGVGRPEDLVEGVARGVDMFDCVMPTRNARNGHYFTAFGTVRIRNAKYERDQDPIEPGCGCPACAGGFTRAYLRHLDRCNEMLAPMLGTLHNLWYYEKLMADMRAAIAAGTFAAFRQSFYAARGAQAPALPGQGG

SEQ ID NO: 61246 - protein, 376 aa, Stenotrophomonas pavanii; identical to SEQ ID NO: 52298
  misc_feature (1)..(376): tr|A0A246L1G6|A0A246L1G6_9GAMM Queuine tRNA-ribosyltran sferase OS=Stenotrophomonas pavanii OX=487698 GN=tgt PE =3 SV=1

SEQ ID NO: 61247 - protein, 379 aa, Stenotrophomonas pictorum
  misc_feature (1)..(379): tr|A0A0R0AP52|A0A0R0AP52_9GAMM Queuine tRNA-ribosyltran sferase OS=Stenotrophomonas pictorum JCM 9942 OX=123696 0 GN=tgt PE=3 SV=1
MSRLQFKLQTSDGRARRGQLSFPRGTVETPAFMPVGTYGSVKGILPEQVRALGAEIILGNTFHLYLRPGLEVIADHGGLHGFCQWSGPILTDSGGFQVFSLAHRRKITEEGVTFASPTDGARVFLGPEESMKIQKVLDSDVVMIFDECTPYPATEEVARKSMELSLRWAQRSRNAHDALGKDAALFGIVQGGVHTDLRSRSAEGLQQIGFDGYAIGGLAVGEPEHERNAMLDHMHPILPADRPRYLMGVGRPEDLVEGVARGVDMFDCVMPTRNARNGHYFTSFGTVRIRNARYERDMDVIEPGCGCHACTSGYTRSYLRHLDRCNEMLAPMLGTIHNLFYYEKLMADMRAAIEAGTFMAFRESFYAARGLAVPALSGE

SEQ ID NO: 61248 - protein, 376 aa, Stenotrophomonas rhizophila
  misc_feature (1)..(376): tr|A0A4U3GP66|A0A4U3GP66_9GAMM Queuine tRNA-ribosyltran sferase OS=Stenotrophomonas rhizophila OX=216778 GN=tgt PE=3 SV=1
MSRLQFQLQTTDGRARRGRLTFPRGTVETPAFMPVGTYGSVKGILPEQIRALGAEIILGNTFHLYLRPGLDVIADHGGLHGFARWDGPILTDSGGFQVFSLAHRRKITEQGVTFSSPNDGARVFLGPEESMRIQKVLDSDVVMIFDECTPYPATEPVARTSMELSLRWAQRSRNAHDELGNDAALFGIVQGGVHHDLRSRSAEGLQKIGFDGYAIGGLAVGEPEHERNAMLDHMHPILPADRPRYLMGVGRPEDLVEGVARGVDMFDCVMPTRNARNGHYFTSAGTIRIRNARYQRDMDTIEPGCGCHACTSGYTRSYLRHLDRCNEMLAPMLGTIHNLYYYEKLMADMRAAIEAGTFAAFRESFYAARGMATPAL

SEQ ID NO: 61249 - protein, 376 aa, Stenotrophomonas rhizophila
  misc_feature (1)..(376): tr|A0A3N1KHG8|A0A3N1KHG8_9GAMM Queuine tRNA-ribosyltran sferase OS=Stenotrophomonas rhizophila OX=216778 GN=tgt PE=3 SV=1
MSRLQFQLQTTDGRARRGRLTFPRGTVETPAFMPVGTYGSVKGILPEQIRALGAEIILGNTFHLYLRPGLDVIADHGGLHGFARWNGPILTDSGGFQVFSLAHRRKITEQGVTFSSPTDGARVFLGPEESMRIQKVLDSDVVMIFDECTPYPATEPVARTSMELSLRWAQRSRNAHDELGNDAALFGIVQGGVHHDLRSRSAEGLQQIGFDGYAIGGLAVGEPEHERNAMLDHMHPILPADRPRYLMGVGRPEDLVEGVARGVDMFDCVMPTRNARNGHYFTSFGTVRIRNARYERDMDTIEPGCGCHACTSGYTRSYLRHLDRCNEMLAPMLGTIHNLYYYEKLMADMRAAIAAGTFTAFRESFYAARGAVTPAL

SEQ ID NO: 61250 - protein, 379 aa, Stenotrophomonas sp.
  misc_feature (1)..(379): tr|A0A4R4IDB6|A0A4R4IDB6_9GAMM Queuine tRNA-ribosyltran sferase OS=Stenotrophomonas sp. ATCM1_4 OX=2259330 GN=t gt PE=3 SV=1
MSRLHFKLQTTDGRARRGQLSFPRGTVQTPAFMPVGTYGSVKGVLPEQVRALGAEIILGNTFHLYLRPGLDVIADHGGLHGFCRWDGPILTDSGGFQVFSLAHRRKITEEGVTFASPTDGARVFLGPEESMKIQKVLDSDIVMIFDECTPYPATEAVAQKSMELSLRWAQRSRNAHDAMGNDAALFGIVQGGVHTDLRSRSAEGLQKIGFDGYAIGGLAVGEPEHERNAMLDHMHPILPADHPRYLMGVGRPEDLVEGVARGVDMFDCVMPTRNARNGHYFTSFGTVRIRNARYERDMDPIEPGCGCHACTSGYTRAYLRHLDRCNEMLAPMLGTLHNLFYYEKLMADMRAAIEAGTFLAFRESFYVARGVSAPALSGE

SEQ ID NO: 61251 - protein, 380 aa, Stenotrophomonas sp.
  misc_feature (1)..(380): tr|A0A3R8TYM9|A0A3R8TYM9_9GAMM Queuine tRNA-ribosyltran sferase OS=Stenotrophomonas sp. 278 OX=2479851 GN=tgt P E=3 SV=1
MSRLQFQLQTTDGRARRGRLTFPRGTVETPAFMPVGTYGSVKGVLPEQIRALGAEIILGNTFHLYLRPGLDVIADHGGLHGFARWNGPILTDSGGFQVFSLAHRRKITEQGVTFASPTDGAKVFLGPEESMKIQKVLDSDIVMIFDECTPYPATEQVARTSMELSLRWAQRSRNAHDELGNDAALFGIVQGGVHHDLRTRSAEGLQQIGFDGYAIGGLAVGEPEHERNAMLEHLNPILPADRPRYLMGVGRPEDLVEGVARGVDMFDCVMPTRNARNGHYFTSTGTVRIRNARYERDMDTIEPGCGCHACSSGYTRSYLRHLDRCNEMLAPMLGTLHNLYYYEKLMADMRAAIAAGTFTAFRESFYAARGMATPALDGHA

SEQ ID NO: 61252 - protein, 214 aa, Stenotrophomonas terrae
  misc_feature (1)..(214): tr|A0A0R0CHY6|A0A0R0CHY6_9GAMM Queuine tRNA-ribosyltran sferase (Fragment) OS=Stenotrophomonas terrae OX=405446 GN=tgt PE=4 SV=1
LRWAQRSRNAHDAMGNDAALFGIVQGGVHTELRSRSAEGLQQIGFDGYAIGGLAVGEPEHERNAMLDHMHPILPADRPRYLMGVGRPEDLVEGVARGVDMFDCVMPTRNARNGHYFTSFGTVRIRNARYERDMDVIEPGCGCHACTGGYTRSYLRHLDRCNEMLAPMLGTLHNLFYYEKLMADMRAAIEAGTFLAFRESFYAARGLSVPALSGE

SEQ ID NO: 61253 - protein, 372 aa, Steroidobacter denitrificans
  misc_feature (1)..(372): tr|A0A127F8K0|A0A127F8K0_STEDE Queuine tRNA-ribosyltran sferase OS=Steroidobacter denitrificans OX=465721 GN=tg t PE=3 SV=1
MKYELIKSDGRARRGRIIFPRGIVETPAFMPVGTYGTVKAMTPEELTGIGAQIILGNTFHLMLRPGMEVVRAHGGLHGFMHWQGPILTDSGGFQVFSLATLRKITEDGVSFRSPVNGDTVMLTPERSMQVQRDLNADVVMIFDDCTPYPATPEQARRSMELSLRWAARSRAEFDRLANPHSLFGIVQGGMYPQLREASLEGLLRIGFDGYAIGGLAVGEPRLEREHILETLEPRLPVDRPRYLMGVGTPEDLVECVRRGVDMFDCVMPTRHARNGHLFTSTGVIKIRNARYQSDTRPLDESCDCYTCSHYSRAYLRHLDKCGEILAARLGTIHNLYHYLSLMRAMREAIEAQRFEAFVADFRARAEPLNIPP

SEQ ID NO: 61254 - protein, 389 aa, Stigmatella aurantiaca
  misc_feature (1)..(389): tr|A0A1H7VB74|A0A1H7VB74_STIAU Queuine tRNA-ribosyltran sferase OS=Stigmatella aurantiaca OX=41 GN=tgt PE=3 SV= 1
MAVRFELLTTDPTGARAGVLHTRRGSFPTPMFMPVATHAAFRHLGTEEVWETGSRILLANTYHLMLRPGADVFRKFGGIHPFMQWDGAILTDSGGFQIFSLPEDRLITEKGAQFRSFYDNSRQMLSPETSIAMQQAINSEIMMVLDVCIDSRTDEAGTREAMERTHRWAVRSLAAKDKVPTGQALFGIVQGGVYPRLRDESSAFLTQLPFDGFAIGGLAVGETKEERETMTARATASLPTDKPRYLMGVGTPTDLLEAVMRGVDMFDCIIPTKMAQQGYAYTFEGLVRITRMVYRLDDAPLDAACDCMVCTRYTRGYLQHLMRGKHHLGSRMLSIHNVRHYQKLMGKLREAILQGSYAQTYRELKAAIAPPKDLRGEVSPEAVTLKDVG

SEQ ID NO: 61255 - protein, 392 aa, Stigmatella aurantiaca
  misc_feature (1)..(392): tr|Q08P81|Q08P81_STIAD Queuine tRNA-ribosyltransferase OS=Stigmatella aurantiaca (strain DW4/3-1) OX=378806 GN =tgt PE=3 SV=1
MGEPKQKGDTRVAPGAVRFELLHEDPITRARRGRLHTPHGPIETPIFMPVGTVGSVKGVGPDDLLTLDAQIILGNTYHLMLRPGEALVGELGGLHRFISWNRPMLTDSGGFQVFSLSEKRKITEEGAAFQSHLDGSRHLLTPERSIDIQETLGADIIMAFDECPPATSERAYLEQSLARTTRWLHRCAKAWSRERSSLFGIVQGGLHEDLRKSHAEEVCAVDLPGYALGGYSVGESPEAMHDGVAFSAPLLPRGKPRYLMGVGTPVDLVTCVAAGVDMFDCVLPTRCARNGLLFTSEGKVVIRNAVYAKDPRPVDPTCTCYTCRTFSRAYLRHLFVAGEILAMRLNTLHNLHYFLGLMAEVRRAIAEDRYGAFVQEFRAKAAAQETERTRSR

SEQ ID NO: 61256 - protein, 392 aa, Stigmatella erecta
  misc_feature (1)..(392): tr|A0A1I0K4K3|A0A1I0K4K3_9DELT Queuine tRNA-ribosyltran sferase OS=Stigmatella erecta OX=83460 GN=tgt PE=3 SV=1
MGEPKQKGDTRVAPGQVRFELLHEDPDTKARRGRLHTPHGPIETPIFMPVGTVGSVKGVGPDDLLTLEAQIILGNTYHLMLRPGEALVGEMGGLHRFISWDRPMLTDSGGFQVFSLSEKRKITEEGAAFQSHLDGSRHLLTPERSIDIQETLGADIIMAFDECPPATSERPYLEQSLARTTRWLHRCAQAWSRERSSLFGIVQGGLHEDLRKSHAEEVCAVDLPGYALGGYSVGESPEAMHAGVAFSAPLLPRNKPRYLMGVGTPVDLVTCVAAGVDMFDCVLPTRCARNGLLFTSEGKVVIRNAVYAKDPRPVDPTCTCYTCRTFSRAYLRHLFVAGEILAMRLNTLHNLHYFLGLMGQVRRAIAENRYAAFVREFRAQAAAQEAERTRAR

SEQ ID NO: 61257 - protein, 389 aa, Stigmatella erecta
  misc_feature (1)..(389): tr|A0A1I0K5Q9|A0A1I0K5Q9_9DELT Queuine tRNA-ribosyltran sferase OS=Stigmatella erecta OX=83460 GN=tgt PE=3 SV=1
MAVRFELVTTDPTGARAGVLHTRRGSFPTPMFMPVATHAAFRHLGTEEVWETGSRILLANTYHLMLRPGADVFRKFGGIHPFMQWDGAILTDSGGFQIFSLPEDRLITEKGAQFRSFYDNSRQMLSPETSIAMQQAINSEIMMVLDVCIDSRTDEAGTREAMERTHRWAVRSLAAKDKVPTGQALFGIVQGGVHPRLRDESAAFLTQLPFDGFAIGGLAVGETKEERETMTVRATASLPTDKPRYLMGVGTPTDLLEAVMRGVDMFDCIIPTKMAQQGYAYTFEGLVRITRMVYRLDDAPLDAACDCLVCKRYTRGYLQHLMRGKHHLGSRMLSIHNVRHYQKLMGKLREAILQGSYAQTYRELKAAIAPPKDLRGEVSPEAVTLKDVG

SEQ ID NO: 61258 - protein, 383 aa, Stomatobaculum longum
  misc_feature (1)..(383): tr|H1HVJ8|H1HVJ8_9FIRM Queuine tRNA-ribosyltransferase OS=Stomatobaculum longum OX=796942 GN=tgt PE=3 SV=1
MKYKILASEGRAKRAHMETVHGSIETPVFMNVGTVAAIKGAVSTDDLKEIGTQVQLSNTYHLHVRPGDGKVSGDRLIHEFGGLHRFMHWDRPILTDSGGFQVFSLSGMRKIKEEGVTFRSHIDGRKIFMGPEESMQIQSNLGSTIAMAFDECPPSLAERSYIEQSVDRTTRWLKRCKAEMARLNALPDRVNPEQFLFGINQGGILEDVRIRHAREIGELDLDGYAVGGLAVGESAEEMYRILDAVVPELPREKPTYLMGVGTPQNILEAVERGVDFFDCVYPSRNGRHGHAYTNSGKINLFNKKYELDPRPIEEGCGCPACRSYSRAYIRHLLKAGEMLGMRLCVLHNLYFYNTMMQEIRDAIEKGEFRAYKERKIKGMEAKA

SEQ ID NO: 61259 - protein, 387 aa, Streptobacillus moniliformis
  misc_feature (1)..(387): tr|D1AYB2|D1AYB2_STRM9 Queuine tRNA-ribosyltransferase OS=Streptobacillus moniliformis (strain ATCC 14647 / DS M 12112 / NCTC 10651 / 9901) OX=519441 GN=tgt PE=3 SV=1
MEKPVIYNLEKKDGMARAGVIKTPHGIIHTPVFMPVGTQATVKTMTPEELEEIGAEIILGNTYHLYLRPGDELIAKFNHLHNFMNWKKPILTDSGGFQIFSLGDLRKIKEEGAHFRSHHDGSKHFISPEKSIEIQNNLGSDIMMVLDECPPGLSTREYLIPSIERTTRWAKRCIEANKNPENQGLFAIVQGGIYEDLREKSLNELLVMDDSFSGYAIGGLAVGEPREDMYRILAHTTPLLPETKPRYLMGVGEPLDMLEAIENGIDMMDCVHPSRIGRHGTVFTKYGRLIIKNKEYEYDDRPLDVSDNYVCRNYTRAYIRHLFKTNEILGQRLATYQNIWFLINMIKEARQAILEGRFKEFKEEFIKNYTQGKNSEWIRPKDIRKGE

SEQ ID NO: 61260 - protein, 380 aa, Streptococcus acidominimus
  misc_feature (1)..(380): tr|A0A239WE50|A0A239WE50_STRAI Queuine tRNA-ribosyltran sferase OS=Streptococcus acidominimus OX=1326 GN=tgt PE =3 SV=1
MTEHPIKYRLIKTEKHTGARLGEIETPHGTFSTPMFMPVGTQATVKTQSPEELKQMGSGIILSNTYHLWLRPGDELIARAGGLHKFMNWDQAILTDSGGFQVYSLADSRNITEEGVTFKNHLNGSKMFLSPEKAISIQNNLGSDIMMSFDECPQFYQPYDYVKNSIERTSRWAERGLKAHRRPNDQGLFGIVQGAGFEDLRRQSAQDLVSMDFAGYSIGGLAVGETHEEMNAVLDFTTPMLPENKPRYLMGVGAPDSLIDGVIRGVDMFDCVLPTRIARNGTCMTSEGRLVVKNAKYAEDFTPLDHDCDCYTCQNYTRAYLRHLLKADETFGMRLTSYHNLYFLVNLMKKVRQAIMDDNLLEFREDFVERYGYNQSKRNF

SEQ ID NO: 61261 - protein, 379 aa, Streptococcus acidominimus
  misc_feature (1)..(379): tr|A0A1Q8EC14|A0A1Q8EC14_STRAI Queuine tRNA-ribosyltran sferase OS=Streptococcus acidominimus OX=1326 GN=tgt PE =3 SV=1
MTSPIQYRLIKKEKHTGARLGEIITPHGTFPTPMFMPVGTQATVKTQSPEELKEMGSGIILSNTYHLWLRPGDELIAQAGGLHKFMNWDQAILTDSGGFQVYSLADSRNITEEGVTFKNHLNGSKMFLSPEKAISIQNNLGSDIMMSFDECPQFYQPYDYVKKSIERTSRWAERGLKAHRRPQDQGLFGIVQGAGFEDLRRQSARDLVSMDFPGYSIGGLAVGESHEEMNAVLDFTTPLLPETKPRYLMGVGAPDSLIDGVIRGVDMFDCVLPTRIARNGTCMTSEGRLVVKNAQFAEDFTPLDHDCDCYTCRNYTRAYLRHLLKADETFGIRLTSYHNLYFLLKLMRNVRQAIMEDNLLEFREDFVERYGYNSSKRNF

SEQ ID NO: 61262 - protein, 380 aa, Streptococcus agalactiae
  misc_feature (1)..(380): sp|Q8E6X6|TGT_STRA3 Queuine tRNA-ribosyltransferase OS= Streptococcus agalactiae serotype III (strain NEM316) O X=211110 GN=tgt PE=3 SV=1
MTDHPIKYRLIKQEKHTGARLGEIITPHGTFPTPMFMPVGTQATVKTQSPEELKEMGSGIILSNTYHLWLRPGDELIAKAGGLHKFMNWDQAILTDSGGFQVYSLADSRNITEEGVTFKNHLNGAKMFLSPEKAISIQNNLGSDIMMSFDECPQFYQPYDYVKKSIERTSRWAERGLNAHRRPHDQGLFGIVQGAGFEDLRRQSARDLVSMDFPGYSIGGLAVGETHDEMNAVLDFTVPMLPNDKPRYLMGVGAPDSLIDAVIRGVDMFDCVLPTRIARNGTCMTSQGRLVVKNAKFAEDFTPLDPNCDCYTCKNYTRAYIRHLLKADETFGIRLTSYHNLYFLVNLMKDVRQAIMDDNLLEFRQDFMERYGYGMNNRNF

SEQ ID NO: 61263 - protein, 380 aa, Streptococcus agalactiae; identical to SEQ ID NO: 61262
  misc_feature (1)..(380): sp|Q3K2Y7|TGT_STRA1 Queuine tRNA-ribosyltransferase OS= Streptococcus agalactiae serotype Ia (strain ATCC 27591 / A909 / CDC SS700) OX=205921 GN=tgt PE=3 SV=1

SEQ ID NO: 61264 - protein, 380 aa, Streptococcus anginosus
  misc_feature (1)..(380): tr|I0SIF9|I0SIF9_STRAP Queuine tRNA-ribosyltransferase OS=Streptococcus anginosus subsp. whileyi CCUG 39159 OX =1095729 GN=tgt PE=3 SV=1
MSDSPIQYRLIKKEKHTGARLGEIITPHGTFPTPMFMPVGTQATVKTQSPEELKEMGSGIILSNTYHLWLRPSDELIARAGGLHKFMNWDQAILTDSGGFQVYSLADSRNITEEGVTFKNHLNGAKMFLSPEKAISIQNNLGSDIMMSFDECPQFYQPYDYVKKSIERTSRWAERGLKAHRHPHDQGLFGIVQGAGFEDLRRQSAHDLVSMDFPGYSIGGLAVGESHKEMNAVLDFTTPMLPENKPRYLMGVGAPDSLIDGVIRGVDMFDCVLPTRIARNGTCMTSEGRLVIKNAQYAEDFTPLDHNCDCYTCKNYTRAYLRHLLKADETFGLRLTSYHNLYFLINLMKNVRQAILDDNLLEFREDFVEKYGYNYSKRNF

SEQ ID NO: 61265 - protein, 380 aa, Streptococcus anginosus
  misc_feature (1)..(380): tr|E6J2U6|E6J2U6_STRAP Queuine tRNA-ribosyltransferase OS=Streptococcus anginosus F0211 OX=706437 GN=tgt PE=3 SV=1
MSDSPIQYRLIKKEKHTGARLGEIITPHGTFPTPMFMPVGTQATVKTQSPEELKEMGSGVILSNTYHLWLRPGDELIARAGGLHKFMNWDQAILTDSGGFQVYSLADSRNITEEGVTFKNHLNGSKMFLSPEKAISIQNNLGSDIMMSFDECPQFYQPYDYVKKSIERTSRWAERGLKAHRRPHDQGLFGIVQGAGFEDLRRQSAQDLVSMDFPGYSIGGLAVGESHEEMNAVLDFTTPMLPENKPRYLMGVGAPDSLIDGVIRGIDMFDCVLPTRIARNGTCMTSEGRLVIKNAQYAEDFTALDHDCDCYTCQNYSRAYIRHLLKADETFGLRLTSYHNLYFLVNLMKKVRQAILDDNLLEFREDFVERYGYNSSKRNF

SEQ ID NO: 61266 - protein, 380 aa, Streptococcus australis
  misc_feature (1)..(380): tr|A0A4Q1ZDR9|A0A4Q1ZDR9_9STRE Queuine tRNA-ribosyltran sferase OS=Streptococcus australis OX=113107 GN=tgt PE= 3 SV=1
MTDSPIQYRLIKKEKHTGARLGEIITPHGTFPTPMFMPVGTQATVKTQSPEELKEMGSGIILANTYHLWLRPGDDLVAKAGGLHQFMNWDQPILTDSGGFQVYSLADTRNITEEGVTFKNHLNGSKMFLSPEKAISIQNNLGSDIMMSFDECPQFYQPYDYVKKSIERTSRWAERGLKAHRRPHDQGLFGIVQGAGFEDLRRQSAQDLVSMDFPGYSIGGLAVGESHEEMNAVLDFTTPLLPENKPRYLMGVGAPDSLIDGVIRGVDMFDCVLPTRIARNGTCMTSQGRLVVKNAQFAEDFTPLDHECDCYTCKNYTRAYLRHLLKADETFGIRLTSYHNLYFLINLMKQVRQAIMDDNLLEFREHFVEKYGYNKSGRNF

SEQ ID NO: 61267 - protein, 426 aa, Streptococcus australis
  misc_feature (1)..(426): tr|E7S882|E7S882_9STRE Queuine tRNA-ribosyltransferase OS=Streptococcus australis ATCC 700641 OX=888833 GN=tgt PE=3 SV=1
MVVVPFIITQVRDRAGKIWYNRTGAHRRSCDRNKKAGTVFPSTEVTMTDSPIQYRLIKKEKHTGARLGEIITPHGTFPTPMFMPVGTQATVKTQSPEELKEMGSGIILANTYHLWLRPGDDLVAKAGGLHQFMNWDQPILTDSGGFQVYSLADTRNITEEGVTFKNHLNGSKMFLSPEKAISIQNNLGSDIMMSFDECPQFYQPYDYVKKSIERTSRWAERGLKAHRRPHDQGLFGIVQGAGFEDLRRQSAQDLVSMDFPGYSIGGLAVGESHEEMNAVLDFTTPLLPENKPRYLMGVGAPDSLIDGVIRGVDMFDCVLPTRIARNGTCMTSQGRLVVKNAQFAEDFTPLDHECDCYTCKNYTRAYLRHLLKADETFGIRLTSYHNLYFLINLMKQVRQAIMDDNLLEFREHFVEKYGYNKSGRNF

SEQ ID NO: 61268 - protein, 379 aa, Streptococcus azizii
  misc_feature (1)..(379): tr|A0A1V2SQS8|A0A1V2SQS8_9STRE Queuine tRNA-ribosyltran sferase OS=Streptococcus azizii OX=1579424 GN=tgt PE=3 SV=1
MTSPIQYRLIKKEKHTGARLGEIVTPHGTFPTPMFMPVGTQATVKTQSPEELKEMGSGIILSNTYHLWLRPGDELIARGGGLHQFMNWNQAILTDSGGFQVYSLADSRNITEEGVTFKNHLNGSKMFLSPEKAIAIQNNLGSDIMMSFDECPQFYQPYGYVKKSIERTSRWAERGLKVHQRPHDQGLFGIVQGAGFEDLRRQSAQDLVSMDFSGYSIGGLAVGESHEEMNAVLDFTTPLLPETKPRYLMGVGAPDSLIDGVIRGVDMFDCVLPTRIARNGTCMTSQGRLVVKNAQFAEDFTPLDHDCDCYTCRHYTRAYLRHLLKADETFGIRLTSYHNLYFLLKLMRNVRQAIMDDNLLEFREDFVERYGYNSSKRNF

SEQ ID NO: 61269 - protein, 380 aa, Streptococcus bovimastitidis
  misc_feature (1)..(380): tr|A0A1L8MM27|A0A1L8MM27_9STRE Queuine tRNA-ribosyltran sferase OS=Streptococcus bovimastitidis OX=1856638 GN=t gt PE=3 SV=1
MTDHPIKYRLIKKEKYTGARLGEIITPHGTFPTPMFMPVGTQATVKTQSPEELKSIGSGIILSNTYHLWLRPGDELIARAGGLHKFMNWDQPILTDSGGFQVYSLADSRNITEEGVTFKNHLNGSKMFLSPEKAISIQNNLGSDIMMSFDECPQFYQPYDYVKNSIERTSRWAERGLNAHRRPHDQGLFGIVQGAGFEDLRRQSAADLVGMDFAGYSVGGLAVGETHEEMNAVLDFTTPLLPENKPRYLMGVGAPDSLIDGVIRGIDMFDCVLPTRIARNGTCMTSEGRLVVKNAKFAEDFTSLDHDCDCYTCQNYTRAYIRHLLKADETFGIRLTSYHNLYFLVNLMKKVRQAIMDDNLLEFREDFLERYGYKTSSRNF

SEQ ID NO: 61270 - protein, 380 aa, Streptococcus canis
  misc_feature (1)..(380): tr|A0A2D4DRB9|A0A2D4DRB9_STRCB Queuine tRNA-ribosyltran sferase OS=Streptococcus canis OX=1329 GN=tgt PE=3 SV=1
MTDYPIKYRLIKKEKHTGARLGEIITPHGTFPTPMFMPVGTQATVKTQSPEELKAIGSGIILSNTYHLWLRPGDELIARAGGLHKFMNWDQPILTDSGGFQVYSLADSRNITEEGVTFKNHLNGSKMFLSPEKAISIQNNLGSDIMMSFDECPQFYQPYDYVKKSIERTSRWAERGLKAHRRPHDQGLFGIVQGAGFEDLRRQSAADLVAMDFPGYSIGGLAVGESHEEMNAVLDFTTPLLPENKPRYLMGVGAPDSLIDGVIRGVDMFDCVLPTRIARNGTCMTSEGRLVVKNAKFAEDFTPLDHDCDCYTCQHYTRAYIRHLLKADETFGIRLTSYHNLYFLVNLMKKVRQAIVDDNLLEFRQDFLERYGYNTSNRNF

SEQ ID NO: 61271 - protein, 417 aa, Streptococcus canis
  misc_feature (1)..(417): tr|A0A3P5Y815|A0A3P5Y815_STRCB Queuine tRNA-ribosyltran sferase OS=Streptococcus canis OX=1329 GN=tgt PE=3 SV=1
MIGAGTTCHLEALHYDGNSGRLKTLKTVYLDSKEKKNMTDYPIKYRLIKKEKHTGARLGEIITPHGTFPTPMFMPVGTQATVKTQSPEELKAIGSGIILSNTYHLWLRPGDELIARAGGLHKFMNWDQPILTDSGGFQVYSLADSRNITEEGVTFKNHLNGSKMFLSPEKAISIQNNLGSDIMMSFDECPQFYQPYDYVKKSIERTSRWAERGLKAHRRPHDQGLFGIVQGAGFEDLRRQSAADLVAMDFPGYSIGGLAVGESHEEMNAVLDFTTPLLPENKPRYLMGVGAPDSLIDGVIRGVDMFDCVLPTRIARNGTCMTSEGRLVVKNAKFAEDFTPLDHDCDCYTCQHYTRAYIRHLLKADETFGIRLTSYHNLYFLVNLMKKVRQAIVDDYLLEFRQDFLERYGYNTSNRNF

SEQ ID NO: 61272 - protein, 380 aa, Streptococcus constellatus
  misc_feature (1)..(380): tr|A0A139QEQ1|A0A139QEQ1_STRCV Queuine tRNA-ribosyltran sferase OS=Streptococcus constellatus OX=76860 GN=tgt P E=3 SV=1
MSDSPIQYRLIKKEKHTGARLGEIITPHGTFPTPMFMPVGTQATVKTQSPEELKQMGSGIILANTYHLWLRPGDELIARAGGLHKFMNWDQAILTDSGGFQVYSLADSRNITEEGVTFKNHLNGSKMFLSPEKAISIQNNLGSDIMMSFDECPQFYQPYDYVKKSIERTSRWAERGLEAHSRPHDQGLFGIVQGAGFEDLRRQSAHDLVSMDFPGYSIGGLAVGESHEEMNAVLDFTTPMLPESKPRYLMGVGAPDSLIDGVIRGVDMFDCVLPTRIARNGTCMTSEGRLVIKNAQFAEDFTPLDHDCDCYTCKNYTRAYIRHLLKADETFGLRLTSYHNLYFLVNLMKKVRQAILDDNLLEFREDFVERYGYNRSKRNF

SEQ ID NO: 61273 - protein, 380 aa, Streptococcus constellatus
  misc_feature (1)..(380): tr|F9PA54|F9PA54_STRCV Queuine tRNA-ribosyltransferase OS=Streptococcus constellatus subsp. pharyngis SK1060 = CCUG 46377 OX=1035184 GN=tgt PE=3 SV=1
MSDSPIQYRLIKKEKHTGARLGEIITPHGTFPTPMFMPVGTQATVKTQSPEELKEMGSGIILSNTYHLWLRPSDELIARAGGLHKFMNWDQAILTDSGGFQVYSLADSRNITEEGVTFKNHLNGAKMFLSPEKAISIQNNLGSDIMMSFDECPQFYQPYDYVKKSIERTSRWAERGLKAHCRPHDQGLFGIVQGAGFEDLRRQSAHDLVSMDFPGYSIGGLAVGESHEEMNAVLDFTTPMLPESKPRYLMGVGAPDSLIDGVIRGVDMFDCVLPTRIARNGTCMTSEGRLVIKNAQFAEDFTPLDHDCDCYTCKNYTRAYIRHLLKADETFGLRLTSYHNLYFLVNLMKKVRQAILDDNLLEFREDFVERYGYNRSKRNF

SEQ ID NO: 61274 - protein, 380 aa, Streptococcus criceti
  misc_feature (1)..(380): tr|G5JN85|G5JN85_STRCG Queuine tRNA-ribosyltransferase OS=Streptococcus criceti HS-6 OX=873449 GN=tgt PE=3 SV= 1
MTDVPIKYRLIKKEKHTGARLGEIITPHGTFPTPMFMPVGTQATVKTQSPEELKEMGSGIILSNTYHLWLRPGDELIAEAGGLHKFMNWDQAILTDSGGFQVYSLADSRNITEEGVTFKNHLNGAKMFLSPEKAISIQNNLGSDIMMSFDECPQFYQPYDYVKKSIERTSRWAERGLKAHRRPHDQGLFGIVQGAGFEDLRRQSAADLVSMDFPGYSIGGLAVGESHEEMNAVLDFTTQLLPENKPRYLMGVGAPDSLIDGVIRGVDMFDCVLPTRIARNGTCMTSQGRLVVKNAAFAKDFGPLDPACDCYTCRHYSRAYIRHLLKADETFGLRLTSYHNLYFLVNLMKKVRQAIKDDNLLEFRQDFMDRYGYGKNGRNF

SEQ ID NO: 61275 - protein, 380 aa, Streptococcus cristatus
  misc_feature (1)..(380): tr|A0A512ACM3|A0A512ACM3_STRCR Queuine tRNA-ribosyltran sferase OS=Streptococcus cristatus OX=45634 GN=tgt PE=3 SV=1
MSTSPIQYRLIKKEKHTGARLGEIITPHGTFPTPMFMPVGTQATVKTQSPEELKQMGSGIILANTYHLWLRPGDELIARAGGLHKFMNWDQPILTDSGGFQVYSLADSRNITEEGVTFKNHLNGSKMFLSPEKAISIQNNLGSDIMMSFDECPQFYQPYDYIKKSIERTSRWAERGLKAHTRPHDQGLFGIVQGAGFEDLRRQSAQDLVSMDFPGYSIGGLAVGESHEEMNAVLDFTTPLLPENKPRYLMGVGAPDSLIDGVIRGVDMFDCVLPTRIARNGTCMTSEGRLVVKNAQFEEDFTPLDHDCDCYTCTNYTRAYIRHLLKADETFGLRLTSYHNLYFLVNLMKKVRQAIMDDNLLEFREDFVERYGYNRSKRNF

SEQ ID NO: 61276 - protein, 380 aa, Streptococcus cristatus
  misc_feature (1)..(380): tr|A0A5B0DA34|A0A5B0DA34_STRCR Queuine tRNA-ribosyltran sferase OS=Streptococcus cristatus OX=45634 GN=tgt PE=3 SV=1
MSDSPIQYRLIKKEKHTGARLGEIITPHGTFPTPMFMPVGTQATVKTQSPEELKQMGSGIILANTYHLWLRPGDELIARAGGLHKFMNWDQPILTDSGGFQVYSLADSRNITEEGVTFKNHLNGSKMFLSPEKAISIQNNLGSDIMMSFDECPQFYQPYDYVKKSIERTSRWAERGLKAHRRPHDQGLFGIVQGAGFEDLRRQSAQDLVSMDFPGYSIGGLAVGESHEEMNAVLDFTTPLLPENKPRYLMGVGAPDSLIDGVIRGVDMFDCVLPTRIARNGTCMTSEGRLVVKNAQFEEDFTPLDHDCDCYTCTNYTRAYIRHLLKADETFGLRLTSYHNLYFLVNLMKKVRQAIMDDNLLEFREDFVERYGYNRSKRNF

SEQ ID NO: 61277 - protein, 379 aa, Streptococcus cuniculi
  misc_feature (1)..(379): tr|A0A4Y9JCV2|A0A4Y9JCV2_9STRE Queuine tRNA-ribosyltran sferase OS=Streptococcus cuniculi OX=1432788 GN=tgt PE= 3 SV=1
MTSPIHYRLIKKEKHTGARLGEIITPHGTFPTPMFMPVGTQATVKTQSPEELKEMGTGIILSNTYHLWLRPGDELIARAGGLHKFMNWDQAILTDSGGFQVYSLADSRNITEEGVTFKNHLNGSKMFLSPEKAISIQNNLGSDIMMSFDECPQFYQPYDYVKKSIERTSRWAERGLKAHRRPHEQGLFGIVQGAGFEDLRRQSAHDLVSMDFPGYSIGGLAVGESHEEMNAVLDFTTPLLPENKPRYLMGVGAPDSLIDGVIRGVDMFDCVLPTRIARNGTCMTSEGRLVVKNAQFAEDFTPLDHDCDCYTCRNYTRAYLRHLLKADETFGIRLTSYHNLYFLLKLIRNIRQAIMDDNLLEFREDFIERYGYNSSKRNF

SEQ ID NO: 61278 - protein, 379 aa, Streptococcus cuniculi
  misc_feature (1)..(379): tr|A0A1Q8E8K1|A0A1Q8E8K1_9STRE Queuine tRNA-ribosyltran sferase OS=Streptococcus cuniculi OX=1432788 GN=tgt PE= 3 SV=1
MTSPIQYRLIKKEKHTGARLGEIITPHGTFPTPMFMPVGTQATVKTQSPEELKEMGSGIILSNTYHLWLRPGDELIARAGGLHKFMNWDQAILTDSGGFQVYSLADSRNITEEGVTFKNHLNGSKMFLSPEKAISIQNNLGSDIMMSFDECPQFYQPYDYVKKSIERTSRWAERGLKAHRRPHDQGLFGIVQGAGFEDLRRQSAHDLVSMDFPGYSIGGLAVGESHEEMNAVLDFTTPLLPENKPRYLMGVGAPDSLIDGVIRGVDMFDCVLPTRIARNGTCMTSEGRLVVKNAQFAEDFTPLDHDCDCYTCRNYTRAYLRHLLKADETFGIRLTSYHNLYFLLKLMRNVRQAIMDDNLLEFREDFVERYGYNSSKRNF

SEQ ID NO: 61279 - protein, 380 aa, Streptococcus downei
  misc_feature (1)..(380): tr|A0A380JCR2|A0A380JCR2_STRDO Queuine tRNA-ribosyltran sferase OS=Streptococcus downei MFe28 OX=764290 GN=tgt PE=3 SV=1
MTDVPIKYRLIKKEKHTGARLGEIITPHGTFSTPMFMPVGTQATVKTQSPEELKEMGSGIILANTYHLWLRPGDDLVAEAGGLHKFMNWDQAILTDSGGFQVYSLADSRNITEEGVTFKNHLNGAKMFLSPEKAISIQNNLGSDIMMSFDECPQFYQPYDYVKKSIERTSRWAERGLKAHRRPQDQGLFGIVQGAGYEDLRRQSAADLVSMDFPGYSIGGLAVGESHEEMNAVLDFTTPLLPENKPRYLMGVGAPDSLIDGVIRGIDMFDCVLPTRIARNGTCMTSQGRLVVKNAAFARDFGPLDPVCDCYTCRNYSRAYIRHLLKADETFGLRLTSYHNLYFLVNLMNKVRQAILDDNLLEFRQDFLERYGYGKNSRNF

SEQ ID NO: 61280 - protein, 380 aa, Streptococcus dysgalactiae
  misc_feature (1)..(380): tr|K4QB86|K4QB86_STREQ Queuine tRNA-ribosyltransferase OS=Streptococcus dysgalactiae subsp. equisimilis AC-271 3 OX=759913 GN=tgt PE=3 SV=1
MTDYPIKYRLIKKEKHTGARLGEIITPHGTFPTPMFMPVGTQATVKTQSPEELKAIGSGIILSNTYHLWLRPGDDLIARAGGLHKFMNWDQPILTDSGGFQVYSLADSRNITEEGVTFKNHLNGSKMFLSPEKAISIQNNLGSDIMMSFDECPQFYQPYDYVKKSIERTSRWAERGLKAHRRPHDQGLFGIVQGAGFEDLRRQSAADLVAMDFPGYSIGGLAVGESHEEMNAVLDFTTPLLPENKPRYLMGVGAPDSLIDGVIRGVDMFDCVLPTRIARNGTCMTSEGRLVIKNAKFAEDFTPLDHDCDCYTCQNYSRAYIRHLLKADETFGIRLTSYHNLYFLVNLMKKVRQAIMDDNLLEFRQDFLERYGYNKSNRNF

SEQ ID NO: 61281 - protein, 380 aa, Streptococcus dysgalactiae
  misc_feature (1)..(380): tr|M4YZR3|M4YZR3_STREQ Queuine tRNA-ribosyltransferase OS=Streptococcus dysgalactiae subsp. equisimilis RE378 OX=617121 GN=tgt PE=3 SV=1
MTDYPIKYRLIKKEKHTGARLGEIITPHGTFPTPMFMPVGTQATVKTQSPEELKAIGSGIILSNTYHLWLRPGDDLIARAGGLHKFMNWDQPILTDSGGFQVYSLADSRNITEEGVTFKNHLNGSKMFLSPEKAISIQNNLGSDIMMSFDECPQFYQPYDYVKKSIERTSRWAERGLKAHRRPHDQGLFGIVQGAGFEDLRRQSAADLVAMDFPGYSIGGLAVGESHEEMNAVLDFTTPLLPENKPRYLMGVGAPDSLIDGVIRGVDMFDCVLPTRIARNGTCMTSEGRLVVKNAKFAEDFTPLDHDCDCYTCQNYSRAYIRHLLKADETFGIRLTSYHNLYFLVNLMKKVRQAIMDDNLLEFRQDFLERYGYNKSNRNF

SEQ ID NO: 61282 - protein, 380 aa, Streptococcus equi
  misc_feature (1)..(380): tr|A0A380JP48|A0A380JP48_9STRE Queuine tRNA-ribosyltran sferase OS=Streptococcus equi subsp. equi OX=148942 GN= tgt PE=3 SV=1
MTNYPITYRLIKKEKHTGARLGEIITPHGTFPTPMFMPVGTQATVKTQSPEELKEIGSGIILSNTYHLWLRPGDELIARAGGLHKFMNWDQAILTDSGGFQVYSLADSRNITEEGVTFKNHLNGSKMFLSPEKAISIQNNLGSDIMMSFDECPQFYQPYDYVKKSIERTSRWAERGLKAHRRPHDQGLFGIVQGAGFEDLRRQSAADLVAMDFPGYSIGGLAVGESHVEMNAVLDFTTPLLPENKPRYLMGVGAPDSLIDGVIRGVDMFDCVLPTRIARNGTCMTSEGRLVVKNAKFAEDFTPLDHHCDCYTCQHYTRAYLRHLLKADETFGMRLTSYHNLYFLVNLMKQVRQAILDDNLLEFRQDFLERYGYNSSSRNF

SEQ ID NO: 61283 - protein, 380 aa, Streptococcus equi
  misc_feature (1)..(380): sp|C0MAH5|TGT_STRE4 Queuine tRNA-ribosyltransferase OS= Streptococcus equi subsp. equi (strain 4047) OX=553482 GN=tgt PE=3 SV=1
MTNYPITYRLIKKEKHTGARLGEIITPHGTFPTPMFMPVGTQATVKTQSPEELKEIGSGIILSNTYHLWLRPGDELIARAGGLHKFMNWDQAILTDSGGFQVYSLADSRNITEEGVTFKNHLNGSKMFLSPEKAISIQNNLGSDIMMSFDECPQFYQPYDYVKKSIERTSRWAERGLKAHRRPHDQGLFGIVQGAGFEDLRRQSAADLVSMDFPGYSIGGLAVGESHAEMNAVLDFTTPLLPENKPRYLMGVGAPDSLIDGVIRGVDMFDCVLPTRIARNGTCMTSEGRLVVKNAKFAEDFTPLDHHCDCYTCQHYTRAYLRHLLKADETFGMRLTSYHNLYFLVNLMKQVRQAILDDNLLEFRQDFLERYGYNSSSRNF

SEQ ID NO: 61284 - protein, 380 aa, Streptococcus equinus
  misc_feature (1)..(380): tr|A0A447UB27|A0A447UB27_STREI Queuine tRNA-ribosyltran sferase OS=Streptococcus equinus OX=1335 GN=tgt PE=3 SV =1
MTDYPIKYRLIKKEKHTGARLGEIITPHGTFPTPMFMPVGTQATVKTQSPEELKEMGSGIILSNTYHLWLRPGDELIARAGGLHKFMNWDQAILTDSGGFQVYSLAETRNITEEGVTFKNHLNGQKMFLSPEKAISIQNNLGSDIMMSFDECPQFYQPYDYVKKSIERTSRWAERGLKAHRRPHDQGLFGIVQGAGFKDLRRQSANDLVSMDFPGYSIGGLAVGESHKEMNAVLDFTVPMLPENKPRYLMGVGAPDSLIDGVIRGVDMFDCVLPTRIARNGTCMTSEGRLVVKNAAYAEDFTPLDHDCDCYTCRNYTRAYIRHLLKADETFGLRLTSYHNLYFLVNLMKKVRQAIMDDNLLEFREDFFERYGYNRSARNF

SEQ ID NO: 61285 - protein, 380 aa, Streptococcus equinus
  misc_feature (1)..(380): tr|A0A1H0ZR96|A0A1H0ZR96_STREI Queuine tRNA-ribosyltran sferase OS=Streptococcus equinus OX=1335 GN=tgt PE=3 SV =1
MTDYPIKYRLIKKEKHTGARLGEIITPHGTFPTPMFMPVGTQATVKTQSPEELKEMGSGIILSNTYHLWLRPGDELIARAGGLHKFMNWDQAILTDSGGFQVYSLAETRNITEEGVTFKNHLNGQKMFLSPEKAISIQNNLGSDIMMSFDECPQFYQPYDYVKKSIERTSRWAERGLKAHRRPHDQGLFGIVQGAGFKDLRRQSANDLVSMDFPGYSIGGLAVGESHKEMNAVLDFTVPMLPENKPRYLMGVGAPDSLIDGVIRGVDMFDCVLPTRIARNGTCMTSEGRLVVKNAAYAEDFTPLDHDCDCYTCRNYTRAYIRHLLKADETFGLRLTSYHNLYFLVNLMKKVRQAIMDDNLLEFREDFFERYGYNKSDRNF

SEQ ID NO: 61286 - protein, 380 aa, Streptococcus ferus
  misc_feature (1)..(380): tr|A0A2X3VP23|A0A2X3VP23_9STRE Queuine tRNA-ribosyltran sferase OS=Streptococcus ferus OX=1345 GN=tgt PE=3 SV=1
MTDSPIQYRLIKKEKHTGARLGEIITPHGTFPTPMFMPVGTQATVKTQSPEELKEMGSGIILANTYHLWLRPGDDLVAKAGGLHQFMNWDQPILTDSGGFQVYSLAEKRNITEEGVTFKNHLNGAKMFLTPEKAISIQNNLGSDIMMSFDECPQFYQPYDYVKKSIERTSRWAERGLKAHRRPHDQGLFGIVQGAGFEDLRRQSARDLVGMDFPGYSIGGLAVGESHEEMNAVLDFTTPLLPEDKPRYLMGVGAPDSLIDGVIRGIDMFDCVLPTRIARNGTCMTSEGRLVVKNAQYEEDFSPLDHDCDCYTCRNYTRAYIRHLIKADETFGLRLTSYHNLYFLINLMKKVRQAIMDDNLLEFREDFLERYGYNRTNRNF

SEQ ID NO: 61287 - protein, 380 aa, Streptococcus gallolyticus
  misc_feature (1)..(380): tr|A0A368UF21|A0A368UF21_9STRE Queuine tRNA-ribosyltran sferase OS=Streptococcus gallolyticus OX=315405 GN=tgt PE=3 SV=1
MTDYPIKYRLIKKEKHTGARLGEIITPHGTFPTPMFMPVGTQATVKTQSPEELKEMGSGIILSNTYHLWLRPGDDLIARAGGLHKFMNWDQAILTDSGGFQVYSLADTRNITEEGVTFKNHLNGAKMFLSPEKAISIQNNLGSDIMMSFDECPQFYQPYDYVKKSIERTSRWAERGLKAHRRPHDQGLFGIVQGAGFKDLRRQSASDLVSMDFPGYSIGGLAVGESHKEMNEVLDFTVPMLPENKPRYLMGVGAPDSLIDGVIRGVDMFDCVLPTRIARNGTCMTSRGRLVVKNAAYAEDFTPLDHDCDCYTCRNYTRAYIRHLLKADETFGLRLTSYHNLYFLVNLMKKVRQAIMDDNLLEFREDFFERYGYNKSDRNF

SEQ ID NO: 61288 - protein, 380 aa, Streptococcus gallolyticus
  misc_feature (1)..(380): tr|A0A0E1XDL2|A0A0E1XDL2_STRGY Queuine tRNA-ribosyltran sferase OS=Streptococcus gallolyticus subsp. gallolytic us TX20005 OX=545774 GN=tgt PE=3 SV=1
MTDYPIKYRLIKKEKHTGARLGEIITPHGTFPTPMFMPVGTQATVKTQSPEELKEMGSGIILSNTYHLWLRPGDELIARAGGLHKFMNWDQAILTDSGGFQVYSLADTRNITEEGVTFKNHLNGAKMFLSPEKAISIQNNLGSDIMMSFDECPQFYQPYDYVKKSIERTSRWAERGLKAHRRPHDQGLFGIVQGAGFKDLRRQSASDLVSMDFPGYSIGGLAVGESHKEMNEVLDFTVPMLPENKPRYLMGVGAPDSLIDGVIRGVDMFDCVLPTRIARNGTCMTSEGRLVVKNAAYAEDFTPLDHDCDCYTCRNYTRAYIRHLLKADETFGLRLTSYHNLYFLVNLMKKVRQAIMDDNLLEFREDFFERYGYNKSDRNF

SEQ ID NO: 61289 - protein, 380 aa, Streptococcus gordonii
  misc_feature (1)..(380): sp|A8AUL3|TGT_STRGC Queuine tRNA-ribosyltransferase OS= Streptococcus gordonii (strain Challis / ATCC 35105 / B CRC 15272 / CH1 / DL1 / V288) OX=467705 GN=tgt PE=3 SV= 1
MSDSPIQYRLIKKEKHTGARLGEIITPHGTFPTPMFMPVGTQATVKTQSPEELKQMGSGIILANTYHLWLRPGDELIARAGGLHKFMNWDQPILTDSGGFQVYSLADSRNITEEGVTFKNHLNGSKMFLSPEKAISIQNNLGSDIMMSFDECPQFYQPYDYVKKSIERTSRWAERGLKAHSRPHDQGLFGIVQGAGFEDLRRQSAQDLVSMDFPGYSIGGLAVGESHEEMNAVLDFTTPLLPENKPRYLMGVGAPDSLIDGVIRGVDMFDCVLPTRIARNGTCMTSEGRLVVKNAQFEEDFTPLDHNCDCYTCTNYTRAYIRHLLKADETFGLRLTSYHNLYFLVNLMKKVRQAIMDDNLLEFREDFMERYGYNRSNRNF

SEQ ID NO: 61290 - protein, 380 aa, Streptococcus gordonii
  misc_feature (1)..(380): tr|A0A0F5MMA5|A0A0F5MMA5_STRGN Queuine tRNA-ribosyltran sferase OS=Streptococcus gordonii OX=1302 GN=tgt PE=3 S V=1
MSDSPIQYRLIKKEKHTGARLGEIITPHGTFPTPMFMPVGTQATVKTQSPEELKQMGSGIILANTYHLWLRPGDELIARAGGLHKFMNWDQPILTDSGGFQVYSLADSRNITEEGVTFKNHLNGSKMFLSPEKAISIQNNLGSDIMMSFDECPQFYQPYDYVKKSIERTSRWAERGLKAHSRPHDQGLFGIVQGAGFEDLRRQSAQDLVSMDFPGYSIGGLAVGESHEEMNAVLDFTTPMLPENKPRYLMGVGAPDSLIDGVIRGVDMFDCVLPTRIARNGTCMTSEGRLVVKNAQFEEDFTPLDHNCDCYTCTNYTRAYIRHLLKADETFGLRLTSYHNLYFLVNLMKKVRQAIMDDNLLEFREDFMERYGYNRSNRNF

SEQ ID NO: 61291 - protein, 380 aa, Streptococcus halitosis
  misc_feature (1)..(380): tr|A0A426FUD7|A0A426FUD7_9STRE Queuine tRNA-ribosyltran sferase OS=Streptococcus halitosis OX=2172545 GN=tgt PE =3 SV=1
MSDSPIKYRLIKKEKHTGARLGEIITPHGTFPTPMFMPVGTQATVKTQSPEELKEMGSGIILSNTYHLWLRPGDELIARAGGLHKFMNWDQPILTDSGGFQVYSLADSRNITEEGVTFKNHLNGSKMFLSPEKAISIQNNLGSDIMMSFDECPQFYQPYDYVKKSIERTSRWAERGLKAHRRPEDQGLFGIVQGAGFEDLRRQSAHDLVSMDFPGYSIGGLAVGETHEEMNAVLDFTTQLLPENKPRYLMGVGAPDSLIDGVIRGVDMFDCVLPTRIARNGTCMTSQGRLVVKNAQFAEDFTPLDPECDCYTCKNYTRAYLRHLLKADETFGIRLTSYHNLYFLLNLMKQVRQAIVDDNLLEFREYFVEKYGYNKSGRNF

SEQ ID NO: 61292 - protein, 381 aa, Streptococcus henryi
  misc_feature (1)..(381): tr|A0A1G6AQ02|A0A1G6AQ02_9STRE Queuine tRNA-ribosyltran sferase OS=Streptococcus henryi OX=439219 GN=tgt PE=3 S V=1
MTTDYPIKYRLIKKEKHTGARLGEIITPHGTFPTPMFMPVGTQATVKTQSPEELKEMGSGIILANTYHLWLRPGDELIARAGGLHKFMNWDQPILTDSGGFQVYSLADSRNITEEGVTFKNHLNGSKMFLSPEKAISIQNNLGSDIMMSFDECPQFYQPYDYVKKSIERTSRWAERGLKAHSRPHDQGLFGIVQGAGFEDLRRQSAADLVGMDFPGYSIGGLAVGETHEEMNAVLDFTTPLLPENKPRYLMGVGAPDSLIDGVIRGVDMFDCVLPTRIARNGTCMTSQGRLVVKNAQYAEDFTPLDHDCDCYTCKNYTRAYLRHLLKADETFGLRLTSYHNLYFLVNLMKKVRQAIMDDNLLEFRQDFMERYGYGKNGRNF

SEQ ID NO: 61293 - protein, 380 aa, Streptococcus hyointestinalis
  misc_feature (1)..(380): tr|A0A380KEP9|A0A380KEP9_9STRE Queuine tRNA-ribosyltran sferase OS=Streptococcus hyointestinalis OX=1337 GN=tgt PE=3 SV=1
MTEHPIKYRLIKQEKHTGARLGEIITPHGTFPTPMFMPVGTQATVKTQSPEELKEMGSGIILSNTYHLWLRPGDELIARAGGLHKFMNWDQAILTDSGGFQVYSLAENRNITEEGVTFKNHLNGAKMFLSPEKAISIQNNLGSDIMMSFDECPQFYQPYDYVKKSIERTSRWAERGLKAHRRPHDQGLFGIVQGAGFEDLRRQSAQDLVSMDFPGYSIGGLAVGESHEEMNAVLDFTVPMLPQDKPRYLMGVGAPDSLIDGVIRGIDMFDCVLPTRIARNGTCMTSMGRLVVKNAQYAEDFTPLDPNCDCYTCTNYTRAYIRHLIKADETFGLRLTSYHNLYFLVNLMKQVRQAIMDDNLLEFREDFVERYGYNNSKRNF

SEQ ID NO: 61294 - protein, 380 aa, Streptococcus ictaluri
  misc_feature (1)..(380): tr|G5JZI2|G5JZI2_9STRE Queuine tRNA-ribosyltransferase OS=Streptococcus ictaluri 707-05 OX=764299 GN=tgt PE=3 SV=1
MTDYPIKYRLIKKEKHTGARLGEIITPHGTFPTPMFMPVGTQATVKTQSPEELKAMGSGIILSNTYHLWLRPGDELIARAGGLHKFMNWDQPILTDSGGFQVYSLADSRNITEEGVTFKNHLNGSKMFLSPEKAISIQNNLGSDIMMSFDECPQFYQPYDYVKKSIERTSRWAERGLKAHRRPHDQGLFGIVQGAGFEDLRRQSAADLVSMDFPGYSIGGLAVGETHDEMNAVLDFTTPLLPENKPRYLMGVGAPDSLIDGVIRGVDMFDCVLPTRIARNGTCMTSEGRLVVKNAKFAEDFTPLDHDCDCYTCQNYTRAYIRHLLKADETFGIRLTSYHNLYFLVNLMKKVRQAIMDDNLLEFREDFLERYGYNKSSRNF

SEQ ID NO: 61295 - protein, 380 aa, Streptococcus infantarius
  misc_feature (1)..(380): tr|A0A380KRA3|A0A380KRA3_9STRE Queuine tRNA-ribosyltran sferase OS=Streptococcus infantarius OX=102684 GN=tgt P E=3 SV=1
MTDYPIKYRLIKKEKHTGARLGEIITPHGTFPTPMFMPVGTQATVKTQSPEELKEMGSGIILSNTYHLWLRPGDELIARAGGLHKFMNWDQAILTDSGGFQVYSLAETRNITEEGVTFKNHLNGQKMFLSPEKAISIQNNLGSDIMMSFDECPQFYQPYDYVKKSIERTSRWAERGLKAHRRPHDQGLFGIVQGAGFKDLRRQSANDLVSMDFPGYSIGGLAVGESHKEMNAVLDFTVPMLPESKPRYLMGVGAPDSLIDGVIHGVDMFDCVLPTRIARNGTCMTSEGRLVVKNAAYAEDFTPLDHDCDCYTCRNYTRAYIRHLLKADETFGLRLTSYHNLYFLVNLMKKVRQAIMDDNLLEFREDFFERYGYNKSDRNF

SEQ ID NO: 61296 - protein, 360 aa, Streptococcus infantis
  misc_feature (1)..(360): tr|F9PY37|F9PY37_9STRE Queuine tRNA-ribosyltransferase OS=Streptococcus infantis SK970 OX=1035189 GN=tgt PE=3 SV=1
MGEIITPHGTFPTPMFMPVGTQATVKTQSPEELKEMGSGIILSNTYHLWLRPGDELIARAGGLHKFMNWDQPILTDSGGFQVYSLADSRNITEEGVTFKNHLNGSKMFLSPEKAISIQNNLGSDIMMSFDECPQFYQPYDYVKKSIERTSRWAERGLKAHRRPHDQGLFGIVQGAGFEDLRRQSAQDLVSMDFPGYSIGGLAVGETHEEMNAVLDFTTQLLPENKPRYLMGVGAPDSLIDGVIRGVDMFDCVLPTRIARNGTCMTSQGRLVVKNAQFAEDFTPLDPECDCYTCKNYTRAYLRHLLKADETFGIRLTSYHNLYFLLNLMKQVHQAIMDDNLLEFREHFVEKYGYNKSGRNF

SEQ ID NO: 61297 - protein, 380 aa, Streptococcus infantis
  misc_feature (1)..(380): tr|E8K2E6|E8K2E6_9STRE Queuine tRNA-ribosyltransferase OS=Streptococcus infantis ATCC 700779 OX=889204 GN=tgt PE=3 SV=1
MSDSPIKYRLIKKEKHTGARLGEIITPHGTFPTPMFMPVGTQATVKTQSPEELKDMGSGIILSNTYHLWLRPGDELIARAGGLHKFMNWDQPILTDSGGFQVYSLADSRNITEEGVTFKNHLNGSKMFLSPEKAISIQNNLGSDIMMSFDECPQFYQPYDYVKKSIERTSRWAERGLKAHRRPHDQGLFGIVQGAGFEDLRRQSAQDLVSMDFPGYSIGGLAVGETHEEMNAVLDFTTQLLPENKPRYLMGVGAPDSLIDGVIRGVDMFDCVLPTRIARNGTCMTSQGRLVVKNAQFAEDFTPLDPECDCYTCKNYTRAYLRHLLKADETFGIRLTSYHNLYFLLNLMKQVRQAIMDDNLLEFREHFVEKYGYNKSGRNF

SEQ ID NO: 61298 - protein, 380 aa, Streptococcus iniae
  misc_feature (1)..(380): tr|A0A1J0N1C9|A0A1J0N1C9_STRIN Queuine tRNA-ribosyltran sferase OS=Streptococcus iniae OX=1346 GN=tgt PE=3 SV=1
MTDYPIKYRLIKKDKRTGARLGEIITPHGTFPTPMFMPVGTQATVKTQSPEELKEMGSGIILSNTYHLWLRPGDDLIARAGGLHKFMNWDQPILTDSGGFQVYSLADSRNITEEGVTFKNHLNGSKMFLSPEKAISIQNNLGSDIMMSFDECPQFYQPYDYVKKSIERTSRWAERGLKAHRRPHDQGLFGIVQGAGFEDLRRQSAADLVAMDFPGYSIGGLAVGETHDEMNAVLDFTTPLLPENKPRYLMGVGAPDSLIDGVIRGVDMFDCVLPTRIARNGTCMTSQGRLVVKNAKFAEDFTPLDHDCDCYTCQNYTRAYIRHLLKADETFGIRLTSYHNLYFLVNLMKKVRQAIMDDNLLEFREDFLERYGYNKSSRNF

SEQ ID NO: 61299 - protein, 380 aa, Streptococcus intermedius
  misc_feature (1)..(380): tr|A0A428EUS0|A0A428EUS0_STRIT Queuine tRNA-ribosyltran sferase OS=Streptococcus intermedius OX=1338 GN=tgt PE= 3 SV=1
MSDSPIQYRLIKKEKHTGARLGEIITPHGTFPTPMFMPVGTQATVKTQSPEELKQMGSGIILANTYHLWLRPGDELIARAGGLHKFMNWDQAILTDSGGFQVYSLADSRNITEEGVTFKNHLNGSKMFLSPEKAISIQNNLGSDIMMSFDECPQFYQPYDYVKKSIERTSRWAERGLKAHRRPQDQGLFGIVQGAGFEDLRRQSAQDLVSMDFPGYSIGGLAVGESHEEMNAVLDFTTPMLPENKPRYLMGVGAPDSLIDGVIRGVDMFDCVLPTRIARNGTCMTSEGRLVVKNAQFEEDFTPLDHDCDCYTCSNYTRAYIRHLLKADETFGLRLTSYHNLYFLLNLMKKVRQAIMDDNLLEFREDFVERYGYNKSSRNF

SEQ ID NO: 61300 - protein, 380 aa, Streptococcus intermedius
  misc_feature (1)..(380): tr|T1ZGL7|T1ZGL7_STRIT Queuine tRNA-ribosyltransferase OS=Streptococcus intermedius B196 OX=862967 GN=tgt PE=3 SV=1
MSDSPIQYRLIKKEKHTGARLGEIITPHGTFPTPMFMPVGTQATVKTQSPEELKQMGSGIILANTYHLWLRPGDELIARAGGLHKFMNWDQAILTDSGGFQVYSLADSRNITEEGVTFKNHLNGSKMFLSPEKAISIQNNLGSDIMMSFDECPQFYQPYDYVKKSIERTSRWAERGLKAHRRPQDQGLFGIVQGAGFEDLRRQSAQDLVSMDFPGYSIGGLAVGESHEEMNAVLDFTTPMLPENKPRYLMGVGAPDSLIDGVIRGVDMFDCVLPTRIARNGTCMTSEGRLVVKNAQFEEDFTPLDHDCDCYTCSNYTRAYIRHLLKADETFGLRLTSYHNLYFLLNLMKKVRQAIMDDNLLEFREDFIERYGYNKSSRNF

SEQ ID NO: 61301 - protein, 380 aa, Streptococcus lutetiensis; identical to SEQ ID NO: 61284
  misc_feature (1)..(380): tr|S5RNG6|S5RNG6_9STRE Queuine tRNA-ribosyltransferase OS=Streptococcus lutetiensis 033 OX=1076934 GN=tgt PE=3 SV=1

SEQ ID NO: 61302 - protein, 380 aa, Streptococcus lutetiensis; identical to SEQ ID NO: 61284
  misc_feature (1)..(380): tr|A0A2X4FEW6|A0A2X4FEW6_9STRE Queuine tRNA-ribosyltran sferase OS=Streptococcus lutetiensis OX=150055 GN=tgt P E=3 SV=1

SEQ ID NO: 61303 - protein, 380 aa, Streptococcus macacae
  misc_feature (1)..(380): tr|G5JW36|G5JW36_9STRE Queuine tRNA-ribosyltransferase OS=Streptococcus macacae NCTC 11558 OX=764298 GN=tgt PE =3 SV=1
MTYSPIQYRLIKREKHTGARLGEIITPHGTFPTPMFMPVGTQATVKTQSPEELKEMGSGIILANTYHLWLRPGDDLVAKAGGLHTFMNWDQAILTDSGGFQVYSLAEKRNITEEGVTFKNHLNGAKMFLTPEKAISIQNNLGSDIMMSFDECPQFYQPYDYVKASIERTSRWAERGLNAHRRPQDQGLFGIVQGAGFKDLRRQSAADLVSMDFPGYSIGGLAVGESHAEMNAVLDFTAPLLPANKPRYLMGVGAPDSLIDGVIRGIDMFDCVLPTRIARNGTCMTSQGRLVVKNAQYAEDFTPLDHDCDCYTCQHYTRAYIRHLIKADETFGLRLTSYHNLYFLLNLMSNIRQAIMDDNLLEFREDFIEKYGYNHSQRNF

SEQ ID NO: 61304 - protein, 380 aa, Streptococcus macedonicus
  misc_feature (1)..(380): tr|A0A2G3NZ68|A0A2G3NZ68_STRMC Queuine tRNA-ribosyltran sferase OS=Streptococcus macedonicus OX=59310 GN=tgt PE =3 SV=1
MTDYPIKYRLIKKEKHTGARLGEIITPHGTFPTPMFMPVGTQATVKTQSPEELKEMGSGIILSNTYHLWLRPGDELIARAGGLHKFMNWDQAILTDSGGFQVYSLADTRNITEEGVTFKNHLNGAKMFLSPEKAISIQNNLGSDIMMSFDECPQFYQPYDYVKKSIERTSRWAERGLKAHRRPHDQGLFGIVQGAGFKDLRRQSASDLVSMDFPGYSIGGLAVGESHKEMNEVLDFTVPMLPENKPRYLMGVGAPDSLIDGVIRGVDMFDCVLPTRIARNGTCMTSEGRLVVKNAAYAEDFTPLDHDCDCHTCHNYTRAYIRHLLKADETFGLRLTSYHNLYFLVNLMKKVRQAIMDDNLLEFREDFFERYGYNKSDRNF

SEQ ID NO: 61305 - protein, 380 aa, Streptococcus macedonicus
  misc_feature (1)..(380): tr|A0A081JF24|A0A081JF24_STRMC Queuine tRNA-ribosyltran sferase OS=Streptococcus macedonicus OX=59310 GN=tgt PE =3 SV=1
MTDYPIKYRLIKKEKHTGARLGEIITPHGTFPTPMFMPVGTQATVKTQSPEELKEMGSGIILSNTYHLWLRPGDELIARAGGLHKFMNWDQAILTDSGGFQVYSLADTRNITEEGVTFKNHLNGAKMFLSPEKAISIQNNLGSDIMMSFDECPQFYQPYDYVKKSIERTSRWAERGLKAHRRPHDQGLFGIVQGAGFKDLRRQSASDLVSMDFPGYSIGGLAVGESHKEMNEVLDFTVPMLPENKPRYLMGVGAPDSLIDGVIRGVDMFDCVLPTRIARNGTCMTSEGRLVVKNAAYAEDFTPLDHDCDCHTCRNYTRAYIRHLLKADETFGLRLTSYHNLYFLVNLMKKVRQAIMDDNLLEFREDFFERYGYNKSDRNF

SEQ ID NO: 61306 - protein, 380 aa, Streptococcus massiliensis
  misc_feature (1)..(380): tr|A0A380KZ18|A0A380KZ18_9STRE Queuine tRNA-ribosyltran sferase OS=Streptococcus massiliensis OX=313439 GN=tgt PE=3 SV=1
MSDSPIQYRLIKKEKHTGARLGEIITLHGTFPTPMFMPVGTQATVKTQSPEELKEMGSGIILSNTYHLWLRPGDELIARAGGLHKFMNWDQAILTDSGGFQVYSLADSRNITEEGVTFKNHLNGSKMFLSPEKAISIQNNLGSDIMMSFDECPQFYQPYDYVKKSIERTSRWAERGLKAHRRPHDQGLFGIVQGAGFEDLRRQSAQDLVSMNFPGYSIGGLAVGESHEEMNAVLDFTTPMLPENKPRYLMGVGAPDSLINGVIRGIDMFDCVLPTRIARNGTCMTSEGRLVIKNAQYAEDFTALDHDCDCYTCQHYSRAYIRHLLKADETFGLRLTSYHNLYFLVNLMKKVRQAILNDNLLEFREDFVERYGYNSSKRNF

SEQ ID NO: 61307 - protein, 380 aa, Streptococcus merionis
  misc_feature (1)..(380): tr|A0A239SUW6|A0A239SUW6_9STRE Queuine tRNA-ribosyltran sferase OS=Streptococcus merionis OX=400065 GN=tgt PE=3 SV=1
MTDSPIQYRLIKKEKHTGARLGEIITPHGTFPTPMFMPVGTQATVKTQSPEELKQMGAGIILANTYHLWLRPGDELVAKAGGLHTFMNWDQPILTDSGGFQVYSLADSRNITEEGVTFKNHLNGSKMFLSPEKAIAIQNNLGSDIMMSFDECPQFYQPYDYVKNSIERTSRWAERGLKAHRRPHDQGLFGIVQGAGFEDLRRQSARDLVSMDFPGYSIGGLAVGESHEEMNAVLDFTTQLLPENKPRYLMGVGAPDSLIDGVIRGVDMFDCVLPTRIARNGTTMTSRGRLVVKNAQFAEDFGPLDPECDCYTCQNYSRAYLRHLLKADETFGIRLTSYHNLYFLINLMKNVRQAIMDDNLLEFRQDFMEKYGYGKNGRNF

SEQ ID NO: 61308 - protein, 380 aa, Streptococcus milleri
  misc_feature (1)..(380): tr|A0A380L7Q9|A0A380L7Q9_9STRE Queuine tRNA-ribosyltran sferase OS=Streptococcus milleri OX=33040 GN=tgt PE=3 S V=1
MSDSPIQYRLIKKEKHTGARLGEIITPHGTFPTPMFMPVGTQATVKTQSPEELKQMGSGIILANTYHLWLRPGDELIARAGGLHKFMNWDQAILTDSGGFQVYSLADSRNITEEGVTFKNHLNGSKMFLSPEKAISIQNNLGSDIMMSFDECPQFYQPYDYVKKSIERTSRWAERGLKAHSRPHDQGLFGIVQGAGFEDLRRQSAHDLVSMDFPGYSIGGLAVGESHEEMNAVLDFTTPMLPESKPRYLMGVGAPDSLIDGVIRGVDMFDCVLPTRIARNGTCMTSEGRLVIKNAQFAEDFTPLDHDCDCYTCKNYTRAYIRHLLKADETFGLRLTSYHNLYFLVNLMKKVRQAILDDNLLEFREDFVERYGYNRSKRNF

SEQ ID NO: 61309 - protein, 380 aa, Streptococcus milleri
  misc_feature (1)..(380): tr|A0A448D4E7|A0A448D4E7_9STRE Queuine tRNA-ribosyltran sferase OS=Streptococcus milleri OX=33040 GN=tgt PE=3 S V=1
MSDSPIQYRLIKKEKHTGARLGEIITPHGTFPTPMFMPVGTQATVKTQSPEELKQMGSGIILANTYHLWLRPGDELIARAGGLHKFMNWDQAILTDSGGFQVYSLADSRNITEEGVTFKNHLNGSKMFLSPEKAISIQNNLGSDIMMSFDECPQFYQPYDYVKKSIERTSRWAERGLKAHSRPHDQGLFGIVQGAGFEDLRRQSAHDLVSMDFPGYSIGGLAVGESHEEMNAVLDFTTPMLPESKPRYLMGVGAPDSLIDGVIRGVDMFDCVLPTRIARNGTCMTSEGRLVIKNAQFAEDFTPLDHDCDCYTCKNYTRAYIRHLLKADETFGLRLTSYHNLYFLVNLMKKVRQAILGDNLLEFREDFVERYGYNRSKRNF

SEQ ID NO: 61310 - protein, 380 aa, Streptococcus minor
  misc_feature (1)..(380): tr|A0A3P1VEQ1|A0A3P1VEQ1_9STRE Queuine tRNA-ribosyltran sferase OS=Streptococcus minor OX=229549 GN=tgt PE=3 SV =1
MTDYPIKYRLIKKEKHTGARLGEIITPHGTFPTPMFMPVGTQATVKTQSPEELKEMGSGIILSNTYHLWLRPGDELIARAGGLHKFMNWDQAILTDSGGFQVYSLADSRNITEEGVTFKNHLNGSKMFLSPEKAISIQNNLGSDIMMSFDECPQFYQPYDYVKKSIERTSRWAERGLKAHRRPHDQGLFGIVQGAGFEDLRRQSAADLVSMDFPGYSIGGLAVGETHDEMNAVLDFTTPLLPENKPRYLMGVGAPDSLIDGIIRGVDMFDCVLPTRIARNGTCMTSEGRLVVKNAKYEEDFTPLDHDCDCYTCKNYTRAYIRHLLKADETFGIRLTSYHNLYFLINLMNKVRQAILDDNLLEFRQDFMERYGYGKNGRNF

SEQ ID NO: 61311 - protein, 380 aa, Streptococcus mitis
  misc_feature (1)..(380): tr|D3H6J2|D3H6J2_STRM6 Queuine tRNA-ribosyltransferase OS=Streptococcus mitis (strain B6) OX=365659 GN=tgt PE= 3 SV=1
MSDSPIKYRLIKKEKHTGARLGEIITPHGTFPTPMFMPVGTQATVKTQSPEELKEMGSGIILSNTYHLWLRPGDELIARAGGLHKFMNWDQPILTDSGGFQVYSLADSRNITEEGVTFKNHLNGSKMFLSPEKAISIQNNLGSDIMMSFDECPQFYQPYDYVKKSIERTSRWAERGLKAHRRPHDQGLFGIVQGAGFEDLRRQSAHDLVSMDFPGYSIGGLAVGETHEEMNAVLDFTTQLLPETKPRYLMGVGAPDSLIDGVIRGVDMFDCVLPTRIARNGTCMTSQGRLVVKNAQFAEDFTPLDPECDCYTCKNYTRAYLRHLLKADETFGIRLTSYHNLYFLLNLMKQVRQAIMDDNLLEFREYFVEKYGYNKSGRNF

SEQ ID NO: 61312 - protein, 380 aa, Streptococcus mitis
  misc_feature (1)..(380): tr|A0A1X1KBP1|A0A1X1KBP1_STRMT Queuine tRNA-ribosyltran sferase OS=Streptococcus mitis OX=28037 GN=tgt PE=3 SV= 1
MSDSPIKYRLIKKEKHTGARLGEIITPHGTFPTPMFMPVGTQATVKTQSPEELKEMGSGIILSNTYHLWLRPGDELIARAGGLHKFMNWDQPILTDSGGFQVYSLADSRNITEEGVTFKNHLNGSKMFLSPEKAISIQNNLGSDIMMSFDECPQFYQPYDYVKKSIERTSRWAERGLKAHRRPHDQGLFGIVQGAGFEDLRRQSAHDLVSMAFPGYSIGGLAVGETHEEMNAVLDFTTQLLPENKPRYLMGVGAPDSLIDGVIRGVDMFDCVLPTRIARNGTCMTSQGRLVVKNAQFAEDFTPLDPECDCYTCKNYTRAYLRHLLKADETFGIRLTSYHNLYFLLNLMKQVRQAIMDDNLLEFREYFVEKYGYNKSGRNF

SEQ ID NO: 61313 - protein, 380 aa, Streptococcus mutans
  misc_feature (1)..(380): sp|Q8DVZ3|TGT_STRMU Queuine tRNA-ribosyltransferase OS= Streptococcus mutans serotype c (strain ATCC 700610 / U A159) OX=210007 GN=tgt PE=3 SV=1
MTHSPIQYRLIKKEKHTGARLGEIITPHGVFPTPMFMPVGTQATVKTQSPEELKEMKAGIILANTYHLWLRPGDDLVARAGGLHKFMNWDQPILTDSGGFQVYSLAEKRNITEEGVTFKNHLNGARMFLTPEKAISIQNNLGSDIMMSFDECPQFYQPYDYVKASIERTSRWAERGLKAHRRPQDQGLFGIVQGAGFEDLRRQSTADLVSMDFPGYSIGGLAVGESHEEMNAVLDFTTPLLPENKPRYLMGVGAPDSLIDGVIRGVDMFDCVLPTRIARNGTCMTSRGRLVVKNAQYAEDFTPLDHDCDCYTCQNYTRAYIRHLIKADETFGLRLTSYHNLYFLLNLMEKIRQAIMDDNILEFREDFIEKYGYGRSERNF

SEQ ID NO: 61314 - protein, 380 aa, Streptococcus mutans
  misc_feature (1)..(380): tr|A0A2J9QH27|A0A2J9QH27_STRMG Queuine tRNA-ribosyltran sferase OS=Streptococcus mutans OX=1309 GN=tgt PE=3 SV= 1
MTHSPIQYRLIKKEKHTGARLGEIITPHGVFPTPMFMPVGTQATVKTQSPEELKEMKAGIILANTYHLWLRLGDDLVARAGGLHKFMNWDQPILTDSGGFQVYSLAEKRNITEEGVTFKNHLNGARMFLTPEKAISIQNNLGSDIMMSFDECPQFYQPYDYVKASIERTSRWAERGLKAHRRPQDQGLFGIVQGAGFEDLRRQSTADLVSMDFPGYSIGGLAVGESHEEMNAVLDFTTPLLPENKPRYLMGVGAPDSLIDGVIRGVDMFDCVLPTRIARNGTCMTSRGRLVVKNAQYAEDFTPLDHDCDCYTCQNYTRAYIRHLIKADETFGLRLTSYHNLYFLLNLMEKIRQAIMDDNILEFREDFIEKYGYGRSERNF

SEQ ID NO: 61315 - protein, 380 aa, Streptococcus oralis
  misc_feature (1)..(380): tr|A0A139PTM2|A0A139PTM2_STROR Queuine tRNA-ribosyltran sferase OS=Streptococcus oralis OX=1303 GN=tgt PE=3 SV= 1
MSDSPIKYRLIKKEKHTGARLGEIITPHGTFPTPMFMPVGTQATVKTQSPEELKEMGSGIILSNTYHLWLRPGDELIARAGGLHKFMNWDQPILTDSGGFQVYSLADSRNITEEGVTFKNHLNGSKMFLSPEKAISIQNNLGSDIMMSFDECPQFYQPYDYVKKSIERTSRWAERGLKAHRRPHDQGLFGIVQGAGFEELRRQSAHDLVSMDFPGYSIGGLAVGETHEEMNAVLDFTTQLLPENKPRYLMGVGAPDSLIDGVIRGVDMFDCVLPTRIARNGTCMTSQGRLVVKNAQFAEDFTPLDPECDCYTCKNYTRAYLRHLLKADETFGIRLTSYHNLYFLLNLMKQVRQAIMDDNLLEFREYFVEKYGYNKSGRNF

SEQ ID NO: 61316 - protein, 380 aa, Streptococcus oralis
  misc_feature (1)..(380): tr|A0A1X1HAX6|A0A1X1HAX6_STROR Queuine tRNA-ribosyltran sferase OS=Streptococcus oralis subsp. oralis OX=189191 4 GN=tgt PE=3 SV=1
MSDSPIKYRLIKKEKHTGARLGEIITPHGTFPTPMFMPVGTQATVKTQSPEELKEMGSGIILSNTYHLWLRPGDELIARAGGLHKFMNWDQPILTDSGGFQVYSLADSRNITEEGVTFKNHLNGSKMFLSPEKAISIQNNLGSDIMMSFDECPQFYQPYDYVKKSIERTSRWAERGLKAHRRPHDQGLFGIVQGAGFEDLRRQSAHDLVSMDFPGYSIGGLAVGETHEEMNAVLDFTTQLLPENKPRYLMGVGAPDSLIDGVIRGVDMFDCVLPTRIARNGTCMTSRGRLVVKNAQFAEDFTPLDPECDCYTCKNYTRAYLRHLLKADETFGIRLTSYHNLYFLLNLMKQVRQAIMDDNLLEFREYFVEKYGYNKSGRNF

SEQ ID NO: 61317 - protein, 380 aa, Streptococcus pantholopis
  misc_feature (1)..(380): tr|A0A172Q943|A0A172Q943_9STRE Queuine tRNA-ribosyltran sferase OS=Streptococcus pantholopis OX=1811193 GN=tgt PE=3 SV=1
MSVQPIQYRLIKKEKHTGARLGEIITPHGTFPTPMFMPVGTQATVKTQSPEELKEMGAGIILANTYHLWLRPGDDLIAKAGGLHQFMNWDQPILTDSGGFQVYSLADSRNITEKGVTFKNHLNGAKMFLSPEKAMAIQNHLGSDIMMSFDECPQFYQPYDYVKQSIERTSRWAERGLKAHSRPQEQGLFGIVQGAGFEDLRRQSAKDLISLDFPGYAVGGLAVGESHEEMNAVLDFTTPLLPENKPRYLMGVGASDSLIDGVIRGIDMFDCVLPTRIARNGTCMTSQGRLVVKNAQYAEDFGPLDPNCDCYTCQNYSRAYIRHLHKADETFGLRLTSYHNLYFLVQLMKKVRQAIIDDSLLEFRADFMEKYGYNRSKRNF

SEQ ID NO: 61318 - protein, 380 aa, Streptococcus parasanguinis
  misc_feature (1)..(380): tr|A0A414CEV5|A0A414CEV5_STRPA Queuine tRNA-ribosyltran sferase OS=Streptococcus parasanguinis OX=1318 GN=tgt P E=3 SV=1
MTDSPIQYRLIKKEKHTGARLGEIITPHGTFPTPMFMPVGTQATVKTQSPEELKEMGSGIILANTYHLWLRPGDDLVAKAGGLHQFMNWDQPILTDSGGFQVYSLADTRNITEEGVTFKNHLNGSKMFLSPEKAISIQNNLGSDIMMSFDECPQFYQPYDYVKKSIERTSRWAERGLKAHRRPHDQGLFGIVQGAGFEDLRRQSAQDLVGMDFPGYSIGGLAVGESHEEMNAVLDFTTPLLPENKPRYLMGVGAPDSLIDGVIRGVDMFDCVLPTRIARNGTCMTSQGRLVVKNAQFAEDFTPLDPECDCYTCKNYTRAYLRHLLKADETFGIRLTSYHNLYFLINLMKQVRKAIMDDNLLEFREHFVEKYGYNKSGRNF

SEQ ID NO: 61319 - protein, 380 aa, Streptococcus parasanguinis
  misc_feature (1)..(380): tr|A0A4V1Y7X8|A0A4V1Y7X8_STRPA Queuine tRNA-ribosyltran sferase OS=Streptococcus parasanguinis OX=1318 GN=tgt P E=3 SV=1
MTDSPIQYRLIKKEKHTGARLGEIITPHGTFPTPMFMPVGTQATVKTQSPEELKEMGSGIILANTYHLWLRPGDDLVAKAGGLHQFMNWDQSILTDSGGFQVYSLADTRNITEEGVTFKNHLNGSKMFLSPEKAISIQNNLGSDIMMSFDECPQFYQPYDYVKKSIERTSRWAERGLKAHRRPHDQGLFGIVQGAGFEDLRRQSAQDLVSMDFPGYSIGGLAVGESHEEMNAVLDFTTPLLPENKPRYLMGVGAPDSLIDGVIRGVDMFDCVLPTRIARNGTCMTSQGRLVVKNAQFAEDFTPLDPECDCYTCKNYTRAYLRHLLKADETFGIRLTSYHNLYFLINLMKQVRQAIMDDNLLEFREHFVEKYGYNKSGRNF

SEQ ID NO: 61320 - protein, 380 aa, Streptococcus parasuis
  misc_feature (1)..(380): tr|A0A4Q8L3B8|A0A4Q8L3B8_9STRE Queuine tRNA-ribosyltran sferase OS=Streptococcus parasuis OX=1501662 GN=tgt PE= 3 SV=1
MTDVPIKYRLIKKEKHTGARLGEIITPHGTFPTPMFMPVGTQATVKTMSPEELKEMGSGIILSNTYHLWLRPGDDLVARAGGLHKFMNWDQPILTDSGGFQVYSLADSRNITEEGVTFKNHLNGSKMFLSPEKAISIQNNLGSDIMMSFDECPQFYQPYDYVKKSIERTSRWAERGLKAHLRPHDQGLFGIVQGAGFEDLRRQSAHDLVSMDFPGYSIGGLAVGETHDEMNAVLDFTTPLLPENKPRYLMGVGAPDSLIDGVIRGVDMFDCVLPTRIARNGTCMTSQGRLVVKNAQFAEDFTPLDPECDCYTCKNYTRAYLRHLLKADETFGIRLTSYHNLFFLINLMKNVRQAIMDDNLLEFRQDFMEKYGYGKNGRNF

SEQ ID NO: 61321 - protein, 380 aa, Streptococcus parauberis
  misc_feature (1)..(380): tr|A0A2I8AHT3|A0A2I8AHT3_9STRE Queuine tRNA-ribosyltran sferase OS=Streptococcus parauberis OX=1348 GN=tgt PE=3 SV=1
MTDYPIKYRLIKKDKRTGARLGEIITPHGTFPTPMFMPVGTQATVKTQSPEELKQMSSGIILSNTYHLWLRPGDELIARAGGLHKFMNWDQPILTDSGGFQVYSLADSRNITEEGVTFKNHLNGSKMFLSPEKAISIQNNLGSDIMMSFDECPQFYQPYDYVKKSIERTSRWAERGLNAHRRPHDQGLFGIVQGAGFEDLRRQSAADLVSMDFPGYSIGGLAVGETHDEMNAVLDFTTQLLPENKPRYLMGVGAPDSLIDGVIRGVDMFDCVLPTRIARNGTCMTSEGRLVVKNAKFAEDFTPLDHDCDCYTCQNYTRAYIRHLLKADETFGIRLTSYHNLYFLVNLMKKVRQAIMDDNLLEFREDFLERYGYNKSSRNF

SEQ ID NO: 61322 - protein, 392 aa, Streptococcus parauberis
  misc_feature (1)..(392): tr|F1Z249|F1Z249_9STRE Queuine tRNA-ribosyltransferase OS=Streptococcus parauberis NCFD 2020 OX=873447 GN=tgt PE=3 SV=1
MLKTVYLESEETMTDYPIKYRLIKKDKRTGARLGEIITPHGTFPTPMFMPVGTQATVKTQSPEELKQMGSGIILSNTYHLWLRPGDELIARAGGLHKFMNWDQPILTDSGGFQVYSLADSRNITEEGVTFKNHLNGSKMFLSPEKAISIQNNLGSDIMMSFDECPQFYQPYDYVKKSIERTSRWAERGLNAHRRPHDQGLFGIVQGAGFEDLRRQSAADLVSMDFPGYSIGGLAVGETHDEMNAVLDFTTQLLPENKPRYLMGVGAPDSLIDGVIRGVDMFDCVLPTRIARNGTCMTSEGRLVVKNAKFAEDFTPLDHDCDCYTCQNYTRAYIRHLLKADETFGIRLTSYHNLYFLVNLMKKVRQAIMDDNLLEFREDFLERYGYNKSSRNF

SEQ ID NO: 61323 - protein, 380 aa, Streptococcus pasteurianus; identical to SEQ ID NO: 61288
  misc_feature (1)..(380): tr|F5X3N4|F5X3N4_STRPX Queuine tRNA-ribosyltransferase OS=Streptococcus pasteurianus (strain ATCC 43144 / JCM 5346 / CDC 1723-81) OX=981540 GN=tgt PE=3 SV=1

SEQ ID NO: 61324 - protein, 380 aa, Streptococcus pasteurianus; identical to SEQ ID NO: 61288
  misc_feature (1)..(380): tr|A0A135YVA3|A0A135YVA3_9STRE Queuine tRNA-ribosyltran sferase OS=Streptococcus pasteurianus OX=197614 GN=tgt PE=3 SV=1

SEQ ID NO: 61325 - protein, 380 aa, Streptococcus penaeicida
  misc_feature (1)..(380): tr|A0A2N8LAH3|A0A2N8LAH3_9STRE Queuine tRNA-ribosyltran sferase OS=Streptococcus penaeicida OX=1765960 GN=tgt P E=3 SV=1
MTDHPIKYRLIKKEKHTGARLGEIITPHGTFPTPMFMPVGTQATVKTQSPEELKSMGSGIILSNTYHLWLRPGDELIARAGGLHKFMNWDQPILTDSGGFQVYSLADSRNITEEGVTFKNHLNGSKMFLSPEKAISIQNNLGSDIMMSFDECPQFYQPYDYVKNSIERTSRWAERGLNAHRRPHDQGLFGIVQGAGFEDLRRQSAADLVGMDFAGYSVGGLAVGETHEEMNAVLDFTTPLLPENKPRYLMGVGAPDSLIDGVIRGIDMFDCVLPTRIARNGTCMTSEGRLVVKNAKFAEDFTPLDHECDCYTCQNYTRAYIRHLLKADETFGIRLTSYHNLYFLVNLMKKVRQAIMDDNLLEFREDFLERYGYKTSSRNF

SEQ ID NO: 61326 - protein, 380 aa, Streptococcus peroris
  misc_feature (1)..(380): tr|E8KDB2|E8KDB2_9STRE Queuine tRNA-ribosyltransferase OS=Streptococcus peroris ATCC 700780 OX=888746 GN=tgt P E=3 SV=1
MSDSPIKYRLIKKEKHTGARLGEIITPHGTFPTPMFMPVGTQATVKTQSPEELKEMGSGIILSNTYHLWLRPGDELIARAGGLHKFMNWDQPILTDSGGFQVYSLADSRNITEEGVTFKNHLNGSKMFLSPEKAISIQNNLGSDIMMSFDECPQFYQPYDYVKKSIERTSRWAERGLKAHRRPHDQGLFGIVQGAGFEDLRRQSAHDLVSMDFPGYSIGGLAVGETHEEMNAVLDFTTQLLPENKPRYLMGVGAPDSLIDGVIRGVDMFDCVLPTRIARNGTCMTSQGRLVVKNAQFAEDFTPLDPECDCYTCKNYTRAYLRHLLKADETFGIRLTSYHNLYFLLNLMKQVRQAIMDDNLLEFREHFVEKYGYNKSGRNF

SEQ ID NO: 61327 - protein, 380 aa, Streptococcus pharyngis
  misc_feature (1)..(380): tr|A0A5C5SBL0|A0A5C5SBL0_9STRE Queuine tRNA-ribosyltran sferase OS=Streptococcus pharyngis OX=1562651 GN=tgt PE =3 SV=1
MTEHPIQYRLIKKEKHTGARLGEIVTPHGTFPTPMFMPVGTQATVKTQSPEELKEMGSGIILSNTYHLWLRPGDELVAQAGGLHKFMNWDQAILTDSGGFQVYSLADSRQITEEGVTFKNHLNGAKMFLSPEKAISIQNNLGSDIMMSFDECPQFYQPYDYVKKSIERTSRWAERGLKAHRRPQDQGLFGIVQGAGFEDLRRQSAQDLVSMDFSGYSIGGLAVGETHEEMNAVLDFTVPLLPENKPRYLMGVGAPDSLIDGVIRGVDMFDCVLPTRIARNGTCMTSQGRLVVKNAQFTEDFSPLDPNCDCYTCQNYTRAYIRHLLKADETFGIRLTSYHNLYFLVNLMKQVRQAILDDNLLDFRADFVERYGYNKSKRNF

SEQ ID NO: 61328 - protein, 380 aa, Streptococcus phocae
  misc_feature (1)..(380): tr|A0A0P6S713|A0A0P6S713_9STRE Queuine tRNA-ribosyltran sferase OS=Streptococcus phocae OX=119224 GN=tgt PE=3 S V=1
MTDYPITYRLIKKEKHTGARLGEIITPHGTFPTPMFMPVGTQATVKTQSPEELKQMGSGIILSNTYHLWLRPGDELIARAGGLHKFMNWDQPILTDSGGFQVYSLADSRNITEEGVTFKNHLNGSKMFLSPEKAISIQNNLGSDIMMSFDECPQFYQPYDYVKKSIERTSRWAERGLNAHQRPHDQGLFGIVQGAGFKDLRRQSASDLVGMDFPGYSVGGLAVGETHEEMNAVLDFTTPLLPENKPRYLMGVGAPDSLIDGVIRGIDMFDCVLPTRIARNGTCMTSEGRLVIKNAKFAEDFTPLDHNCDCYTCQNYTRAYIRHLLKADETFGIRLTSYHNLYFLINLMKQVRQAIMDDQLLEFRQDFLERYGYNRSTRNF

SEQ ID NO: 61329 - protein, 380 aa, Streptococcus pluranimalium
  misc_feature (1)..(380): tr|A0A345VMS3|A0A345VMS3_9STRE Queuine tRNA-ribosyltran sferase OS=Streptococcus pluranimalium OX=82348 GN=tgt PE=3 SV=1
MTEHAIKYRLIKTEKHTGARLGEIETPHGTFSTPMFMPVGTQATVKTQSPEELKQMGSGIILSNTYHLWLRPGDELIARAGGLHKFMNWDQAILTDSGGFQVYSLADSRNITEEGVTFKNHLNGSKMFLSPEKAISIQNNLGSDIMMSFDECPQFYQPYDYVKNSIERTSRWAERGLKAHRRPHDQGLFGIVQGAGFEDLRRQSAQDLVSMDFAGYSIGGLAVGETHEEMNAVLDFTTPMLPENKPRYLMGVGAPDSLIDAVIRGVDMFDCVLPTRIARNGTCMTSEGRLVVKNAKYAEDFTPLDHDCDCYTCQNYTRAYLRHLLKADETFGMRLTSYHNLYFLVNLMKKVRQAIVDDNLLEFREDFVERYGYNHSKRNF

SEQ ID NO: 61330 - protein, 380 aa, Streptococcus pluranimalium
  misc_feature (1)..(380): tr|A0A2L0D680|A0A2L0D680_9STRE Queuine tRNA-ribosyltran sferase OS=Streptococcus pluranimalium OX=82348 GN=tgt PE=3 SV=1
MTEHAIKYRLIKTEKHTGARLGEIETPHGTFSTPMFMPVGTQATVKTQSPEELKQMGSGIILSNTYHLWLRPGDELIARAGGLHKFMNWDQAILTDSGGFQVYSLADSRNITEEGVTFKNHLNGSKMFLSPEKAISIQNNLGSDIMMSFDECPQFYQPYDYVKNSIERTSRWAERGLKAHRRPQDQGLFGIVQGAGFEDLRRQSAQDLVSMDFAGYSIGGLAVGETHEEMNAVLDFTTPMLPENKPRYLMGVGAPDSLIDAVIRGVDMFDCVLPTRIARNGTCMTSEGRLVVKNAKYAEDFTPLDHDCDCYTCQNYTRAYLRHLLKADETFGMRLTSYHNLYFLVNLMKKVRQAIVDDNLLEFREDFVERYGYNHSKRNF

SEQ ID NO: 61331 - protein, 380 aa, Streptococcus pneumoniae
  misc_feature (1)..(380): sp|P66908|TGT_STRR6 Queuine tRNA-ribosyltransferase OS= Streptococcus pneumoniae (strain ATCC BAA-255 / R6) OX= 171101 GN=tgt PE=3 SV=1
MSDSPIKYRLIKKEKHTGARLGEIITPHGTFPTPMFMPVGTQATVKTQSPEELKEMGSGIILSNTYHLWLRPGDELIARAGGLHKFMNWDQPILTDSGGFQVYSLADSRNITEEGVTFKNHLNGSKMFLSPEKAISIQNNLGSDIMMSFDECPQFYQPYDYVKKSIERTSRWAERGLKAHRRPHDQGLFGIVQGAGFEDLRRQSAHDLVSMDFSGYSIGGLAVGETHEEMNAVLDFTTQLLPENKPRYLMGVGAPDSLIDGVIRGVDMFDCVLPTRIARNGTCMTSQGRLVVKNAQFAEDFTPLDPECDCYTCNNYTRAYLRHLLKADETFGIRLTSYHNLYFLLNLMKQVRQAIMDDNLLEFREYFVEKYGYNKSGRNF

SEQ ID NO: 61332 - protein, 380 aa, Streptococcus pneumoniae; identical to SEQ ID NO: 61331
  misc_feature (1)..(380): sp|B5E2X9|TGT_STRP4 Queuine tRNA-ribosyltransferase OS= Streptococcus pneumoniae serotype 19F (strain G54) OX=5 12566 GN=tgt PE=3 SV=1

SEQ ID NO: 61333 - protein, 380 aa, Streptococcus porcinus
  misc_feature (1)..(380): tr|A0A4U9YFB8|A0A4U9YFB8_STRPO Queuine tRNA-ribosyltran sferase OS=Streptococcus porcinus OX=1340 GN=tgt PE=3 S V=1
MTDYPIKYRLIKKEKHTGARLGEIITPHGTFPTPMFMPVGTQATVKTQSPEELKQMGSGIILSNTYHLWLRPGDELIAKAGGLHKFMNWDQPILTDSGGFQVYSLADSRNITEEGVTFKNHLNGSKMFLSPEKAISIQNNLGSDIMMSFDECPQFYQPYDYVKKSIERTSRWAERGLKAHRRPHDQGLFGIVQGAGFEDLRRQSAADLVAMDFPGYSVGGLAVGESHEEMNAVLDFTTPLLPENKPRYLMGVGAPDSLIDGVIRGIDMFDCVLPTRIARNGTCMTSQGRLVVKNAKFAEDFTPLDHDCDCYTCQNYSRAYIRHLLKADETFGIRLTSYHNLYFLVNLMKKVRQAIIDDNLLDFREDFLERYGYNASSRNF

SEQ ID NO: 61334 - protein, 380 aa, Streptococcus porcinus
  misc_feature (1)..(380): tr|A0A4V0HBP1|A0A4V0HBP1_STRPO Queuine tRNA-ribosyltran sferase OS=Streptococcus porcinus OX=1340 GN=tgt PE=3 S V=1
MTDYPIKYRLIKKEKHTGARLGEIITPHGTFPTPMFMPVGTQATVKTQSPEELKQMGSGIILSNTYHLWLRPGDELIAKAGGLHKFMNWDQPILTDSGGFQVYSLADSRNITEEGVTFKNHLNGSKMFLSPEKAISIQNNLGSDIMMSFDECPQFYQPYDYVKKSIERTSRWAERGLKAHRRPHDQGLFGIVQGAGFEDLRRQSAADLVAMDFPGYSVGGLAVGESHEEMNAVLDFTTPLLPENKPRYLMGVGAPDSLIDGVIRGIDMFDCVLPTRIARNGTCMTSQGRLVVKNAKFAEDFTPLDHDCDCYTCQNYSRAYIRHLLKADETFGIRLTSYHNLYFLVNLMRKVRQAIMDDNLLEFREDFLERYGYNVSNRNF

SEQ ID NO: 61335 - protein, 380 aa, Streptococcus pseudopneumoniae
  misc_feature (1)..(380): tr|G0ID32|G0ID32_STRES Queuine tRNA-ribosyltransferase OS=Streptococcus pseudopneumoniae (strain IS7493) OX=10 54460 GN=tgt PE=3 SV=1
MSDSPIKYRLIKKEKHTGARLGEIITPHSTFPTPMFMPVGTQATVKTQSPEELKEMGSGIILSNTYHLWLRPGDELIARAGGLHKFMNWDQPILTDSGGFQVYSLADSRNITEEGVTFKNHLNGSKMFLSPEKAISIQNNLGSDIMMSFDECPQFYQPYDYVKKSIERTSRWAERGLKAHRRPHDQGLFGIVQGAGFEDLRRQSAHDLVSMDFPGYSIGGLAVGETHEEMNAVLDFTTQLLPENKPRYLMGVGAPDSLIDGVIRGVDMFDCVLPTRIARNGTCMTSQGRLVVKNAQFAEDFTPLDPECDCYTCKNYTRAYLRHLLKADETFGIRLTSYHNLYFLLNLMKQVRQAIMDDNLLEFREYFVEKYGYNKSGRNF

SEQ ID NO: 61336 - protein, 380 aa, Streptococcus pseudopneumoniae
  misc_feature (1)..(380): tr|A0A3A4SDE1|A0A3A4SDE1_9STRE Queuine tRNA-ribosyltran sferase OS=Streptococcus pseudopneumoniae OX=257758 GN= tgt PE=3 SV=1
MSDSPIKYRLIKKEKHTGARLGEIITPHGTFPTPMFMPVGTQATVKTQSPEELKEMGSGIILSNTYHLWLRPGDELIARAGGLHKFMNWDQPILTDSGGFQVYSLADSRNITEEGVTFKNHLNGSKMFLSPEKAISIQNNLGSDIMMSFDECPQFYQPYDYVKKSIERTSRWAERGLKAHRRPHDQGLFGIVQGAGFEDLRRQSAHDLVSMDFPGYSIGGLAVGETHEEMNAVLDFTTQLLPENKPRYLMGVGAPDSLIDGVIRGIDMFDCVLPTRIARNGTCMTSQGRLVVKNTQFAEDFTPLDPECDCYTCKNYTRAYLRHLLKADETFGIRLTSYHNLYFLLNLMKQVRQAIMDDNLLEFREYFVEKYGYNKSGRNF

SEQ ID NO: 61337 - protein, 380 aa, Streptococcus pseudoporcinus; identical to SEQ ID NO: 61333
  misc_feature (1)..(380): tr|G5K791|G5K791_9STRE Queuine tRNA-ribosyltransferase OS=Streptococcus pseudoporcinus LQ 940-04 OX=875093 GN= tgt PE=3 SV=1

SEQ ID NO: 61338 - protein, 380 aa, Streptococcus pyogenes
  misc_feature (1)..(380): sp|Q9A1L6|TGT_STRP1 Queuine tRNA-ribosyltransferase OS= Streptococcus pyogenes serotype M1 OX=301447 GN=tgt PE= 3 SV=1
MTDYPIKYRLIKAEKHTGARLGEIITPHGTFPTPMFMPVGTQATVKTQSPEELKAIGSGIILSNTYHLWLRPGDELIARSGGLHKFMNWDQPILTDSGGFQVYSLADSRNITEEGVTFKNHLNGSKMFLSPEKAISIQNNLGSDIMMSFDECPQFYQPYDYVKKSIERTSRWAERGLKAHRRPHDQGLFGIVQGAGFEDLRRQSAADLVAMDFPGYSIGGLAVGESHEEMNAVLDFTTPLLPENKPRYLMGVGAPDSLIDGVIRGVDMFDCVLPTRIARNGTCMTSEGRLVIKNAKFAEDFTPLDHDCDCYTCQNYSRAYIRHLLKADETFGIRLTSYHNLYFLVNLMKKVRQAIMDDNLLEFRQDFLERYGYNKSNRNF

SEQ ID NO: 61339 - protein, 380 aa, Streptococcus pyogenes
  misc_feature (1)..(380): sp|Q48VG9|TGT_STRPM Queuine tRNA-ribosyltransferase OS= Streptococcus pyogenes serotype M28 (strain MGAS6180) O X=319701 GN=tgt PE=3 SV=1
MTDYPIKYRLIKTEKHTGARLGEIITPHGTFPTPMFMPVGTQATVKTQSPEELKAIGSGIILSNTYHLWLRPGDELIARSGGLHKFMNWDQPILTDSGGFQVYSLADSRNITEEGVTFKNHLNGSKMFLSPEKAISIQNNLGSDIMMSFDECPQFYQPYDYVKKSIERTSRWAERGLKAHRRPHDQGLFGIVQGAGFEDLRRQSAADLVAMDFPGYSIGGLAVGESHEEMNAVLDFTTPLLPENKPRYLMGVGAPDSLIDGVIRGVDMFDCVLPTRIARNGTCMTSEGRLVIKNAKFAEDFTPLDHDCDCYTCQNYSRAYIRHLLKADETFGIRLTSYHNLYFLVNLMKKVRQAIMDDNLLEFRQDFLERYGYNKSNRNF

SEQ ID NO: 61340 - protein, 380 aa, Streptococcus ratti
  misc_feature (1)..(380): tr|J3AKV8|J3AKV8_STRRT Queuine tRNA-ribosyltransferase OS=Streptococcus ratti FA-1 = DSM 20564 OX=699248 GN=tg t PE=3 SV=1
MTHSPIQYRLIKKEKHTGARLGEIITPHGTFPTPMFMPVGTQATVKTQSPEELKEMGSGVILANTYHLWLRPGDDLIARAGGLHQFMNWDQPILTDSGGFQVYSLADSRNITEEGVTFKNHLNGAKMFLSPEKAISIQNNLGSDIMMSFDECPQFYQPYDYVKNSIERTSRWAERGLKAHHRPQDQGLFGIVQGAGFEDLRRQSAADLVSMDFPGYSIGGLAVGESHEEMNAVLDFTTPLLPENKPRYLMGVGAPDSLIDGVIRGVDMFDCVLPTRIARNGTCMTSQGRLVVKNAQYAEDFTPLDHDCDCYTCQNYTRAYLRHLLKADETFGLRLTSYHNLYFLLNLMRKVHQAIMDDNLLEFRADFIERYGYNKSKRNF

SEQ ID NO: 61341 - protein, 380 aa, Streptococcus ratti; identical to SEQ ID NO: 61340
  misc_feature (1)..(380): tr|A0A5J6NQL8|A0A5J6NQL8_STRRT tRNA guanosine(34) trans glycosylase Tgt OS=Streptococcus ratti OX=1341 GN=tgt P E=4 SV=1

SEQ ID NO: 61342 - protein, 380 aa, Streptococcus rubneri
  misc_feature (1)..(380): tr|A0A4Z1DRH5|A0A4Z1DRH5_9STRE Queuine tRNA-ribosyltran sferase OS=Streptococcus rubneri OX=1234680 GN=tgt PE=3 SV=1
MTDSPIQYRLIKKEKHTGARLGEIITPHGTFPTPMFMPVGTQATVKTQSPEELKEMGSGIILANTYHLWLRPGDDLVAKAGGLHQFMNWDQPILTDSGGFQVYSLADTRNITEEGVTFKNHLNGSKMFLSPEKAISIQNNLGSDIMMSFDECPQFYQPYDYVKKSIERTSRWAERGLKAHRRPHDQGLFGIVQGAGFEDLRRQSARDLVSMDFPGYSIGGLAVGESHEEMNAVLDFTTPLLPENKPRYLMGVGAPDSLIDGVIRGVDMFDCVLPTRIARNGTCMTSQGRLVVKNAQFAEDFTPLDHECDCYTCKNYTRAYLRHLLKADETFGIRLTSYHNLYFLINLMKQVRQAIMDDNLLEFREHFVEKYGYNKSGRNF

SEQ ID NO: 61343 - protein, 380 aa, Streptococcus ruminantium
  misc_feature (1)..(380): tr|A0A2Z5TXT3|A0A2Z5TXT3_9STRE Queuine tRNA-ribosyltran sferase OS=Streptococcus ruminantium OX=1917441 GN=tgt PE=3 SV=1
MTDVPIKYRLIKKEKHTGARLGEIITPHGTFPTPMFMPVGTQATVKTMSPEELKEMGSGIILSNTYHLWLRPGDELVARAGGLHTFMNWDQPILTDSGGFQVYSLADSRNISEEGVTFKNHLNGSKMFLSPEKAISIQNNLGSDIMMSFDECPQFYQPYDYVKKSIERTSRWAERGLKAHRRPHDQGLFGIVQGAGFEDLRRQSAHDLVSMDFPGYSIGGLAVGETHAEMNAVLDFTTPLLPENKPRYLMGVGAPDSLIDGVIRGVDMFDCVLPTRIARNGTCMTSRGRLVVKNAQFAEDFTPLDPECDCYTCRNYTRAYLRHLLKADETFGIRLTSYHNLYFLINLMKNVRQAIMDDNLLEFRQDFMDKYGYGKNGRNF

SEQ ID NO: 61344 - protein, 380 aa, Streptococcus salivarius
  misc_feature (1)..(380): tr|J7TUV8|J7TUV8_STRSL Queuine tRNA-ribosyltransferase OS=Streptococcus salivarius K12 OX=1200793 GN=tgt PE=3 SV=1
MTDFPIKYRLIKKEKHTGARLGEIITPHGTFPTPMFMPVGTQATVKTQSPEELKQMGSGIILANTYHLWLRPGDELVAKAGGLHKFMNWDQAILTDSGGFQVYSLAEKRNISEEGVTFKNHLNGSKMFLSPEKAISIQNNLGSDIMMSFDECPQFYQPYDYVKNSIERTSRWAERGLKAHRRPHDQGLFGIVQGAGFEDLRRQSAQDLVSMDFPGYSIGGLAVGETHEEMNAVLDFTVPLLPENKPRYLMGVGAPDSLIDGVIRGVDMYDCVLPTRIARNGTCMTSQGRLVVKNASYAEDFSPIDPECDCYTCKNYTRAYVRHLLKADETFGIRLTSYHNLYFLVNLMAKVREAIIDDNLLEFRQDFIEKYGYNASKRNF

SEQ ID NO: 61345 - protein, 380 aa, Streptococcus salivarius
  misc_feature (1)..(380): tr|A0A074JI26|A0A074JI26_STRSL Queuine tRNA-ribosyltran sferase OS=Streptococcus salivarius OX=1304 GN=tgt PE=3 SV=1
MTDFPIKYRLIKKEKHTGARLGEIITPHGTFPTPMFMPVGTQATVKTQSPEELKQMGSGIILANTYHLWLRPGDELVAKAGGLHKFMNWDQAILTDSGGFQVYSLAEKRNISEEGVTFKNHLNGSKMFLSPEKAISIQNNLGSDIMMSFDECPQFYQPYDYVKNSIERTSRWAERGLKAHRRPHDQGLFGIVQGAGFEDLRRQSAQDLVSMDFPGYSIGGLAVGETHEEMNAVLDFTVPLLPENKPRYLMGVGAPDSLIDGVIRGVDMYDCVLPTRIARNGTCMTSQGRLVVKNAAYAEDFSPIDPECDCYTCKNYTRAYVRHLLKADETFGIRLTSYHNLYFLVNLMAKVRQAIIDDNLLEFRQDFIEKYGYNASKRNF

SEQ ID NO: 61346 - protein, 380 aa, Streptococcus sanguinis
  misc_feature (1)..(380): sp|A3CK60|TGT_STRSV Queuine tRNA-ribosyltransferase OS= Streptococcus sanguinis (strain SK36) OX=388919 GN=tgt PE=3 SV=1
MSTSPIQYRLIKKEKHTGARLGEIITPHGTFPTPMFMPVGTQATVKTQSPEELKQMGSGIILANTYHLWLRPGDELIARAGGLHTFMNWDQPILTDSGGFQVYSLADSRNITEEGVTFKNHLNGSKMFLSPEKAISIQNNLGSDIMMSFDECPQFYQPYDYVKKSIERTSRWAERGLKAHSRPHDQGLFGIVQGAGFEDLRRQSAQDLVSMDFPGYSIGGLAVGESHEEMNAVLDFTTPMLPENKPRYLMGVGAPDSLIDGVIRGVDMFDCVLPTRIARNGTCMTSEGRLVVKNAQFEEDFTPLDHDCDCYTCSNYTRAYIRHLLKADETFGIRLTSYHNLYFLVNLMKKVRQAIMDDNLLEFREDFIERYGYNKSSRNF

SEQ ID NO: 61347 - protein, 380 aa, Streptococcus sanguinis
  misc_feature (1)..(380): tr|F3UPA1|F3UPA1_STRSA Queuine tRNA-ribosyltransferase OS=Streptococcus sanguinis SK355 OX=888816 GN=tgt PE=3 SV=1
MSTSPIQYRLIKKEKHTGARLGEIITPHGTFPTPMFMPVGTQATVKTQSPEELKQMGSGIILSNTYHLWLRPGDELIARAGGLHKFMNWDQPILTDSGGFQVYSLADSRNITEEGVTFKNHLNGSKMFLSPEKAISIQNNLGSDIMMSFDECPQFYQPYDYVKKSIERTSRWAERGLKAHSRPHDQGLFGIVQGAGFEDLRRQSAQDLVSMDFPGYSIGGLAVGESHEEMNAVLDFTTPMLPESKPRYLMGVGAPDSLIDGVIRGVDMFDCVLPTRIARNGTCMTSEGRLVVKNAQFEEDFTPLDHDCDCYTCSNYTRAYIRHLLKADETFGIRLTSYHNLYFLVNLMKKVRQAIMDDNLLEFREDFIERYGYNKSSRNF

SEQ ID NO: 61348 - protein, 380 aa, Streptococcus sinensis
  misc_feature (1)..(380): tr|A0A0A0DGF5|A0A0A0DGF5_9STRE Queuine tRNA-ribosyltran sferase OS=Streptococcus sinensis OX=176090 GN=tgt PE=3 SV=1
MSTSPIQYRLIKKEKHTGARLGEIITPHGTFPTPMFMPVGTQATVKTQSPEELKQMGSGIILANTYHLWLRPGDELIARAGGLHKFMNWDQPILTDSGGFQVYSLADSRNITEEGVTFKNHLNGSKMFLSPEKAIAIQNNLGSDIMMSFDECPQFYQPYDYVKKSIERTSRWAERGLKAHSRPHDQGLFGIVQGAGFEDLRRQSAQDLVSMDFPGYSIGGLAVGESHEEMNAVLDFTTPLLPENKPRYLMGVGAPDSLIDGVIRGVDMFDCVLPTRIARNGTCMTSEGRLVVKNAQFEEDFTPLDHDCDCYTCTNYTRAYIRHLLKADETFGLRLTSYHNLYFLVNLMKKVRQAIMDDNLLEFREDFVERYGYNRSKRNF

SEQ ID NO: 61349 - protein, 380 aa, Streptococcus sobrinus
  misc_feature (1)..(380): tr|U2IJJ0|U2IJJ0_9STRE Queuine tRNA-ribosyltransferase OS=Streptococcus sobrinus W1703 OX=1227275 GN=tgt PE=3 SV=1
MTDVPIKYRLIKKEKHTGARLGEIITPHGTFSTPMFMPVGTQATVKTQSPEELKEMGSGIILANTYHLWLRPGDDLVADAGGLHRFMNWDQAILTDSGGFQVYSLADSRNITEEGVTFKNHLNGAKMFLSPEKAISIQNNLGSDIMMSFDECPQFYQPYDYVKKSIERTSRWAERGLKAHRRPHDQGLFGIVQGAGYEDLRRQSAADLVSMDFPGYSIGGLAVGESHEEMNAVLDFTTPLLPENKPRYLMGVGAPDSLIDGVIRGVDMFDCVLPTRIARNGTCMTSQGRLVVKNAAFARDFSPLDPDCDCYTCCNYSRAYIRHLLKADETFGLRLTSYHNLYFLVNLMKKVRQAIVDDNLLEFRQDFLDRYGYGKNGRNF

SEQ ID NO: 61350 - protein, 380 aa, Streptococcus sp.
  misc_feature (1)..(380): tr|A0A5C5TDF3|A0A5C5TDF3_9STRE Queuine tRNA-ribosyltran sferase OS=Streptococcus sp. sy004 OX=2600149 GN=tgt PE =3 SV=1
MTQHPIQYRLIKKEKHTGARLGEIITPHGTFPTPMFMPVGTLATVKTQSPEELKEMGSGIILSNTYHLWLRPGDELVAQAGGLHKFMNWDQAILTDSGGFQVYSLADSRQITEEGVTFKNHLNGSKMFLSPEKAIAIQNNLGSDIMMSFDECPQFYQPYDYVKKSIERTSRWAERGLNAHRRPHDQGIFGIVQGAGFEDLRRQSAQDLVSMDFSGYSIGGLAVGETHEEMNAVLDFTTPLLPENKPRYLMGVGAPDSLIDGVIRGVDMFDCVLPTRIARNGTCMTSQGRLVVKNAQFTEDFSPLDPNCDCYTCQNYTRAYIRHLLKADETFGIRLTSYHNLYFLVNLMKRVRQAILDDNLLEFREDFIEQYGYNRSKRNF

SEQ ID NO: 61351 - protein, 380 aa, Streptococcus sp.
  misc_feature (1)..(380): tr|A0A1F0BP76|A0A1F0BP76_9STRE Queuine tRNA-ribosyltran sferase OS=Streptococcus sp. HMSC070B10 OX=1715092 GN=t gt PE=3 SV=1
MSDSPIKYRLIKKEKHTGARLGEIITPHGTFPTPMFMPVGTQATVKTQSPEELKEMGSGIILSNTYHLWLRPGDELIARAGGLHKFMNWDQPILTDSGGFQVYSLADSRNITEEGVTFKNHLNGSKMFLSPEKAISIQNNLGSDIMMSFDECPQFYQPYDYVKKSIERTSRWAERGLKAHRRPHDQGLFGIVQGAGFEDLRRQSAHDLVSMDFPGYSIGGLAVGETHEEMNAVLDFTTQLLPENKPRYLMGVGAPDSLIDGVIRGVDMFDCVLPTRIARNGTCMTSQGRLVVKNAQFAEDFTPLDPECDCYTCKNYTRAYLRHLLKADETFGIRLTSYHNIYFLLNLMKQVRQAIMDDNLLEFREYFVEKYGYNKSGRNF

SEQ ID NO: 61352 - protein, 380 aa, Streptococcus suis
  misc_feature (1)..(380): tr|A0A0Z8XIC8|A0A0Z8XIC8_STRSU Queuine tRNA-ribosyltran sferase OS=Streptococcus suis OX=1307 GN=tgt PE=3 SV=1
MTDVPIKYRLIKKEKHTGARLGEIITPHGTFPTPMFMPVGTQATVKTMSPEELKAMGSGIILSNTYHLWLRPGDELVARAGGLHKFMNWDQPILTDSGGFQVYSLADSRNISEEGVTFKNHLNGSKMFLSPEKAISIQNNLGSDIMMSFDECPQFYQPYDYVKKSIERTSRWAERGLNAHRRPHDQGLFGIVQGAGFEDLRRQSAHDLVSMDFPGYSIGGLAVGETHDEMNAVLDFTTPLLPENKPRYLMGVGAPDSLIDGVIRGVDMFDCVLPTRIARNGTCMTSRGRLVVKNAQFAEDFTPLDPECDCYTCKNYTRAYLRHLLKADETFGIRLTSYHNLYFLINLMKNVRQAIMDDNLLEFRQDFMEKYGYGKNGRNF

SEQ ID NO: 61353 - protein, 380 aa, Streptococcus suis
  misc_feature (1)..(380): sp|A4W2F8|TGT_STRS2 Queuine tRNA-ribosyltransferase OS= Streptococcus suis (strain 98HAH33) OX=391296 GN=tgt PE =3 SV=1
MTDVPIKYRLIKKEKHTGARLGEIITPHGTFPTPMFMPVGTQATVKTMSPEELKAMGSGIILSNTYHLWLRPGDELVARAGGLHKFMNWDQPILTDSGGFQVYSLADSRNISEEGVTFKNHLNGSKMFLSPEKAISIQNNLGSDIMMSFDECPQFYQPYDYVKKSIERTSRWAERGLKAHRRPHDQGLFGIVQGAGFEDLRRQSAHDLVSMDFPGYSIGGLAVGETHDEMNAVLDFTTPLLPENKPRYLMGVGAPDSLIDGVIRGVDMFDCVLPTRIARNGTCMTNRGRLVVKNAQFAEDFTPLDPECDCYTCKNYTRAYLRHLLKADETFGIRLTSYHNLYFLINLMKNVRQAIMDDNLLEFRQDFMEKYGYGKNGRNF

SEQ ID NO: 61354 - protein, 380 aa, Streptococcus thermophilus
  misc_feature (1)..(380): sp|Q5M2K9|TGT_STRT2 Queuine tRNA-ribosyltransferase OS= Streptococcus thermophilus (strain ATCC BAA-250 / LMG 1 8311) OX=264199 GN=tgt PE=3 SV=1
MIDFPIKYRLIKKEKYTGARLGEIITPHGTFPTPMFMPVGTQATVKTQSPEELQQMGSGIILANTYHLWLRPGDELIAKAGGLHKFMNWDQAILTDSGGFQVYSLAEKRDISEEGVTFKNHLNGSKMFLSPEKAISVQNNLGSDIMMSFDECPQFYQPYDYVKKSIERTSRWAERGLKAHRRPHDQGLFGIVQGAGFEDLRRQSSHDLVSMDFPGYSIGGLAVGETHEEMNAVLDFTVPLLPENKPRYLMGVGAPDSLIDGVIRGVDMYDCVLPTRIARNGTCMTSNGRLVVKNAAYAEDFSPIDPECDCYTCKNYTRAYVRHLLKADETFGIRLTSYHNLYFLVNLMAKVRQAIVDDNLLEFRQDFIEKYGYNASNRNF

SEQ ID NO: 61355 - protein, 380 aa, Streptococcus thermophilus
  misc_feature (1)..(380): sp|Q5LY05|TGT_STRT1 Queuine tRNA-ribosyltransferase OS= Streptococcus thermophilus (strain CNRZ 1066) OX=299768 GN=tgt PE=3 SV=1
MIDFPIKYRLIKKEKYTGARLGEIITPHGTFPTPMFMPVGTQATVKTQSPEELQQMGSGIILANTYHLWLRPGDELIAKAGGLHKFMNWDQAILTDSGGFQVYSLAEKRDISEEGVTFKNHLNGSKMFLSPEKAISVQNNLGSDIMMSFDECPQFYQPYDYVKKSIERTSRWAERGLKAHRRPHDQGLFGIVQGAGFEDLRRQSSHDLVSMDFPGYSIGGLAVGETHEEMNAVLDFTVPLLPENKPRYLMGVGAPDSLIDGVIRGVDMYDCVLPTRIARNGTCMTSNGRLVVKNAAYAEDFSPIDPECDCYTCKNYTRAYVRHLLKADETFGIRLTSYHNLYFLVNLMARVRQAIVDDNLLEFRQDFIEKYGYNASNRNF

SEQ ID NO: 61356 - protein, 380 aa, Streptococcus troglodytae
  misc_feature (1)..(380): tr|A0A1L7LLM1|A0A1L7LLM1_9STRE Queuine tRNA-ribosyltran sferase OS=Streptococcus troglodytae OX=1111760 GN=tgt PE=3 SV=1
MTHSPIQYRLIKKEKHTGARLGEIITPHGVFPTPMFMPVGTQATVKTQAPEELKEMKAGIILANTYHLWLRPGDDLVTRAGGLHKFMNWDQPILTDSGGFQVYSLAEKRNITEEGVTFKNHLNGAKMFLTPEKAISIQNNLGSDIMMSFDECPQFYQPYDYVKASIERTSRWAERGLKAHRRPQEQGLFGIVQGAGFEDLRRQSAADLVSMDFPGYSIGGLAVGESHKEMNAVLDFTTPLLPENKPRYLMGVGAPDSLIDGVIRGIDMFDCVLPTRIARNGTCMTSRGRLVVKNAQYAEDFTPLDHDCDCYTCQNYTRAYIRHLIKADETFGLRLTSYHNLYFLLNLMKKIRQAIMDDNLLEFRKDFVEKYGYGRSERNF

SEQ ID NO: 61357 - protein, 380 aa, Streptococcus uberis
  misc_feature (1)..(380): sp|B9DVZ9|TGT_STRU0 Queuine tRNA-ribosyltransferase OS= Streptococcus uberis (strain ATCC BAA-854 / 0140J) OX=2 18495 GN=tgt PE=3 SV=1
MTDYPIKYRLIKKEKHTGARLGEIITPHGTFPTPMFMPVGTQATVKTQSPEELKAMGSGIILSNTYHLWLRPGDELIAKAGGLHKFMNWDQPILTDSGGFQVYSLADSRNITEEGVTFKNHLNGSKMFLSPEKAISIQNNLGSDIMMSFDECPQFYQPYDYVKKSIERTSRWAERGLKAHRRPHDQGLFGIVQGAGFEDLRRQSAADLVSMDFPGYSVGGLAVGESHEEMNAVLDFTTPLLPENKPRYLMGVGAPDSLIDGVIRGIDMFDCVLPTRIARNGTCMTSEGRLVVKNAKFAEDFTPLDHDCDCYTCQNYTRAYIRHLLKADETFGIRLTSYHNLYFLVNLMKKVRQAIMDDNLLEFREDFLERYGYNTSNRNF

SEQ ID NO: 61358 - protein, 380 aa, Streptococcus uberis
  misc_feature (1)..(380): tr|A0A0A6S135|A0A0A6S135_STRUB Queuine tRNA-ribosyltran sferase OS=Streptococcus uberis OX=1349 GN=tgt PE=3 SV= 1
MTDYPITYRLIKKDKRTGARLGEIITPHGTFPTPMFMPVGTQATVKTQSPEELKQMGSGIILSNTYHLWLRPGDELIARAGGLHKFMNWDQPILTDSGGFQVYSLADSRNITEEGVTFKNHLNGSKMFLSPEKAISIQNNLGSDIMMSFDECPQFYQPYDYVKKSIERTSRWAERGLNAHRRPHDQGLFGIVQGAGFEDLRRQSAADLVSMDFPGYSIGGLAVGETHDEMNAVLDFTTPLLPENKPRYLMGVGAPDSLIDGVIRGVDMFDCVLPTRIARNGTCMTSEGRLVVKNAKFAEDFTPLDHDCDCYTCQNYTRAYIRHLLKADETFGIRLTSYHNLYFLVNLMKKVRQAIMDDNLLEFREDFLERYGYNKSSRNF

SEQ ID NO: 61359 - protein, 380 aa, Streptococcus urinalis
  misc_feature (1)..(380): tr|G5KH65|G5KH65_9STRE Queuine tRNA-ribosyltransferase OS=Streptococcus urinalis 2285-97 OX=764291 GN=tgt PE=3 SV=1
MADYPIKYRLIKKEKHTGARLGEIITPHGTFPTPMFMPVGTQATVKTQSPEELKEMGSGIILSNTYHLWLRPGDELVAKAGGLHKFMNWDQAILTDSGGFQVYSLADSRNITEEGVTFKNHLNGSKMFLSPEKAISIQNNLGSDIMMSFDECPQFYQPYDYVKKSIERTSRWAERGLKAHRRPNDQGLFGIVQGAGFEDLRRQSAHDLVGMDFPGYSIGGLAVGESHEEMNAVLDFTTPLLPENKPRYLMGVGAPDSLIDGVIRGVDMFDCVLPTRIARNGTCMTSEGRLVVKNAKFAEDFTPLDHDCDCYTCRNYTRAYIRHLLKADETFGIRLTSYHNLYFLLNLMKKVRQAIVEDNLLEFRADFLERYGYNQSSRNF

SEQ ID NO: 61360 - protein, 404 aa, Streptococcus varani
  misc_feature (1)..(404): tr|A0A0E4CSR7|A0A0E4CSR7_9STRE Queuine tRNA-ribosyltran sferase OS=Streptococcus varani OX=1608583 GN=tgt PE=3 SV=1
MHPKSGYQVVTIFIRFLFGLSNLKMTDYPIKYRLIKKEKHTGARLGEIITPHGTFPTPMFMPVGTQATVKTQSPEELKEMGSGIILSNTYHLWLRPGDELIARAGGLHKFMNWDQPILTDSGGFQVYSLADSRNITEEGVTFKNHLNGSKMFLSPEKAISIQNNLGSDIMMSFDECPQFYQPYDYVKKSIERTTRWAERGLKAHSRPHDQGLFGIVQGAGFEDLRRQSAQNLVSMDFPGYSIGGLAVGETHDEMNAVLDFTTPLLPENKPRYLMGVGAPDSLIDGVIRGVDMFDCVLPTRIARNGTCMTSEGRLVVKNAKFEEDFTPLDYDCDCYTCKNYTRAYIRHLLKADETFGIRLTSYHNLYFLINLMKNVRQAIMDDNLLEFRQDFMERYGYGKNGRNF

SEQ ID NO: 61361 - protein, 380 aa, Streptococcus vestibularis
  misc_feature (1)..(380): tr|A0A3S4MRT3|A0A3S4MRT3_STRVE Queuine tRNA-ribosyltran sferase OS=Streptococcus vestibularis OX=1343 GN=tgt PE =3 SV=1
MTDFPIKYRLIKKEKYTGARLGEIITPHGTFPTPMFMPVGTQATVKTQSPEELKQMGSGIILANTYHLWLRPGDELVAKAGGLHKFMNWDQAILTDSGGFQVYSLAEKRNISEEGVTFKNHLNGSKMFLSPEKAISIQNNLGSDIMMSFDECPQFYQPYDYVKKSIERTSRWAERGLKAHRRPHDQGLFGIVQGAGFEDLRRQSAHDLVSMDFPGYSIGGLAVGETHEEMNAVLDFTVPLLPENKPRYLMGVGAPDSLIDGVIRGVDMYDCVLPTRIARNGTCMTSNGRLVVKNAAYAEDFSSIDPECDCYTCKNYTRAYVRHLLKADETFGIRLTSYHNLYFLVNLMAKVRQAIVDDNLLEFRQDFIEKYGYNASNRNF

SEQ ID NO: 61362 - protein, 380 aa, Streptococcus vestibularis
  misc_feature (1)..(380): tr|E8KSW1|E8KSW1_STRVE Queuine tRNA-ribosyltransferase OS=Streptococcus vestibularis ATCC 49124 OX=889206 GN=t gt PE=3 SV=1
MTDFPIKYRLIKKEKYTGARLGEIITPHGTFPTPMFMPVGTQATVKTQSPEELKQMGSGIILANTYHLWLRPGDELVAKAGGLHKFMNWDQAILTDSGGFQVYSLAEKRNISEEGVTFKNHLNGSKMFLSPEKAISIQNNLGSDIMMSFDECPQFYQPYDYVKKSIERTSRWAERGLKAHRRPHDQGLFGIVQGAGFEDLRRQSAHDLVSMDFPGYSIGGLAVGETHEEMNAVLDFTVPLLPENKPRYLMGVGAPDSLIDGVIRGVDMYDCVLPTRIARNGTCITSNGRLVVKNAAYAEDFSSIDPECDCYTCKNYTRAYVRHLLKADETFGIRLTSYHNLYFLVNLMAKVRQAIVDDNLLEFRQDFIEKYGYNASNRNF

SEQ ID NO: 61363 - protein, 380 aa, Streptococcus viridans; identical to SEQ ID NO: 61265
  misc_feature (1)..(380): tr|A0A380MAI6|A0A380MAI6_9STRE Queuine tRNA-ribosyltran sferase OS=Streptococcus viridans OX=78535 GN=tgt PE=3 SV=1

SEQ ID NO: 61364 - protein, 380 aa, Streptococcus viridans
  misc_feature (1)..(380): tr|A0A3S4PYJ9|A0A3S4PYJ9_9STRE Queuine tRNA-ribosyltran sferase OS=Streptococcus viridans OX=78535 GN=tgt PE=3 SV=1
MTDSPIQYRLIKKEKHTGARLGEIITPHGTFPTPMFMPVGTQATVKTQSPEELKEMGSGIILANTYHLWLRPGDDLVAKAGGLHQFMNWDQPILTDSGGFQVYSLADTRNITEEGVTFKNHLNGSKMFLSPEKAISIQNNLGSDIMMSFDECPQFYQPYDYVKKSIERTSRWAERGLKAHRRPHDQGLFGIVQGAGFEDLRRQSARDLVSMDFPGYSIGGLAVGESHEEMNAVLDFTTPLLPENKPRYLMGVGAPDSLIDGVIRGVDMFDCVLPTRIARNGTCMTSQGRLVVKNAQFAEDFTPLDPECDCYTCKNYTRAYLRHLLKADETFGIRLTSYHNLYFLINLMKQVRQAIMDDNLLEFREHFVEKYGYNKSGRNF

SEQ ID NO: 61365 - protein, 379 aa, Streptohalobacillus salinus
  misc_feature (1)..(379): tr|A0A2V3W6R7|A0A2V3W6R7_9BACI Queuine tRNA-ribosyltran sferase OS=Streptohalobacillus salinus OX=621096 GN=tgt PE=3 SV=1
MTAIRYELIKTCKQTGARLGRVHTPHGSFETPVFMPVGTLATVKTMSPEELTEIGAGIILSNTYHLWLRPGEDIIEEAGGLHKFMNWNGSILTDSGGFQVFSLSDLRKIEEEGVHFRNHISGEKLFLSPEKAMHIQNSLGSDIMMAFDECPPYPAEHKYMKSSVERTSRWAERCLSAHQRQNDQGLFGIIQGGEYEDLRRQSARDLTSLDFPGYAIGGLSVGEPKDVMNRVLEFTTPLLPNDKPRYLMGVGSPDSLIDGAIRGVDMFDCVLPTRIARNGTCMTSEGRVVVRNAKYARDFGPLDPNCDCYTCKNYSRAYIRHLIKADETFGLRLTSYHNLYFLVNLMEQVRQAIREDRLGDFREAFFEQYGFNKPNAKNF

SEQ ID NO: 61366 - protein, 377 aa, Subdoligranulum sp.; identical to SEQ ID NO: 55586
  misc_feature (1)..(377): tr|A0A1Q6SYQ6|A0A1Q6SYQ6_9FIRM Queuine tRNA-ribosyltran sferase OS=Subdoligranulum sp. 60_17 OX=1897022 GN=tgt PE=3 SV=1

SEQ ID NO: 61367 - protein, 376 aa, Subdoligranulum sp.
  misc_feature (1)..(376): tr|G9RYH6|G9RYH6_9FIRM Queuine tRNA-ribosyltransferase OS=Subdoligranulum sp. 4_3_54A2FAA OX=665956 GN=tgt PE= 3 SV=1
MYKLLKNEGSARRGEFSTVHGTVQTPAFMNVATAAAIKGGLSAFDLKANDCQVMLCNTYHLHLRPGDKNVARLGGLHKFTRWDGPILTDSGGFQVFSLSKLRKITEEGVTFNSHLDGHRIFMGPEESMQIQANLGSTIAMAFDECMENPAEYQYAKASCDRTVRWLKRCKAELSRLKGEGLAVNPHQLLFGINQGCCYDDLRVGHMQEIAALDLDGYAIGGLAVGEPKEEMYGVISVVEEHMPKDKIRYLMGVGTPGNILEGVRRGVDLFDCVMPSRNARHGHLNTWKGIINIKNAKYELDEQPLDEACSCECCRNFSRAYLRHLFKADEMLGMRLAVMHNLHFYNNLMLRIREALDNGTFDAFYRRYVNLLDTRI

SEQ ID NO: 61368 - protein, 377 aa, Subdoligranulum variabile
  misc_feature (1)..(377): tr|D1PKT7|D1PKT7_9FIRM Queuine tRNA-ribosyltransferase OS=Subdoligranulum variabile DSM 15176 OX=411471 GN=tgt PE=3 SV=1
MPYRLIKQEGAARRGEFVTVHGTVQTPAFQNVATAAAIKGGLSALDLKEIRAQVMLCNTYHLHLRPGDQIVADMGGLHKFTRWDGPILTDSGGFQVFSLAKLRQITEEGVTFNSHLDGHRIFMGPEQSMQIQANLGSTIAMAFDECVENPATYEYAKNSCARTARWLLRCKAEMARLKHEEKAVNPDQLLFGINQGCTFKDLRVEHMKQIAEYDLDGYAIGGLAVGEPAEVMYDIISAVEPYAPKDKIRYLMGVGTPGNIIEGVYRGVDLFDCVMPSRNARHGHLFTWNGIINIKNLKYERDESPIDPHCDCPVCRNFSRAYIRHLQKADEMLGMRLAVMHNLYFYNHLMERIREALDNGTFQQFHDTYVHRLDTRI

SEQ ID NO: 61369 - protein, 377 aa, Subdoligranulum variabile
  misc_feature (1)..(377): tr|A0A2V2FJQ9|A0A2V2FJQ9_9FIRM Queuine tRNA-ribosyltran sferase OS=Subdoligranulum variabile OX=214851 GN=tgt P E=3 SV=1
MPYRLIKQEGAARRGEFKTVHGTVQTPAFQNVATAAAIKGGLSALDLKEIRAQVMLCNTYHLHLRPGDQVVAQMGGLHKFTRWDGPILTDSGGFQVFSLAKLRQITEEGVTFNSHLDGHRIFMGPEQSMQIQANLGSTIAMAFDECVENPATYEYAKNSCARTARWLLRCKQEMARLKNEGKAVNPDQLLFGINQGCTFPELRVEHMKQIAEYDLDGYAIGGLAVGEPAEVMYEIISAVEPFAPKDKIRYLMGVGTPGNIIEAVYRGVDLFDCVMPSRNARHGHLFTWDGIINIKNLKYERDESPIDPNCDCPVCRNFSRAYIRHLQKADEMLGMRLAVMHNLYFYNRLMERIREALDNGTFQQFHDTYVRRLDTRI

SEQ ID NO: 61370 - protein, 376 aa, Subsaximicrobium wynnwilliamsii
  misc_feature (1)..(376): tr|A0A5C6ZCU8|A0A5C6ZCU8_9FLAO Queuine tRNA-ribosyltran sferase OS=Subsaximicrobium wynnwilliamsii OX=291179 GN =tgt PE=3 SV=1
MIFELKAKDAQTKARAGVITTDHGSIETPIFMPVGTVASVKGVHQRELKNDINPDIILGNTYHLYLRPQTHILEKAGGLHKFMNWDRNILTDSGGYQVYSLSANRKIKEEGVKFKSHIDGSTHVFTPENVMEIQRTIGADIIMAFDECTPYPCDYKYAKRSMHMTHRWLDRCIGHLDKLPFKYGYEQTFFPIVQGSTYKDLRQESAEYIANAGAQGNAIGGLSVGEPAEEMYAMTEVVCDILPSEKPRYLMGVGTPINILENIALGVDMFDCVMPTRNARNGMLFTAHGSINIKNLKWADDFSPVDEMGITFVDTEYSKAYLRHLFTVNELLGKQIATIHNLGFYMWLVREARKHIIAGDFRTWKEKMVKQMDKRL

SEQ ID NO: 61371 - protein, 369 aa, Succinatimonas hippei
  misc_feature (1)..(369): tr|E8LK26|E8LK26_SUCHY Queuine tRNA-ribosyltransferase OS=Succinatimonas hippei (strain DSM 22608 / JCM 16073 / KCTC 15190 / YIT 12066) OX=762983 GN=tgt PE=3 SV=1
MEFKILAKDGKARRGELHFKRGIVRTPAFMPVGTLGTVKGIRPEQVEELGADILLGNTFHLWLRPGTDVIKLHGDLHDFMHWNKPILTDSGGFQVFSLSGIRKVTEEGVKFQHPINGSKLFLSPEISMQVQHALGSDIVMQFDECIGLPADYRRMEQAMELSLRWARRCKDEFLRLENPNSLFGIIQGGTDEGLRERSLEGLTNIGFDGYAIGGLAVGEPKDVMYKALGHIAPLMPDDKPRYLMGVGRPEDILQGVLNGVDMFDCVMPTRNARNGHLFTSQGVVKIRNAKYATDTTPLDPNCSCYTCRHFSRAYLHHLDKCGEMLGAHLNTIHNLWYYEHLMQGIRDAIESGTLESFAENFYKTACKTV

SEQ ID NO: 61372 - protein, 373 aa, Succinatimonas sp.
  misc_feature (1)..(373): tr|R5EVB5|R5EVB5_9GAMM Queuine tRNA-ribosyltransferase OS=Succinatimonas sp. CAG:777 OX=1262974 GN=tgt PE=3 SV =1
MKLKFELKKRCGKARLGQMVFERGVVRTPAFMPVGTLGTVKGVRPEDVEELGADILLGNTFHLWLRPGCDVIKAHGDLHDFMNWHKPILTDSGGFQVFSLSEIRKVTEEGVHFRNPINGSKLFLSPEVSMQIQYALGSDIVMQFDECIGLPASREEMARAMRLSLRWAKRSKDEFERLGNQNSLFGIIQGGSDEALREESLKGLTEIGFEGYAIGGLAVGEPKPVMYKALSHIAPNMPEDKPRYLMGVGTPADILQGVLNGVDMFDCVMPSRNARNAHLFTSKGVVRIRNSKYAMDTSPLDENCSCYTCRHYSKAYLHHLDKCHELLGAQLNTIHNLHFYEHFMADIRKAIEDDRLEQFAEEFYKVYGYPELV

SEQ ID NO: 61373 - protein, 379 aa, Succiniclasticum ruminis
  misc_feature (1)..(379): tr|A0A1I1YXC2|A0A1I1YXC2_9FIRM Queuine tRNA-ribosyltran sferase OS=Succiniclasticum ruminis DSM 9236 OX=1123323 GN=tgt PE=3 SV=1
MHAVTYELIKEAKQGKARRGRLHTPHGTFETPMFMPVGTQATVKTLSPEELYDMESQVILANTYHLFLRPGSGLVKKAGGLHKFMNYNRGMLTDSGGFQVFSLGEMRKITEEGVMFRSHIDGSKQFLSPEVSVRVQEELGADIAMAFDECIPYPSDFNYTKKSTERTTRWAERCLKAHTRPDQALFGIVQGGMFPELRKMSAESLLEMDFAGYGIGGLSVGEPKPVMYDMLDQTTDWMDKQKARYLMGVGTPDCIVEGVNLGVDMYDCVFPTRVARNGTAMTARGRLVIRNAVYAEDFRPIDEHCNCYTCRNFSRAYIRHLFKAEETFGLRLLSIHNLHFLLDFAKKIRDAIEQDRFAEFRKEFWNNWEEKDKRPEDLN

SEQ ID NO: 61374 - protein, 379 aa, Succiniclasticum ruminis
  misc_feature (1)..(379): tr|A0A1G6MW58|A0A1G6MW58_9FIRM Queuine tRNA-ribosyltran sferase OS=Succiniclasticum ruminis OX=40841 GN=tgt PE= 3 SV=1
MHAVTYELIKEATKGKARRGRLHTPYGTFETPMFMPVGTQATVKTLSPEELYDMESQVILANTYHLFLRPGSELVKKAGGLHRFMNYSRGMLTDSGGFQVFSLGEMRKISEEGVMFRSHIDGSKQFLSPEVSVRVQEELGADIAMAFDECIPYPSDFAYTKKSTERTTRWAERCLKAHTREDQALFGIVQGGMFPELRKMSAQSLQDMDFAGYGIGGLSVGEPKPMMYEVLDQTTDWMDKQKARYLMGVGTPDCLVEGINLGVDMFDCVFPTRVARNGTAMTWRGRLVVRNAMYAEDFRPIDEHCDCYACRNFSRAYIRHLFKAEEIFGLRLLSIHNLHFLLHFTKKIREAIEQDRFQEFRKAFWDNWEEKDQRPADLA

SEQ ID NO: 61375 - protein, 371 aa, Succinivibrio dextrinosolvens
  misc_feature (1)..(371): tr|A0A1T4VJK0|A0A1T4VJK0_9GAMM Queuine tRNA-ribosyltran sferase OS=Succinivibrio dextrinosolvens DSM 3072 OX=11 23324 GN=tgt PE=3 SV=1
MKFELKKKCGKARLGQMVFDRGVVRTPAFMPVGTCGTVKGLRPENVEEIGADILLGNTFHLWLRPGTDVIRAHGDLHDFMNWKKPILTDSGGFQVFSLSDIRKVTEEGVKFRHPINGSKLFLSPEISMQIQYDLGSDIVMQFDECIGLPAPREEMARAMRLSLRWAKRSKDEFNRLGNKNSLFGIIQGGSDEALREESLKGLTDIGFDGYAIGGLAVGEPKPVMYKALSHIAPIMPEDRPRYLMGVGTPMDILQGVLNGVDMFDCVMPSRNARNAHLFTSNGIVRIRNSKYAMDTSPLDEKCTCYTCRNYSKAYLHHLDKCHEILGAHLNTIHNLHFYEHFMADIRKAIEEDRLEQFAEEFYKVYGYPEKV

SEQ ID NO: 61376 - protein, 250 aa, Succinivibrio sp.
  misc_feature (1)..(250): tr|A0A3C1W2V3|A0A3C1W2V3_9GAMM Queuine tRNA-ribosyltran sferase (Fragment) OS=Succinivibrio sp. OX=2053619 GN=D CQ86_07170 PE=3 SV=1
MKFEIKKRCNKARLGQMIFDRGIVRTPAFMPVGTLGTVKGLRPEHVEELGADILLGNTFHLWLRPGTEVIKAHGDLHDFMNWHKPILTDSGGFQVFSLSDIRKVKEEGVHFRNPINGSKLFLSPEISMQIQYDLGSDIVMQFDECIGLPATSEEMARAMRLSLRWAQRSKDEFQRLGNKNSLFGIIQGGSDEKLREESLEGLTKIGFDGYAIGGLAVGEPKPVMYKALRHIAPLMPEDKPRYLMGVGTPA

SEQ ID NO: 61377 - protein, 373 aa, Succinivibrio sp.
  misc_feature (1)..(373): tr|A0A316SGG6|A0A316SGG6_9GAMM Queuine tRNA-ribosyltran sferase OS=Succinivibrio sp. OX=2053619 GN=tgt PE=3 SV= 1
MKLKFELKKRCGKARLGQMVFERGVVRTPAFMPVGTLGTVKGVRPEDVEELGADILLGNTFHLWLRPGCDVIKAHGDLHDFMNWHKPILTDSGGFQVFSLSDIRKVTEEGVHFRNPINGSKLFLSPEVSMQIQYALGSDIVMQFDECIGLPATREEMARAMRLSLRWAKRSKDEFERLGNQNSLFGIIQGGSDEALREESLKGLTEIGFEGYAIGGLAVGEPKPVMYKALSHIAPNMPEDKPRYLMGVGTPADILQGVLNGVDMFDCVMPSRNARNAHLFTSKGVVRIRNSKYAMDTSPLDENCSCYTCRHYSKAYLHHLDKCHELLGAQLNTIHNLHFYEHFMADIRKAIEEDRLEQFAEEFYNVYGYPELV

SEQ ID NO: 61378 - protein, 370 aa, Succinivibrionaceae bacterium
  misc_feature (1)..(370): tr|A0A3C0C9I8|A0A3C0C9I8_9GAMM Queuine tRNA-ribosyltran sferase OS=Succinivibrionaceae bacterium OX=2053620 GN= tgt PE=3 SV=1
MKFTVKKKSGRARLGSLELPHGVVRTPAFMPVGTQATVKGMRPEHIKELGADILLGNTFHLWLRPGPEVIRAHGGLHQFMNWQGPILTDSGGFQVFSLSGLRKVTEEGVNFRHPINGSKLFLSPEISMQIQHALNSDIVMQFDECIALPAPRDEMKRAMELSLRWARRCHDEFVRLENHNALFGIIQGGTDKSLREASLRGLTDIGFDGYAIGGLAVGEPKKDMYGELDHITPMMPDDHPRYLMGVGTPMDILQGVLNGVDMFDCVMPSRNARNGHLFTTQGVVRIRNARYATDTSPLDPNCGCYTCQNYTKAYLHHLDKCNEILGAHLNTLHNLWFYEHFMADIRKAIEEDRLEQFAEDFYKVWGRPEI

SEQ ID NO: 61379 - protein, 372 aa, Succinivibrionaceae bacterium
  misc_feature (1)..(372): tr|A0A348YLI3|A0A348YLI3_9GAMM Queuine tRNA-ribosyltran sferase OS=Succinivibrionaceae bacterium OX=2053620 GN= tgt PE=3 SV=1
MAFKFEVHKKCGKARLGSLKFARGTVRTPAFMPVGTQATVKGMRPEHIEELGADILLGNTFHLWLRPGCEVIRAHGGLHEFMNWDKPILTDSGGFQVFSLSGIRKVTEEGVKFVSPINGSRLFLSPEVSMQIQKDLDSDIVMQFDECIGLPAERKEMERAMKLSLRWAARCKDEFERLGNKNSLFGIIQGGTDKALREESLQGLMDIGFDGYAIGGLAVGESKESMYTELRHIGPIMPEDKPHYLMGVGTPMDILQGVLNGVDMFDCVMPSRNARNGHLFTSQGVVRIRNAVHAMDTGPLDPACGCYTCRNYSRAYLHHLDKTKELLGAHLNTLHNLWFYEHFMADIRQAIAEDRLEQFAEDFYKVWGRPEA

SEQ ID NO: 61380 - protein, 375 aa, Sulfitobacter brevis
  misc_feature (1)..(375): tr|A0A1I1ZVT2|A0A1I1ZVT2_9RHOB Queuine tRNA-ribosyltran sferase OS=Sulfitobacter brevis OX=74348 GN=tgt PE=3 SV =1
MTAFSFEKHGQDGKARTGVIHTARGDIRTPAFMPVGTAATVKAMMPESVAATGADILLGNTYHLMLRPTAERIQSLGGLHKFMNWSGPILTDSGGFQVMSLAALRKLTERGVTFKSHIDGSRHEITPERSMEIQAMLGSDIVMCFDECPALPADRDRIASSMEMSMRWAKRSKEAFGDRPGHALFGIQQGGLEQDLRGQSAESLREIGFDGYAVGGLAVGEGQAAMFDCLDFAADQLPQDRPRYLMGVGKPDDIVGAVARGIDMMDCVLPSRSGRTGQVFTRRGVLNIKNARHQDDPRPLDEDCGCPACSNYSRAYLHHVYRSQEIISSMLLTWHNLRFYQDLMAGMRDAIAAGEFTQWQAKFHTDRAEGDIEPL

SEQ ID NO: 61381 - protein, 375 aa, Sulfitobacter delicatus
  misc_feature (1)..(375): tr|A0A1G7KME3|A0A1G7KME3_9RHOB Queuine tRNA-ribosyltran sferase OS=Sulfitobacter delicatus OX=218672 GN=tgt PE= 3 SV=1
MTSTGFTKHAQDGMARSGVITTPRGEIRTPAFMPVGTAATVKAMMPESVASTGADILLGNTYHLMLRPTAERVAKLGGLHKFMNWDKPILTDSGGFQVMSLAGLRKLTERGVTFKSHIDGSKHEITPERSMEIQELLGSDIVMCFDECPALPADRARIAESMRLSMRWAKRSREAFGDRPGHMLFGIQQGGLEQDFRQESAEALREIGFDGYAVGGLAVGEGQEAMFSTLDFATDMLPEDKPRYLMGVGKPDDIVGAVARGIDVMDCVLPSRSGRTGQVFTRMGVLNIKNARHMDDPRPLDENCSCPACQNYSRAYLHHVFRSQEIISSMLLTWHNLQYYQDIMAGMREAIAAGRFTQWQADFHAGRAQGDIDPL

SEQ ID NO: 61382 - protein, 379 aa, Sulfitobacter donghicola
  misc_feature (1)..(379): tr|A0A410XZ87|A0A410XZ87_9RHOB Queuine tRNA-ribosyltran sferase OS=Sulfitobacter donghicola OX=421000 GN=tgt PE =3 SV=1
MPAVTYEHIKTCKQSGARLGIVHTPHGSFETPMFMPVGTKATVKTMSPEELRQIEAKIILGNTYHLWLQPGNDIIKHAGGLHKFMNWNGPILTDSGGFQVFSLSNLRKISEEGVEFRHHTNGSKLFLSPEKSMEIQNDLGSDIMMAFDECPPMPSEYKYVKDSIDRTTRWAERCLKAHARPEDQALFGIIQGGEYKDLREQSAKELVELDFPGYAIGGLSVGEPKPVMYEMVEHTEQFMPKDKPRYLMGVGSPDALIECSIRGMDMFDCVLPTRIARNGTCMTSNGRLVIKNAKFADDLRPLDENCDCYTCKNYSRAYIRHLIKAEETFGIRLTTIHNLHFLLKLMEDIRQAIREDRLLDFKAEFFEQYGLNVDNPKNF

SEQ ID NO: 61383 - protein, 375 aa, Sulfitobacter donghicola
  misc_feature (1)..(375): tr|A0A073IKI7|A0A073IKI7_9RHOB Queuine tRNA-ribosyltran sferase OS=Sulfitobacter donghicola DSW-25 = KCTC 12864 = JCM 14565 OX=1300350 GN=tgt PE=3 SV=1
MTEISYQINATDGRARTGVINTPRGEIRTPAFMPVGTAATVKAMMPESVRQTGADILLGNTYHLMLRPTAERVDRLGGLHKFMNWDRPILTDSGGFQVMSLASLRKLTERGVTFKSHIDGSKHEITPERSMEIQKLLGSDIVMCFDECPALPADRDRIASSMELSMRWAKRSKDAFGDRPGHALFGIQQGGLEEDLRQQSADALRDIGFGGYAIGGLAVGEGQEAMFGCLDYAPEQLPQDKPRYLMGVGKPDDIVGAVARGIDMMDCVLPSRSGRTGQVFTRKGVLNIKNARHMDDPRPLDEDCGCPACQNYSRAYLHHVFRSQEMISSMLLTWHNLHYYQDLMAGMRDAITAGTFEAWQRDFHANRAQGDIDPL

SEQ ID NO: 61384 - protein, 375 aa, Sulfitobacter dubius
  misc_feature (1)..(375): tr|A0A1I2S3B5|A0A1I2S3B5_9RHOB Queuine tRNA-ribosyltran sferase OS=Sulfitobacter dubius OX=218673 GN=tgt PE=3 S V=1
MTSTGFTKHAQDGKARSGVIQTPRGEIRTPAFMPVGTAATVKAMMPESVASTGADILLGNTYHLMLRPTAERIAKLGGLHKFMNWDKPILTDSGGFQVMSLAGLRKLTERGVTFKSHIDGSKHEITPERSMEIQELLGSDIVMCFDECPALPADRDRIASSMRMSMRWAKRSREAFGDRPGHMLFGIQQGGLEEDFRKESAEALCEIGFDGYAVGGLAVGEGQQAMFSTLDFSNDMLPEDKPRYLMGVGKPDDIVGAVARGIDMMDCVLPSRSGRTGQVFTRMGVLNIKNARHMDDPRPLDENCSCPACQNYSRAYLHHVFRSQEIISSMLLTWHNLQYYQDIMAGMREAIAAGRFAQWQADFHAGREQGDIDPL

SEQ ID NO: 61385 - protein, 375 aa, Sulfitobacter geojensis
  misc_feature (1)..(375): tr|A0A196QRX9|A0A196QRX9_9RHOB Queuine tRNA-ribosyltran sferase OS=Sulfitobacter geojensis OX=1342299 GN=tgt PE =3 SV=1
MSRITFEKHAQDGKARAGVIHTTRGDIRTPAFMPVGTAATVKAMMPESVAATGADILLGNTYHLMLRPTAERIARLGGLHKFMNWDKPILTDSGGFQVMSLADLRKLTERGVTFKSHIDGSKHEITPERSMEIQALLGSDIVMCFDECPALPADRDRIATSMELSMRWAKRSKEAFGDRPGHALFGIQQGGLEQDLRGQSAEALREIGFDGYAVGGLAVGEGQEAMFGCLDYAPDQLPEDKPRYLMGVGKPDDIVGAVKRGIDMMDCVLPSRSGRTGQVFTRAGVLNIKNARHADDPRPLDENCACPACTKYSRAYLHHVFRSQEMISGMLLTWHNLRYFQDIMDGMRTAIAAGTFEAWERDFHAGRAQGDIDPL

SEQ ID NO: 61386 - protein, 375 aa, Sulfitobacter guttiformis
  misc_feature (1)..(375): tr|A0A420DIJ4|A0A420DIJ4_9RHOB Queuine tRNA-ribosyltran sferase OS=Sulfitobacter guttiformis OX=74349 GN=tgt PE =3 SV=1
MTGFSYQINATDGQARTGVINTPRGEIRTPAFMPVGTAATVKAMMPSSVRETGADILLGNTYHLMLRPTAERIDRLGGLHKFMNWDRPILTDSGGFQVMSLANLRKLTERGVTFKSHIDGSKHEITPERSMEIQALLGSDIVMCFDECPALPADRDRIAQSMELSMRWAKRSREAFGDRPGHALFGIQQGGLEEDLRKVSAEALREIGFDGYAVGGLAVGEGQEAMFGCLDYAADQLPVEKPRYLMGVGKPDDIVGAVARGIDMMDCVLPSRSGRTGQVFTRQGVLNIKNARHADDPRPLDEGCGCPACSHYSRAYLHHVFRSQEMISSMLLTWHNLRYYQDIMAGMRETIAAGTFQKWQSDFHSTRAQGDIDPL

SEQ ID NO: 61387 - protein, 375 aa, Sulfitobacter indolifex
  misc_feature (1)..(375): tr|A9E963|A9E963_9RHOB Queuine tRNA-ribosyltransferase OS=Sulfitobacter indolifex HEL-45 OX=391624 GN=tgt PE=3 SV=1
MTSTGFTKHAQDGKARSGVIQTTRGEIRTPAFMPVGTAATVKAMMPESVASTGADILLGNTYHLMLRPTAERIAKLGGLHKFMNWDKPILTDSGGFQVMSLAGLRKLTERGVTFKSHIDGSKHEITPERSMEIQELLGSDIVMCFDECPALPADRDRIASSMRMSMRWAKRSREAFGDRPGHMLFGIQQGGLEQDFRQESAEALREIGFDGYAVGGLAVGEGQEAMFSTLDFSTDMLPEDKPRYLMGVGKPDDIVGAVARGIDMMDCVLPSRSGRTGQVFTRMGVLNIKNARHMDDPRPLDENCSCPACQNYSRAYLHHVFRSQEIISSMLLTWHNLQYYQDIMAGMREAIAAGRFTQWQADFHAGREQGDIDPL

SEQ ID NO: 61388 - protein, 375 aa, Sulfitobacter litoralis
  misc_feature (1)..(375): tr|A0A1H0PPZ1|A0A1H0PPZ1_9RHOB Queuine tRNA-ribosyltran sferase OS=Sulfitobacter litoralis OX=335975 GN=tgt PE= 3 SV=1
MKKFSFDLQARDGAARTGVISTPRGDIRTPAFMPVGTAATVKAMMPESVAATGADILLGNTYHLMLRPTAERIDRLGGLHKFMNWDKPILTDSGGFQVMSLSDLRKLTEKGVTFKSHIDGSKHELTPERSMEIQKLLGSDIVMCFDECPALPADRARIAESMRLSMRWAKRSRDAFGDRPGYALFGIQQGGLEQDFREESAKALMEVGFDGYAVGGLAVGEGQEAMFGCLDFATDMLPVDRPRYLMGVGKPDDIVGAVARGIDMMDCVLPSRSGRTGQVFTRHGVVNIKNARHADDPRPLDEACTCPACSNYSRAYLHHVFRSQEMISGMLLTWHNLHYFQEIMAGMRGAIAAGTFDAWQADFHSQRAQGDIDPL

SEQ ID NO: 61389 - protein, 375 aa, Sulfitobacter marinus
  misc_feature (1)..(375): tr|A0A1I6Q9V1|A0A1I6Q9V1_9RHOB Queuine tRNA-ribosyltran sferase OS=Sulfitobacter marinus OX=394264 GN=tgt PE=3 SV=1
MEKFSFDLQARDGSARTGVISTPRGDIRTPAFMPVGTAATVKAMMPESVVATGADILLGNTYHLMLRPTAERIDRLGGLHKFMNWDKPILTDSGGFQVMSLADLRKLTEKGVTFKSHIDGSKHELTPERSMEIQKLLGSDIVMCFDECPALPADRDRIAESMRLSMRWAARSRDAFGDRPGHALFGIQQGGLEQDFREESAKALIDVGFDGYAVGGLAVGEGQEAMFGCLDFATDMLPVDRPRYLMGVGKPDDIVGAVARGIDMMDCVLPSRSGRTGQVFTRHGVVNIKNARHADDPRPLDEDCTCPACSNYSRAYLHHVFRSQEMISGMLLTWHNLHYFQEIMAGMRGAIAAGTFDTWQADFHAQRAQGDIEPL

SEQ ID NO: 61390 - protein, 375 aa, Sulfitobacter mediterraneus
  misc_feature (1)..(375): tr|A0A2T6CH06|A0A2T6CH06_9RHOB Queuine tRNA-ribosyltran sferase OS=Sulfitobacter mediterraneus OX=83219 GN=tgt PE=3 SV=1
MTRITFEKQAQDGKARRGVIRTTRGDIQTPAFMPVGTAATVKAMMPESVAATGADILLGNTYHLMLRPTAERVAALGGLHKFMNWSGPILTDSGGFQVMSLAGLRKLTEKGVTFKSHIDGSKHEITPERSMEIQALLGSDIVMCFDECPALPADRDRIASSMELSMRWAQRSKDAFGDRPGHALFGIQQGGLEEDLRAQSAQALREIEFDGYAVGGLAVGEGQEAMFGCLDFAPDQLPEDKPRYLMGVGKPDDIVGAVARGIDMMDCVLPSRSGRTGQVFTRHGVLNIKNARHQDDPRPLDENCSCPACRNYSRAYLHHVFRSQEIISSMLLTWHNLHYYQDIMSGMREAIASGTFAAWQSDFHAGRAQGDIDPL

SEQ ID NO: 61391 - protein, 375 aa, Sulfitobacter mediterraneus
  misc_feature (1)..(375): tr|A0A061SQZ0|A0A061SQZ0_9RHOB Queuine tRNA-ribosyltran sferase OS=Sulfitobacter mediterraneus OX=83219 GN=tgt PE=3 SV=1
MTRITFEKQAQDGKARRGVIRTTRGDIQTPAFMPVGTAATVKAMMPESVAATGADILLGNTYHLMLRPTAERVAALGGLHKFMNWSGPILTDSGGFQVMSLAGLRKLTEKGVTFKSHIDGSKHEITPERSMEIQALLGSDIVMCFDECPALPADRDRIASSMELSMRWAQRSKDAFGDRPGHALFGIQQGGLEEDLRAQSAQALREIEFDGYAVGGLAVGEGQEAMFGCLDFAPDQLPENKPRYLMGVGKPDDIVGAVARGIDMMDCVLPSRSGRTGQVFTRHGVLNIKNARHQDDPRPLDENCSCPACRNYSRAYLHHVFRSQEIISSMLLTWHNLHYYQDIMSGMREAIASGTFAAWQSDFHSGRAQGDIDPL

SEQ ID NO: 61392 - protein, 375 aa, Sulfitobacter pontiacus
  misc_feature (1)..(375): tr|A0A1H2UAS1|A0A1H2UAS1_9RHOB Queuine tRNA-ribosyltran sferase OS=Sulfitobacter pontiacus OX=60137 GN=tgt PE=3 SV=1
MKKFSFDLQARDGAARTGVISTPRGDIRTPAFMPVGTAATVKAMMPESVAATGADILLGNTYHLMLRPTAERIDRLGGLHKFMNWDKPILTDSGGFQVMSLSGLRKLTEKGVTFKSHVDGSKHELTPERSMEIQKLLGSDIVMCFDECPALPADRARIADSMRMSMRWAKRSREAFGDRPGHALFGIQQGGLERDFREESAKALIDVGFDGYAVGGLAVGEGQEAMFGCLDFATDMLPVDRPRYLMGVGKPDDIVGAVARGIDMMDCVLPSRSGRTGQVFTRHGVVNIKNARHADDPRPLDEACTCPACSNYSRAYLHHVFRSQEMISGMLLTWHNLHYFQEIMAGMRDAIAAGTFDAWQADFHSQRAQGDIDPL

SEQ ID NO: 61393 - protein, 375 aa, Sulfitobacter pseudonitzschiae
  misc_feature (1)..(375): tr|A0A221JZI9|A0A221JZI9_9RHOB Queuine tRNA-ribosyltran sferase OS=Sulfitobacter pseudonitzschiae OX=1402135 GN =tgt PE=3 SV=1
MTLITFRKDATDGKARTGVLSTPRGDIRTPAFMPVGTAATVKAMLPESVAATGADILLGNTYHLMLRPTAERIDRLGGLHRFMNWDKPILTDSGGFQVMSLAALRKLTEKGVTFKSHIDGSRHEITPERSMEIQKLLGSDIVMCFDECPALPADKTRIAQSMRLSMRWAQRSRDAFGDRPGHALFGIQQGGLEQDLRAESAAALTEIGFDGYAVGGLAVGEGQEAMFGCLDFASDQLPQDKPRYLMGVGKPDDIVGAVARGIDMMDCVLPSRSGRTGQVFTRHGVLNIKNARHQDDPRPIDDACTCPACTKYSRAYLHHVFRSQEMISSMLLTWHNLHYFQQIMDGMRKAIAAGTFTRWQADFHANRAGGDIEQL

SEQ ID NO: 61394 - protein, 375 aa, Sulfitobacter pseudonitzschiae
  misc_feature (1)..(375): tr|A0A073JJB5|A0A073JJB5_9RHOB Queuine tRNA-ribosyltran sferase OS=Sulfitobacter pseudonitzschiae OX=1402135 GN =tgt PE=3 SV=1
MTRFSFELAATDGRARTGTIHTPRGDIRTPAFMPVGTAATVKAMMPESVAATGADILLGNTYHLMLRPTAERIDRLGGLHKFMNWDKPILTDSGGFQVMSLAALRKLTEKGVTFKSHIDGSRHEITPERSMEIQKLLGSDIVMCFDECPALPADKARIAESMRLSMRWAERSRDAFGDRPGHALFGIQQGGLEEDLRAESAEALTQIGFDGYAVGGLAVGEGQEAMFGCLDFAPEQLPQDKPRYLMGVGKPDDIVGAVARGIDMMDCVLPSRSGRTGQVFTRHGVLNIKNARHQDDPRPIDDACTCPACTNYSRAYLHHVFRSQEMISSMLLTWHNLHYFQQIMGEMRAAIAAGSFTQWQADFHANRANGDIEQL

SEQ ID NO: 61395 - protein, 374 aa, Sulfitobacter sp.
  misc_feature (1)..(374): tr|A0A345QNT0|A0A345QNT0_9RHOB Queuine tRNA-ribosyltran sferase OS=Sulfitobacter sp. SK012 OX=1389005 GN=tgt PE =3 SV=1
MSFGFEITATDGKARTGAISTTRGDIRTPAFMPVGTAATVKAMMPDSVAATGADILLGNTYHLMLRPTAERIASLGGLHKFMNWSGPILTDSGGFQVMSLADLRKLTERGVTFKSHIDGSKHEITPERSMEIQALLGSDIVMCFDECPALPADRARINESMQLSMRWAARSKEAFGDRPGHALFGIQQGGLERDLRGESAEALASIGFDGYAVGGLAVGEGQEAMFDCLDYAPDQLPQDKPRYLMGVGKPDDIVGAVARGIDMMDCVLPSRSGRTGQVFTRRGVLNIKNARHMDDPRPLDEACTCPACSNYSRAYLHHVFRSQEIISSMLLTWHNLHYYQDLMAGMREAIAAGSFTTWQSEFHATRVQGDIDPL

SEQ ID NO: 61396 - protein, 378 aa, Sulfitobacter sp.
  misc_feature (1)..(378): tr|A0A196P9I6|A0A196P9I6_9RHOB Queuine tRNA-ribosyltran sferase OS=Sulfitobacter sp. EhC04 OX=1849168 GN=tgt PE =3 SV=1
MNKTDKVAFDLTATDGKARSGVIHTTRGDIRTPAFMPVGTAATVKAMMPESVAATGADILLGNTYHLMLRPTAERVARLGGLHRFMNWSGPILTDSGGFQVMSLADLRKLTERGVTFKSHIDGSRHEITPERSMEIQALLGSDIVMCFDECPALPASRDRIAESMELSMRWAKRSKEAFGDRPGHALFGIQQGGLERDLRQQSAEALREIGFDGYAVGGLAVGEGQAAMFDCLDHAAGQLPEDKPRYLMGVGKPDDIVGAVARGIDMMDCVLPSRSGRTGQVFTRLGVLNIKNARHADDPRPLDENCTCPACRNYSRAYLHHVFRSQEIISSMLLTWHNLHYFQDIMAGMRGAIAAGSFAAWQADFHATRAQGDIDPL

SEQ ID NO: 61397 - protein, 373 aa, Sulfuricaulis limicola
  misc_feature (1)..(373): tr|A0A1B4XF57|A0A1B4XF57_9GAMM Queuine tRNA-ribosyltran sferase OS=Sulfuricaulis limicola OX=1620215 GN=tgt PE= 3 SV=1
MKFELLANDGAARRGRMVFERGTVETPAFMPVGTYGTVKGMTPEELRETGAEIILGNTFHLMLRPGTEVIKAHGGLHRFMHWDGPILTDSGGFQVWSLGQLRKLSEKGVLFQSPVDGAKIFLGPEESMAVQQALDADIIMIFDECTHHPATEPEARASMELSLRWAERSKIAHADHPSALFGIVQGGMYEHLRDISLIGLKQIGFDGYAIGGLSVGETKEEMLRILDHLAPQMPADKPRYLMGVGTPEDLVEAVRRGMDMFDCVLPTRNARNGWLFTHDGAVKIKNSRYARDTGPVDPLCDCYTCRHYSRAYLRHLQQANEILGARLATIHNLHYYQCLMRGLRQAIAEKELDDFVEKFYRMRRPEPPDGPEN

SEQ ID NO: 61398 - protein, 367 aa, Sulfuricella denitrificans
  misc_feature (1)..(367): tr|S6AMI3|S6AMI3_SULDS Queuine tRNA-ribosyltransferase OS=Sulfuricella denitrificans (strain DSM 22764 / NBRC 105220 / skB26) OX=1163617 GN=tgt PE=3 SV=1
MKFDLHATDGPARRGTLTLAHGTVETPAFMPVGTYGTVKAMSPAELKEIGAHIVLGNTFHLWLRPGLEVIEAHGGLHRFMGWDGPILTDSGGFQVFSLGELRKITEEGVKFQSPVNGDRCFLTPEESMRIQKVLNSDIVMIFDECTPHPADLQQAGDSMRLSLRWAERSKRAHEGNPNALFGIVQGGMHESLRDESLAGLVNIGFDGYAIGGLSVGEPKEDMLRILDHVGPQMPAEKPRYLMGVGTPEDLVDAVSRGVDMFDCVMPTRNARNGWLFTRFGTVRIKNAQYRLDMRPLDEACGCYTCRNFTRAYLHHLHRIGEILGARLNTIHNLYYYQELMQGIRRAIEEGRFADFVREFKQARVAGS

SEQ ID NO: 61399 - protein, 367 aa, Sulfuricella sp.
  misc_feature (1)..(367): tr|A0A0E9MD16|A0A0E9MD16_9PROT Queuine tRNA-ribosyltran sferase OS=Sulfuricella sp. T08 OX=1632857 GN=tgt PE=3 SV=1
MKFELLATDGPARRGTLTLAHGTVETPAFMPVGTYGTVKAMSPAELKEIGAHIVLGNTFHLWLRPGLEVIAAHGGLHRFMGWDGPILTDSGGFQVFSLGDLRKITEEGVKFQSPVNGDRCFLTPEESMRIQKVLNSDIVMIFDECTPHPADLQQAGDSMRLSLRWAERSKRAHEGNPNALFGIVQGGMHESLRDESLAGLVNIGFDGYAIGGLSVGEPKEDMLRILDHVAPQMPADKPRYLMGVGTPEDIVDAVSRGVDMFDCVMPTRNARNGWLFTRFGTVRIKNAQYRLDMRPLDEVCGCYTCRNFTRAYLHHLHRIGEILGARLNTIHNLHYYQELMQGIRRAIEEGRLAEFVQEFRQARVAGS

SEQ ID NO: 61400 - protein, 373 aa, Sulfuricurvum kujiense
  misc_feature (1)..(373): tr|A0A2D3WA69|A0A2D3WA69_9HELI Queuine tRNA-ribosyltran sferase OS=Sulfuricurvum kujiense OX=148813 GN=tgt PE=3 SV=1
MQFHVDATCGNARACTITTAHSTIQTPIFMPVGTVGSVKSLDMADMTELLDTQIILANTYHTYLRPGDETIAKLGGLHEFTTYPKSFLTDSGGFQAFSLSDISKPTERGIEFRSHIDGSKHFFTPEKVIDIQNNLNSDIMMILDDLVALPATQERIKTSIQRTTQWAQQSIDYHRNNQTKGIGINQNIFAIIQGGTDFNFRTQSAQELCAMDYDGFAIGGLSVGEANNLMYDTVEHTTPLMPSDKPRYLMGVGTPEDLVENIERGVDMFDCVMPTRNARNGTLFTTFGKVNIKGSRYKFDSEPIDPACTCYTCRRYSRAYLNHLFRSRELTYFRLASLHNLHYYLWLVRQAREAILAGKFVEFKKDFYARRQS

SEQ ID NO: 61401 - protein, 373 aa, Sulfuricurvum kujiense
  misc_feature (1)..(373): tr|E4U2Q6|E4U2Q6_SULKY Queuine tRNA-ribosyltransferase OS=Sulfuricurvum kujiense (strain ATCC BAA-921 / DSM 16 994 / JCM 11577 / YK-1) OX=709032 GN=tgt PE=3 SV=1
MQFNVDATCGKARACTITTAHSTIQTPIFMPVGTVGSVKALDMADMTELLDTQIILANTYHMYLRPGDETVAKMGGLHGYTTYPNSFLTDSGGFQAFSLSDISKPTESGIEFRSHIDGSKHFFTPEKVIDIQNNLNSDIMMILDDLVALPATQERIKTSIQRTTQWAQQSIDYHRYNQSKGIGINQNIFAIIQGGTDFNFRTQSAEELCAMDYDGFAIGGLSVGESNNLMYDTVEHTTPLMPADKPRYLMGVGTPEDLVENIERGVDMFDCVMPTRNARNGTLFTTFGKVNIKGAVYKYDAQPIDPDCQCYTCRRYSRAYLHHLFRSREITYFRLASLHNLHYYLWLVRQAREAIIAGQFIEFKKDFYARRQS

SEQ ID NO: 61402 - protein, 373 aa, Sulfuricurvum sp.
  misc_feature (1)..(373): tr|A0A2D0I5T2|A0A2D0I5T2_9HELI Queuine tRNA-ribosyltran sferase OS=Sulfuricurvum sp. PD_MW2 OX=2027917 GN=tgt P E=3 SV=1
MQFHVDATCGNARACTITTAHSTIQTPIFMPVGTVGSVKALDMSDMTDLLDTQIILANTYHTYLRPGDETIAKLGGLHGFTTYPKSFLTDSGGFQAFSLSDISKPTEHGIEFRSHIDGSKHFFTPEKVIDIQNNLNSDIMMILDDLVALPATQERIRTSIKRTTQWAQQSIDYHRNNQSKGIGINQNIFAIIQGGTDFNFRTQSAEELCAMDYDGFAIGGLSVGEANNLMYDTVEHTTPLMPSDKPRYLMGVGTPEDLVENIERGVDMFDCVMPTRNARNGTLFTTFGKVNIKGAAYKFDSEPIDPACECYTCRRYSRAYLHHLFRSREITYFRLASLHNLHYYLWLVKQARQAIIEGKFKEFKKDFYARRQA

SEQ ID NO: 61403 - protein, 375 aa, Sulfuricurvum sp.
  misc_feature (1)..(375): tr|A0A0C2ZS91|A0A0C2ZS91_9HELI Queuine tRNA-ribosyltran sferase OS=Sulfuricurvum sp. PC08-66 OX=1539066 GN=tgt PE=3 SV=1
MQFSLQASDGSARAGTLKTAHSTILTPVFMPVGTLASVKALDMADIQSELDAQIILANTYHTYLRPGDEVIAQMGGLHGFTSYPKSFLTDSGGFQAFSLSKNTQHFDEGIEFKSHIDGSRHLFTPKKVLDIQYNLNSDIMMILDDLVALPATPERIRASIERTTQWAKTSIDYHRSMQSQGRGLTNNIFAIIQGGTDKNFRTQSANELCALDFDGFAIGGLSVGEPNQAMYDTVEHTTPLMPVDKPRYLMGVGTPEDLVENIARGIDMFDCVMPTRNARNGTLFTHFGRITIKATRFKTDPRPIDENCTCMTCQRYSRSYLSHLFRAKELTYFRLASIHNLHYYLELVRMAREAIIAGQFAQFKHDFYAKRKEPQ

SEQ ID NO: 61404 - protein, 367 aa, Sulfuriferula multivorans
  misc_feature (1)..(367): tr|A0A401JGX1|A0A401JGX1_9PROT Queuine tRNA-ribosyltran sferase OS=Sulfuriferula multivorans OX=1559896 GN=tgt PE=3 SV=1
MEFKLHSTDGLARRGTLTLAHGAVETPAFMPVGTYGTVKAMSPLELKEIGAHIVLGNTFHLWLRPGLEAIEAHGGLHRFMGWDRPILTDSGGFQVFSLGALRKITEEGVKFASPLNGDRLFLTPEESMRIQKVLNSDIVMIFDECTPYPAEPDAAAYSMRLSLRWAERSKLAHAGNPNALFGIVQGGMYEDLRDESLRELAAMDFDGYAIGGLSVGEPKDDMRRILAHTAPQLPQHKPRYLMGVGTPEDIVASVQHGVDMFDCVLPTRNARHGILFTRHGDLRIKNARFRTDIAPVDAQCGCYCCRNFSRAYLHHLIRCGEILGARLATLHNLHYYQELMAGLRAAIETGTLGDFVAGFHEQRAGSC

SEQ ID NO: 61405 - protein, 367 aa, Sulfuriferula plumbiphila
  misc_feature (1)..(367): tr|A0A512L7C8|A0A512L7C8_9PROT Queuine tRNA-ribosyltran sferase OS=Sulfuriferula plumbiphila OX=171865 GN=tgt P E=3 SV=1
MKFKLHSTDDLARRGTLNLTHGTVETPAFMPVGTYGTVKAMSPDELKQIGAHIVLGNTFHLWLRPGLEAVEAHGGLHRFMGWDRPILTDSGGFQVFSLGALRKITEEGVKFASPLNGDRLFLTPEESMRIQKVLNSDIVMIFDECTPYPAEPDAAAYSMRLSLRWAERSQAAHAGNPNALFGIVQGGMYEDLRDESLRELAAMDFDGYAIGGLSVGEPKDDMRRILAHTAPQLPQHKPRYLMGVGTPEDIVASVQNGVDMFDCVLPTRNARHGILFTRHGDLRIRNARFRTDIAPVDAQCGCYCCRNFSRAYLHHLIRCGEILGARLATLHNLHYYQELMAGLRAAIETGTLSDFVARFHEQRAGSC

SEQ ID NO: 61406 - protein, 367 aa, Sulfuriferula sp.
  misc_feature (1)..(367): tr|A0A1Y0G620|A0A1Y0G620_9PROT Queuine tRNA-ribosyltran sferase OS=Sulfuriferula sp. AH1 OX=1985873 GN=tgt PE=3 SV=1
MQFQLHKTDGLARRGTLTLAHGQVETPAFMPVGTYGTVKAMAPDELKTVGAQIVLGNTFHLWLRPGLEAIEAHGGLHKFMGWDRPILTDSGGFQVFSLGALRKITEQGVKFSSPQNGDKLFLSPEESMHIQKVLNSDIVMIFDECTPYPAEHDAAAYSMRLSLRWAERSKTAHAGNPNALFGIVQGGMYEDLRDESLRELGQMNFDGYAIGGLSVGEPKPDMRRILAHTAPQLPADKPRYLMGVGTPEDIVASVQHGVDMFDCVLPTRNARHGILFTKFGDIRIKNARFRIDTAPVDNECTCYCCSNFSRAYLHHLIRCGEILGARLATIHNLHYYQQLMTGLRQAIENGKLNDFVAKFHEQRALSC

SEQ ID NO: 61407 - protein, 373 aa, Sulfurifustis variabilis
  misc_feature (1)..(373): tr|A0A1B4V556|A0A1B4V556_9GAMM Queuine tRNA-ribosyltran sferase OS=Sulfurifustis variabilis OX=1675686 GN=tgt P E=3 SV=1
MRFELLATDGAARRGRMTFARGTVETPAFMPVGTYGTVKAMTPEELRAAGAEIILGNTFHLMLRPGVDVVRAHGGLHRFTHWEGPILTDSGGFQVWSLGALRKLTEEGVWFQSPVDGAKVFLGPEEAVAVQHALDADIVMVFDECTPYPASESEARASMELSLRWAERCRRAHGDHPAALFGIVQGGMHEHLREISLTGLRQIGFDGYALGGLSVGEPKETMYAVVAHMAPRMPADRPRYLMGVGTPEDLVEAVRRGMDMFDCVLPTRNARNGWLYTSTGHLKIKNSRHAADTSPVDPRCDCYTCRHYSRAYLRHLHQANEILGARLATVHNLHYYQALMRGLRTAIDEKRLDDFANKFYRMRRRETPLEAEE

SEQ ID NO: 61408 - protein, 379 aa, Sulfurihydrogenibium azorense
  misc_feature (1)..(379): tr|C1DVR0|C1DVR0_SULAA Queuine tRNA-ribosyltransferase OS=Sulfurihydrogenibium azorense (strain Az-Fu1 / DSM 1 5241 / OCM 825) OX=204536 GN=tgt PE=3 SV=1
MFKFQLIKKEGNARLGKIYTPHGEIETPIFMPVGTQGTVKAITVKHLEEDIKAQIILGNTYHLYLRPGLEVLKKFNGLHNFSSWKKPILTDSGGFQVFSLSIGKEKEGKQKAQVVVTEEGVKFKSHLDGSWHFFTPEFVVEIQEIIGSDIMMPLDECPPYPCSHQYAKESLERTVRWLKRSKQAKKNPNQALFGIIQGSVYEDLRKESTLKTVELDMDGYSIGGLSVGEPKEFMYSMTEVVTSLLPENKPRYLMGVGTPEDLLEAIDRGIDMFDCVIPTRNGRNGTLFTHFGKINIKSAKYKFDDTPVDPLCDCYTCKNFSKGYLRHLYNAEEITAYILGTIHNLRFYLKLMEDVRNAIKNESFSIFKKEFLDLYNSNI

SEQ ID NO: 61409 - protein, 379 aa, Sulfurihydrogenibium sp.
  misc_feature (1)..(379): tr|B2VA97|B2VA97_SULSY Queuine tRNA-ribosyltransferase OS=Sulfurihydrogenibium sp. (strain YO3AOP1) OX=436114 GN=tgt PE=3 SV=1
MFKFELLKEDGNARLGKIYTPHGEIDTPIFMPVGTQGTVKAITMKNLEEINAQIILGNTYHLYLRPGLEVLKKFGGLHNFSSWQKPILTDSGGFQVFSLAAGKEKEGKQKAQVVITEEGVKFKSHLDGSWHFFTPEFVVEIQEIIGSDIMMPLDECPPYPSSHQYALESLKRTIRWLERSKKAKKNPNQALFGIIQGSTYEDLRRESALRTVELDMDGYSIGGLSVGEPKEYMYAMTEIIAPLLPKDKPRYLMGVGTPEDLLESVDRGIDMFDCVMPTRNGRNGTLFTHFGKINIKSAKYKLDETPVDPLCDCYTCKNFSKGYLRHLYNAEEITAYILGTIHNLRFYLRLMEDIREAIKENRFKQFKKEFLERYNGQSV

SEQ ID NO: 61410 - protein, 378 aa, Sulfurihydrogenibium sp.
  misc_feature (1)..(378): tr|A0A2J6X183|A0A2J6X183_9AQUI Queuine tRNA-ribosyltran sferase OS=Sulfurihydrogenibium sp. OX=2053621 GN=tgt P E=3 SV=1
MFRFSLIKKDGNARLGKIYTSHGEIETPIFMPVGTQGTVKAITMKHLEEINAQIILGNTYHLYLRPGLEVLKKFGGLHNFSSWKKPILTDSGGFQVFSLAVGKEKEGKQKAQVIITEEGVKFKSHLDGSWHFFTPEFVVEIQEIIGSDIMMPLDECPPYPCSHQYAKQSLDRTVRWLKRSKEAKKNPNQALFGIIQGSVYEDLRKESTLKTLELDMDGYSIGGLSVGEPKEFMYSMTEVVTSLLPENKPRYLMGVGTPEDLLESVDRGVDMFDCVMPTRNGRNGTLFTHYGKINIKSAKYKLDDSPIDPLCDCYTCKNFSKGYLRHLYNAEEITAYILGTIHNLRFYLKLMEDIRQAIKEDRFKSFKREFLDRYNNQG

SEQ ID NO: 61411 - protein, 202 aa, Sulfurihydrogenibium yellowstonense
  misc_feature (1)..(202): tr|C4FLF5|C4FLF5_9AQUI Queuine tRNA-ribosyltransferase (Fragment) OS=Sulfurihydrogenibium yellowstonense SS-5 OX=432331 GN=SULYE_1409 PE=4 SV=1
MPVGTQGTVKAITMKHLEEINAQIILGNTYHLYLRPGLEVLKKFGGLHNFSSWQKPILTDSGGFQVFSLAAGKEKEGKQKAQVVITEEGVKFKSHLDGSWHFFTPEFVVEIQEIIGSDIMMPLDECPPYPSSHQYALESLKRTIRWLERSKKAKKNPNQALFGIIQGSTYEDLRRESALRTIELDMDGYSVGGLSVGEPKEY

SEQ ID NO: 61412 - protein, 374 aa, Sulfurimonas autotrophica
  misc_feature (1)..(374): tr|E0US31|E0US31_SULAO Queuine tRNA-ribosyltransferase OS=Sulfurimonas autotrophica (strain ATCC BAA-671 / DSM 16294 / JCM 11897 / OK10) OX=563040 GN=tgt PE=3 SV=1
MEFTLDATSKNARAGTITTAHSTIKTPVFMPVGTIGSVKSLDAHDVLELLGAEIILANTYHMYLRPGDKTVAKMGKLHGFTKYPKSFLTDSGGFQAFSLSDMSKPKTDGIEFRSHIDGSKHFFTPKKVIDIQHNLGSDIMMILDDLVALPATQERIKLSIERTTAWAKESIEYFRMKQKEGVGTEQNIFAIIQGGTDKAFRTKSATELCALDYDGFAIGGLSVGELNNEMYDTVEHTVQYMPKDKPRYLMGVGTPEDLIENIERGIDMFDCVMPTRNARNGTLFTSFGKMNIKGAKFKEDPAPIDPECQCLTCKTYSRAYINHLFRSREITYFRLATIHNLHYYLTLMREVREAILENRFAEYKKEFYKKRSKS

SEQ ID NO: 61413 - protein, 372 aa, Sulfurimonas denitrificans
  misc_feature (1)..(372): sp|Q30S46|TGT_SULDN Queuine tRNA-ribosyltransferase OS= Sulfurimonas denitrificans (strain ATCC 33889 / DSM 125 1) OX=326298 GN=tgt PE=3 SV=1
MEFTLEATSKNARACTIKTAHSTIKTPVFMPVGTLGSVKALDMEDVLDLLGAEIILANTYHMYLRPGDETVAKMGKLHGFTTYPKSFLTDSGGFQAFSLSDISKASENGIEFRSHIDGSKHFFTPKKVIDIQHNLGSDIMMILDDLVALPATGERIALSIERTTAWAKESIEYFRKKQKEGIGAEQNIFAIIQGGTDKAFRTKSATELCALDFDGFAIGGLSVGELNNEMYDTVEHTVKYMPKDKPRYLMGVGTPEDLIENIERGIDMFDCVMPTRNARNGTLFTSFGRLNIKGATYKEDAQPVDSECECLTCKRYSRAYLNHLFRSREIAYFRLATIHNLHYYLNLMREAREAILEDKYAEFKAEFYRKRG

SEQ ID NO: 61414 - protein, 373 aa, Sulfurimonas gotlandica
  misc_feature (1)..(373): tr|B6BL99|B6BL99_SULGG Queuine tRNA-ribosyltransferase OS=Sulfurimonas gotlandica (strain DSM 19862 / JCM 1653 3 / GD1) OX=929558 GN=tgt PE=3 SV=1
MEFTLEATSKNARACTIKTAHSTIKTPVFMPVGTLGSIKALDMDDVLNVLGAEIILANTYHMYLRPGDETVAKMGKLHKFTTYPKSFLTDSGGFQAFSLSDISKPKENGIEFRSHIDGSKHFFTPKKVIDIQNNLGSDIMMILDDLVALPATQERIKLSIERTTAWAKESIEYFRSKQAKGIGQEQNIFAIIQGGTDKAFRTKSATELCALDYDGFAIGGLSVGELNNEMYDTVEHTVQYMPKDKPRYLMGVGTPEDLIENIERGIDMFDCVMPTRNARNGTLFTSFGKINIKGAKFKEDEAPIDPECKCITCQRYSRAYLNHMFRAREITYFRLATIHNLHYYLNLMREVREAILEDRFAEYKEVFYKKRAN

SEQ ID NO: 61415 - protein, 373 aa, Sulfurimonas hongkongensis
  misc_feature (1)..(373): tr|T0J2V4|T0J2V4_9HELI Queuine tRNA-ribosyltransferase OS=Sulfurimonas hongkongensis OX=1172190 GN=tgt PE=3 SV =1
MDFKIDATSKNARACTIKTAHSTIKTPVFMPVGTLGSIKALDMQDVLETLGADIILANTYHMYLRPGDKTVAKMGKLHGFTTFFKSFLTDSGGFQAFSLSDISKPKADGIEFRSHIDGSKHFFTPKKVIDIQNNLGSDIMMVLDDLVALPASQERIKLSIERTTEWARESIEYFRQKQESGIGVEQNIFAIIQGGTDKSFREKSAKELCELDFDGFAIGGLSVGELNNEMYDTVEHTTQFMPKEKPRYLMGVGTPEDLIENIDRGIDMFDCVMPTRNARNGTLFTSFGKLNIKGASFKEDKTPIDPECRCLTCQRYSRAYLNHLFRSREITYFRLATLHNLHYYLNLMREAREAILEDRYDEFKSEFYKKREA

SEQ ID NO: 61416 - protein, 372 aa, Sulfurimonas sp.; identical to SEQ ID NO: 56034
  misc_feature (1)..(372): tr|A0A2M7D0P5|A0A2M7D0P5_9HELI Queuine tRNA-ribosyltran sferase OS=Sulfurimonas sp. CG02_land_8_20_14_3_00_36_6 7 OX=1975545 GN=tgt PE=3 SV=1

SEQ ID NO: 61417 - protein, 372 aa, Sulfurimonas sp.
  misc_feature (1)..(372): tr|A0A2N6GIK0|A0A2N6GIK0_9HELI Queuine tRNA-ribosyltran sferase OS=Sulfurimonas sp. OX=2022749 GN=tgt PE=3 SV=1
MQFTLNATSKNARACTIKTAHSTIKTPVFMPVGTVGSVKALDMQDVLDLLGAEIILANTYHMYLRPGDKTVAKMGKLHGFTTYPKSFLTDSGGFQAFSLSDISKASQDGIEFRSHIDGSKHFFTPKKVIDIQHNLGSDIMMILDDLVALPATQERIALSIERTTAWAKESIEYFRAKQKEGIGVEQNIFAIIQGGTDKVFRTKSATELCKLDFDGFAIGGLSVGEANQDMYDTVEHTVEYMPTDKPRYLMGVGTPEDLIENIERGIDMFDCVMPTRNARNGTLFTSFGRLNIKGAVYKEDNSPVDNECTCLTCQRYSRAYLNHLFRAREITYFRLATIHNLHYYLNLMKEAREAILGDRFTEFKAEFYAKRS

SEQ ID NO: 61418 - protein, 367 aa, Sulfurirhabdus autotrophica
  misc_feature (1)..(367): tr|A0A4R3Y2K9|A0A4R3Y2K9_9PROT Queuine tRNA-ribosyltran sferase OS=Sulfurirhabdus autotrophica OX=1706046 GN=tg t PE=3 SV=1
MKFEIHAQDGLSRRGTLHLAHGKVETPAFMPVGTYGTVKAMSPVELNDIGAHIVLGNTFHLWLRPGMEVIEAHGGLHGFMGWDKPILTDSGGFQVFSLGDLRKITEEGVKFRSPVNGDPCFLTPEESMRIQRVLNSDIVMVFDECTPHPADLQQADESMQLSLRWAARSKRAHEGNTNALFGIVQGGMHESLRDVSLQGLMDIGFDGYAIGGLSVGEPKEDMMRILAHTAPKLPEKKPRYLMGVGTPEDLVDAVLQGVDMFDCVMPTRNARNGWLFTRNGTVKIRNAQYRLDTAPLDEKCTCYTCQNFTRAYLHHLYRLGEILGARLNTIHNLHYYQELMQGLRQAIEAGKLTDFVAEFRQARAATC

SEQ ID NO: 61419 - protein, 370 aa, Sulfurisoma sediminicola
  misc_feature (1)..(370): tr|A0A497XAI8|A0A497XAI8_9PROT Queuine tRNA-ribosyltran sferase OS=Sulfurisoma sediminicola OX=1381557 GN=tgt P E=3 SV=1
MKFDLITQDGAARRGTLTLAHGTVETPVFMPVGTYGTVKAMAPNELHEIGAKIVLGNTFHLWLRPGLEVIAAHGGLHRFMGWDGPILTDSGGFQVFSLGDLRKISEDGVKFQSPINGDRLFMRPEDSMQIQHVLNSDIVMIFDECTPYPATEKQAADSMRLSLLWARRSRDEHDRLANRNALFGIVQGGMFEPLREESLAGLAGIGFDGYAIGGLSVGEPKEEFTRILAHTAPRLPAEKPRYLMGVGTPEDIVYAVNRGIDMFDCVLPTRNARNGHLFTRHGDIRIKNAQHKNDLRPLDASCGCYCCRNFSRAYLHHLHRTGEILGSRLNTIHNLFYYQTLMAELRAAIEARGLAAYTAEFHRGRAGGLV

SEQ ID NO: 61420 - protein, 370 aa, Sulfuritalea hydrogenivorans
  misc_feature (1)..(370): tr|W0SIR5|W0SIR5_9PROT Queuine tRNA-ribosyltransferase OS=Sulfuritalea hydrogenivorans sk43H OX=1223802 GN=tgt PE=3 SV=1
MNFELIATDGAARRGTLTLAHGVAPTPTFMPVGTYGTVKAMSPDELVGIGASIVLGNTFHLWLRPGLEVVAAHGGLHRFMGWNGPILTDSGGFQVFSLGDLRKITEEGVKFASPINGDRLFLTPEESMRIQHVLNSDVVMIFDECTPYPADLSTAAESMRLSLRWAQRSRDEHDRLQNTNALFGIVQGGMHEALRDESLAALVDIGFDGFAIGGLSVGEPKEEMSRILAHTAPRLPADKPRYLMGVGTPEDLVYAVGQGIDMFDCVMPTRNARNGWLFTRHGDVKIKNAQYKADTRPLDESCDCHTCRNFTRAYLHHLHRVGEILGARLNTIHNLFYYQTLMAEMRAAIEQGDFAAFCLRFKRGRAGEQV

SEQ ID NO: 61421 - protein, 367 aa, Sulfuritortus calidifontis
  misc_feature (1)..(367): tr|A0A4R3K0H5|A0A4R3K0H5_9PROT Queuine tRNA-ribosyltran sferase OS=Sulfuritortus calidifontis OX=1914471 GN=tgt PE=3 SV=1
MQFELLGRDGQARRGRLTTAHGVIETPVFMPVGTYGVVKSLTPDEVRALGAQIVLGNTFHLWLRPGLEVIAAHGGLHGFMRWDGPILTDSGGFQVYSLTHLRKISEEGVRFASPLNGDRLLLTPEKSMEIQRVLNSDIVMIFDECTPYPADHRTAKTSMELSLRWAERSKTAHAGNPNALFGIVQGGMYEDLRDASLEQLSRIGFDGYAIGGLSVGEPKADMERILAHVAPRLPEDRPRYLMGVGTPEDLVHAVSRGIDMFDCVMPTRNARHGVLFTRTGELRIKNAKYRSDLSPIDEACDCYTCRHFSRAYLHHLFRTGETLSGRLNSIHNLNYYQTLMRELREAIEQGRLAAHIETFLAARGIRA

SEQ ID NO: 61422 - protein, 371 aa, Sulfurivirga caldicuralii
  misc_feature (1)..(371): tr|A0A1N6E4S1|A0A1N6E4S1_9GAMM Queuine tRNA-ribosyltran sferase OS=Sulfurivirga caldicuralii OX=364032 GN=tgt P E=3 SV=1
MKFELLKTDGPARRGRIIFDRGVVETPAFMPVGTYGTVKAMTPEELKGIGAQIILGNTFHLALRPGTEIIRAHGDLHDFMHWDGPILTDSGGFQVFSLGEMRKIREEGVTFRSPINGAKIFMGPEESMQIQRELGSDIVMIFDECTPYPADHETARLSMELSLRWAERSKRAHADNPAALFGIVQGGMYEDLRKRSAEALQQIGFDGYAIGGLSVGEPKDEMMKVLDFTAPELPQDRPRYLMGVGKPEDLVESVRRGMDMFDCVIPTRNARNGFLFTSTGVVKIRNAVYKHSTQPLDPDCDCYTCRNYTRAYLHHLDRCGEILGARLNTIHNLHYYQHLMRQMREAIEAGTFEAFVADFYARRGLPVPPLA

SEQ ID NO: 61423 - protein, 373 aa, Sulfurospirillum barnesii
  misc_feature (1)..(373): tr|I3XXF5|I3XXF5_SULBS Queuine tRNA-ribosyltransferase OS=Sulfurospirillum barnesii (strain ATCC 700032 / DSM 10660 / SES-3) OX=760154 GN=tgt PE=3 SV=1
MEFQIDKTDGNARACTIKTAHSTIQTPVFMPVGTVGSVKSLDAVDMSEMLGAQIILGNTYHLYLRPSDEVVKHFGGLHGFTKFPNSFLTDSGGFQAFSLSDISKADSNGIMFKSHIDGSTHYFTPEKVLDIQYNLNSDIMMILDDLVALPATKERIALSIKRTTDWAKRAITYHQEKQAQGIGKHQNIFAIIQGGTDKEFRHISANELCALPFDGFAIGGLSVGESNALMYETVEYTTPLMPKEKPRYLMGVGTPEDLVENVERGVDMFDCVMPTRNARNGSLFTSFGKISIKNAKFQKDESPLDPECDCFTCKHYSRGYLHHLFRAKELTYFRLASIHNLHYYLTLMKQMREAILKGEFKAFKAEFYRKRGK

SEQ ID NO: 61424 - protein, 373 aa, Sulfurospirillum deleyianum
  misc_feature (1)..(373): tr|D1B2G8|D1B2G8_SULD5 Queuine tRNA-ribosyltransferase OS=Sulfurospirillum deleyianum (strain ATCC 51133 / DSM 6946 / 5175) OX=525898 GN=tgt PE=3 SV=1
MEFQIDKIDGDARACTIKTAHSTIQTPVFMPVGTVGSVKSLDAFDMSEMLGAKIILGNTYHLYLRPNDEVVKHFGGLHGFTKFPNSFLTDSGGFQAFSLSDISKADKDGIMFKSHIDGSTHYFTPEKVLDIQYNLNSDIMMILDDLVALPATKERVALSIERTTNWAKRAISYHQKRQSEGVGLHQNIFAIIQGGTDKEFRRISAQELCALPFDGFAIGGLSVGESNALMYETVEFVTPLMPKEKPRYLMGVGTPEDLVENVERGVDMFDCVMPTRNARNGTLFTSFGKMSIKNAKFARDESAIDPECDCFTCKHYSRGYLHHLFRAKELTYFRLASIHNLHYYLTLMKQMREAILKGEFQTFKAEFYRKRGK

SEQ ID NO: 61425 - protein, 373 aa, Sulfurospirillum halorespirans
  misc_feature (1)..(373): tr|A0A1D7TKB0|A0A1D7TKB0_9PROT Queuine tRNA-ribosyltran sferase OS=Sulfurospirillum halorespirans DSM 13726 OX= 1193502 GN=tgt PE=3 SV=1
MEFQIDKTDGSARACTIKTAHSTIQTPVFMPVGTVGSVKSLDAVDMSEMLGAQIILGNTYHLYLRPNDEVIKHFGGLHGFTKFPNSFLTDSGGFQAFSLSDISKADVNGIMFKSHIDGSSHYFTPEKVLDIQYNFNSDIMMILDDLVALPATKERIALSIKRTTDWAQRAITYHKQKQSEGIGLHQNIFAIIQGGTDKEFRQISANELCALPFDGFAIGGLSVGESNALMYETVEFVTPLMPKDKPRYLMGVGTPEDLVENVERGVDMFDCVMPTRNARNGSLFTSFGKISIKNAKFQRDEAPLDPECECFTCKHYSRGYLHHLFRAKELTYFRLASIHNLHYYLTLMKQMRQAILKGEFKAFKAEFYAKRAK

SEQ ID NO: 61426 - protein, 373 aa, Sulfurospirillum multivorans
  misc_feature (1)..(373): tr|A0A5B9TS04|A0A5B9TS04_SULMU Queuine tRNA-ribosyltran sferase OS=Sulfurospirillum multivorans OX=66821 GN=tgt PE=3 SV=1
MEFQIDKTDGSARACTIKTAHSTIQTPVFMPVGTVGSVKSLDAVDMSEMLGAQIILGNTYHLYLRPNDEVIKHFGGLHGFTKFPNSFLTDSGGFQAFSLSDISKADVNGIMFKSHIDGSSHYFTPEKVLDIQYNFNSDIMMILDDLVALPATKERIALSIKRTTDWAQRAITYHKQKQSEGIGLHQNIFAIIQGGTDKEFRRISANELCALPFDGFAIGGLSVGESNALMYETVEFVTPLMPTDKPRYLMGVGTPEDLVENVERGVDMFDCVMPTRNARNGSLFTSFGKISIKNAKFQRDEAPLDPECECFTCKHYSRGYLHHLFRAKELTYFRLASIHNLHYYLTLMKQMRQAILEGRFKAFKAEFYAKRAN

SEQ ID NO: 61427 - protein, 373 aa, Sulfurospirillum sp.
  misc_feature (1)..(373): tr|A0A432SLU6|A0A432SLU6_9PROT Queuine tRNA-ribosyltran sferase OS=Sulfurospirillum sp. OX=2053622 GN=tgt PE=3 SV=1
MQFTIDKTDGAARACTIRTAHSTIVTPVFMPVGTVGTVKALDSYDMLELLQTDIILANTYHLYLRPGDETVGHFGGLHKFANYPKSFLTDSGGFQAFSLSDISRADENGIHFKSHIDGSSHYFTPEKVLDIQYNLGSDIMMILDDLIALPAEKERIKLSIERTTNWARASIGYHRQKQQEGIGVDQNIFAIVQGGIDKEFRKLSATQLTEFDFDGFAIGGLSVGEANADMYDTVAYTVPFLPTEKPRYLMGVGTPEDLIENIERGVDMFDCVMPTRNARNGTLFTTFGKINIKGAKHKLSEDPIDSACSCHTCKNYSRGYLNHLFRAKELTYFRLASLHNLHYYLTLMREVREAILKGEFQAYKREFYAKRAV

SEQ ID NO: 61428 - protein, 374 aa, Sulfurospirillum sp.
  misc_feature (1)..(374): tr|A0A2D3W774|A0A2D3W774_9PROT Queuine tRNA-ribosyltran sferase OS=Sulfurospirillum sp. UBA12182 OX=2015905 GN= tgt PE=3 SV=1
MEFTIDNVDNKARACTIRTAHSTIQTPVFMPVGTVGSVKSLDASDMAQMLGAKIILGNTYHLYLRPNDKVVKHFGGLHGFTKFPNSFLTDSGGFQAFSLSDISKADENGIHFRSHIDGSKHYFTPQSVLDIQYNLNSDIMMILDDLVALPATRERIALSIQRTTSWAKQAIEYHISQKQKGIGTHQKIFAIIQGGTDKEFRKISANELCSLEDFDGYAIGGLSVGEANQEMYDTVEWTTPFMPTQKPRYLMGVGTPEDLVENVERGVDMFDCVMPTRNARNGTLFTSFGKINIKSAKYIMDENPIDPECDCHTCKNYSRGYINHLFRSKELTYFRLASLHNLHYYLTLMKQIREAILLNRFSEFKKEFYAKRVV

SEQ ID NO: 61429 - protein, 373 aa, Sulfurovum lithotrophicum
  misc_feature (1)..(373): tr|A0A2T4CQR6|A0A2T4CQR6_9PROT Queuine tRNA-ribosyltran sferase OS=Sulfurovum lithotrophicum OX=206403 GN=tgt P E=3 SV=1
MEFQIDKTDGFARACTIKTAHSTVQTPVFMPVGTVGAVKALDAMDLATFIKPEIILANTYHMYIRPGDDVVAKMGKLHGFTKYPKSFLTDSGGFQAFSLSDNVKIDEGGITFASHLDGSKHYFTPKKVIDIQHNLGSDIMMILDDLVALPATQERIAASIDRTTRWAQESIDYFREKQAEGIGVEQNIFAIIQGGTDKAFREKSAKELCAMDYDGFAIGGLSVGEANQDMYDTVEWTTQFMPKDKPRYLMGVGTPEDLVENVARGVDMFDCVMPTRNARNGTLFTSFGKVNIKKAEFTTDEGPIDPECECMVCKTYSRSYLRHLYRAREITYFRLGTIHNLYYYLNLMKEMREAILEERFDAFKVEFYKKRKK

SEQ ID NO: 61430 - protein, 373 aa, Sulfurovum riftiae
  misc_feature (1)..(373): tr|A0A151CJ02|A0A151CJ02_9PROT Queuine tRNA-ribosyltran sferase OS=Sulfurovum riftiae OX=1630136 GN=tgt PE=3 SV =1
MQFQIDKTDGKARACTIKTAHSTVQTPVFMPVGTVGAVKALDATDLATFIKPEIILANTYHMYIRPGDEVVAKMGKLHGFTKYPKSFLTDSGGFQAFSLSDNVKIDEGGITFRSHLDGSKHYFTPTKVIDIQHNLGSDIMMILDDLVALPATQERIAASIDRTTRWAEESIVYFRAKQKEGIGVEQNIFAIIQGGTDKAFREKSAKELCALDYDGFAIGGLSVGEANQDMYDTVEWTTQFMPKEKPRYLMGVGTPEDLVENVSRGVDMFDCVMPTRNARNGTLFTSFGKVNIKKAEYTIDEKPIDPECNCMVCQTYSRAYLRHLFRAREITYFRLATIHNLYYYLNLMKEMREAILEERFDAFKAAFYKKREQ

SEQ ID NO: 61431 - protein, 373 aa, Sulfurovum sp.
  misc_feature (1)..(373): sp|A6Q906|TGT_SULNB Queuine tRNA-ribosyltransferase OS= Sulfurovum sp. (strain NBC37-1) OX=387093 GN=tgt PE=3 S V=1
MHFQIDKTDSKARACTIKTAHSTIQTPVFMPVGTVGAVKALDATDLATFIKPEIILGNTYHLYIRPGDEVIKTMGKLHGFTKYPKSFLTDSGGFQAFSLSDNVKIDEGGITFRSHLDGSKHYFTPKKVIDIQNNLGSDIMMILDDLVALPATQERIKASIERTTRWAEESITYHRANQKKGIGVDQNIFAIIQGGTDKAFREKSAKELCRLDYDGFAIGGLSVGEANQDMYDTVEWTTQFMPEEKPRYLMGVGTPEDLVENVSRGVDMFDCVMPTRNARNGTLFTSFGKVNIKKAEYTTDAGPIDPECGCMVCQTYSRAYLRHLFRSREITYFRLATIHNLYYYLNLMKEMREAILEERFNDFKVTFYRKRGK

SEQ ID NO: 61432 - protein, 372 aa, Sulfurovum sp.
  misc_feature (1)..(372): tr|I2K931|I2K931_9PROT Queuine tRNA-ribosyltransferase OS=Sulfurovum sp. AR OX=1165841 GN=tgt PE=3 SV=1
MEFQIDKTDGKARACTIKTAHSTIQTPVFMPVGTVGAVKALDATDLATFIKPEIILGNTYHLYMRPGDETIKTMGKLHGFTKYPKSFLTDSGGFQAFSLSDNVKIDENGITFRSHLDGSKHYFTPKKVIDIQHNLGSDIMMILDDLVALPATQERIKASIERTTRWAQESIDYFRAKQEEGIGVYQNIFAIIQGGTDKAFREKSAKELCAMDYDGFAIGGLSVGEANQDMYDTVEWTTQFMPEEKPRYLMGVGTPEDLVENVARGVDMFDCVMPTRNARNGTLFTSFGKVNIKKAEYTTDEGPVDPECDCMVCKTYSRSYLRHLFRAREITYFRLATIHNLYYYLNLMSQMREAILENRFDAFKVEFYEKRK

SEQ ID NO: 61433 - protein, 376 aa, Sunxiuqinia dokdonensis
  misc_feature (1)..(376): tr|A0A0L8V753|A0A0L8V753_9BACT Queuine tRNA-ribosyltran sferase OS=Sunxiuqinia dokdonensis OX=1409788 GN=tgt PE =3 SV=1
MNFTLQHQAVNSQARAGKLETGHGTIETPIFMPVGTAGSVKGIHVKDLKEDIQAQIILGNTYHLYLRPGTEIIEEAGGLHKFNGWSGPILTDSGGYQVFSLGDIRKLTEEGAKFQSHIDGSRHLFTPESVVDVQRKIGADIIMAFDECTPGDAGYDYAKKSLALTQRWLERCVNQMEKTKPLYGHGQSLFPIVQGAVYPDLREAAAKHATSIPSDGYAIGGLSVGESEADMYAMIEVVNPILPKDKPRYLMGVGTPINILEAIDRGVDMFDCVMPTRNGRNGMLFTKNGIINIRNKKWAADFSPVDQDGTSFVDHNYSKAFLRHLIISNEMLGAQIASQHNLAFYLWLVKEARRQILTDNFKAWKEELVQQLGKRL

SEQ ID NO: 61434 - protein, 376 aa, Sunxiuqinia elliptica
  misc_feature (1)..(376): tr|A0A4R6H472|A0A4R6H472_9BACT Queuine tRNA-ribosyltran sferase OS=Sunxiuqinia elliptica OX=655355 GN=tgt PE=3 SV=1
MDFTLHHQAVNSEARAGSLQTGHGTIETPIFMPVGTAGSVKGIHVKELKEDIQAQIILGNTYHLYLRPGTAIIEEAGGLHRFNGWDGPILTDSGGYQVFSLGDIRKLTEEGARFQSHIDGSRHLFTPENVIDTQRKIGADIIMAFDECTPGDADFDYAKKSLELTQRWLDRCVNQMAKTKPLYGHSQSLFPIVQGGVYPQLREAAAKHVTTIPSDGYAIGGLSVGEPEADMYAMIEVVNPILPKEKPRYLMGVGTPINILEGIDRGVDMFDCVMPTRNGRNGMLFTQNGIINIKNKKWADDFSPVDPDGTSYVDKQYSKAFLRHLIVANEMLGAQIASQHNLAFYLWLVKEARRQIMADTFKSWKEEMVQKLGQRL

SEQ ID NO: 61435 - protein, 376 aa, Sunxiuqinia elliptica
  misc_feature (1)..(376): tr|A0A1I2A8U5|A0A1I2A8U5_9BACT Queuine tRNA-ribosyltran sferase OS=Sunxiuqinia elliptica OX=655355 GN=tgt PE=3 SV=1
MDFTLHHQAVNSEARAGSLQTGHGTIETPIFMPVGTAGSVKGIHVKELKEDIQAQIILGNTYHLYLRPGTAIIEEAGGLHRFNGWDGPILTDSGGYQVFSLGDIRKLTEEGARFQSHIDGSRHLFTPENVIDTQRKIGADIIMAFDECTPGDADFDYAKKSLELTQRWLDRCVNQMAKTKPLYGHNQSLFPIVQGGVYPQLRETAAKHVTTIPSDGYAIGGLSVGEPEADMYAMIEVVNPILPKEKPRYLMGVGTPINILEGIDRGVDMFDCVMPTRNGRNGMLFTQNGIINIKNKKWADDFSPVDPDGTSYVDKQYSKAFLRHLIVANEMLGAQIASQHNLAFYLWLVKEARRQIMADTFKSWKEEMVQKLGQRL

SEQ ID NO: 61436 - protein, 375 aa, Superficieibacter electus
  misc_feature (1)..(375): tr|A0A2P5GSC9|A0A2P5GSC9_9ENTR Queuine tRNA-ribosyltran sferase OS=Superficieibacter electus OX=2022662 GN=tgt PE=3 SV=1
MKFELDTTDGRARRGRLVFDRGVVETPAFMPVGTYGTVKGMTPEEVEATGAQIILGNTFHLWLRPGQEIMKLHGDLHDFMQWKGPILTDSGGFQVFSLGDIRKITEQGVHFRNPINGDPIFLDPEKSMEIQFDLGSDIVMIFDECTPYPADWDYAKRSMEMSLRWAKRSRDRFDSLGNKNALFGIIQGSVYEDLRDISVKGLVEIGFDGYAVGGLAVGEPKADMHRILEHVCPQIPADKPRYLMGVGKPEDLVEGVRRGIDMFDCVMPTRNARNGHLFVTEGVVKIRNAKYKSDTGPLDAECDCYTCRNYSRAYLHHLDRCNEILGARLNTIHNLRYYQRLMAGLRKAIEEGKLESFVTDFYQRQGRPVPPVNVD

SEQ ID NO: 61437 - protein, 377 aa, Sutterella megalosphaeroides
  misc_feature (1)..(377): tr|A0A2Z6I8D1|A0A2Z6I8D1_9BURK Queuine tRNA-ribosyltran sferase OS=Sutterella megalosphaeroides OX=2494234 GN=t gt PE=3 SV=1
MAFSFKVKTTCGKARRGELTLNHGVVQTPIFMPVGTYGSVKAMAPYELKEVGSQIILGNTFHLWLRPGLEVIEAHKGLHDFMQWDKPILTDSGGFQVFSLGELRKITEEGVKFSNPINGNKLFLTPEISMQIQKTLNSDIVMVLDECTPYKIGDRPATELEAAKSMRMSLRWAKRSKDEFERLENPNALFGIVQGGMFTKLREESLDGLKSIGFHGYALGGLSVGEPKEEMLRILDEVAHQLPDDRPRYLMGVGTPEDLVDGVSSGIDMFDCVMPTRNARNGWLFTRFGDVKLKNSRYRNDLRPLDPSCNCYTCRNFSRAYLHHLHKVGEILGARLNTIHNLHFYLNLMQEMRDALEAGTFEEWKTRFREDRARGIE

SEQ ID NO: 61438 - protein, 377 aa, Sutterella parvirubra
  misc_feature (1)..(377): tr|H3KCR9|H3KCR9_9BURK Queuine tRNA-ribosyltransferase OS=Sutterella parvirubra YIT 11816 OX=762967 GN=tgt PE= 3 SV=1
MAFSFQVKATCGRARRGTLTLNHGVVETPIFMPVGTYGSVKAMAPYELNEVGSQIILGNTFHLWLRPGLEVIGAHKGLHDFMQWSKPILTDSGGFQVFSLGELRKITEEGVRFSNPINGDKLFLTPEVSMQIQRTLNSDIVMVLDECTPYKIGDRPATEMEAAKSMRMSLRWAKRSKDEFDRLENPNALFGIVQGGMFTHLREESLAGLKEIGFHGYALGGLSVGEPKEEMLRILDEVAHKLPEDRPRYLMGVGTPEDLVDGVSNGIDMFDCVMPTRNARNGWLFTRFGDVKLKNSRYRNDLRPLDPSCSCYTCRNFSRAYLHHLHKVGEILGARLNTIHNLHFYLNMMAEIRASLEDGTFEAWKKRFAEDRARGVE

SEQ ID NO: 61439 - protein, 377 aa, Sutterella sp.
  misc_feature (1)..(377): tr|A0A139JX28|A0A139JX28_9BURK Queuine tRNA-ribosyltran sferase OS=Sutterella sp. KLE1602 OX=1574262 GN=tgt PE= 3 SV=1
MAFDFKVKATCGRARRGELTLNHGVVQTPIFMPVGTYGSVKAMAPYELKEIGSQIILGNTFHLWLRPGLEVIGAHNGLHDFMQWDKPILTDSGGFQVFSLGELRKITEEGVKFSNPINGDKLFLSPEVSMKIQRVLNSDVVMVLDECTPYKIGDRPATELEAAKSMRMSLRWAKRSRDEFDRLENPNALFGIVQGGMFEHLREESLEGLKDIGFHGYAVGGLSVGEPKEDMLRIMDHIVHKLPDDRPRYLMGVGTPEDLVAGVSQGIDMFDCVMPTRNARNGWLFTRFGDVKLKNSRYRNDLRPLDPSCNCYTCRNFTRAYLHHLHKVGEILGARLNTIHNLSFYLQIMQEMRDSLEAGTFEAWKKQFAEDRARGVE

SEQ ID NO: 61440 - protein, 377 aa, Sutterella sp.
  misc_feature (1)..(377): tr|A0A415CEK1|A0A415CEK1_9BURK Queuine tRNA-ribosyltran sferase OS=Sutterella sp. AM11-39 OX=2292075 GN=tgt PE= 3 SV=1
MALQFEVLKTEGAARRGVMTLNHGVVQTPVFMPVGTYGTVKAMTPDELEGMGSQIILGNTFHLWLRPGLDVIATHGGLHRFMNWNRPILTDSGGFQVFSLGQLRKISEEGVRFASPINGDKLFLTPEVSMQIQKVLNSDIVMQFDECTPYMIGDRPATEKEAADSMRLSLRWAKRSREEFDRLENPNALFGIVQGGMFPKLREESLAGLKEIGFHGYALGGLSVGEPKEKMLAIMDAIVHQMPEDKPRYLMGVGTPEDLVEGVSRGIDMFDCVMPTRNARNGWLFTRYGDIKIRNAKHKNDTRPLDPSCTCATCRGYTRAYLHHLQKVNEILGARLNSIHNLHFYATIMAEMRKALEEGTFAAWKKKFYEDRAKGTD

SEQ ID NO: 61441 - protein, 377 aa, Sutterella wadsworthensis
  misc_feature (1)..(377): tr|K1KG73|K1KG73_9BURK Queuine tRNA-ribosyltransferase OS=Sutterella wadsworthensis 2_1_59BFAA OX=742823 GN=tg t PE=3 SV=1
MAFDFKVKATCGRARRGELTLNHGVVQTPIFMPVGTYGSVKAMAPYELKEIGSQIILGNTFHLWLRPGLEVIGAHNGLHDFMQWDKPILTDSGGFQVFSLGELRKITEEGVKFSNPINGDKLFLSPEVSMKIQRVLNSDVVMVLDECTPYKIGDRPATELEAAKSMRMSLRWAKRSRDEFDRLENPNALFGIVQGGMFEHLREESLEGLKGIGFHGYAVGGLSVGEPKEDMLRIMDHIVHKLPDDRPRYLMGVGTPEDLVAGVSQGIDMFDCVMPTRNARNGWLFTRFGDVKLKNSRYRNDLRPLDPSCNCYTCRNFTRAYLHHLHKVGEILGARLNTIHNLSFYLQIMQEMRDSLEAGTFEAWKKQFAEDRARGVE

SEQ ID NO: 61442 - protein, 377 aa, Sutterella wadsworthensis
  misc_feature (1)..(377): tr|R5PLS1|R5PLS1_9BURK Queuine tRNA-ribosyltransferase OS=Sutterella wadsworthensis CAG:135 OX=1263111 GN=tgt PE=3 SV=1
MAFSFTVKTRCGKARRGTLELNHGIVETPIFMPVGTYGAVKSMAPYELKEVGAQIILGNTFHLWLRPGLEVIGAHGGLHGFGRWDKPILTDSGGFQVFSLGELRKITEEGVRFANPINGSKLFLTPEISMQIQHTLNSDVTMVLDECTPYKIGDRPATEAEAAASMRMSLRWAKRSKDEFDRLENPNTLFGIVQGGMFNHLREESLEGLKDIGFHGYALGGLSVGEPKEEMLRILDEVAYKLPEDHPRYLMGVGTPEDLVDGVSSGIDMFDCVMPTRNARNGWLFTRFGDLKLKNSRYRNDLRPLDPSCTCYTCRNFSRAYLHHLHKVGEILGARLNTIHNLHYYLTLMGEIRAAIENGTFEAWKVQFRTDRARGIE

SEQ ID NO: 61443 - protein, 386 aa, Sutterellaceae bacterium; identical to SEQ ID NO: 56997
  misc_feature (1)..(386): tr|A0A2D6RVT2|A0A2D6RVT2_9BURK Queuine tRNA-ribosyltran sferase OS=Sutterellaceae bacterium OX=2026794 GN=tgt P E=3 SV=1

SEQ ID NO: 61444 - protein, 251 aa, Sutterellaceae bacterium
  misc_feature (1)..(251): tr|A0A3D4GDM1|A0A3D4GDM1_9BURK Queuine tRNA-ribosyltran sferase (Fragment) OS=Sutterellaceae bacterium OX=20267 94 GN=DIU26_05960 PE=3 SV=1
EVSMEIQKVLNSDIAMIFDECTPYEIDGRPATEKEAADSMRLSLRWARRSRDEFDRLQNPNALFGIVQGGMFEHLRDESLEGLKAIGFDGYAIGGLSVGEPKEEMMKILDHLKTRMPEDKPRYLMGVGTPEDLVEGVKRGIDMFDCVMPTRNARNGWLFTRYGDIKLRNAKHKHDLRPLDESCDCYCCRNFSRAYLHHLQKVNEILGARLNTIHNLHYYLNLMKEIREALDQGNFEAWCKKFAEDRARGTD

SEQ ID NO: 61445 - protein, 371 aa, Suttonella indologenes
  misc_feature (1)..(371): tr|A0A380N2C1|A0A380N2C1_9GAMM Queuine tRNA-ribosyltran sferase OS=Suttonella indologenes OX=13276 GN=tgt PE=3 SV=1
MKYTLLAQDGNARRGYLTFPNGQVVQTPVFMPVGTLGTVKGLSVEELHGIGAEIILGNTFHLMLRPGEDIVQAHGGLHQFMNWDKPILTDSGGFQVFSLAKIRKISEEGVRFRSPIDGSEVFLTPERSMQVQRALNSNIVMQFDECTPYPATHMEAANSMRLSLRWAARSKAAHAGSPNHLFGIVQGGVYEDLRRESAQALAAMDLPGYAIGGLAVGEPKEAREQTLDVTMPLMPQNKPRYLMGVGKPVDLVEGVRRGVDMFDCVMPSRNARNAYLFTRFGVLKLRNSRYKNDLRPIEEGCNCYTCRHYSRAYLHHLDKCNEMLGARLNTIHNLHYYVHLMHAMRAAIEQQTFDAFAREFYALQAEGVAGY

SEQ ID NO: 61446 - protein, 368 aa, Suttonella ornithocola
  misc_feature (1)..(368): tr|A0A380MU23|A0A380MU23_9GAMM Queuine tRNA-ribosyltran sferase OS=Suttonella ornithocola OX=279832 GN=tgt PE=3 SV=1
MKYELLAQDGEARRGKITFPNGQVVQTPVFMPVGTLGTVKGLSPEELHGIGAEIILGNTFHLMLRPGEDIVAAHGGLHQFMHWDKPILTDSGGFQVFSLAKIRKITEEGVRFKSPIDGSEVFLTPERSMQVQRALNSNIVMQFDECTPYPATHQEAADSMRLSLRWAARSKKAHEGSPNHLFGIVQGGVYPDLRRESALALTELNLPGYAVGGLAVGEPKEAREETLDFTLPLMPKNKPRYLMGVGKPVDLVEGVRRGIDMFDCVMPSRNARNAYLFTKYGILKLRNSRYKNDLAPIDETCGCYTCQHYSRAYLHHLDKCNEMLGARLNTIHNLYYYVHLMHEMRAAIEAQQFEHFAHRFYEDQRQGV

SEQ ID NO: 61447 - protein, 390 aa, Swaminathania salitolerans
  misc_feature (1)..(390): tr|A0A511BT09|A0A511BT09_9PROT Queuine tRNA-ribosyltran sferase OS=Swaminathania salitolerans OX=182838 GN=tgt PE=3 SV=1
MTQSATKMQWKAEACCGQARAGHLHTAHGTIPTPTFMPVGTAGTVKAMTMDAVRATGAGIILGNTYHLMLRPGAERVRKMGGLHRMMDWSGPILTDSGGFQVMSLGALRKLDQDGVTFNSHIDGSKHRLTPESSTDIQHALDATITMCFDECPALPATPERLESSMELSMRWAARSREAFVQRPGYGQFGIVQGGTERDLRARSAKALTDIGFEGYAIGGLAVGEGQELMFSTLDFTTPLLPQDHARYLMGVGTPDDLLGGVERGVDMFDCVMPTRAGRTARAYTERGTLNLRNARHAGDNRPISPDCDCLACSRHSRAYLHHLFRANEILGPMLLTWHNLAYYQRLMREIRAAIVNGTLPQKAEELRASWAAGDWSQDEFPQPDWPPVP

SEQ ID NO: 61448 - protein, 388 aa, Swingsia samuiensis
  misc_feature (1)..(388): tr|A0A4Y6ULI3|A0A4Y6ULI3_9PROT Queuine tRNA-ribosyltran sferase OS=Swingsia samuiensis OX=1293412 GN=tgt PE=3 S V=1
MTEPTQKMTWIPEATCGQARAGHLHTRHGVVQTPTFMPVGTVGTVKGMTMDAVRSTGAGIVLGNTYHLMLRPNADRVQKLGGLHKMMDWPGPILTDSGGFQVMSLGALRKLDEDGVTFRSHIDGSKHRLTPESSTDIQYKLDATITMAFDECPALPATPDVLRKSMEMSMRWAARSREAFVARDGYGQFGIVQGGTEKELREASVKALTDIGFEGYAIGGLAVGEGQELMFSTLDFTTPLLPQDKARYLMGVGTPDDLLGAVMRGVDMFDCVMPSRAGRTARAYTERGTINLRNARFAEDTRPITPHDDSPMAGKYTRAYFHHLFRANEILGPMLLTWHNLAYYQRLMRTIRQAIIAGNLTEVAQKLRQDWAQGDWTEDEWPMPQLAL

SEQ ID NO: 61449 - protein, 382 aa, Swingsia sp.
  misc_feature (1)..(382): tr|A0A4Y6UAM5|A0A4Y6UAM5_9PROT Queuine tRNA-ribosyltran sferase OS=Swingsia sp. F3b2 OX=2558361 GN=tgt PE=3 SV= 1
MAWVAEARQGQARAGWLHTAHGTVPTPTFMPVGTKATVKAMTADAVRATGAGVVLGNTYHLMLRPGAERVAALGGLHKVMDWPGPILTDSGGFQVMSLGALRKLDEDGVTFRSHIDGSPHRLTPESSTAIQHDLDADITMAFDECPALPAPKAVLEASMERSMRWAARSRKAFKARPGYGQFGIVQGGTDRELRLRSIKALVAIGFEGYAIGGLAVGEPQAEMFATLDYTAPALPEDKPRYLMGVGTPDDMLGAVMRGVDMFDCVMPSRAGRTARAYTERGALNLRNARFKDDPRPLSPYEPSPLNRYSRAYLHHLFRTDEILGPMLLTWHNLAYYQRLMRLIRAHVVAGDLEGFAAFLRAQWALGDWGRAEWDGRPDELRF

SEQ ID NO: 61450 - protein, 400 aa, Symbiobacterium thermophilum
  misc_feature (1)..(400): sp|Q67Q92|TGT_SYMTH Queuine tRNA-ribosyltransferase OS= Symbiobacterium thermophilum (strain T / IAM 14863) OX= 292459 GN=tgt PE=3 SV=1
MAVRWELLRRDPASAARLGRLHTPRGVIETPVFMPVGTQATVKTLNPEEVWDLGARIILSNTYHLYLRPGHDLVQEAGGLHRFMNWKGAVLTDSGGFQVFSLADLRKITEEGVQFRSHIDGSTHFLSPEKAIAVENALGADIIMAFDECTPWPCDYDYAKRSIERTARWAARCKAAHARPDEQALFGIVQGSTFADLRRQSAEEIVALDFPGYGIGGLSVGEPKELMHEMLEVQVPLLPDDRPRYLMGVGSPEDLVEGVWRGVDMFDCVLPTRIARHGTVFVPDGKMTVRNAEFARDFLPIQEGCDCYACRNFSRAYIRHLLKADEMLGLRLCSIHNLRFLVRLMEEIRAALAAGTFAEYRKAFLERWHAGEAERRERARAAGGAGHAPGPAEPLLPENR

SEQ ID NO: 61451 - protein, 377 aa, Synechococcales bacterium
  misc_feature (1)..(377): tr|A0A3D5I0H8|A0A3D5I0H8_9CYAN Queuine tRNA-ribosyltran sferase OS=Synechococcales bacterium UBA12195 OX=205579 8 GN=tgt PE=3 SV=1
MSTAAPFQFELLHRCPHTQARTGRFHTPHGVVETPRFMPVGTAATVKGISAEQLRSTDAQMVLSNTFHLHLQPGESIVAAAGGLHRFMGWPGPMLTDSGGFQVFSLASLNAIKERGVTFQSPRDGSVVELTPERSMAIQEQLGADVAMAFDQCPPYPASHEDVREACDRTHRWLERCVTAHQRPDQALFGIVQGGVFQDLREESARVIASFDLPGCAIGGVSVGEPAAAMHEVVRWCTPLLPEHKPRYLMGVGTLPEMAQAVAHGVDLFDCVLPTRLGRHGAALVNGERWNLKNARFREDHTPLDPSCPCACCQQHSRAYLHHLIKSDEILGLTLLSLHNLTQLIRYTKSMAQAIEEGCFSEHFAPWELNSPAFHTW

SEQ ID NO: 61452 - protein, 378 aa, Synechococcales bacterium
  misc_feature (1)..(378): tr|A0A358BVQ9|A0A358BVQ9_9CYAN Queuine tRNA-ribosyltran sferase OS=Synechococcales bacterium UBA8138 OX=2055796 GN=tgt PE=3 SV=1
MTSSAAPFSYEVLHQCPHTKARVGRFHTPHGVVDTPRFMPVGTAATVKGISIDQLRSTGAQMVLSNTFHLHLQPGEAVVAAAGGLHRFMGWHAPMLTDSGGFQVFSLASLNAISELGVTFKSPRDGLVVELTPERVMAIQNSLGADVAMAFDQCPPYPASHADVQEATERTHRWLERCVAAHNCANQALFGIVQGGCYEDLRKESARVVAGFNLPGVAIGGVSVGEPALAMHEVVRWVTPLLPLHKPRYLMGVGTLPEMAQAVAEGVDLFDCVLPTRLGRHGAALVGGERWNLKNARFRNDHSPLDSTCPCPTCQQHSRAYLHHLIKSDEILGLTLLSLHNLSQLLRFTNAMAMAIRDGCFAEHFAPWEPGSAAAHTW

SEQ ID NO: 61453 - protein, 384 aa, Synechococcus elongatus
  misc_feature (1)..(384): sp|Q8GAA6|TGT_SYNE7 Queuine tRNA-ribosyltransferase OS= Synechococcus elongatus (strain PCC 7942) OX=1140 GN=tg t PE=3 SV=2
MDRQCAVASLTAFQFQIDRQCSQTRGRACSFHTPHGIVETPRFMPVGTLATVKTVTPAQLRDTGAQMVLSNTYHLHLQPGEEIVAKAGGLHRFMNWSGPMLTDSGGFQVFSLSELRKIEERGVTFRSPRDGAVIEFTPERSIRIQNALGADVIMAFDECPPYPAERKDVEAAVARTYRWLERCINAHERPQDQALFGIVQGGVYLDLRQQAARDLVQLDLPGYAIGGVSVGEPSEEIHRIVEATAPLLPAHKPRYLMGVGTYREMVQAIAAGIDLFDCVIPTRLARHGAALVKGDRWNLKNAQFREDFQPLDEDCNCYCCQNFSRAYLNHLIRSREILGYTLLSIHNITELVRFTTRIREAILSDRFVEEFGHWLQPSAVPVSP

SEQ ID NO: 61454 - protein, 384 aa, Synechococcus elongatus
  misc_feature (1)..(384): tr|A0A3G6WXE2|A0A3G6WXE2_SYNEL Queuine tRNA-ribosyltran sferase OS=Synechococcus elongatus PCC 11801 OX=2219813 GN=tgt PE=3 SV=1
MDRQCAVASLTAFQFQIDRQCSQTRGRACSFHTPHGIVETPRFMPVGTLATVKTVTPAQLSETGAQMVLSNTYHLHLQPGENIVAKAGGLHRFMNWSGPMLTDSGGFQVFSLSELRKIEERGVTFRSPRDGAVIEFTPERSIRIQNALGADVIMAFDECPPYPAERKDVEAAVARTYRWLERCITAHERPQDQALFGIVQGGVYLDLRQQAARDLVQLDLPGYAIGGVSVGEPSEEIHRIVEATAPLLPAHKPRYLMGVGTYREMVQAIASGIDLFDCVIPTRLARHGAALVKGDRWNLKNAQFREDFRPLDEDCSCYCCQNFSRAYLNHLIRSREILGYTLLSIHNITELVRFTTRIREAILSDRFVEEFGHWLQPSAVPVAP

SEQ ID NO: 61455 - protein, 378 aa, Synechococcus lacustris
  misc_feature (1)..(378): tr|A0A2P7EHL5|A0A2P7EHL5_9SYNE Queuine tRNA-ribosyltran sferase OS=Synechococcus lacustris OX=2116544 GN=tgt PE =3 SV=1
  misc_feature (52)..(52): Xaa can be any naturally occurring amino acid
MTSSAAPFSYEVLHQCPHTKARVGRFHTPHGVVDTPRFMPVGTAATVKGISXDQLRSTGAQMVLSNTFHLHLQPGEAVVAAAGGLHRFMGWHAPMLTDSGGFQVFSLASLNAISELGVTFKSPRDGLVVELTPERVMAIQNSLGADVAMAFDQCPPYPASHADVQEATERTHRWLERCVAAHNCANQALFGIVQGGCYEDLRKESARVVAGFDLPGVAIGGVSVGEPALAMHEVVRWVTPLLPLHKPRYLMGVGTLPEMAQAVAEGVDLFDCVLPTRLGRHGAALVGGERWNLKNARFRNDHSPLDSTCPCPTCQQHSRAYLHHLIKSDEILGLTLLSLHNLSQLLRFTNAMAMAIRDGCFAEHFAPWEPGSAAAHTW

SEQ ID NO: 61456 - protein, 373 aa, Synechococcus lividus
  misc_feature (1)..(373): tr|A0A2D2PYZ5|A0A2D2PYZ5_SYNLI Queuine tRNA-ribosyltran sferase OS=Synechococcus lividus PCC 6715 OX=1917166 GN =tgt PE=3 SV=1
MFEFVCQQQCRHSHARAGLFHTPHGSVATPRFMPVGTLANVKTLTPQHLEGAGAQMVLANTYHLHLQPGEEIVAAAGGLHRFMGWSGPILTDSGGFQVFSLSEMRQISDAGVVFRSPHDGQMIELSPERAIRIQEQLGADVIMAFDECPPYPASRAVVTQATQRTLHWLERCIAAKQRPDQALFGIVQGGVYGDIRRECATAMLAYDLPGYAIGGVSVGEPTTAMHEIVAVTAPLLPTHKPRYLMGVGTHLEMLRAIAAGVDLFDCVIPTRLARHGCAIVQGNRWNLKNARFRRDYAPLDPTCPCYTCGTFSRAYLSHLVRAKELLAYTLLSIHNVTELIGFTQAARQAILEDHFPKFAAEWEQRLCTSSHDD

SEQ ID NO: 61457 - protein, 372 aa, Synechococcus sp.
  misc_feature (1)..(372): sp|Q3B088|TGT_SYNS9 Queuine tRNA-ribosyltransferase OS= Synechococcus sp. (strain CC9902) OX=316279 GN=tgt PE=3 SV=1
MFNFEISAHCPHTKGRCGCFHTPHGPVQTPRFMPVGTLATVKGISTEQLARTGAQMVLSNTYHLHLQPGEQVVAEAGGLHRFMGWDGPMLTDSGGFQVFSLGNLNKIDERGVVFRNPRDGRTIDMTPEHATNIQMALGADVAMAFDQCPPYPATENDVKDACRRTHAWLERCVNAHTRSDQALFGIVQGGCFPHLRRESARAVAAFDLPGIAIGGVSVGEPTDDMHRIVRDIGPLLPLDRPRYLMGIGTLREMAVAVANGIDLFDCVLPTRLGRHGTALVGGERWNLRNARFRNDHTPLDSSCSCLACTGHSRAYIHHLIRSDELLGLTLLSLHNITHLVRFTNAMAQAIQDGCFSEDFAPWQEDSPAHHTW

SEQ ID NO: 61458 - protein, 373 aa, Synechococcus sp.
  misc_feature (1)..(373): tr|A0A0H5PPT0|A0A0H5PPT0_SYNPZ Queuine tRNA-ribosyltran sferase OS=Synechococcus sp. (strain WH8103) OX=29410 G N=tgt PE=3 SV=1
MFGFEISAHCANTAARCGCFHTPHGPVHTPRFMPVGTLATVKGISTDQLARTGAQMVLSNTYHLHLQPGEEIVAAAGGLHGFMGWDGPMLTDSGGFQVFSLGDLNKIDDRGVVFRNPRDGRIIDMTPEHATQIQMALGADVAMAFDQCPPYPATENDVIDACRRTHAWLARCVEAHSRDNQALFGIVQGGCFPHLRRESARAVADFDLPGIAVGGVSVGEPVEEMHRIVRDVTPLLPTHKPRYLMGIGTLREMAVAVANGIDLFDCVLPTRLGRHGTALVGGERWNLRNARFRHDHTPLDPSCPCPTCSGGHTRAYLNHLIRSEELLGLTLLSLHNITHLLRFTTAMSQAIRDGCFSEDFAPWEPDSPAHHTW

SEQ ID NO: 61459 - protein, 374 aa, Synechocystis sp.
  misc_feature (1)..(374): sp|Q55983|TGT_SYNY3 Queuine tRNA-ribosyltransferase OS= Synechocystis sp. (strain PCC 6803 / Kazusa) OX=1111708 GN=tgt PE=3 SV=1
MPLPSVNFTYQCQARCSHSQARAGIFQTPHGPVETPRFMPVGTLATVKGITPAQLADTQAQMVLANTYHLHLQPGEKIIAAAGGVHKFMGWSGPMLTDSGGFQVFSLSQLRTIGEQGVLFRSPRDGRLIDMTPENSIRIQNALGADVIMAFDECPPGQGDRLMVEQATARTYRWLERCIEAHQRPGDQALFGIVQGGTYLDLRSQAAEQLIALDLPGYAIGGVSVGEAPALIDKVVQHTAPLLPAHKPRYLMGVGTYREMARAIFAGIDLFDCVIPTRFGRHGTALVQGERWNLKNATFREDHRPLDETCPCYTCQTFSRAYLNHLIRSREMLGYILLSLHNITELIRFTQSIRQAILNDTFTQDFAHWLTPPE

SEQ ID NO: 61460 - protein, 390 aa, Synechocystis sp.
  misc_feature (1)..(390): tr|A0A068MS13|A0A068MS13_SYNY4 Queuine tRNA-ribosyltran sferase OS=Synechocystis sp. (strain PCC 6714) OX=1147 GN=tgt PE=3 SV=1
MPLPSVNFTYQCQARCSHSQVRAGIFQTPHGPVETPRFMPVGTLATVKGITPAQLADTQAQMVLANTYHLHLQPGEKIIAAAGGVHKFMGWPGPMLTDSGGFQVFSLSQLRTIDERGVTFRSPRDGRLIDMTPENSIRIQNALGADVIMAFDECPPGQGDRPMVERATARTYRWLERCIEAHQRPQDQALFAIVQGGTFLDLRSQAVEKLLALDLPGYAIGGVSVGEAPALIDKVVQHTAPLLPAHKPRYLMGVGTYREMARAIFAGIDLFDCVIPTRFGRHGTALVQGERWNLKNATFREDHRPLDENCPCYTCQTFSRAYLNHLIRSREMLGYILLSLHNITELIRFTQSIRQAILNDTFTQDFAHWLTPPGQLEEKSGQLPIFCGDP

SEQ ID NO: 61461 - protein, 364 aa, Synergistaceae bacterium
  misc_feature (1)..(364): tr|A0A3D3VUI7|A0A3D3VUI7_9BACT Queuine tRNA-ribosyltran sferase (Fragment) OS=Synergistaceae bacterium OX=20536 24 GN=DIT24_06120 PE=3 SV=1
MFGFRIDSRCPDTMARTGEIRTERGSVPTPAFMPVGTRATVKAMAPFELQEMGAGIILANTYHLYLRPGHEVIREAGGLHRFMAWPGLILTDSGGFQVFSLSTLREISDDGVTFRSHLDGTTHLMSPELSVQVQEALGSDIAMCFDECVPYPCSPGDSQEAVRRTLLWARRCQDVHSRADQTLFGIVQGSVFEDQRISCARELAAMDFPGYAVGGLSVGEPHSEMYRILDAVIPALPEGKPRYLMGVGYPPNLVEGVARGIDMFDCVLPTRNGRNGTLFTPGGRMNIKNLEYERDFRPIDPQCGCYACRNFTRSYIRHLFRSGEILASRLCTWHNLHYLLDLMRGIRGSIRSGNFADFRERFHE

SEQ ID NO: 61462 - protein, 373 aa, Synergistaceae bacterium
  misc_feature (1)..(373): tr|A0A3B9TSP5|A0A3B9TSP5_9BACT Queuine tRNA-ribosyltran sferase OS=Synergistaceae bacterium OX=2053624 GN=tgt P E=3 SV=1
MGCFRIEASCQKTGARAGILETRHGFVKTPVFMPVGTQATVKAMAPFELKAIGSQIILSNTYHLYLRPGQDVINEAGGLHKFMGWDRPILTDSGGFQVFSLSDLREVNDEGVVFQSHLDGRRHFLTPELAVSIQEKLGSDIAMCLDECVPYPCDEKRSAGAVKRTIEWAARCKKAHSREGQLLFGIVQGSIFPSQRRHCAEALSEADFPGYGIGGLSVGEPHEIMYEMLDELAPVLPALKPRYLMGVGYPPNLIEGVARGVDMFDCVLPTRLGRNGTVFTSRGRLNIKNSVFERDFGPIEQGCTCYACRTVTRAYIRHLYRSREILASRLCTWHNLHFLQKLMERVRSAIVEGTFEMFRKEFNETFRDGENTP

SEQ ID NO: 61463 - protein, 276 aa, Synergistales bacterium
  misc_feature (1)..(276): tr|A0A101GPR3|A0A101GPR3_9BACT Queuine tRNA-ribosyltran sferase OS=Synergistales bacterium 57_84 OX=1641384 GN= XD83_0635 PE=3 SV=1
MFSLSTLREISDDGVTFRSHLDGTTHLMSPELSVQVQEALGSDIAMCFDECVPYPCSPGDSQEAVRRTLLWARRCQDVHSRADQTLFGIVQGSVFEDQRISCARELAAMDFPGYAVGGLSVGEPHSEMYRILDAVIPALPEGKPRYLMGVGYPPNLVEGVARGIDMFDCVLPTRNGRNGTLFTPGGRMNIKNLEYERDFRPIDPQCGCYACRNFTRAYIRHLFRSGEILASRLCTWHNLHYLLDLMRGIRGSIRSGNFADFRERFHEEFRDGGVRG

SEQ ID NO: 61464 - protein, 379 aa, Synergistales bacterium
  misc_feature (1)..(379): tr|A0A117LNS3|A0A117LNS3_9BACT Queuine tRNA-ribosyltran sferase OS=Synergistales bacterium 53_16 OX=1635273 GN= tgt PE=3 SV=1
MGSVNGLGCFRIEASCQKTGARAGILETRHGFVKTPVFMPVGTQATVKAMAPFELKAIGSQIILSNTYHLYLRPGQDVINEAGGLHKFMGWDRPILTDSGGFQVFSLSDLREVNDEGVVFQSHLDGRRHFLTPELAVSIQEKLGSDIAMCLDECVPYPCDEKRSAGAVKRTIEWAARCKKAHSREGQLLFGIVQGSIFPSQRRHCAEALSEADFPGYGIGGLSVGEPHEIMYEMLDELAPVLPALKPRYLMGVGYPPNLIEGVARGVDMFDCVLPTRLGRNGTVFTSRGRLNIKNSVFERDFGPIEQGCTCYACRTVTRAYIRHLYRSREILASRLCTWHNLHFLQKLMERVRSAIVEGTFEMFRKEFNETFRDGENTP

SEQ ID NO: 61465 - protein, 374 aa, Synergistes jonesii
  misc_feature (1)..(374): tr|A0A073IQA6|A0A073IQA6_9BACT Queuine tRNA-ribosyltran sferase OS=Synergistes jonesii OX=2754 GN=tgt PE=3 SV=1
MFEYKLIAECRQTGARAGVLTTPHGTVETPVFMPVGTQATVKAMTPEELEELGAQIILCNTYHLHMRTGEDIVEEAGGAHRFMNWKHPILTDSGGFQVFSLAKLNKITDEGVEFRSHIDGGKRFMRPEDSMEIQQKLGGDIAMAFDECVSLPTTPEYSRAAMERTIAWGKRCRDHHSRKDQALFGIVQGALYESQRIECVERLEEIGFPGYGIGGLSVGESHAEMYGVLDALCPKMPKEKPRYLMGVGFPTNLIEGVARGVDMFDCVLPTRNGRNGQLFTRFGKMNIKNLSYARDFTPPDPSCGCYVCRNFTRAYLRHLYTAGEILAARLCSWHNLYFLVNLLRDARSAIVEGRFPAFRRDFMENFMEGAYLDE

SEQ ID NO: 61466 - protein, 374 aa, Synergistes sp.
  misc_feature (1)..(374): tr|G9PY90|G9PY90_9BACT Queuine tRNA-ribosyltransferase OS=Synergistes sp. 3_1_syn1 OX=457415 GN=tgt PE=3 SV=1
MFEYKLIAQCPETGARAGEFTTPHGVIKTPVFMPVGTQATVKAMTPPELEGMGAQIILGNTYHLHMRPGEDIVAEAGGLHRFMGWHHPILTDSGGFQVFSLANINKIKEDGVEFRSHIDGSKHFMRPEDSIEIQQKLGSDIAMAFDECVSLPTTPEYSREAMERTLRWAKRCREYHSRPGQALFGIVQGALYESQRIECIERLEEIGFPGYGIGGLSVGESHAEMYRILDALSPHMPQDKPRYLMGVGFPTNLVEGIARGIDMFDCVLPTRNGRNGQLLTSFGKMNIKNLAFARDFTAPDPQCDCYVCRSFTRAYLRHLYTAGEILAARLCSWHNLHFLVNLVRGARQAIIEGRFPAFRRGFMENFMEGAYLNE

SEQ ID NO: 61467 - protein, 382 aa, Synergistetes bacterium
  misc_feature (1)..(382): tr|A0A1V5K0K6|A0A1V5K0K6_9BACT Queuine tRNA-ribosyltran sferase OS=Synergistetes bacterium ADurb.Bin520 OX=1852 915 GN=tgt PE=3 SV=1
MKTSRAVIMVACCAMSIIAYQPGARAGELHTPHGVIETPVFMPVGTQGTVKAMAPFELVEMGASIVLGNTYHLWLRPGSELVASLGGLHRFMGWSRGLLTDSGGFQVFSLGELRTISEEGVAFRSHIDGKRCFLSPEDSMRIQEELGSDIAMCFDECVALPASPERSRDALERTLRWAERCQRAHGRKDQALFGIVQGATFPDQRRECAERMAVMDFPGYGIGGLSVGESHEEMYAMLEVTNAVLPRGKPRYLMGVGLPENLVEGVARGVDMFDCVLPTRNGRNGTVFTLRGRLNLKAQRYLRDEDPLDPTCDCYVCRHHSRAYIRHLYRAGEILAARLCSWHNLHFLIRLMRRLRGAILQGRFGELRREIMMALREGDGTP

SEQ ID NO: 61468 - protein, 373 aa, Synergistetes bacterium
  misc_feature (1)..(373): tr|A0A2N1QU76|A0A2N1QU76_9BACT Queuine tRNA-ribosyltran sferase OS=Synergistetes bacterium HGW-Synergistetes-1 OX=2013842 GN=tgt PE=3 SV=1
MFEYRLIAECPETGARAGELITPHGVIETPVFMPVGTQATVKAMTPPELEEIGAQIILGNTYHLYMRPGADIVEEAGGLHKFMQWHHPILTDSGGFQVFSLSELRKITDEGVEFRSHLDGSKHFMRPEDSMDIQQKLGSDIAMAFDECVVWPTTEEYSRAAMERTISWAGRCKEHHSREDQALFGIVQGSMFEAQRIECIKRLEEIGFPGYGIGGLSVGESHEDMYRILDALCPEMPVNKPRYLMGVGHPANLIEGVARGIDMFDCVLPTRNGRNGGVLTSFGKLNLKNRGFARDFTPIDPSCGCYTCRNFTRAYIRHLYTAGEILAARLCSWHNLYFLVNLMRDARKAIIEGRYPQFRRDFFSKYNEGPIQP

SEQ ID NO: 61469 - protein, 292 aa, Syntrophaceae bacterium
  misc_feature (1)..(292): tr|A0A3D4R464|A0A3D4R464_9DELT Queuine tRNA-ribosyltran sferase (Fragment) OS=Syntrophaceae bacterium OX=205218 4 GN=DIW05_08015 PE=3 SV=1
MPFSFELIKKDLQTSARLGKMVTPHGTVQTPAFMPVGTQGTVKSMRPEEIQNCGAQILLSNTYHLYLRPGHETIRRMGGLHSFMNWPGPILTDSGGFQVYSLAALRKIGPDGVMFQSHIDGSKHFLTPQKAVLIQEALGSDIMMCLDECTHYPATRKQTSDSLDLTVKWAGLCRKAKTNPEQALFGIVQGGAYMDLRRQAVLQTVPIGFDGYALGGVSVGEPKEMMQAITDEITPLLPSEKPRYLMGVGTPADIVYGVSRGIDLFDCVIPTRSARHGLLFTNSEKIVIKNAR

SEQ ID NO: 61470 - protein, 376 aa, Syntrophaceae bacterium
  misc_feature (1)..(376): tr|A0A1J5I892|A0A1J5I892_9DELT Queuine tRNA-ribosyltran sferase OS=Syntrophaceae bacterium CG2_30_58_14 OX=1805 378 GN=tgt PE=3 SV=1
MEFTRIAKDPGCGARLGKIGTPHGDVRTPAFMPVGTQGAVKALTPEQVRGLGAEIILGNAYHLYLRPGHRLIADLGGLHRFMNWPGPILTDSGGFQIYSLGALRRMAEEGATFQSHIDGSSHFLSPEKAVEIQEALGSDIMMCLDECIAYPATRGEVERALARTARWADRCKQSRKNRAQSLFGIIQGGVYPDLRRRGAEEMTAIGFDGYAIGGLSVGEPKVLMLENLAATAPLLPEDRPRYLMGVGTPEDLVEGVFHGIDMFDCVMPTRCARNGLLFTNGEKVVIKNARYREDASPLDSECDCYTCQNYSRAYLRHLFVAGEILAMVLNTIHNLRYYLHLMERIREAIREGRYPEFRDRFIRERTAIHADGCPET

SEQ ID NO: 61471 - protein, 370 aa, Syntrophaceticus schinkii
  misc_feature (1)..(370): tr|A0A0B7MN02|A0A0B7MN02_9FIRM Queuine tRNA-ribosyltran sferase OS=Syntrophaceticus schinkii OX=499207 GN=tgt P E=3 SV=1
MGFFHFDLLKKSSKSKARLGVINTPRGKIHTPAFMPVGTQATVKTMTPDEVARLGAEIILSNTYHLYLRPGMGIIRQAEGLHKFMNWQRPILTDSGGFQVFSLSSLRQITDEGVHFRSHLDGSKHFIGPEQSMEIQAALGSDIAMAFDECSPFPCSYEDALAGLERTTSWAERCLKAPHAPGQVVFGIVQGSVYPELRARSAREITGLDFPGYAIGGLSVGEPKSIMYELLEYTTPLLPENKPRYLMGVGSADCLWEGVAHGIDMFDCVLPTRVARNGTAFTWQGKVVVRNAKYAEDFSPLEPDCDCYTCKHYSRAYLRHLFNAGEILGPRLLTIHNLHFTLSVMERIRRSIKDGCFEEEKNAFLDQYSI

SEQ ID NO: 61472 - protein, 373 aa, Syntrophobacter fumaroxidans
  misc_feature (1)..(373): sp|A0LFR2|TGT_SYNFM Queuine tRNA-ribosyltransferase OS= Syntrophobacter fumaroxidans (strain DSM 10017 / MPOB) OX=335543 GN=tgt PE=3 SV=1
MDFRIIARDASCHARRGRLRTAHGTFDTPVFMPVGTQASVKSLSPDELEDLGAHIILGNTYHLLLRPGAERVARLGGLHRFMHWNRSILTDSGGFQVFSLARINRIEEDGVVFQSHIDGARHAITPETSMECQMQLGSDIAMCFDECTAYPVTYEYARESMLRTVRWAARSKEAHTLPEQSLFGIVQGGVFCDLRRDCLERLVETGFDGYALGSLSVGESKEEMLSVLEAVAPGLPAASPRYVMGVGTPEDLVEGVRCGVDMFDCVMPTRNARNGMLFTVRGGIQIKNSRYADDDRPIEEGCSCYTCRRFSRAYLRHLFLARELLAYRLNTLHNLHYYLGLMAAMREAIEANAFDRWRRSFYLDRENREPAEE

SEQ ID NO: 61473 - protein, 365 aa, Syntrophobacter sp.
  misc_feature (1)..(365): tr|A0A0S7XVA4|A0A0S7XVA4_9DELT Queuine tRNA-ribosyltran sferase OS=Syntrophobacter sp. DG_60 OX=1703361 GN=tgt PE=3 SV=1
MQFKIEAQDGNARAGLLITPHGVIHTPAFMPVGTLGSVKSLTSEDLETIGTEIILANTYHLYLRPGHLLIKKFGGLHKFMHWGGPLLTDSGGYQVYSLAKKREIKEEGVVFRSHINGSSHFLTPEKVIGVQSYFGSDIIMCLDECPPYPIDYSYAERSLKLTTKWAGECKLAHKNLNQSLFGIAQGGFYPDLRRRAALSLIEIGFDGYAIGGLSVGEPKEKTWEAIEICNEMLPKDRPRHAMGIGLPEDILEAVLRGMDMFDCVVPTRHARTGTLFTSFGELTIKKAQYTQDEHPIDEACNCYVCRHYSRAYLRHLFISKELLAYRLNSYHNVYYYLNFVRQIRQAILDGHLAEFRKKFYEMRKS

SEQ ID NO: 61474 - protein, 370 aa, Syntrophobacter sp.
  misc_feature (1)..(370): tr|A0A2U3L710|A0A2U3L710_9DELT Queuine tRNA-ribosyltran sferase OS=Syntrophobacter sp. SbD1 OX=2043167 GN=tgt P E=3 SV=1
MKFQIVSKDPGCSARAGRIELARGHIDTPVFMPVGTAGSVKSISPEELESLGVQIILGNTYHLYLRPGDERIARLGGLHKFMGWDYPILTDSGGFQVFSLARINKIEEEGVLFQSHIDGSRHLITPESAIGIQKNLGSDIMMCFDECTPYPISYEYASESVQRTIRWSLRSKEASAGSDQALFAIVQGGVFKDLREMCLEKLAETGFDGYAIGSLSVGESKEQMLEVMNWLAPKLPDSAPRYVMGVGAPEDLVEGVRAGVDMFDCVMPTRNARNGTLFTSRGAVHIKNSGYAEDSGPLDPDCGCYTCRRFSRAYLRHLYMCRELLSYRLNTIHNLHYYLDLMAQVRAAIAAGRFEQWRAGFYARREMQIV

SEQ ID NO: 61475 - protein, 384 aa, Syntrophobacteraceae bacterium
  misc_feature (1)..(384): tr|A0A1J5IGE6|A0A1J5IGE6_9DELT Queuine tRNA-ribosyltran sferase OS=Syntrophobacteraceae bacterium CG2_30_61_12 OX=1805379 GN=tgt PE=3 SV=1
MGRKVILMKFKLLKTDSGCGARRGRLETAHGVIETPMFMPVGTQGSVKSVSPDELEALDTRIILGNTYHLYLRPGAERIERFGGLHRFIHWDRAILTDSGGYQVFSLAPMRKIEEQGVHFQSHIDGSRHFIRPEDAVRIQQQLGSDIAMCFDECTPYPISRDYAEASAERTVRWAQRCKAAHQRTDQALFGIVQGGVFPELRRRCLEQLQAIGFDGYAVGSLAVGEPKAEMLRVLNQLVPAMPAAAPRYLMGVGTPEDLVAGVAAGIDLFDCVMPTRNARNGMLFTAAGHLQIKNRCHADDPRPIEEGCTCYTCARFSRGYLRHLFMARELLAYRLNTLHNLHYYLNLMGDIRAALDQDQFADWTREFHARRGSGDGGEQGAAS

SEQ ID NO: 61476 - protein, 369 aa, Syntrophobacteraceae bacterium
  misc_feature (1)..(369): tr|A0A3B8HLW6|A0A3B8HLW6_9DELT Queuine tRNA-ribosyltran sferase OS=Syntrophobacteraceae bacterium OX=2052185 GN =tgt PE=3 SV=1
MKLGFEVITTDTQSGARRGRFLTSHGRVETPVFMPVGTQASVKSLSPDELEQLGVSILLGNTYHLYLRPGAEVVARLGGLHRFMGWRRAILTDSGGYQVFSLAQTRRIEEQGVVFQSHLDGSRHLITPEDATHIQMLLGADIIMCFDECTPYPADYQYVQDSMNRTVRWAQRCRSAHQHPDQALFGIIQGGTHLDLRQQCLEQLLEICFDGYAIGSLAVGEPKQSTMEILAGLTPRLPHELPRYLMGVGTPEDLVEGVMMGVDMFDCVMPTRNARNGMLFTRHGHLQIKNSCHATDDHPIEEECQCYTCQRFSRAYLRHLFMARELLAYRLNTLHNLYYYQNLMAEMRSAIEGHEFIQWRREFYARRQP

SEQ ID NO: 61477 - protein, 376 aa, Syntrophobacterales bacterium; identical to SEQ ID NO: 61470
  misc_feature (1)..(376): tr|A0A2M7BJM4|A0A2M7BJM4_9DELT Queuine tRNA-ribosyltran sferase OS=Syntrophobacterales bacterium CG03_land_8_20 _14_0_80_58_14 OX=1974100 GN=tgt PE=3 SV=1

SEQ ID NO: 61478 - protein, 375 aa, Syntrophobacterales bacterium
  misc_feature (1)..(375): tr|A0A2M8GD19|A0A2M8GD19_9DELT Queuine tRNA-ribosyltran sferase OS=Syntrophobacterales bacterium CG_4_8_14_3_um _filter_49_14 OX=1974097 GN=tgt PE=3 SV=1
MVDGYQFELLKKDLTSRARLGKIQTPHGEVNTPVFMPVGSQGAVKSLVPEWVRKLGAEMIIGNAYHLYLKPGHKIVGDLGGLHRFMNWSGPLLTDSGGFQIYSLSALRKITDKGVMFQSHIDGSRQFLTPELVVEIQETLGSDIMMCLDECTPYPAGFAEVEKSLALTIEWAGRSKDAKKNSNRQALFGIVQGGMYPDLRERGVEGITGIGFDGYALGGLSVGEPKEMMTEIVAGTTPLLPEDKPRYLMGVGTPEDIVACVHQGIDMFDCVMPTRCARNGLLFTNRENIVIKNARYSDDSSPLDSSCDCYTCRHYSRAYLRHLFLAREILAMILNTIHNIRYYMHLLEMIREAIRNGQYADFKNNFLRNRSYSGV

SEQ ID NO: 61479 - protein, 384 aa, Syntrophobotulus glycolicus
  misc_feature (1)..(384): tr|F0T264|F0T264_SYNGF Queuine tRNA-ribosyltransferase OS=Syntrophobotulus glycolicus (strain DSM 8271 / FlGly R) OX=645991 GN=tgt PE=3 SV=1
MSPVHLEILQQEKSTRARLGKLYTPHGVIDTPVFMPVGTQATVKTMTPEEIKEIGAGIILGNTYHLFLRPGHELIREFGGLHHFMHWDGAILTDSGGFQVFSLGDLRKITEEGVEFRSHHDGSKQFLSPEKAMEIQMALGADIVMAFDECTPHPCTREYAEASMERTLRWLKRCQDTLKTTRTQALFGIVQGSMYKDLRIESARRTVEYDLPGYAIGGLSVGEDKQTMYEVLDYTVPELPEDKPRYLMGVGSPDALIEGVIRGIDMFDCVLPTRIARNGTAMTRSGKVVIKNAEYAKDPKPLDPGCDCYACRNYSRAYIRHLFKAGEILGLRLMTIHNLRFLQNLMAEIRKSIAGDTLLEFRDRFFREYGYEEERQDKQNRPAD

SEQ ID NO: 61480 - protein, 368 aa, Syntrophomonas sp.
  misc_feature (1)..(368): tr|A0A3B8HXK2|A0A3B8HXK2_9FIRM Queuine tRNA-ribosyltran sferase OS=Syntrophomonas sp. OX=2053627 GN=tgt PE=3 SV =1
MLKFELEITSPQYQARLGRLTLSHGEVETPVFMPVGTQATVKTLTPEELYEIGIGIILANTYHLYLRPGEELVAKAGGLHSFMNWKRNILTDSGGFQVFSLSKLRKISDEGVEFQSHIDGSRHFLSPEKVMDIEQKLGADIAMCFDECAPYPCSYEEAELAVERTTLWAKRCREVHRHQEQALFGIVQGNIFPDLRARSAEELVKLDFPGYAVGGLSVGEPKENMYEILEFLHPLLPADKPRYLMGVGEPEDLIEGVKRGIDMFDCVVPTRLARHGTAYTYSGKITVRNAAFKEDFLPIDTRCDCYVCRNYSRAYLRHLIKAEEILAHRLLSYHNVYFLVNLMARIRNAIREGNLDNFCHDFFSEYRF

SEQ ID NO: 61481 - protein, 368 aa, Syntrophomonas sp.
  misc_feature (1)..(368): tr|A0A356UEY0|A0A356UEY0_9FIRM Queuine tRNA-ribosyltran sferase OS=Syntrophomonas sp. OX=2053627 GN=tgt PE=3 SV =1
MFHFELLKQDSNSSARLGRITTGHGVIDTPVFMPVGTQATVKTLTPEELYEIGVQIILSNTYHLYLRPGEELIARAGGLHRFMNWKGNVLTDSGGFQVFSLAKLRRISDEGVYFNSHIDGSVHFLSPEKVMQIEQELGADIAMCFDECAPYPCSYEEALQAVVRTSLWARRCRENHHRSDQVLFAIVQGNIFPDLRQRSAEELLKMDFPAYAIGGLSVGEPKEDMYRILDFMHGLLPVDKPRYLMGVGTPEDLLEGVKRGVDMFDCVLPTRLARHGTAYTAEGKITVRNAQYADDFSPIDNSCDCYVCRNYSRAYLRHLIKAEEILAHRLLSYHNVYFLVKLMENIRSAINQGRFSTFYHDFLNTYRF

SEQ ID NO: 61482 - protein, 369 aa, Syntrophomonas wolfei
  misc_feature (1)..(369): tr|Q0AX19|Q0AX19_SYNWW Queuine tRNA-ribosyltransferase OS=Syntrophomonas wolfei subsp. wolfei (strain DSM 2245 B / Goettingen) OX=335541 GN=tgt PE=3 SV=1
MLKFELLQEDKTSAARLGRLTTAHTTVDTPIFMPVGTQATVKTLTPEDLYEIGAGIILANAYHLYLRPGCELIQQAGGLHRFMNWKKGILTDSGGFQVFSLSKLRDINDDGVWFHSHIDGSRHFLTPEKVMEIEAKLGADIAMCFDECAPYPCTYEEAEKAVKRTSLWAGRCKKAHNNDKQVLFGIIQGSVYPELRERSVGELTALDFPGYAIGGLSVGEPKEMLYATLEVTTRMLPREKPRYLMGVGAPEDLLEGVRLGVDMFDCVLPTRLARHGTAYTAEGKITVRNALYAADFSPLDARCSCYVCQNYSRAYIRHLIKAEEILAQRLLSYHNLYFLFQLMAGIRAALAKGEFPSFYREFFHNYISA

SEQ ID NO: 61483 - protein, 368 aa, Syntrophomonas zehnderi
  misc_feature (1)..(368): tr|A0A0E4C9E0|A0A0E4C9E0_9FIRM Queuine tRNA-ribosyltran sferase OS=Syntrophomonas zehnderi OL-4 OX=690567 GN=tg t PE=3 SV=1
MFTFQVTKNDDASAARLGRLSTSHGVFDTPIFMPVGTQATVKAVTPEMLTEMGAGIILSNTYHLYLRPGADLVERAGGLHKFMNWPRGILTDSGGFQIFSLQGLRKISDEGVVFNSHIDGSRHFLSPQIVMEIEQKLGADIAMCFDECAPYPCSYEEADQAVTRTSLWAKRCRDSHNCSDQALFGIIQGNIFADLREKSAREITALDFPGYAIGGLSVGEPKEDMYRILDLTHQLLPTDKPRYLMGVGAPEDLVEGVARGVDMFDCVLPTRIARHGTAFTHRGKLVVRNAVYAADFRALDTDCDCRVCKNYSRAYIRHLVKAEEILAHTLITYHNLYFLIKMMQDIRQAIAEDRFNEFYTNFYASYKF

SEQ ID NO: 61484 - protein, 377 aa, Syntrophorhabdaceae bacterium
  misc_feature (1)..(377): tr|A0A1V5CDW4|A0A1V5CDW4_9DELT Queuine tRNA-ribosyltran sferase OS=Syntrophorhabdaceae bacterium PtaU1.Bin034 O X=1811715 GN=tgt PE=3 SV=1
MSAITIENTDGQARLGTLVTGHGLIETPVFMPVGTQGAVKAILNRDLQEMGVKMILGNAYHLYLRPGDELIRDMGGIQKFAGWDGAVLTDSGGYQIFSLGVLRKIREEGVNFQSHIDGSRHFLTPERIVEVQENIGADVCMCLDECVSYPSSHEYTSASVDLTTRWAQRCHSVKNDSSLLFGIVQGGTYADLRLKSARDLVELNFDGYALGGFSVGEPKSVMWEMVDVAIGELPREKPRYLMGLGFPEDIVKGVSKGIDMFDCVIPTRHARNGNLFTRLGRINIKHAKYARDGKPIDEQCQCYTCRNFSRAYLRHLFVTRELTSYYLNTVHNLFFYADLMERIREAIREGKFGQFCEDFRSEWKGGELQDGYSVCDG

SEQ ID NO: 61485 - protein, 387 aa, Syntrophorhabdus aromaticivorans
  misc_feature (1)..(387): tr|A0A351U7U1|A0A351U7U1_9DELT Queuine tRNA-ribosyltran sferase OS=Syntrophorhabdus aromaticivorans OX=328301 G N=tgt PE=3 SV=1
MNTIALLKQEGHARLGIVRTGHGEIETPVFMPVGTQGIVKATSPRDLKNMGIKVILANAYHLYLRPGDHLVREMGGIHRFAGWDGAVLTDSGGYQVFSLGVLREIREDGVLFQSHIDGSRHFLSPEKVVEVQENIGADICMCFDECAPYPSSYEYTSNSVDLTSRWAERCKNAKKNDGTMLFGIVQGGFYRDLRLKSAEELIKMDFDGYAVGGLSVGEPKSIMWEMVDTVVDMLPKDKPRYLMGLGFPEDIVEGVRKGIDMFDCVIPTRHARNGSLFTRNGRINIKHAKYVKDESPIDEQCQCYTCRTFSRAYLRHLFVSHEISSYYLNTIHNIFFYNNLMQTIREAIREGSFETFCEAFKGEWKGGELQDEYSIRDGHSGSIRTGG

SEQ ID NO: 61486 - protein, 387 aa, Syntrophorhabdus sp.
  misc_feature (1)..(387): tr|A0A1V5DD66|A0A1V5DD66_9DELT Queuine tRNA-ribosyltran sferase OS=Syntrophorhabdus sp. PtaU1.Bin153 OX=1811705 GN=tgt PE=3 SV=1
MNTIALLKKDGHARLGIVRTGHGEIETPVFMPVGTQGIVKATSPRDLKDMGIKVILANAYHLYLRPGDQLVREMGGIHRFAGWDGSVLTDSGGYQIFSLGVLREIKEDGVLFQSHIDGSRHFLSPEKAVEVQENIGADICMCFDECAPYPSSYEYTSNSVDLTSRWAKRCKNAKKNDEAMLFGIVQGGFYRDLRLKSAQELIGMDFDGYAVGGLSVGEPKSIMWEMVDTVVDMLPEDKPRYLMGLGFPEDIVEGVRKGIDMFDCVIPTRHARNGSLFTNDGRINIKHAKYVKDESPIDEQCQCYTCRTFSRAYLRHLFVSHELSSYYLNTIHNIFFYNNLIRNIREAIREGSFETFYEAFKSKWKGGELQNEYSVCDGHPGSVRAGG

SEQ ID NO: 61487 - protein, 379 aa, Syntrophorhabdus sp.
  misc_feature (1)..(379): tr|A0A1V4WYH4|A0A1V4WYH4_9DELT Queuine tRNA-ribosyltran sferase OS=Syntrophorhabdus sp. PtaB.Bin184 OX=1811701 GN=tgt PE=3 SV=1
MTMIEIDHTDGAARSGRLITGHGTIETPVFMPVGTQGVVKAMTHRQLKELGVTMILSNAYHLYLRPGDELIGRMGGLHNFSGWDGAILTDSGGYQIFSLGVLREIKDDGVLFQSHIDGSRHFLTPEKIVRVQENIGADIAMCLDECVSYPSTFEYTSESVELTTRWARRCLAARSGEGTQKLFGIIQGGFYPDLRLRSAGDILSLDFDGFAIGGLSVGEPKSLMWDMVDTVVGLMPAGKPRYMMGIGLPEDLMEGVRRGIDMFDCIIPTRFARNGSLFTWDGRINIKNARFTGDERPIQEGCTCYTCRTYSRAYLRHLTVSHELTSFYLNTIHNVHFYMELMKKIRSAVSTGTFDAFYHDFKRRYEGGESDDRYSVCNG

SEQ ID NO: 61488 - protein, 378 aa, Syntrophothermus lipocalidus
  misc_feature (1)..(378): tr|D7CLE4|D7CLE4_SYNLT Queuine tRNA-ribosyltransferase OS=Syntrophothermus lipocalidus (strain DSM 12680 / TGB -C1) OX=643648 GN=tgt PE=3 SV=1
MSVGCKMFGFVINRKCSATGARLGVLSTPHGVFETPMFMPVGTQATVKTLIPEELYEIGTGIILANSYHLYLRPGTEIIHMAGGLHRFMNYRRGILTDSGGYQVFSLAPLRRITDDGVYFNSHIDGSRHFLNPEKVISIQEDLGADIIMCFDECSPYPCKYEEAREAVSRTTKWAERCLQAHRREDQALFGIVQGNVYEDLRIESAASLVSLGFDGYAIGGLSVGEPKEDMYRIIEVMNTVLPEDKPRYLMGVGAPEDLVEGVKRGVDMFDCVLPTRLARHGTAYTSRGKLVIRNAEYRDDFRPLDEECGCYVCHNYTRAYLRHLFKAEEILALRLLTYHNIYFLIKLMENIRSAIQEDRLLVFCERFLTRYSEPSGN

SEQ ID NO: 61489 - protein, 376 aa, Syntrophus aciditrophicus
  misc_feature (1)..(376): tr|Q2LVH1|Q2LVH1_SYNAS Queuine tRNA-ribosyltransferase OS=Syntrophus aciditrophicus (strain SB) OX=56780 GN=tg t PE=3 SV=1
MPPLKQHFRILNTDPGSAARLGLLSTVHGEVHTPAFMPVGTQGTVKALTPDTVKSLGAEIILCNTYHLYLRPGHRLIESLGGLHRFMNWPGPILTDSGGFQVYSLGKLRKVTREGVIFQSHIDGSRHKITPELAIEIQEALNTDIMMCLDECTPWPAGFQEAESSLSLTLSWAERSRKARTNSSSQALYGIIQGGMYLELRRRAVEAITAMDFDGYALGGVSVGEPKPLMEQIVSETAPLLPEDRPHYLMGVGTPEDIVRAVDCGIDLFDCVMPTRCARHGLLFTNAEKVVIKNARYREDNGPLDSDCDCYTCRNFSRAYLRHLYVAGEILAMTLNTLHNIRYYMRLMEQIRSAIGRGQYAAFKTRFLKDRRMSEA

SEQ ID NO: 61490 - protein, 376 aa, Syntrophus gentianae
  misc_feature (1)..(376): tr|A0A1H7WEB8|A0A1H7WEB8_9DELT Queuine tRNA-ribosyltran sferase OS=Syntrophus gentianae OX=43775 GN=tgt PE=3 SV =1
MAPLNQHFRILNTDPESAARCGLLSTPHGQVLTPAFMPVGTQGTVKSLTPDTVKALGAEMILCNTYHLYLRPGHQLIASLGGLHSFMNWGGPILTDSGGFQVYSLGKLRKITPEGAIFQSHIDGSRHRLTPELAIEIQEALGSDIMMCLDECTPYPATFSEAEASLSLTLSWAERSRKARADSSPQALYGIVQGGMYPDLRKRAVEAIAAMNFDGCALGGVSVGEPKALMEQIVAETTPLLPADRPHYLMGVGTPEDIVKAVDCGIDLFDCVMPTRCARHGLLFTNTEKVVIKNARYRKDNGPLDSECDCYTCRNFSRAYLRHLYVAGEILAMTLNTLHNIRYYMRLMEQIRDAIGCGQYAAFKSRFLKDRQRVET

SEQ ID NO: 61491 - protein, 374 aa, Syntrophus sp.
  misc_feature (1)..(374): tr|A0A1V5DLW5|A0A1V5DLW5_9DELT Queuine tRNA-ribosyltran sferase OS=Syntrophus sp. PtaU1.Bin005 OX=1811712 GN=tg t PE=3 SV=1
MPPIKQHFKVLETDPGSAARCGLLSTPHGDVRTPAFMPVGTQGTVKSLAPDTVKELGAEMILCNTYHLYLRPGHGLIASLGGLHSFMNWHGPILTDSGGFQVYSLGKLRKITPEGAIFQSHIDGSRHRLTPELAVEIQEALHSDIMMCLDECTPYPATFREAESSLSLTLSWAERSRKARADSSDQALYGIVQGGMYSELRKRAVEAISAMNFDGYALGGLSVGEPKAQMEQIVQETAPLLPADRPHYLMGVGTPEDIVKAVDCGIDLFDCVMPTRCARHGLLFTNAEKVVIKNARYREDNGPLDSECDCYTCRNFSRAYLRHLYVAGEILAMTLNTLHNIRYYMRLMEQIRNAIGCGQYAAFKTRFLESRLKA

SEQ ID NO: 61492 - protein, 338 aa, Syntrophus sp.
  misc_feature (1)..(338): tr|A0A1V4XQU6|A0A1V4XQU6_9DELT Queuine tRNA-ribosyltran sferase OS=Syntrophus sp. PtaB.Bin138 OX=1811711 GN=tgt _1 PE=3 SV=1
MPVGTQATVKAMTPDELWEVKARIILANTYHLYIRPGHELIGRMGGLHGFMGWSGPILTDSGGFQVFSLGELCRIKEEGVTFRSHLDGSPHFISPEVSIDIQEDLGADIIMCFDECPPATADYDYVRKSMEMTSRWAVRCREARRRKDQALFGIVQGGRFPDLRAQSARDLREIGFDGYALGGLSVGEEKEVMYGVMETCEPLLPEDRPRYIMGIGTPEDLIEGIYRGYDMFDCVMPTRNARNGMLFTSSGSLNIKNARYAEDREPIDPECGCYVCRNYSRAYLRHLYRAGEILSSRFNTYHNLYYYLNLMEKARDAIAEGRFARFREEFYEKRAVSV

SEQ ID NO: 61493 - protein, 376 aa, Tabrizicola sp.
  misc_feature (1)..(376): tr|A0A3S8UBA5|A0A3S8UBA5_9RHOB Queuine tRNA-ribosyltran sferase OS=Tabrizicola sp. K13M18 OX=2494374 GN=tgt PE= 3 SV=1
MATGFTFTVAATDGAARTGAIKTPRGEIRTPAFMPVGTAATVKAMLPESVRATGADILLGNTYHLMLRPTAERIAALGGLHRFMNWDRPILTDSGGFQVMSLGPLRKLTEEGVRFSSHLDGSKHMLTPERSMEIQALLGSDIVMCFDECPALPATEAEVAKSMRLSMRWAQRSRDAFGDRPGHALFGIMQGGVTRDLRQESAKALTDIGFDGYAVGGLAVGEGQEAMFSVLDYAPGFLPADKPRYLMGVGKPDDIVGAVERGIDMMDCVLPSRSGRTGQAWTPRGQVNLRNARHKDDPRPLDESCTCPACTGYSRAYLHHVVKSDEIIGSMLLTWHNLHYYQVLMQGLRDAIAVGRLAGFVASFHAGRASGDIDPL

SEQ ID NO: 61494 - protein, 376 aa, Tabrizicola sp.
  misc_feature (1)..(376): tr|A0A4Z0LMS6|A0A4Z0LMS6_9RHOB Queuine tRNA-ribosyltran sferase OS=Tabrizicola sp. WMC-M-20 OX=2528693 GN=tgt P E=3 SV=1
MAQRFGFTVEATDGRARKGVIRTPRGEIRTPAFMPVGTAATVKAMLPESVRATGADILLGNTYHLMLRPTAERIAHLGGLHRFMNWDRPILTDSGGFQVMSLASLRKLTEEGVRFSSHIDGSKHMLSPERSMEIQKLLGSDIVMCFDECPALPATDAEVAKSMALSMRWAQRSRDAFGDRPGHALFGIMQGGVTRDLREESARALVDIGFDGYAVGGLAVGEGQEAMFGVLDYAPGFLPEEKPRYLMGVGKPDDIVGAVERGIDMMDCVLPSRSGRTGQAWTRRGQVNIKNARHMDDQRPLDEECTCPACRSYSRAYLHHVFKAQEMISGMLLTWHNLHYYQELMQGLRDAIATGTLPAFVAAFHAQRAMGDIDPV

SEQ ID NO: 61495 - protein, 379 aa, Tahibacter aquaticus
  misc_feature (1)..(379): tr|A0A4R6YZ10|A0A4R6YZ10_9GAMM Queuine tRNA-ribosyltran sferase OS=Tahibacter aquaticus OX=520092 GN=tgt PE=3 S V=1
MLRICQLNKESTMQFDLIKTSGAARRGRLTFARGTIETPAFMPVGTYGSVKAMLPRDIKEIGAEIILGNTFHLFLRPGLEVIGEFGGLHDFIGWDRPILTDSGGFQVFSLAHKRKITEQGVTFASPIDGSKVFLSPEESMRIQRVLNSDIVMIFDECTPYPATEKQASDSMELSLRWAERSRRAHEGNANALFGIVQGGVYPALRERSAAGLQQIGFDGYAVGGLAVGEPEAERNHTLEATVPLLPADKPRYLMGVGRPEDIVEAVRRGIDMFDCVMPTRNARNAHLFTRHGVLRLRNAQYQRDTRPIDEACGCHTCASGFSRAYLRHLDKCNEILASQLATIHNLYHYQELMRGLRAAIAEDRLDAFVAEFYALRRPA

SEQ ID NO: 61496 - protein, 376 aa, Taibaiella chishuiensis
  misc_feature (1)..(376): tr|A0A2P8DCL7|A0A2P8DCL7_9BACT Queuine tRNA-ribosyltran sferase OS=Taibaiella chishuiensis OX=1434707 GN=tgt PE =3 SV=1
MEFELIATDAETGARAGLLHTDHGTIETPIFMPVGTVGSVKAVMQEQLKETVKGQIILGNTYHLYLRPGTEILEKAGGLHKFNGWDRPILTDSGGYQVFSLSGNRKLKEEGALFQSHIDGSRHLFTPESVMDIQRSIGADIVMAFDECTPYPCEYGYARKSMELTHRWLTRCVKRFGETEPKYGHNQSLFPIVQGSTYKDLRRESAEFISQIEADGNAIGGLSVGEPEQDMYEMCELVCGILPKQKPRYLMGVGTPWNILEGIGLGVDMFDCVMPTRNGRNGMLFTSEGVVNIKNKRWADDFSPIDAGLEDGPSTVYTKAYLRHLFAANEILGLQLASLQNLSFYLHLVKEARKHIIAGDFASWRRGMLETVKRRN

SEQ ID NO: 61497 - protein, 376 aa, Taibaiella soli
  misc_feature (1)..(376): tr|A0A2W2A780|A0A2W2A780_9BACT Queuine tRNA-ribosyltran sferase OS=Taibaiella soli OX=1649169 GN=tgt PE=3 SV=1
MEFQLLAADSGSKARAGIITTDHGQIETPIFMPVGTVGSVKAVNQQQLKEEIKAQIILGNTYHLYLRPGTEILEEAGGLHKFNGWDRPILTDSGGYQVFSLSNNRKLTEEGAMFQSHIDGSRHLFTPERVMDIQRSIGADIIMAFDECPPYPSEYLYAKNSMELTHRWLARCIQRLGETEPKYGYRQTLFPIVQGSTYKDLRKASAEFVAAAECEGNAIGGLSVGEPEEMMYEMCALCCEYLPESKPRYLMGVGTPWNILENISLGVDMFDCVMPTRNGRNGMLFTSKGVVNIKNKKWANDFTPIDDGIDCYTSNFYTKAYLRHLFVASEILALEIASIHNLAFYLHLVKQAREHIIAGDYNQWKNEMIPILKQRC

SEQ ID NO: 61498 - protein, 376 aa, Taibaiella sp.
  misc_feature (1)..(376): tr|A0A3N6ZUE2|A0A3N6ZUE2_9BACT Queuine tRNA-ribosyltran sferase OS=Taibaiella sp. KBW10 OX=2153357 GN=tgt PE=3 SV=1
MKFELQAVCPDTGARAGLLHTDHGVIETPIFMPVGTAGSVKAVMQDQLLHDVKAEIILGNTYHLYLRPGTEILEAAGGLHKFNGWDKPILTDSGGYQVFSLSANRKLKEEGAIFQSHIDGSKHLFSPERVMDIQRSIGADIIMAFDECTPYPCDYAYAHKSMELTHRWLDRCVQRLSETDPKYGYNQSLFPIVQGSTYKDLRKISAEYIASKGADGNAIGGLSVGEPEQDMYEMCGLVCDILPKDKPRYLMGVGTPWNIIENIGLGVDMFDCVMPTRNGRNGMLFTSEGVVNIKNKKWEKDFSPIDAGIDSRFSNYYTKAYLRHLFQAKEILGLQLASLQNLSYYLHLVKEARQHILNGTFASWKRTALDIVKTRL

SEQ ID NO: 61499 - protein, 376 aa, Tamilnaduibacter salinus
  misc_feature (1)..(376): tr|A0A2U1CYX2|A0A2U1CYX2_9ALTE Queuine tRNA-ribosyltran sferase OS=Tamilnaduibacter salinus OX=1484056 GN=tgt P E=3 SV=1
MRDDCVMQFEKLANDGEARRGRLTFPRGTVETPAFMPVGTYGTVKGMLPRDIEEIGAEIILGNTFHLMLRPGTEVIRGHGDLHDFTQWQGPILTDSGGFQVFSLGEMTKISEKGVQFRSPIDGSPVELNPEIAMQVQRDLGSDIVMIFDECTPYPATEQQARESMDLSLRWAERSKQAHGDNPSALFGIVQGGMYEGLREASLNGLTDIGFDGYAIGGLSVGEPKEDMQRILTHIAPKLPDDQPRYLMGVGRPEDIVEAVRRGVDMFDCVMPTRNARNGHLFTTEGVIKIRNAKHRHDTGPLDTACDCYTCRHFSRGYLHHLDRCGEMLGSQLNTIHNLRHYQSLMAGLRGAIEAGTLSDFIERFYERCGQTVPPL

SEQ ID NO: 61500 - protein, 370 aa, Tamilnaduibacter salinus
  misc_feature (1)..(370): tr|A0A2A2I3M9|A0A2A2I3M9_9ALTE Queuine tRNA-ribosyltran sferase OS=Tamilnaduibacter salinus OX=1484056 GN=tgt P E=3 SV=1
MQFEKLANDGEARRGRLTFPRGTVETPAFMPVGTYGTVKGMLPRDIEEIGAEIILGNTFHLMLRPGTEVIRGHGDLHDFAQWQGPILTDSGGFQVFSLGEMTKISEKGVQFRSPIDGSPVELNPEIAMQVQRDLGSDIVMIFDECTPYPATEQQARESMDLSLRWAERSKQAHGDNPAALFGIVQGGMYEGLREASLNGLTDIGFDGYAIGGLSVGEPKEDMQRILTHIAPKLPDDQPRYLMGVGRPEDIVEAVRRGVDMFDCVMPTRNARNGHLFTTEGVIKIRNAKHRHDTGPLDTECDCYTCRHFSRGYLHHLDRCGEMLGSQLNTIHNLRHYQSLMAGLRGAIEAGTLSDFIERFYERRGQTVPPL

SEQ ID NO: 61501 - protein, 376 aa, Tamlana nanhaiensis
  misc_feature (1)..(376): tr|A0A0D7W3G8|A0A0D7W3G8_9FLAO Queuine tRNA-ribosyltran sferase OS=Tamlana nanhaiensis OX=1382798 GN=tgt PE=3 S V=1
MKFELKANDPNSKARAGKLTLDHGVIETPIFMPVGTVATVKGVHQRELKNDINPDIILGNTYHLYLRPQTPILEKAGGLHKFMNWDRNILTDSGGYQVYSLSANRKIKEEGVKFKSHIDGSYHTFTPENVMEIQRTIGADIIMAFDECTPYPCDYNYAKRSMHMTHRWLDRCINHLEKTPLKYGYNQAFFPIVQGSTYKDLRQQSAEYIANAGAFGNAIGGLSVGEPAEEMYAMTDVVCNILPEDKPRYLMGVGTPINILENIALGVDMFDCVMPTRNARNGMLFTAHGTINIKNLKWAEDFSPIDEMGITFVDTEYSKAYLRHLFTVNELLGKQIATIHNLGFYLWLVREARKHILAGDFAVWKDKMVKQMDKRL

SEQ ID NO: 61502 - protein, 376 aa, Tamlana sedimentorum
  misc_feature (1)..(376): tr|A0A0D7W2E2|A0A0D7W2E2_9FLAO Queuine tRNA-ribosyltran sferase OS=Tamlana sedimentorum OX=1435349 GN=tgt PE=3 SV=1
MKFELNAKDPNSKARAGKITLDHGVIETPIFMPVGTVATVKGVHQRELKNDINPDIILGNTYHLYLRPQTQVLEKAGGLHKFMNWDRNILTDSGGYQVYSLSANRKIKEEGVKFKSHIDGSYHTFTPENVMEIQRTIGADIIMAFDECTPYPCDYNYAKRSMHMTHRWLDRCINHLEKTPLKYGYNQAFFPIVQGSTYKDLRQQSAEYIANSGAVGNAIGGLSVGEPAEEMYAMTDVVCSILPEEKPRYLMGVGTPINILENIALGVDMFDCVMPTRNARNGMLFTAHGTINIKNLKWAEDFSPIDEMGITFVDTEYSKAYLRHLFTVNELLGKQIATIHNLGFYLWLVREARKHILAGDFRAWKDKMVKQMDKRL

SEQ ID NO: 61503 - protein, 376 aa, Tamlana sp.
  misc_feature (1)..(376): tr|A0A2I7SMH5|A0A2I7SMH5_9FLAO Queuine tRNA-ribosyltran sferase OS=Tamlana sp. UJ94 OX=2069432 GN=tgt PE=3 SV=1
MKFEINAQDSQSKARAGKITTDHGVIETPIFMPVGTVATVKGVHQRELKDEINPDIILGNTYHLYLRPQTKIIEKAGGLHKFMNWDRNILTDSGGYQVYSLSANRKIKEEGVKFKSHIDGSYHTFTPENVMEIQRSIGADIIMAFDECTPYPCDYNYAKRSMHMTHRWLDRCINHLEKTPLKYNYNQAFFPIVQGSTYTDLRKQSAEYIANAGAVGNAIGGLSVGEPAEEMYAMTDVVCSILPEDKPRYLMGVGTPINILENIALGVDMFDCVMPTRNARNGMLFTAHGTINIKNLKWAEDFSPIDEMGITFVDTEYSKAYLRHLFTVNELLGKQIATIHNLGFYLWLVREARKHILAGDFRTWKDMMVKQMNNRL

SEQ ID NO: 61504 - protein, 376 aa, Tamlana sp.
  misc_feature (1)..(376): tr|A0A5C4SG94|A0A5C4SG94_9FLAO Queuine tRNA-ribosyltran sferase OS=Tamlana sp. CW2-9 OX=2583814 GN=tgt PE=3 SV= 1
MKFELKSQDTQSKARAGKITTDHGVIETPIFMPVGTLATVKGVHQRELKEEINPDIILGNTYHLYLRPSTDILEKAGGLHKFMNWDRNILTDSGGYQVYSLSANRKIKEEGVKFKSHIDGSYHVFTPENVMEIQRTIGADIIMAFDECTPYPCDYNYAKRSMHMTHRWLDRCINHLEKIPVKYGYSQAFFPIVQGSTYKDLRQQSAEYIANSGAVGNAIGGLSVGEPAEEMYAMTDVVCSILPEDKPRYLMGVGTPINILENIGLGVDMFDCVMPTRNARNGMLFTAHGTINIKNKKWEADFSPIDEMGITYVDTEYSKAYLRHLFTVNELLGKQIATIHNLGFYLWLVREARKHILAGDFRMWKKKMVKQMDNRL

SEQ ID NO: 61505 - protein, 375 aa, Tangfeifania diversioriginum
  misc_feature (1)..(375): tr|A0A1M6MDF1|A0A1M6MDF1_9BACT Queuine tRNA-ribosyltran sferase OS=Tangfeifania diversioriginum OX=1168035 GN=t gt PE=3 SV=1
MKFKVTATTSNSRARAGVITTDHGTIETPIFMPVGTAGSVKGIHSRDLQEDIKAQIILGNTYHLYLRPGIEVIEKAGGLHKFNRWNGPILTDSGGYQVFSLGDIRKLTEEGARFQSHIDGSYHSFTPENVIDIQRSIGADIMMAFDECTPGDADYAYAKKSLELTQRWLDRCINQFENTQSKYGYSQTLFPIVQGNTFADLRQKAVAHVISHNADGYAIGGLSVGEPEEAMYEMTEICTADLPEDKPRYLMGVGTPINILEGIDRGVDMFDCVMPTRNGRNGMLFTSDGIINIRNKKWQNDHSPVDENGTSFVDQYSKAYLRHLIISNEMLGAQIASQHNLAFYLWLVKTARQKIAEGGFRAWKEEMTERLKERL

SEQ ID NO: 61506 - protein, 376 aa, Tannerella forsythia
  misc_feature (1)..(376): tr|A0A0E4BI15|A0A0E4BI15_TANFO Queuine tRNA-ribosyltran sferase OS=Tannerella forsythia KS16 OX=1307833 GN=tgt PE=3 SV=1
MKFELVQTDSQSQARAGVMTTDHGIIETPIFMPVGTQGTVKAVHIPELEQDIRAQIILGNTYHLYLRPGLDILEKAGGLHKFNGWNRPILTDSGGFQVFSLAENRKLTSEGAEFRSHIDGSKHFFSPERVMDIERTIGADIMMAFDECCPGDADYGYAEKSLDLTEQWLKRCVKRFNETEPKYGYGQCLFPIVQGCVYPDLRTRAAENVAAIGADGNAIGGLAVGEPTEKMYEMVELVNGILPKDKPRYLMGVGTPVNLLEAIERGVDMFDCIMPTRNGRNGQLFTRFGTMNMRNRKWADDFSPIDPDAHSYVDTLYSRAYLHHLFKADELLALQIASVHNLAFYLWLVREARQHIIAGDFTTWKNSMIGPLSQRI

SEQ ID NO: 61507 - protein, 376 aa, Tannerella forsythia
  misc_feature (1)..(376): tr|A0A3P1XYF7|A0A3P1XYF7_TANFO Queuine tRNA-ribosyltran sferase OS=Tannerella forsythia OX=28112 GN=tgt PE=3 SV =1
MKFELVQTDSQSQARAGVMTTDHGIIETPIFMPVGTQGTVKAVHIPELEQDIRAQIILGNTYHLYLRPGLDILEKAGGLHRFNSWNRPILTDSGGFQVFSLAENRKLTSEGAEFRSHIDGSKHFFSPERVMDIERTIGADIMMAFDECCPGDADYGYAKKSLDLTEQWLKRCVKRFNETEPKYGYSQCLFPIVQGCVYPDLRIRAAENVAEIGADGNAIGGLAVGEPTEKMYEMVELVNGILPKDKPRYLMGVGTPANLLEAIERGVDMFDCIMPTRNGRNGQLFTRFGTMNMRNRKWADDFSPIDPDAHSYVDTLYSRAYLHHLFKADELLALQIASVHNLAFYLWLAREARLHIIAGDFMTWKSSMIGPLSQRI

SEQ ID NO: 61508 - protein, 384 aa, Tannerella sp.
  misc_feature (1)..(384): tr|R7DFC4|R7DFC4_9BACT Queuine tRNA-ribosyltransferase OS=Tannerella sp. CAG:51 OX=1262979 GN=tgt PE=3 SV=1
MRQILNKRMDFELQYTDPCSRARAGKITTDHGCINTPIFMPVGTVASVKAVHLHELKEDIKAQIILGNTYHLYLRPGLDTLEKAGGLHKFNGWDRPILTDSGGFQVFSLSENRKLTEEGAHFRSHIDGSKHLFTPEKVVDIQRIIGSDIMMALDECPPGQSDYSYAKKSLQLTQRWLERGWKHFCETEGKYGYKQTFFPIVQGCVYPDLRKDAAKHVAQLGADGNAIGGLAVGEPTEKMYEMIDVVNEILPTDKPRYLMGVGTPANILEGIERGVDMFDCVMPTRNGRNGMLFTANGIMNMRNKKWADDFSPIDPDGTSYVDHQYSKAYLRHLFISNEILAMQIASVHNLAFYVWLTQEARKHILNGTFKTWKDEMIIRVTHRL

SEQ ID NO: 61509 - protein, 376 aa, Tannerella sp.
  misc_feature (1)..(376): tr|A0A396N4Y5|A0A396N4Y5_9BACT Queuine tRNA-ribosyltran sferase OS=Tannerella sp. AF04-6 OX=2293248 GN=tgt PE=3 SV=1
MDFELQYTDPCSHARAGKITTDHGCINTPIFMPVGTVASVKAVHLHELKEDIKAQIILGNTYHLYLRPGLDTLEKAGGLHKFNGWDRPILTDSGGFQVFSLSENRKLTEEGAHFRSHIDGSKHLFTPEKVVDIQRIIGSDIMMALDECPPGQSDYSYAKKSLQLTQRWLERGWKHFCETEGKYGYKQTFFPIVQGCVYPDLRKDAAKHVAQLGADGNAIGGLAVGEPTEKMYEMIDVVNEILPTDKPRYLMGVGTPANILEGIERGVDMFDCVMPTRNGRNGMLFTANGIMNMRNKKWADDFSPIDPDGTSYVDHQYSKAYLRHLFISNEILAMQIASVHNLAFYVWLTQEARKHILNGTFKTWKDEMIIRVTHRL

SEQ ID NO: 61510 - protein, 383 aa, Tanticharoenia sakaeratensis
  misc_feature (1)..(383): tr|A0A0D6MNR3|A0A0D6MNR3_9PROT Queuine tRNA-ribosyltran sferase OS=Tanticharoenia sakaeratensis NBRC 103193 OX= 1231623 GN=tgt PE=3 SV=1
MSAFHWRCSATCGHARAGMLKTAHGDVPTPTFMPVGTAGTVKAMTMDSVRSTGAGIVLGNTYHLMLRPGADRVAALGGLHKMMDWPGPILTDSGGFQVMSLGALRKLDQDGVTFQSHIDGSKHRLTPEISTQIQHKLDATITMAFDECPALPATPENLRKSMELSMRWAARSREAFVQRDGYGQFGIVQGGTERDLREYSVRALADIGFEGYAIGGLAVGEGQALMFETLDYTAPLLPPDRARYLMGVGTPDDLLGAVERGVDMFDCVMPTRAGRTARAYTERGTLNLRNARHANDTRPLSPDCDCLACARHSRAYLHHLFRADEILGPMLLTWHNLAYYQRLMRTIRAAIIADDLPETARALRAGWASEDWTPDEMPYPDLS

SEQ ID NO: 61511 - protein, 377 aa, Tardiphaga robiniae
  misc_feature (1)..(377): tr|A0A164A9E1|A0A164A9E1_9BRAD Queuine tRNA-ribosyltran sferase OS=Tardiphaga robiniae OX=943830 GN=tgt PE=3 SV =1
MTVANHFELLRTDGAARRGQLTTPHGVVRTPAFMPVGTLGAMKSLHWREVRDAGADIVLGNTYHLMLRPGAERIASFGGLQKFTTWNGPMLTDSGGFQVMSLAQLRKVTEQGVTFRSHIDGAKFELTPERAIEIQRLLNSDIAMQLDECVRLPAEHADIDRAMQLSLRWAERCKRAFETAPDGYMLFGIAQGGDVPELRRASAQGLIDIGFHGYAIGGLAVGEPQAVMLAMIEEVVPILPSDRPRYLMGVGTPDDMLEAVARGVDMFDCVMPTRNGRHGMAFTRYGQINMRNARHQDDPRPLDEESTWPAARDYSRAYLHHLVRSGETLGAMLLSEINIAYYQSLMQGIRASIEAGTFEEFRARTRECWARGDIPPR

SEQ ID NO: 61512 - protein, 377 aa, Tardiphaga sp.
  misc_feature (1)..(377): tr|A0A2U0TWS6|A0A2U0TWS6_9BRAD Queuine tRNA-ribosyltran sferase OS=Tardiphaga sp. OV697 OX=2135487 GN=tgt PE=3 SV=1
MTVANHFELLRTDGTARRGQLTTPHGVVRTPAFMPVGTLGAMKSLHWRDVRDAGADIVLGNTYHLMLRPGAERVASFGGLQKFTTWNGPMLTDSGGFQVMSLAQLRKVTEQGVTFRSHIDGAKFELTPERAIEIQRLLNSDIAMQLDECVRLPAEHADIDRAMQLSLRWAERCKRAFETAPEGYMLFGIAQGGDVPALRRASAQGLIDIGFHGYAIGGLAVGEPQAVMLAMIEEVVPILPSDRPRYLMGVGTPDDMLEAVARGVDMFDCVMPTRNGRHGMAFTRHGQINMRNARHQDDPRPLDEESTWPAARDYSRAYLHHLVRSGETLGAMLLSEINIAYYQSLMQGIRAAIEAGTFEEFRAQTRECWARGDIPSR

SEQ ID NO: 61513 - protein, 377 aa, Tardiphaga sp.
  misc_feature (1)..(377): tr|A0A5A7VMS6|A0A5A7VMS6_9BRAD Queuine tRNA-ribosyltran sferase OS=Tardiphaga sp. P9-11 OX=2024614 GN=tgt PE=3 SV=1
MTVANHFELLRTDGAARRGQLTTPHGVVRTPAFMPVGTLGAMKSLHWRDVRDAGADIVLGNTYHLMLRPGAERVASFGGLQKFTTWNGPMLTDSGGFQVMSLAQLRKVTEQGVTFRSHIDGAKFELTPERAIEIQRLLNSDIAMQLDECVRLPAEHADIDRAMQLSLRWAERCKRAFETAPEGYMLFGIAQGGDVPVLRRASAQGLIDIGFHGYAIGGLAVGEPQAVMLAMIEEVVPILPSDRPRYLMGVGTPDDMLEAVARGVDMFDCVMPTRNGRHGMAFTRHGQINMRNARHQDDPRPLDEESTWPAARDYSRAYLHHLVRSGETLGAMLLSEINIAYYQSLMQGIRAAIEAGTFEEFRAQTRECWARGDIPPR

SEQ ID NO: 61514 - protein, 375 aa, Tateyamaria omphalii
  misc_feature (1)..(375): tr|A0A1P8MT58|A0A1P8MT58_9RHOB Queuine tRNA-ribosyltran sferase OS=Tateyamaria omphalii OX=299262 GN=tgt PE=3 S V=1
MSSFSFDLQATDGRARTGVISTPRGEIRTPAFMPVGTAATVKAMMPDSVRATGADVLLGNTYHLMLRPTAERIDRLGGLHRFMNWDRPILTDSGGFQVMSLAGLRKLTEEGVTFKSHIDGSKHALTPERSMEIQRLLGSDIVMCFDECPALPADRDRIAESMRLSMRWARRSRDAFGDRPGHALFGIQQGGLEQDLREESAEALKEIGFEGYAVGGLAVGEGQEAMFSCLDYAPEQLPGDKPRYLMGVGKPDDIVGAVARGIDMMDCVLPSRSGRTGQVFTRRGVVNIKNARHSDDPRPLDEYCTCPACSNYSRAYLHHVFRAQEMISGMLLTWHNLHYYQEIMQGMRDAIAADTFDTWQKVFHATRAQGDIDPL

SEQ ID NO: 61515 - protein, 375 aa, Tateyamaria sp.
  misc_feature (1)..(375): tr|A0A0B4D2P5|A0A0B4D2P5_9RHOB Queuine tRNA-ribosyltran sferase OS=Tateyamaria sp. ANG-S1 OX=1577905 GN=tgt PE= 3 SV=1
MSSFSFDLQATDGRARTGVISTPRGDIRTPAFMPVGTAATVKAMMPESVRATGADILLGNTYHLMLRPTAERIDRLGGLHTFMNWERPILTDSGGFQVMSLAGLRKLTEEGVTFKSHIDGSKHALTPERSMEIQRLLGSDIVMCFDECPALPADRTRIADSMRLSMRWAQRSRDAFGDRPGYALFGIQQGGLEQDLREESAEALKGIGFEGYAIGGLAVGEGQEAMFGCLDYAPEQLPVDKPRYLMGVGKPDDIVGAVARGIDMMDCVLPSRSGRTGQVFTRRGVINIKNARHADDPRPLDEDCNCPACSNYSRAYLHHVFRSNEMIAGMLLTWHNLHYFQEIMQGMRDAIAAGTFEAWQADFHAMRARGDIEPL

SEQ ID NO: 61516 - protein, 383 aa, Tatlockia micdadei
  misc_feature (1)..(383): tr|A0A098GKM7|A0A098GKM7_TATMI Queuine tRNA-ribosyltran sferase OS=Tatlockia micdadei OX=451 GN=tgt PE=3 SV=1
MNKFSSELIKKHAYTKARVTRISTPHGDFLTPVFMPVGTRAGVNNMTPRELLEAGSQIVLGGNTYHMLCAPGMSVIEKAGGMHPFMGWHGPMLTDSGGFQVFSLSKNKEICSIDEEGAHFRLPGSTRLIHMTPEMSLETQKIIGADIIMAFDQCTPDHCSREEVKRIMKRTHRWLRQSIDYHQKYPTSRYGATQALFGIVQGGIYEDLRQESADFITSMNPDGIAIGGETVGFNMKTTIDIIRWINKYLPENKPRYTMGVGMSPQDLLDVVAEGIDMFDCVAPTRNARHGSLYCGELIKEGNWLRFASPYENARIQIKKACFASDLEPIMPSCTCYTCQHHSRAFLHHLSKQRANLFTALASIHNVHVMNEVCAKMRDLIFSS

SEQ ID NO: 61517 - protein, 374 aa, Tatumella citrea
  misc_feature (1)..(374): tr|A0A1Y0L658|A0A1Y0L658_TATCI Queuine tRNA-ribosyltran sferase OS=Tatumella citrea OX=53336 GN=tgt PE=3 SV=1
MKFELMKTDGRARRGRLVFDRGVVETPAFMPVGTYGTVKGMTPEEVRETGAQIILGNTFHLWLRPGQEIMKLHGDLHDFMQWQGPILTDSGGFQVFSLGDIRKITEAGVHFRNPINGDPIFLDPEKSMEIQYDLGSDIVMIFDECTPYPADWDYAKRSMEMSLRWAKRSRDRFDSLGNKNALFGIIQGSVYEDLRDVSVKGLVEIGFDGYAVGGLAVGEPKADMHRILEHVCPQIPEDKPRYLMGVGKPEDLVEGVRRGVDMFDCVMPTRNARNGHLFVTDGVVKIRNAKHKDDTSPLDAECDCYTCRHYSRAYLHHLDRCNEILGARLNTIHNLRYYQRLMAGLRKAIEDDKLEHFVADFYQKTGKDVPALNV

SEQ ID NO: 61518 - protein, 374 aa, Tatumella morbirosei
  misc_feature (1)..(374): tr|A0A095TES0|A0A095TES0_9GAMM Queuine tRNA-ribosyltran sferase OS=Tatumella morbirosei OX=642227 GN=tgt PE=3 S V=1
MKFELMKTDGRARRGRLVFDRGVVETPAFMPVGTYGTVKGMTPEEVKDTGAQIILGNTFHLWLRPGQEIMKLHGDLHDFMQWQGPILTDSGGFQVFSLGDIRKITEAGVHFRNPINGDPIFLDPEKSMEIQYDLGSDIVMIFDECTPYPADRDYAKRSMEMSLRWAKRSRDRFDSLGNKNALFGIIQGSVYEDLRDVSVKGLVEIGFDGYAVGGLAVGEPKEDMHRILEHVCPQIPEDKPRYLMGVGKPQDLVEGVRRGVDMFDCVMPTRNARNGHLFVTDGVVKIRNAKHKDDTSPLDAECDCYTCRHYSRAYLHHLDRCNEILGARLNTIHNLRYYQRLMAGLRKAIEDDKLEHFVADFYQRTGKDVPALNV

SEQ ID NO: 61519 - protein, 374 aa, Tatumella ptyseos
  misc_feature (1)..(374): tr|A0A085JAV3|A0A085JAV3_9GAMM Queuine tRNA-ribosyltran sferase OS=Tatumella ptyseos ATCC 33301 OX=1005995 GN=t gt PE=3 SV=1
MKFELITTEGRARRGRLVFDRGVVETPAFMPVGTYGTVKGMTPEEVKDTGAQIILGNTFHLWLRPGQEIMKLHGDLHDFMQWQGPILTDSGGFQVFSLGDIRKITEAGVHFRNPINGDAIFLDPEKSMEIQYDLGSDIVMIFDECTPYPADHDYAKRSMEMSLRWAKRSRDRFDSLGNKNALFGIIQGSVYEDLRDVSVKGLVEIGFDGYAVGGLAVGEPKEDMHRILEHVCPQIPEDKPRYLMGVGKPEDLVEGVRRGVDMFDCVMPTRNARNGHLFVTDGVVKIRNAKHKDDTSPLDAECDCYTCRHYTRAYLHHLDRCNEILGARLNTIHNLRYYQRLMAGLRQAIEDGNLEQFVTDFYQRKGKDVPALNV

SEQ ID NO: 61520 - protein, 374 aa, Tatumella ptyseos; identical to SEQ ID NO: 61519
  misc_feature (1)..(374): tr|A0A2X5PHV3|A0A2X5PHV3_9GAMM Queuine tRNA-ribosyltran sferase OS=Tatumella ptyseos OX=82987 GN=tgt PE=3 SV=1

SEQ ID NO: 61521 - protein, 374 aa, Tatumella sp.
  misc_feature (1)..(374): tr|A0A2G8C5X7|A0A2G8C5X7_9GAMM Queuine tRNA-ribosyltran sferase OS=Tatumella sp. OPLPL6 OX=1928657 GN=tgt PE=3 SV=1
MKFEYIKRDGRARRGRLVFDRGVVETPAFMPVGTYGTVKGMTPEEVKETGAQILLGNTFHLWLRPGQEIMKLHGDLHDFMQWQGPILTDSGGFQVFSLGDIRKITEKGVHFRNPINGDPIFLDPEKSMEIQHDLGSDIVMIFDECTPYPADWDYAKRSMEMSLRWAQRSRDRFDELGNKNALFGIVQGGVYEDLRDISVKGLVEIGFDGYAVGGLAVGEPKADMHRILEHVCPQLPEEKPRYLMGVGKPEDLVEGVRRGIDMFDCVMPTRNARNGHLFVTDGVVKIRNAKHKSDTSPLDAECDCYTCKHYTRAYLYHLDRCNEILGARLNTIHNLRYYQRLMAGLRQAIEDDRLEEFVADFYTKIGKEVPALPF

SEQ ID NO: 61522 - protein, 381 aa, Taylorella asinigenitalis
  misc_feature (1)..(381): tr|G4QA08|G4QA08_TAYAM Queuine tRNA-ribosyltransferase OS=Taylorella asinigenitalis (strain MCE3) OX=1008459 G N=tgt PE=3 SV=1
MLESKFKFEVLKTQGKARRATMTLNHGAVQTPMFMPVGTYGCVKAMLPSDLKEVGSQVILGNTFHLWLRPGTEVIEKHGGLHGFMNWDQPILTDSGGFQVFSLSDLRSKIYEEGVKFSSPIDGAKLFLTPEESMRIQKSLNSDIVMVFDECTPYLIKDRPATHEEAAKSMRMSLRWAKRSKTAFEELRNPNALFGIVQGGMYDDLRIESLHGLKEIGFHGYAIGGLSVGEPKEEMNRIIEFLAHQLPEDAPRYLMGVGTPEDLVYGVAHGIDMFDCVMPTRNARNGTLFTRYGDLKIRNARYKDDMRPVDPSLPPNTSSKFSRAYLHHLQKTNEISGSRLNTIHNLMFYLHIMKEMREAIELGSFTEWVAKFHEDRARGIE

SEQ ID NO: 61523 - protein, 381 aa, Taylorella asinigenitalis
  misc_feature (1)..(381): tr|I7JMW7|I7JMW7_9BURK Queuine tRNA-ribosyltransferase OS=Taylorella asinigenitalis 14/45 OX=1091495 GN=tgt PE =3 SV=1
MLESKFKFEVLKTQGKARRATMTLNHGAVQTPMFMPVGTYGCVKAMLPSDLKEVGSQVILGNTFHLWLRPGTEVIEKHGGLHGFMNWDQPILTDSGGFQVFSLSDLRSKIYEEGVKFSSPIDGAKLFLTPEESMRIQKSLNSDIVMVFDECTPYLIKDRPATHEDAAKSMRMSLRWAKRSKTAFEELRNPNALFGIVQGGMYDDLRIESLHGLKEIGFHGYAIGGLSVGEPKEEMNRIIEFLAHQLPEDAPRYLMGVGTPEDLVYGVAHGIDMFDCVMPTRNARNGTLFTRYGDLKIRNARYKDDMRPVDPSLPPNTSSKFSRAYLHHLQKTNEISGSRLNTIHNLMFYLHIMKEMREAIELGSFTEWVAKFHEDRARGIE

SEQ ID NO: 61524 - protein, 381 aa, Taylorella equigenitalis
  misc_feature (1)..(381): tr|I7IAU2|I7IAU2_9BURK Queuine tRNA-ribosyltransferase OS=Taylorella equigenitalis 14/56 OX=1091497 GN=tgt PE= 3 SV=1
MIDSKFKFEVLQTQGKARRASLTLNHGTVQTPMFMPVGTYGCVKAMLPADLKEVGSQVILGNTFHLWLRPGIEVIEKHGGLHGFMNWDQPILTDSGGFQVFSLSDLRSKITEEGVKFSSPIDGAKLFLTPEESMRIQKSLNSDIVMVFDECTPYIIKDRPATHEEAAKSMRMSLRWARRSKDAFEKLNNPNALFGIVQGGMFDDLRIESLKGLTDIGFHGYAIGGLSVGEPKEEMNRIIEFLAHQLPADAPRYLMGVGTPEDLVYGVAQGIDMFDCVMPTRNARNGTLFTRYGDLKIRNARYKDDMRPVDDSLPPNTSSKFTRSYLHHLQKTNEISGARLNTIHNLMFYLHIMKEMREALEKGSFLEWVAKFHEDRARGIE

SEQ ID NO: 61525 - protein, 375 aa, Telmatospirillum siberiense
  misc_feature (1)..(375): tr|A0A2N3PPI6|A0A2N3PPI6_9PROT Queuine tRNA-ribosyltran sferase OS=Telmatospirillum siberiense OX=382514 GN=tgt PE=3 SV=1
MSAFGFRHLGSDGRARLGEVSTAHGVIHTPAFMPVGTVGTVKAMTPESVASTGAEIILGNTYHLMLRPTAERVERFGGLHRFMNWPGPILTDSGGFQVMSLAKLRTMTEEGVTFQSHLDGSRHTLTPERSMEIQRMLDSDITMSFDECTAFPASEEVAATSMRLSMRWAKRSRAAFSERPGYGLFGIVQGSVYPELRAESVAALTDIGFHGYAVGGLAVGEGQEEMFRILDVTTPLLPEDRPRYLMGVGKPSDIVGSVMRGIDMFDCVMPTRSGRTGQAFTRRGPVNIRNARHQEDPRPLDEACGCPACRSYSRAYLHHLARAEEVLGLMLMTWHNLHYYQDLMRELRAAIAEGRLSRYAADFAALQAEGDIAPL

SEQ ID NO: 61526 - protein, 376 aa, Tenacibaculum caenipelagi
  misc_feature (1)..(376): tr|A0A4R6TGY6|A0A4R6TGY6_9FLAO Queuine tRNA-ribosyltran sferase OS=Tenacibaculum caenipelagi OX=1325435 GN=tgt PE=3 SV=1
MQFDLKITDPKSKARAGVITTDHGTIETPIFMPVGTVATVKGVHQSELKDEVNPDIILGNTYHLYLRPQTSILEQAGGLHKFMNWDRNILTDSGGYQVYSLSGRRKINEEGVKFKSHIDGSTHFFTPENVMEIQRSIGADIIMAFDECTPYPCDYSYAKQSMHMTHRWLKRCVNHLEKVPPKYGYNQTLFPIVQGSTYTDLRKQSAEFIASVEAEGNAIGGLSVGEPAEEMYAMTEVVTAILPEDKPRYLMGVGTPINILENIALGVDMFDCVMPTRNARNGMLFTAHGSINIKNKKWENDFSPIDEMDITYVDTMYSKAYLRHLFASREMLGKQIASIHNLGFYLWLVREARKHIIAGDFATWKDKMVKQMDKRL

SEQ ID NO: 61527 - protein, 376 aa, Tenacibaculum dicentrarchi
  misc_feature (1)..(376): tr|A0A0U3KE02|A0A0U3KE02_9FLAO Queuine tRNA-ribosyltran sferase OS=Tenacibaculum dicentrarchi OX=669041 GN=tgt PE=3 SV=1
MQFDLKITDPKSKARAGVITTDHGIIETPIFMPVGTVGTVKGVHQSELKDEINPDIILGNTYHLYLRPKLKTLEAAGGLHKFMNWDRNILTDSGGYQVYSLSGRRKINEEGVKFKSHIDGSMHFFTPENVMETQRTIGADIIMAFDECTPYPCDYNYAKRSMHMTHRWLTRCVNHLEKVPFKYGHKQAFFPIVQGSTYKDLRKQSAEYIASVGAEGNAIGGLSVGEPADELYAMTEVVTAILPEDKPRYLMGVGTPINILENIALGIDMFDCVMPTRNARNGMLFTAHGSINIKNKKWENDFSPIDDMGITYVDTMYSKAYLRHLFAAKEMLGKQIASIHNLGFYLWLTREARKHIIAGDFVQWKDKMVKQMDNRL

SEQ ID NO: 61528 - protein, 376 aa, Tenacibaculum dicentrarchi
  misc_feature (1)..(376): tr|A0A2H1XM16|A0A2H1XM16_9FLAO Queuine tRNA-ribosyltran sferase OS=Tenacibaculum dicentrarchi OX=669041 GN=tgt PE=3 SV=1
MQFDLKITDPKSKARAGVITTDHGTIETPIFMPVGTVGTVKGVHQSELKDEINPDIILGNTYHLYLRPKLKTLEAAGGLHKFMNWDRNILTDSGGYQVYSLSGRRKINEEGVKFKSHIDGSMHFFTPENVMETQRTIGADIIMAFDECTPYPCDYNYAKRSMHMTHRWLTRCVNHLEKLPFKYGYKQAFFPIVQGSTYKDLRKQSAEYIASVGAEGNAIGGLSVGEPAEELYAMTEVVTAILPEDKPRYLMGVGTPINILENIALGIDMFDCVMPTRNARNGMLFTAHGSINIKNKKWENDFSPIDDMGITYVDTMYSKAYLRHLFAAKEMLGKQIASIHNLGFYLWLTREARKHIIAGDFVQWKDKMIKQMDNRL

SEQ ID NO: 61529 - protein, 376 aa, Tenacibaculum discolor
  misc_feature (1)..(376): tr|A0A497YZF7|A0A497YZF7_9FLAO Queuine tRNA-ribosyltran sferase OS=Tenacibaculum discolor OX=361581 GN=tgt PE=3 SV=1
MQFDLKITDPKSKARAGVITTDHGTIETPIFMPVGTVATVKGVHQSELKDEINPDIILGNTYHLYLRPKLETLEAAGGLHKFMNWDRNILTDSGGYQVYSLSGRRKINEEGVKFKSHIDGSTHFFTPENVMETQRTIGADIIMAFDECTPYPCDYNYAKRSMHMTHRWLDRCIKHFENTPPKYGYSQSLFPIVQGSTYKDLRKQSAEYIANSGAEGNAIGGLSVGEPAEEMYAMTEVVTAILPEDKPRYLMGVGTPINILENIALGVDMFDCVMPTRNARNGMLFTAHGSINIKNKKWEKDFSPIDEMGITWVDNMYSKAYLRHLFASREMLGKQIASIHNLGFYLWLVREARKHIIAGDFASWKDKMVKQMDKRL

SEQ ID NO: 61530 - protein, 376 aa, Tenacibaculum finnmarkense
  misc_feature (1)..(376): tr|A0A2H1XZZ7|A0A2H1XZZ7_9FLAO Queuine tRNA-ribosyltran sferase OS=Tenacibaculum finnmarkense OX=1680763 GN=tgt PE=3 SV=1
MQFDLKITDPKSKARAGVITTDHGIIETPIFMPVGTVGTVKGVHQSELKDEINPDIILGNTYHLYLRPKLETLEAAGGLHKFMNWDRNILTDSGGYQVYSLSGRRKINEEGVVFKSHIDGSSHFFSPENVMETQRTIGADIIMAFDECTPYPCDYNYAKRSMHMTHRWLKRCVNHLEKVPFKYGHKQAFFPIVQGSTYKDLRKQSAEYIASVGAEGNAIGGLSVGEPADELYAMTEVVTAILPEDKPRYLMGVGTPINILENIALGIDMFDCVMPTRNARNGMLFTAHGSINIKNKKWENDFSPIDDMAITYVDTMYSKAYLRHLFAAKEMLGKQIASIHNLGFYLWLTREARKHIIAGDFVQWKDKMVKQMDNRL

SEQ ID NO: 61531 - protein, 379 aa, Tenacibaculum finnmarkense
  misc_feature (1)..(379): tr|A0A2I2MCQ2|A0A2I2MCQ2_9FLAO Queuine tRNA-ribosyltran sferase OS=Tenacibaculum finnmarkense OX=1680763 GN=tgt PE=3 SV=1
MSPMQFDLKITDPKSKARAGVITTDHGTIETPIFMPVGTVGTVKGVHQSELKDEINPDIILGNTYHLYLRPKLKTLEAAGGLHKFMNWDRNILTDSGGYQVYSLSGRRKINEEGVKFKSHIDGSMHFFTPENVMETQRTIGADIIMAFDECTPYPCDYNYAKRSMHMTHRWLTRCVNHLEKVPFKYGHKQAFFPIVQGSTYKDLRKQSAEYIASVGAEGNAIGGLSVGEPADELYAMTEVVTAILPEDKPRYLMGVGTPINILENIALGIDMFDCVMPTRNARNGMLFTAHGSINIKNKKWENDFSPIDDMGITYVDTMYSKAYLRHLFAAKEMLGKQIASIHNLGFYLWLTREARKHIIAGDFVQWKDKMVKQMDNRL

SEQ ID NO: 61532 - protein, 376 aa, Tenacibaculum gallaicum
  misc_feature (1)..(376): tr|A0A3E0I143|A0A3E0I143_9FLAO Queuine tRNA-ribosyltran sferase OS=Tenacibaculum gallaicum OX=561505 GN=tgt PE= 3 SV=1
MQFDLKITDPKSKARAGVITTDHGTIETPIFMPVGTVATVKGVHQSELKDEINPDIILGNTYHLYLRPKLETLEAAGGLHKFMNWDRNILTDSGGYQVYSLSGRRKINEEGVKFKSHIDGSTHFFTPENVMETQRTIGADIIMAFDECTPYPCDYNYAKRSMHMTHRWLDRCIKHFEKTPPKYGYSQSLFPIVQGSTYKDLRKQSAEYIANSGAEGNAIGGLSVGEPAEEMYAMTEVVTAILPEDKPRYLMGVGTPINILENIALGVDMFDCVMPTRNARNGMLFTAHGSINIKNKKWEKDFSPIDEMGITWVDTMYSKAYLRHLFASREMLGKQIASIHNLGFYLWLTREARKHIIAGDFAEWKDKMVKQMDKRL

SEQ ID NO: 61533 - protein, 376 aa, Tenacibaculum holothuriorum
  misc_feature (1)..(376): tr|A0A1Y2PHB6|A0A1Y2PHB6_9FLAO Queuine tRNA-ribosyltran sferase OS=Tenacibaculum holothuriorum OX=1635173 GN=tg t PE=3 SV=1
MQFELKTNDPKSKARAGVITTDHGTIETPIFMPVGTVGTVKGVHQSELKDEINPDIILGNTYHLYLRPQTKILEEAGGLHKFMNWDRNILTDSGGYQVYSLSGRRKINEEGVKFKSHIDGSTHFFTPENVMEIQRSIGADIIMAFDECTPYPCDYGYAKRSMHMTHRWLKRCVNHLEKVPPKYGYNQTLFPIVQGSTYTDLRKESAEFIASVGAEGNAIGGLSVGEPAEEMYAMTDVVCSILPEDKPRYLMGVGTPINILENIALGVDMFDCVMPTRNARNGMLFTAHGSINIKNKKWENDFSPIDEMGITWVDTMYSKAYLRHLFAAREMLGKQIASIHNLGFYLWLTREARKHIIAGDFAEWKDKMVKQMNKRL

SEQ ID NO: 61534 - protein, 376 aa, Tenacibaculum jejuense
  misc_feature (1)..(376): tr|A0A238UB54|A0A238UB54_9FLAO Queuine tRNA-ribosyltran sferase OS=Tenacibaculum jejuense OX=584609 GN=tgt PE=3 SV=1
MQFDLKLKDPKSKARAGVITTDHGTIETPIFMPVGTVASVKGVHQSELKDEINPDIILGNTYHLYLRPKTDILEQAGGLHKFMNWDRNILTDSGGYQVYSLSGRRKINEEGVKFKSHIDGSTHFFTPENVMEIQRSIGADIIMAFDECTPYPCDYNYAKNSMHMTHRWLKRCINHLEKTPLKYDYNQTLFPIVQGSTYTDLRKQSAEFIASVEAEGNAIGGLSVGEPAEEMYAMTDVVCSILPEDKPRYLMGVGTPINILENIALGVDMFDCVMPTRNARNGMLFTAHGTINIKNKKWENDFSAIDEMGITFVDTLYSKAYLRHLFASKELLGKQIASIHNLGFYLWLVREARKHILEGDFAVWKDKMVKQMSKRL

SEQ ID NO: 61535 - protein, 376 aa, Tenacibaculum litoreum
  misc_feature (1)..(376): tr|A0A427SA75|A0A427SA75_9FLAO Queuine tRNA-ribosyltran sferase OS=Tenacibaculum litoreum OX=321269 GN=tgt PE=3 SV=1
MQFDLKITDPKSKARAGVITTDHGTIETPIFMPVGTVATVKGVHQSELKDEINPDIILGNTYHLYLRPKLETLEAAGGLHKFMNWNRNILTDSGGYQVYSLSGRRKINEEGVKFKSHIDGSMHFFTPENVMETQRTIGADIIMAFDECTPYPCDYNYAKRSMHMTHRWLDRCIKHFENTPPKYGYSQSLFPIVQGSTYKDLRKQSAEYIANSGAEGNAIGGLSVGEPAEEMYAMTEVVTEILPEDKPRYLMGVGTPINILENIALGVDMFDCVMPTRNARNGMLFTAHGSINIKNKKWENDFSPIDEMGITWVDTMYSKAYLRHLFASREMLGKQIASIHNLGFYLWLVREARKHIIAGDFATWKDKMVKQMDKRL

SEQ ID NO: 61536 - protein, 376 aa, Tenacibaculum lutimaris
  misc_feature (1)..(376): tr|A0A420E0P9|A0A420E0P9_9FLAO Queuine tRNA-ribosyltran sferase OS=Tenacibaculum lutimaris OX=285258 GN=tgt PE= 3 SV=1
MQFDLKITDPKSKARAGVITTDHGTIETPIFMPVGTVATVKGVHQSELKEEINPDIILGNTYHLYLRPQTSILEQAGGLHKFMNWDRNILTDSGGYQVYSLSGRRKINEEGVKFKSHIDGSTHFFTPENVMDTQRTIGADIIMAFDECTPYPCDYNYAKRSMHMTHRWLDRCIKHFNNTPPKYGYNQTLFPIVQGSTYKDLRKQSAEYIANSGAEGNAIGGLSVGEPAEEMYAMTEVVTAILPEDKPRYLMGVGTPINILENIALGVDMFDCVMPTRNARNGMLFTAHGSINIKNKKWENDFSPIDEMGITWVDTMYSKAYLRHLFASREMLGKQIASIHNLGFYLWLVREARKHIIAGDFATWKDKMVKQMDKRL

SEQ ID NO: 61537 - protein, 379 aa, Tenacibaculum maritimum
  misc_feature (1)..(379): tr|A0A2H1E978|A0A2H1E978_9FLAO Queuine tRNA-ribosyltran sferase OS=Tenacibaculum maritimum NCIMB 2154 OX=134978 5 GN=tgt PE=3 SV=1
MPPMQFDLKTKDPKSKARAGVITTDHGTIETPIFMPVGTVGTVKGVHQTELKNEINPDIILGNTYHLYLRPQTSILEQAGGLHKFMNWDRNILTDSGGYQVYSLSGRRKINEEGVKFKSHIDGSTHFFTPESVMEIQRSIGADIIMAFDECTPYPCDYNYAKRSMHMTHRWLKRCVNHLEKTPLKYDYSQTLFPIVQGSTYKDLRKQSAEFIASVGAEGNAIGGLSVGEPAEEMYAMTEVVTAILPEDKPRYLMGVGTPINILENIALGIDMFDCVMPTRNARNGMLFTAHGTINIKNKKWENDFSAIDEMGITFVDTLYSKAYLRHLFASKELLGKQIASIHNLGFYLWLTREARKHILAGDFAVWKDKMVKQMDKRL

SEQ ID NO: 61538 - protein, 376 aa, Tenacibaculum mesophilum
  misc_feature (1)..(376): tr|A0A1M5F803|A0A1M5F803_9FLAO Queuine tRNA-ribosyltran sferase OS=Tenacibaculum mesophilum OX=104268 GN=tgt PE =3 SV=1
MQFDLKITDPKSKARAGVITTDHGTIETPIFMPVGTVATVKGVHQSELKDEINPDIILGNTYHLYLRPKLETLEAAGGLHKFMNWDRNILTDSGGYQVYSLSGRRKINEEGVKFKSHIDGSTHFFTPENVMETQRTIGADIIMAFDECTPYPCDYNYAKRSMHMTHRWLDRCIKHFENTPPKYGYSQSLFPIVQGSTYKDLRKQSAEYIANSGAEGNAIGGLSVGEPAEEMYAMTEVVTEILPEDKPRYLMGVGTPINILENIALGVDMFDCVMPTRNARNGMLFTAHGSINIKNKKWENDFSPIDEMGITWVDTMYSKAYLRHLFAAREMLGKQIASIHNLGFYLWLVREARKHIIAGDFTEWKDKMVKQMDKRL

SEQ ID NO: 61539 - protein, 376 aa, Tenacibaculum skagerrakense
  misc_feature (1)..(376): tr|A0A4R2NJ78|A0A4R2NJ78_9FLAO Queuine tRNA-ribosyltran sferase OS=Tenacibaculum skagerrakense OX=186571 GN=tgt PE=3 SV=1
MQFKLESTDPKSKARAGVITTDHGTIETPIFMPVGTVASVKGVHQSELKNEINPDIILGNTYHLYLRPQTDILEKAGGLHKFMNWDRNILTDSGGYQVYSLSGRRKINEEGVKFKSHIDGSMHFFTPENVMEIQRSIGADIIMAFDECTPYPCDYNYAKSSMHMTHRWLKRCIEHLGKVPPKYGYEQTLFPIVQGSTYKDLRKQSAEFIASVEAEGNAIGGLSVGEPAEEMYAMTDVVCQILPEDKPRYLMGVGTPINILENIALGVDMFDCVMPTRNARNGMLFTAHGTINIKNKKWESDFSPIDEMGITFVDTLYSKAYLRHLFASKELLGKQIASIHNLGFYLWLVREARKHIKAGDFADWKDKMVKQMSNRL

SEQ ID NO: 61540 - protein, 376 aa, Tenacibaculum soleae
  misc_feature (1)..(376): tr|A0A1B9XXV0|A0A1B9XXV0_9FLAO Queuine tRNA-ribosyltran sferase OS=Tenacibaculum soleae OX=447689 GN=tgt PE=3 S V=1
MQFDLKTTDPKSKARAGVITTDHGTIETPIFMPVGTVGTVKGVHQSELKNEINPDIILGNTYHLYLRPKLETLEAAGGLHKFMNWDRNILTDSGGYQVYSLSGRRKINEEGVKFKSHIDGSMHFFTPENVMETQRTIGADIIMAFDECTPYPCDYNYAKRSMHMTHRWLKRCVNHLEKLPFKYGYEQTFFPIVQGSTYKDLRKQSAEYIASVGAQGNAIGGLSVGEPAEELYGMTEVVTAILPEDKPRYLMGVGTPINILENIALGIDMFDCVMPTRNARNGMLFTAHGSINIKNKKWEQDFSPIDEMGITWVDTMYSKAYLRHLFAAKEMLGKQIASIHNLGFYLWLTREARKHIIAGDFTQWKDKMVKQMDNRL

SEQ ID NO: 61541 - protein, 376 aa, Tenacibaculum sp.
  misc_feature (1)..(376): tr|A0A2H1YGM9|A0A2H1YGM9_9FLAO Queuine tRNA-ribosyltran sferase OS=Tenacibaculum sp. TNO020 OX=1458515 GN=tgt P E=3 SV=1
MEFDLKITDPKSKARAGVITTDHGTIETPIFMPVGTVGTVKGVHQSELKDEINPDIILGNTYHLYLRPKLETLEAAGGLHKFMNWDRNILTDSGGYQVYSLSGRRKINEQGVKFKSHIDGSMHFFTPENVMETQRTIGADIIMAFDECTPYPCDYNYAKRSMHMTHRWLTRCINHLEKLPFKYGHEQTFFPIVQGSTYKDLRQQSAEYIASVGAQGNAIGGLSVGEPAEELYAMTEIVTAILPEDKPRYLMGVGTPINILENIALGIDMFDCVMPTRNARNGMLFTAHGSINIKNKKWEQDFSPIDEMGITYVDTMYSKAYLRHLFAAKEMLGKQIASIHNLGFYLWLTREARKHIIAGDFTQWKDKMVKQMDNRL

SEQ ID NO: 61542 - protein, 376 aa, Tenacibaculum sp.
  misc_feature (1)..(376): tr|A0A1H5IPI8|A0A1H5IPI8_9FLAO Queuine tRNA-ribosyltran sferase OS=Tenacibaculum sp. MAR_2010_89 OX=1250198 GN= tgt PE=3 SV=1
MQFDLKITDPKSKARAGVITTDHGTIETPIFMPVGTVATVKGVHQSELKEQINPDIILGNTYHLYLRPQTKILEQAGGLHKFMNWDRNILTDSGGYQVYSLSGRRKINEEGVKFKSHIDGSTHFFTPENVMETQRTIGADIIMAFDECTPYPCDYNYAKRSMHMTHRWLKRCINHLEKTPLKYDYNQTFFPIVQGSTYKDLRKQSAEYIASVGAEGNAIGGLSVGEPAEELYAMTEVVTEILPEDKPRYLMGVGTPINILENIALGIDMFDCVMPTRNARNGMLFTAHGSINIKNKKWENDFSPIDEMGITHVDTMYSKAYLRHLFASKEMLGKQIASIHNLGFYLWLTREARKHILAGDFVEWKDKMVKQMDKRL

SEQ ID NO: 61543 - protein, 376 aa, Tenacibaculum todarodis
  misc_feature (1)..(376): tr|A0A1L3JFZ5|A0A1L3JFZ5_9FLAO Queuine tRNA-ribosyltran sferase OS=Tenacibaculum todarodis OX=1850252 GN=tgt PE =3 SV=1
MKFDLHTTDQKSKARAGTITTDHGTIETPIFMPVGTVGTVKGVHQSELKDQINPDIILGNTYHLFLRPKLEVLEAAGGLHKFMNWDRNILTDSGGYQVYSLSGRRKIKEEGVKFKSHIDGSTHFFSPENVMETQRTIGADIIMAFDECTPYPCDYNYAKRSMHMTHRWLDRCINHLEKLPFKYGYEQTFMPIVQGSTYKDLRRQSAEYIANSGQQANAIGGLSVGEPAEEMYAMTEVVTEILPEDKPRYLMGVGTPINILENIALGIDMFDCVMPTRNARNGMLFTAHGSINIKNKKWEQDFSPIDDMGITWVDTMYSKAYLRHLFVAKEMLGKQIASIHNLGFYVWLTREARKHIIAGDFREWKDKMVKQMDNRL

SEQ ID NO: 61544 - protein, 371 aa, Tenericutes bacterium
  misc_feature (1)..(371): tr|A0A2K9AVN0|A0A2K9AVN0_9BACT Queuine tRNA-ribosyltran sferase OS=Tenericutes bacterium MZ-XQ OX=1911683 GN=tg t PE=3 SV=1
MSIKFEVLHTCKQSGARLGKLTTPHGVFETPFFMPVGTQATVKTLTPEEIKEVSEGLILGNTYHLWLQPGNDIVKEHGGIRGFMQWDGALLTDSGGFQVFSLTDMRKITEEGVFFKHHKNGSQLFMSPEDSIKVQEDLGADIIMSFDECPPPYASYEYMKDSVDRTLRWAKRGKDALTTDQALFGIVQGGLDKELRKYSAEELIKMDFPGYSIGGLSVGETKEEMYEITKFLNPILPVDKPRYLMGVGAPDDLVENVINGMDMFDCVLPTRIARHGTALTTEGKVVIKNATYERDYTPLDPNLDTHVKKYTKSYIRHLFKGNEILGMRLVTYQNLAYLKHLMQEIRQAIKEDRLLDFKEEMKQKTNYFKTR

SEQ ID NO: 61545 - protein, 334 aa, Tenericutes bacterium
  misc_feature (1)..(334): tr|A0A1G3VUW3|A0A1G3VUW3_9BACT Queuine tRNA-ribosyltran sferase (Fragment) OS=Tenericutes bacterium GWD2_38_27 OX=1802348 GN=A2009_03535 PE=3 SV=1
TQATVKTLTVEEVKEVSDGMILGNTYHLWLQPGEDIVKEHGGIRGFMQWDGALLTDSGGYQVFSLTDMRKITEEGVHFKHHKNGSSLFMSPENSIKIQESLGADIIMSFDECPPPYETDEYMKTSVDRTLRWAKRGKDVLSTDQALFGIVQGGLNKEIRKYCTEELIKMDFPGYSIGGLSVGETKHEMYEMTKYLNPILPFDKPRYLMGVGSPDDLVENVINGIDMFDCVLPTRIARHGSALTTEGKIVIKNQTYERDFKPLDPNLQTPVSKYTRSYIRHLFKGEEMLGMRLVTYQNLAYLKHLMKEIRQAILEDRLLDYKDEMKKKTNYFKSH

SEQ ID NO: 61546 - protein, 394 aa, Tengunoibacter tsumagoiensis
  misc_feature (1)..(394): tr|A0A401ZTQ5|A0A401ZTQ5_9CHLR Queuine tRNA-ribosyltran sferase OS=Tengunoibacter tsumagoiensis OX=2014871 GN=t gt PE=3 SV=1
MPPFSFSIEAECPETWARAGTIQTPHGPIHTPIFMPVGTQATVKSVSPEELRAAQAQIILSNTYHLMLRPGSDLIASFGGLHSFMHWDGPILTDSGGFQVWSLGNLRKLNEDGVVFKSHIDGSLHTLTPERVMEIEAELGSDIVLPLDICSPYPCTLAEARKAMEWTHRWEERALVAKERHNPDQTLFGIVQGAFEPELRRESARIIGNMPFKGLSIGGLSVGEPKEQMWGMLRHVTPELPRDKPRHLLGVGSPEDLVEGVGLGMDMFDCVLPTRVARHGGLFTRDGRVSIKGARFRMEHGPIEDGCDCYTCQHYSAAYVHHLARAEEQLYFRLGTIHNIRFMLRLAAELRSSILNGTYVAFREAFLARYVPASEKVREAQREKWKAAREQRQS

SEQ ID NO: 61547 - protein, 383 aa, Tengunoibacter tsumagoiensis
  misc_feature (1)..(383): tr|A0A402A5E0|A0A402A5E0_9CHLR Queuine tRNA-ribosyltran sferase OS=Tengunoibacter tsumagoiensis OX=2014871 GN=K TT_41480 PE=3 SV=1
MSQVTTSNLSSSTSQSQDQYGTLSLPHGEIQLPIYMPDATLAVVRSLDAADLENCSVEAVVMNTFHLMQKPGSSTIQALGGLHKMSGWQRPIVADSGGFQAYSLIQQNAKFGSLSDDGITFKPEGADRKFQLTPEKAIQLQLSYDADVVMCLDYCTHVDAPEQIQADAVMHTIDWAKRCKKEFERLLKQKKFPAGKQPMLFGVIQGGGSFELRKRCAEALLEIGFDGFGYGGWPLDGQGKLLTEIITYTRELIPAHYQMHALGVGHPANIADCTKIGYGIFDSAMPTRDARHARLYAFTGPQSSFAAGEKWFHYVYANDDKYIKTDQPVSPYCDCLCCQRYSLGYLRHLFKINDTLFFRLATIHNLRFMTMLTQRLRAAADVQ

SEQ ID NO: 61548 - protein, 379 aa, Tenuibacillus multivorans
  misc_feature (1)..(379): tr|A0A1G9ZKC6|A0A1G9ZKC6_9BACI Queuine tRNA-ribosyltran sferase OS=Tenuibacillus multivorans OX=237069 GN=tgt P E=3 SV=1
MTAITYELIKTCKQTGARLGRVTTPHGSFETPVFMPVGTLATVKTMAPEELKEMGANIILSNTYHLWIRPGEDIVEEAGGLHSFMNWDGSILTDSGGFQVFSLSDRRKIHEEGVHFRNHLSGEKLFLSPEKAMRIQNSLGSDIMMAFDECPPYPASHEYMESSVNRTSRWAERCLEAHQNKDKQGLFGIVQGGKYEDLRKQSARDLVSLDFPGYAIGGLSVGEPKDVMNNVLEFTTPLLPSDKPRYLMGVGSPDSLVDGAIRGVDMFDCVLPTRIARNGTCMTSHGRLVVRNAKFARDFTPLDENCDCYTCRNYTKAYIRHLIKANETLGIRLTTYHNLYFLVKLMEKVRKAIKEDRLGDFRDQFFDQYGFNKPNAKNF

SEQ ID NO: 61549 - protein, 377 aa, Tepidamorphus gemmatus
  misc_feature (1)..(377): tr|A0A4R3MCH6|A0A4R3MCH6_9RHIZ Queuine tRNA-ribosyltran sferase OS=Tepidamorphus gemmatus OX=747076 GN=tgt PE=3 SV=1
MNVPHSFSIHARDGAARLGTLAFHRGAVRTPAFMPVGTAATVKAMFPETVRATGADIVLGNTYHLMLRPGAERVAELGGLHRFMNWPRPILTDSGGFQVMSLSSLRKLTEDGVIFRSHLDGSEHRLSPERSVEIQRLLGADITMQLDECVALPCADAEAERAMELSLRWAERSKRAFGSDSSRALFGIVQGGTVPALRLRSAAGLVDIGFDGYAVGGLAVGEPQAVMLETLDVTVPALPADRPRYLMGVGTPEDILLSVMRGIDMFDCVMPTRAGRHGQAYTRRGRINLRNARHADDPRPLDEESDCPAARDYSRAYLHHLIKAGEMLGAMLLTWANVHYYQQLMDGIRAAIAAGRLADHAEAIRRAWAAGDIPPRG

SEQ ID NO: 61550 - protein, 372 aa, Tepidanaerobacter acetatoxydans
  misc_feature (1)..(372): tr|F4LTJ4|F4LTJ4_TEPAE Queuine tRNA-ribosyltransferase OS=Tepidanaerobacter acetatoxydans (strain DSM 21804 / JCM 16047 / Re1) OX=1209989 GN=tgt PE=3 SV=1
MNFNILKKSANTSARLGELETLHGSFATPVFMPVGTQATVKTMTPDELKEIGAKIILSNTYHLYLRPGHEIIREAGGLHKFMNWDGSILTDSGGFQVFSLGELREINEEGVTFRSHIDGSIHFIGPETSVEIQNALGSDIMMAFDECIPYPATFEYVLSSVERTTRWAERCQKAHNNIDTQTLFGIVQGGVYKELRRKSAIDIVSLGFEGYAIGGLSVGEPKKEMYDMLDFTVPLLPDDKPRYLMGVGTPEDLFEGVIRGIDMFDCVLPTRIARHGTVFTKKGKLVVRNAAYARDFTPLDPSCDCYACKNFTRAYIRHLINVGEILGIRLTTIHNLHFLVTLMQEIQKAIEGDYLLELKDEFYANFGILQYM

SEQ ID NO: 61551 - protein, 372 aa, Tepidanaerobacter syntrophicus
  misc_feature (1)..(372): tr|A0A0U9HHE7|A0A0U9HHE7_9THEO Queuine tRNA-ribosyltran sferase OS=Tepidanaerobacter syntrophicus OX=224999 GN= tgt PE=3 SV=1
MKFDVVKKSSNTSARLGRLETCHNSFSTPIFMPVGTQATVKTMTPDELEEIGAKIILGNTYHLYLRPGHELIREAGGLHKFMNWNGSILTDSGGFQVFSLGELREIKEEGVTFRSHIDGSLHFIGPETSMEIQNALGSDIMMAFDECIPYPATYEYVLRSVERTTRWAERCKKAHKNTETQTLFGIVQGGVYKELRKKSAQDITSLDFEGYAIGGLSVGEPKKMMYEMLDFTVPLLPDERPRYLMGVGTPQDLFEGVIRGIDMFDCVLPTRIARHGTVFTKKGKLVVRNAAYARDFGPLDPTCDCYVCRNFSRAYIRHLISANEILGLRLTTYHNLYFLINLMQKIQKAIEGDYLLELKDEFFADFGIPNIM

SEQ ID NO: 61552 - protein, 377 aa, Tepidibacillus fermentans
  misc_feature (1)..(377): tr|A0A4R3KKR3|A0A4R3KKR3_9BACI Queuine tRNA-ribosyltran sferase OS=Tepidibacillus fermentans OX=1281767 GN=tgt PE=3 SV=1
MSAIRYELIKKDKKTGARLGRLYTPHGVIETPIFMPVGTQATVKTMSPEELKQMNAQIILSNTYHLFLRPGHDIVKEAGGLHHFMNWDRPILTDSGGFQVFSLSDLRKITEEGVHFRNHLSGEKLFISPEKSIEIQNALGADIIMAFDECPPYPADRDYVKKSLERTTRWAERSLKAHSRPNDQALFGIVQGGVYKDLREQSAKEITSLNFPGYAIGGLSVGEPKEMMFDILEYTTPLLPEDKPRYLMGVGDPESLFEGVIRGIDMFDCVLPTRIARNGTAMTSQGRLVVRNAKYARDFGPIDPKCSCYTCQNYSRAYVRHLLKADEIFGLRLTTYHNLFFLLNLMKNIRQAILEDRLLEYKEEFFAEYGRNELRTF

SEQ ID NO: 61553 - protein, 373 aa, Tepidibacter formicigenes
  misc_feature (1)..(373): tr|A0A1M6MWD2|A0A1M6MWD2_9FIRM Queuine tRNA-ribosyltran sferase OS=Tepidibacter formicigenes DSM 15518 OX=11233 49 GN=tgt PE=3 SV=1
MSAIRYEHIKTCKQSGARLGRIHTPHGVIDTPIFMPVGTQATVKSMTPEELKEINAKIILSNTYHLYMRPGHELVEKAGGLHKFMNWDRAILTDSGGFQVFSLGPLRKITEEGVEFRSHLDGSKHFISPEKAIEIENALGADIIMAFDECAPYPASRDYVKNSLERTTRWAKRCKDAHKYPDRQGLFGIVQGGMYKDLREQSAYEIMELDFPGYAVGGLSVGEPKPLMYEVLEYTTPLLPKDKPRYLMGVGSPDALIEGVIRGIDMFDCVLPTRIARNGTAMTSHGKVVVRNAKYAEDFLPLDPECSCYTCRNYSRAYIRHLVKANEILGARLITYHNLYFLLKLMENVRQAIREDRLLDFRREFFTKYGYEL

SEQ ID NO: 61554 - protein, 373 aa, Tepidibacter thalassicus
  misc_feature (1)..(373): tr|A0A1M5QK06|A0A1M5QK06_9FIRM Queuine tRNA-ribosyltran sferase OS=Tepidibacter thalassicus DSM 15285 OX=112335 0 GN=tgt PE=3 SV=1
MSAIRYELIKTCKQSGARLGRIHTPHGVIPTPIFMPVGTQATVKSMTPEELKEIDAKIILSNTYHLYMRPGHKLVEKAGGLHKFMNWDRAILTDSGGFQVFSLGPLRKITEEGVEFRSHLDGSKHFISPEKAIEIENSLGADIIMAFDECAPYPASRDYVKNSLERTTRWAKRCKDAHKYPDRQALFGIVQGGMYRDLREQSAKEIMELDFPGYAVGGLSVGEPKPLMYEVLEYTTPLLPKDKPRYLMGVGSPDALIEGVIRGIDMFDCVLPTRIARNGTAMTSHGKVVVRNAKYAEDFLPLDPECSCYTCRNYSRAYIRHLIKANEILGARLITYHNLYFLLKLMENVREAIMEDRLLDFRREFFSKYGYEL

SEQ ID NO: 61555 - protein, 379 aa, Tepidicaulis marinus
  misc_feature (1)..(379): tr|A0A081B7F1|A0A081B7F1_9RHIZ Queuine tRNA-ribosyltran sferase OS=Tepidicaulis marinus OX=1333998 GN=tgt PE=3 SV=1
MSEFRFDLRATDGKARLGAVHTSRGVIRTPAFMPVGTAATVKALYTEQVRGTGADILLGNTYHLMLRPGAERVASLGGLHKFMNWDGPILTDSGGFQVMSLAKLRKMSEEGVTFQSHLDGSRHMLSPERSIDIQCLLGSDIQMVLDECTPFPATEKQAAESMQLSQRWAVRSKEAFEAHPRRHEGQALFGIVQGSTYPDLRAESAAGLIETGFHGYAIGGLAVGEGQKEMLRVLDYTAPLLPQDRPRYLMGVGTPDDLVEAVSRGVDMFDCVMPTRSGRHGQAFTRRGKVNLKNARHADDPRPLDESLDCPAARDYSRAYLHHLIKNGEILGMMLLTWNNVAYYQRLMADMRAAIEAGDFAGFYKRFKEEQAEGDISPL

SEQ ID NO: 61556 - protein, 392 aa, Tepidicella xavieri
  misc_feature (1)..(392): tr|A0A4R6U825|A0A4R6U825_9BURK Queuine tRNA-ribosyltran sferase OS=Tepidicella xavieri OX=360241 GN=tgt PE=3 SV =1
MLTFQLLKTEGHARRGVLTLNHGVVQTPIFMPVGTYGTVKGVMPRSLHDMGAQIILGNTFHLWMRPGLDVMRAFGGLHGFEQWHKPILTDSGGFQVWSLGAMRKITEEGVHFASPVNGDKLFMSPEVSMQIQTVLNSDIVMQLDECTPYWQGDKASGHVTTEAEARASMALSLRWARRSKAEFERLGNPNALFGIVQGGMFEHLRQESLEALVDMDFPGYAIGGVSVGEPKEEMRRIMAHTPHRLPAHKPRYLMGVGTPEDLVEGVACGVDMFDCVMPTRNARNGTIFTRYGDLKLRNARHKADPQPLDPTCTCYACAGASGVSWADGGRDGFSRAYLHHLDRCGEMLGPMLTTIHNLHYYLNLMQEVRDALDAGTFAAFRQRFAAERARGV

SEQ ID NO: 61557 - protein, 372 aa, Tepidimicrobium xylanilyticum
  misc_feature (1)..(372): tr|A0A1H3DTN1|A0A1H3DTN1_9FIRM Queuine tRNA-ribosyltran sferase OS=Tepidimicrobium xylanilyticum OX=1123352 GN= tgt PE=3 SV=1
MTVRFRLIKESKECMARLGELETPHGIVETPIFMPVGTKATVKTMTPEEVEDLGAQIILSNTYHLYLRPGHKLIEEAGGLHKFMNWDGPILTDSGGFQIFSLGDLRKISEEGVEFKSHIDGSTHFISPEKSIEIQNSLGSDIMMAFDECVSYPADYDYVKKSMERTTRWAKRCKDFHKNWEKQALFGIVQGGMYKDLREESVKGITDIGFSGYAVGGLSVGEPRELMCEMLDFTTPLLPKDKPRYLMGVGTPDYLFEAVIRGIDMADCVMPTRIARNGAVMTSIGRINIRNAKYSRDFTKLDPECDCYTCTNYTRAYIRHLFNVNEILGLRLTTIHNLYFLIKLMENIRTAIREDRLLEYREEFYKNYGYID

SEQ ID NO: 61558 - protein, 394 aa, Tepidimonas alkaliphilus
  misc_feature (1)..(394): tr|A0A554W4E3|A0A554W4E3_9BURK Queuine tRNA-ribosyltran sferase OS=Tepidimonas alkaliphilus OX=2588942 GN=tgt P E=3 SV=1
MLSFELLATDPTSHARRGRLRLTHGVVETPIFMPVGTYGTVKGVTPRSLLEMGAQIILGNTFHLWLRPGLEVIRAFGGLHRFEQWPRPILTDSGGFQVWSLGAMRRITEEGVHFASPVNGDRLFLSPEVSIQIQTALDSDIVMQLDECTPYWQGDKTSGHVTTEAEARASMELSLRWARRSKAEFERLGNRNALFGIVQGGMFEHLRQESLEALVELDLPGYAIGGVSVGEPKEDMRRILAHTPHRLPAHKPRYLMGVGTPEDLVEGVACGVDMFDCVMPTRNARNGTYFTRYGDLKIRNARHKADPRPIDPSCTCYACAGISGVSWNDGGRDGFSRAYLHHLDRCGEMLGPMLATIHNLHYYLNLMREIRAALEAGTFAAFRQRFAAERAAGV

SEQ ID NO: 61559 - protein, 394 aa, Tepidimonas aquatica
  misc_feature (1)..(394): tr|A0A554WRQ3|A0A554WRQ3_9BURK Queuine tRNA-ribosyltran sferase OS=Tepidimonas aquatica OX=247482 GN=tgt PE=3 S V=1
MLRFDVLATDPTSHARRGRLTLNHGVVETPIFMPVGTYGTVKGVTPRSLHEMGAQIILGNTFHLWMRPGLDVIRAFGGLHAFEQWHKPILTDSGGFQVWSLGAMRKITEEGVHFASPVNGDKLFMSPEVSIQIQTVLGSDIVMQLDECTPYWQGDKASGHVTTEAEACASMELSLRWARRCKAEFERLGNPNALFGIVQGGMFEHLRQASLEALVEMDFPGYAIGGVSVGEPKEEMRRIMAHTPHRLPAHKPRYLMGVGTPEDLVEGVACGVDMFDCVMPTRNARNGTYFTRYGDLKIRNARHKTDPRPIDPSCTCYACAGSSGVPWEAGGREGFSRAYLHHLDRCGEMLGPMLATIHNLHYYLNLMRDVRAALEAGRFGEFRQRFAAERSQGV

SEQ ID NO: 61560 - protein, 394 aa, Tepidimonas fonticaldi
  misc_feature (1)..(394): tr|A0A1A6DWU2|A0A1A6DWU2_9BURK Queuine tRNA-ribosyltran sferase OS=Tepidimonas fonticaldi OX=1101373 GN=tgt PE= 3 SV=1
MLTFELLATDPTSHARRGRLTLNHGVVQTPIFMPVGTYGTVKGVMPRSLHDMGAQIILGNTFHLWMRPGLDVMRAFGGLHGFEQWHKPILTDSGGFQVWSLGAMRKITEEGVHFASPVNGDKLFMSPEVSMQIQTVLNSDIVMQLDECTPYWQGDKASGHVTTEAEARASMALSLRWARRSKAEFERLGNPNALFGIVQGGMFEHLRQESLEALVDMDFPGYAIGGVSVGEPKEEMRRIMAHTPHRLPAHKPRYLMGVGTPEDLVEGVACGVDMFDCVMPTRNARNGTIFTRYGDLKLRNARHKADPQPLDPTCTCYACAGASGVRWVDGGRDGFSRAYLHHLDRCGEMLGPMLTTIHNLHYYLNLMQEVRDALDAGTFAAFRQRFAAERAQGV

SEQ ID NO: 61561 - protein, 397 aa, Tepidimonas fonticaldi
  misc_feature (1)..(397): tr|A0A554XKF1|A0A554XKF1_9BURK Queuine tRNA-ribosyltran sferase OS=Tepidimonas fonticaldi OX=1101373 GN=tgt PE= 3 SV=1
MPAMLTFELLATDPTSHARRGRLTLNHGVVETPIFMPVGTYGTVKGVMPRSLHDMGAQIILGNTFHLWMRPGLDVMRAFGGLHGFEQWHKPILTDSGGFQVWSLGAMRKITEEGVHFASPVNGDKLFMSPEVSMQIQTVLNSDIVMQLDECTPYWQGDKASGHVTTEAEARASMALSLRWARRSKAEFERLGNPNALFGIVQGGMFEHLRQESLEALVDMDFPGYAIGGVSVGEPKEEMRRIMAHTPHRLPAHKPRYLMGVGTPEDLVEGVACGVDMFDCVMPTRNARNGTIFTRYGDLKLRNARHKADPQPLDPTCTCYACAGTSGVPWADGGRDGFSRAYLHHLDRCGEMLGPMLTTIHNLHYYLNLMQEVRDALDAGTFAAFRQRFAAERAQGV

SEQ ID NO: 61562 - protein, 394 aa, Tepidimonas ignava
  misc_feature (1)..(394): tr|A0A4R3LDX0|A0A4R3LDX0_9BURK Queuine tRNA-ribosyltran sferase OS=Tepidimonas ignava OX=114249 GN=tgt PE=3 SV= 1
MLRFDVLTTDPTSHARRGRLTLNHGVVETPIFMPVGTYGTVKGVTPRSLHEMGAQIILGNTFHLWMRPGLDVIRAFGGLHAFEQWHKPILTDSGGFQVWSLGAMRKITEEGVHFASPVNGDKLFMSPEVSIQIQTVLGSDIVMQLDECTPYWQGDKASGHVTTEAEARASMELSLRWARRCKAEFERLGNPNALFGIVQGGMFEHLRQASLEALVEMDFPGYAIGGVSVGEPKEEMRRIMAHTPHRLPANKPRYLMGVGTPEDLVEGVACGVDMFDCVMPTRNARNGTYFTRYGDLKIRNARYKTDPLPIDPSCTCYACAGTCGVSWNDGGREGFSRAYLHHLDRCGEMLGPMLATIHNLHHYLNLMREIRAALDAGCYADFRRRFAAERSQGV

SEQ ID NO: 61563 - protein, 394 aa, Tepidimonas sediminis
  misc_feature (1)..(394): tr|A0A554WQT4|A0A554WQT4_9BURK Queuine tRNA-ribosyltran sferase OS=Tepidimonas sediminis OX=2588941 GN=tgt PE=3 SV=1
MLSFELLATDPTSHARRGRLTLTHGVVETPIFMPVGTYGTVKGVTPRSLLEMGAQIILGNTFHLWLRPGLEVIRAFGGLHRFEQWPRPILTDSGGFQVWSLGAMRKITEEGVHFASPVNGDRLFLSPEVSIQIQTALDSDIVMQLDECTPYWQGDQQSGHVTTEAEARASMELSLRWARRSKAEFERLGNRNALFGIVQGGMFEHLRQESLEALVELDLPGYAVGGVSVGEPKEDMRRILAHTPHRLPAHKPRYLMGVGTPEDLVEGVACGVDMFDCVMPTRNARNGTCFTRYGDLKIRNARHKTDPRPIDPSCTCYACAGTSGVSWNDGGREGFARAYLHHLDRCGEMLGPMLATIHNLHYYLNLMREIRAALEAGTFAAFRQRFAAERAAGV

SEQ ID NO: 61564 - protein, 394 aa, Tepidimonas sp.
  misc_feature (1)..(394): tr|A0A554XIE4|A0A554XIE4_9BURK Queuine tRNA-ribosyltran sferase OS=Tepidimonas sp. SPSP-6 OX=2267262 GN=tgt PE= 3 SV=1
MLQFQILATDPDSHARRARLTLNHGVVETPIFMPVGTYGTVKGVMPRNLHEMGAQIILGNTFHLWLRPGLEVIRAFGGLHGFEQWPKPILTDSGGFQVWSLGAMRKISEEGVHFASPVNGDKLFMSPEVSIQIQTVLNSDIVMQLDECTPYWQGDKASGHVTTEAEARASMELSLRWARRCQAEFERLGNRNALFGIVQGGMYEHLRQESLEALAALDLPGYAIGGVSVGEPKEDMRRIMAHTPHRLPAHKPRYLMGVGTPEDLVEGVACGVDMFDCVMPTRNARNGTYFTRTGDLKIRNARYKTDPLPIDPSCTCYACAGAEGVSWEDGGRGGFSRAYLHHLDRCGEMLGPMLATIHNLHFYLHLMQEVRAALETGRFSAFRQRFASERARGV

SEQ ID NO: 61565 - protein, 394 aa, Tepidimonas taiwanensis
  misc_feature (1)..(394): tr|A0A554X7A3|A0A554X7A3_9BURK Queuine tRNA-ribosyltran sferase OS=Tepidimonas taiwanensis OX=307486 GN=tgt PE= 3 SV=1
MLQFQLLATDPTSHARRGRLTLNHGVVETPIFMPVGTYGTVKGVTPRSLREMGAQIILGNTFHLWMRPGLDVIRAFGGLHGFERWERPILTDSGGFQVWSLGAMRKITEEGVRFASPVNGDKLFLSPEVSMQIQTVLNSDIVMQLDECTPYWQGDKASGHVTTEAEARASMELSLRWARRSKAEFERLGNPNALFGIVQGGMFEHLREASLEALVAMDFHGYAIGGVSVGEPKEEMRRIMAHTPHRLPAHKPRYLMGVGTPEDLVEGVACGVDMFDCVMPTRNARNGHLFTRYGDVKIRNARYKDDPLPIDPDCTCYACAGDAGVSWNDGGREGFSRAYLHHLDRCGEMLGPMLATIHNLHYYLNLMREVRAALEAGTFAAFRQRFAAERSRGV

SEQ ID NO: 61566 - protein, 400 aa, Tepidimonas thermarum
  misc_feature (1)..(400): tr|A0A554X3M0|A0A554X3M0_9BURK Queuine tRNA-ribosyltran sferase OS=Tepidimonas thermarum OX=335431 GN=tgt PE=3 SV=1
MLEFTVLRTDPPRDGYAGSHARRGVLKLNHGVVQTPIFMPVGTYGTVKGVMPRSLREMGAQIILGNTFHLWMRPGLDVIRAFGGLHAFEQWERPILTDSGGFQVWSLGAMRKITEEGVHFASPVNGDKLFMSPEVSIQIQTALDSDIVMQLDECTPYWQGDKANGHVTTEAEARQSMEMSLRWARRSQAEFERLGNRNALFGIVQGGMFEHLREESLQALVEMDFPGYAVGGVSVGEPKEAMRRIMAHTPHRLPAHKPRYLMGVGTPEDLVEGVACGVDMFDCVMPTRNARNGTYFTRYGDLKIRNARHKTDPRPIDPSCTCYACAGDSGIPWHAGGRAGFSRAYLHHLDRCGEMLGPMLATIHNLHYYLNLMQEVRDALDAGTFGDYRQRFAAERAQGV

SEQ ID NO: 61567 - protein, 373 aa, Tepidiphilus thermophilus
  misc_feature (1)..(373): tr|A0A0K6IW42|A0A0K6IW42_9PROT Queuine tRNA-ribosyltran sferase OS=Tepidiphilus thermophilus OX=876478 GN=tgt P E=3 SV=1
MSDTPAFTLLATDGAARRGRLHLAHGTVETPIFMPVGTYGTVKAMTPTALEDVGAQIVLGNTFHLWLRPGLEVIRRHGGLHRFMGWNKPILTDSGGFQVFSLGALRKISEEGVRFASPIDGARCFLTPEVSMQIQTVLDSDVVMIFDECTPYPATETQAAESMRLSLRWAQRSRAEFDRLGNRNALFGIVQGGMYEALRDESLAGLMEIGFDGYAIGGLSVGEPKDEMRRVLEYVAPRLPQTRPRYLMGVGTPEDLIHGVDAGVDMFDCVMPTRNARNGLLFTRYGDVKIRNARYREDTAPLDETCSCTTCRHFTRAYLHHLYRTGEILASILNTTHNLHFYLTLMAELRAAIERGNFTETAARLLAERQRGV

SEQ ID NO: 61568 - protein, 372 aa, Terasakiispira papahanaumokuakeensis
  misc_feature (1)..(372): tr|A0A1E2VDK9|A0A1E2VDK9_9GAMM Queuine tRNA-ribosyltran sferase OS=Terasakiispira papahanaumokuakeensis OX=1974 79 GN=tgt PE=3 SV=1
MQFELLNTEGKARRGRLRFPRGDVETPAFMPVGTYGTVKGMTPRDIQDIGAHIILGNTFHLMLRPGTEVIAEHGDLHDFMQWQGPILTDSGGFQVFSLGEMRKITEQGVTFKSPIDGSKVFMGPEESMAVQKALGSDIVMIFDECTPYPATHDEARKSMEMSLRWAKRSREAHGDSPSALFGIIQGGMYRDLREQSLAALNDIGFDGMAIGGLSVGEPKEEMIKVLDYLPDLMPADKPRYLMGVGKPEDLVEGVRRGVDMFDCVMPTRNARNGHYFVHDGVIKIRNAKHRHDTNPLDPHCDCYTCQNFSRSYLHHLDKCGEMLGAMLATIHNLRHYQQLMAGLRGALEAGKLADFVDDFYARRNLVTPPLSE

SEQ ID NO: 61569 - protein, 372 aa, Teredinibacter sp.
  misc_feature (1)..(372): tr|A0A509E2E1|A0A509E2E1_9GAMM Queuine tRNA-ribosyltran sferase OS=Teredinibacter sp. ISS155 OX=2584524 GN=tgt PE=3 SV=1
MKFNKISEDGFARRGQLIFNRGVVETPAFMPVGTYGTVKGMLPRDIEAIGAQIILGNTFHLMLRPGTEIIKQHGDLHDFTQWSGPILTDSGGFQVFSLGDLRKITEEGVKFRSPIDGSEIFLDPEKAMQVQRDLGSDIVMIFDECTPYPASEMDARQSMELSLRWARRSKQAHEGNPNALFGIVQGGMYEQLRTESLAGLVDIGFDGYAIGGLSVGEPKEDMARILDHLKTRMPVEKPRYLMGVGKPEDIVEGVVRGIDMFDCVMPTRNARNGHLFTTEGVVKIRNACHKMDTAPLDAHCDCYTCQNFSRSYLHHLDKCGEILGSQLNTIHNLRHYQKIMQELRTAIEQNSLNRYVDEFYQRQNKIRPSMFL

SEQ ID NO: 61570 - protein, 380 aa, Teredinibacter turnerae
  misc_feature (1)..(380): tr|C5BLY1|C5BLY1_TERTT Queuine tRNA-ribosyltransferase OS=Teredinibacter turnerae (strain ATCC 39867 / T7901) OX=377629 GN=tgt PE=3 SV=1
MAECHMQFELDTSDGAARRGRLRFPRGVVETPAFMPVGTYGTVKGMLPRDIHDTGAQILLGNTFHLMLRPGTEVVKQHGDLHDFMQWSGPILTDSGGFQVFSLGDLRKITEEGVKFRSPIDGSEVFLDPERAMQVQRDLGSDIVMIFDECTPYPATETEAKSSMELSLRWAARSKAAHEGNPSALFGIVQGGMYENLRTESLQGLTEIGFNGYAIGGLSVGEPKEDMIRVLNHLGPQMPVDKPRYLMGVGKPEDIVEGVCRGVDMFDCVMPTRNARNGHLFTREGVIKIRNACHRYDTGPLDPSCDCYTCSNFSRAYLHHLDKCGEILGAQLNTIHNLRHYQTVMSEIRAAIEAHNLKNWVNEFYARQSKARPAFCQSLE

SEQ ID NO: 61571 - protein, 371 aa, Terrabacteria group
  misc_feature (1)..(371): tr|A0A537LHD3|A0A537LHD3_9BACT Queuine tRNA-ribosyltran sferase OS=Terrabacteria group bacterium ANGP1 OX=25697 60 GN=tgt PE=3 SV=1
MSGFRFELLRGSAAGPRLGSLQTPRGVVRTPAFMPVGTQATVKGLTSEEVREIGAEMILANTFHLYLRPGADVIERAGGLHKFMRWDGPILTDSGGFQIFSLARLRRLTDEGVTFRSPLDGAEHLFTPERVLEIQRQLGSDLVMPLDVCLGYPADDEKAKEALRLTLLWARRSRAHGSGNGQMLFGIVQGGFSPVLRRDAAARTVEMGFDGYAIGGLSVGEPRELTAELIQETCAGLPADRPRYLMGVGAPPALLDAIARGVDLFDCVLPTRVARTGAIFTRQGRVNVRNAGFREDLGPPDDSCRCAVCARYTRAYLRHLFNADEMLGPRLATYHNLSFLAQLMEEARAAIAADRFDSWRREVLVAYVTPW

SEQ ID NO: 61572 - protein, 371 aa, Terrabacteria group
  misc_feature (1)..(371): tr|A0A537LLL6|A0A537LLL6_9BACT Queuine tRNA-ribosyltran sferase OS=Terrabacteria group bacterium ANGP1 OX=25697 60 GN=tgt PE=3 SV=1
MSGFRFELLRGSAAGPRLGSLQTPRGVVRTPAFMPVGTQATVKGLTSEEVREIGAEMILANTFHLYLRPGADVIERAGGLHKFMRWDGPILTDSGGFQIFSLARLRRLTDEGVTFRSPLDGAEHLFTPERVLEIQRQLGSDLVMPLDVCLGYPADDEKAKEALRLTLLWARRSRAHGSGNGQMLFGIVQGGFSPVLRRDAAARTVEMGFDGYAIGGLSVGEPRELTAELIQETCAGLPADRPRYLMGVGAPPALLDAIARGVDLFDCVLPTRVARTGAIFTRQGRVNVRNAAFREDLGPPDDSCRCAVCARYTRAYLRHLFNADEMLGPRLATYHNLSFLAQLMEEARAAIAADRFDSWRREVLVAYVTPW

SEQ ID NO: 61573 - protein, 378 aa, Terribacillus aidingensis
  misc_feature (1)..(378): tr|A0A285NQQ8|A0A285NQQ8_9BACI Queuine tRNA-ribosyltran sferase OS=Terribacillus aidingensis OX=586416 GN=tgt P E=3 SV=1
MAIRYEFIKQDKQTGARLGIVHTPHGSFETPTFMPVGTLATVKTMSPEDLTELNAKIILSNTYHLWLRPGHEIIREAGGLHKFMNWDGAILTDSGGFQVFSLSDLRDIQEEGVHFRNHISGEKLFLSPEKAMDIQNALGSDIMMAFDECPPYPASFDYMKASVERTSRWAERCLTAHARPDVQGLFGIVQGGEYEDLRKQSAQDLVSLDFPGYAVGGLSVGEPKDVMNRVLEFTTPWLPQDKPRYLMGVGSPDSLIDGAIRGIDMFDCVLPTRIARNGTCMTSNGRLVVRNAQYARDFGPIDENCDCKVCKNYSRAYIRHLIKCNETFGFRLTTYHNLHFLIELMRKVREAIKEDRLGDFRDEFFESYGFNKPNAKNF

SEQ ID NO: 61574 - protein, 378 aa, Terribacillus goriensis
  misc_feature (1)..(378): tr|A0A075LLU8|A0A075LLU8_9BACI Queuine tRNA-ribosyltran sferase OS=Terribacillus goriensis OX=386490 GN=tgt PE= 3 SV=1
MAIRYEFIKQDKQTGARLGIVHTPHGSFETPTFMPVGTLATVKTMSPEELTELNANIILSNTYHLWLRPGHEIIREAGGLHKFMNWDGAILTDSGGFQVFSLSDLRDIQEEGVHFRNHISGEKLFLSPEKAMDIQNALGSDIMMAFDECPPYPATYDYMKASVERTSRWAERCLTAHARPDVQGLFGIVQGGEFEELRKQSAQDLVSMDFPGYAVGGLSVGEPKDVMNRVLEFTTPWLPQDKPRYLMGVGSPDSLIDGAIRGIDMFDCVLPTRIARNGTCMTSKGRLVVRNAQYARDFGPIDENCDCKVCKNYSRAYIRHLIKCNETFGFRLTTYHNLHFLIELMRKVREAIKEDRLGDFRDEFFESYGFNKPNAKNF

SEQ ID NO: 61575 - protein, 378 aa, Terribacillus halophilus
  misc_feature (1)..(378): tr|A0A1G6SKL3|A0A1G6SKL3_9BACI Queuine tRNA-ribosyltran sferase OS=Terribacillus halophilus OX=361279 GN=tgt PE =3 SV=1
MAIRYEFIKQDKQTGARLGIVHTPHGSFETPTFMPVGTLATVKTMSPEELTELNANIILSNTYHLWLRPGHEIIREAGGLHKFMNWDGAILTDSGGFQVFSLSDLRDIQEEGVHFRNHISGEKLFLSPEKAMEIQNALGSDIMMAFDECPPYPATYDYMKASVERTSRWAERCLTAHARPDVQGLFGIVQGGEFEDLRKQSAQDLVSMDFPGYAVGGLSVGEPKDVMNRVLEFTTPWLPQDKPRYLMGVGSPDSLIDGAIRGIDMFDCVLPTRIARNGTCMTSNGRLVVRNAQYARDFGPIDENCDCKVCKNYSRAYIRHLIKCNETFGFRLTTYHNLHFLIELMRKVREAIKEDRLGDFRDEFFESYGFNKPNAKNF

SEQ ID NO: 61576 - protein, 378 aa, Terribacillus saccharophilus
  misc_feature (1)..(378): tr|A0A1H7Z4G7|A0A1H7Z4G7_9BACI Queuine tRNA-ribosyltran sferase OS=Terribacillus saccharophilus OX=361277 GN=tg t PE=3 SV=1
MAIRYEFIKQDKQTGARLGIVHTPHGSFETPTFMPVGTLATVKTMSPEELTELNANIILSNTYHLWLRPGHEIIREAGGLHKFMNWDGAILTDSGGFQVFSLSDLRDIQEEGVHFRNHISGEKLFLSPEKAMDIQNALGSDIMMAFDECPPYPATYDYMKASVERTSRWAERCLTAHARPDVQGLFGIVQGGEFEDLRKQSAQDLVSMDFPGYAVGGLSVGEPKDVMNRVLEFTTPWLPQDKPRYLMGVGSPDSLIDGAIRGIDMFDCVLPTRIARNGTCMTSKGRLVVRNAQYARDFGPIDENCDCKVCKNYSRAYIRHLIKCNETFGFRLTTYHNLHFLIELMRKVREAIKEDRLGDFRDEFFESYGFNKPNAKNF

SEQ ID NO: 61577 - protein, 378 aa, Terribacillus sp.
  misc_feature (1)..(378): tr|A0A268BS09|A0A268BS09_9BACI Queuine tRNA-ribosyltran sferase OS=Terribacillus sp. 7520-G OX=2025389 GN=tgt P E=3 SV=1
MAIRYEFIKQDKQTGARLGIVHTPHGSFETPTFMPVGTLATVKTMSPEELTELNANIILSNTYHLWLRPGHEIIREAGGLHKFMNWDGAILTDSGGFQVFSLSDLRDIREEGVHFRNHISGEKLFLSPEKAMEIQNALGSDIMMAFDECPPYPATYDYMKASVERTSRWAERCLAAHARPDVQGLFGIVQGGEYEDLRKQSAQDLVSMDFPGYAVGGLSVGEPKDVMNRVLEFTTPWLPQDKPRYLMGVGSPDSLIDGAIRGIDMFDCVLPTRIARNGTCMTSNGRLVVRNAQYARDFGPIDENCDCKVCKNYSRAYIRHLIKCNETFGFRLTTYHNLHFLIELMRKVREAIKEDRLGDFRDEFFESYGFNKPNAKNF

SEQ ID NO: 61578 - protein, 371 aa, Terriglobus albidus
  misc_feature (1)..(371): tr|A0A5B9E946|A0A5B9E946_9BACT Queuine tRNA-ribosyltran sferase OS=Terriglobus albidus OX=1592106 GN=tgt PE=3 S V=1
MSLSFELLKESGPARRATLTLPHGEVETPVFMPVGTAASVKAVPQDVMETNGAEGKGAGIILANTYHLYLRPGHELIRRAGGVHKFMSWNRAMLTDSGGFQVFSLSELRKVTPDGVEFRSHHDGSKHFFSPEHSMEVQIALGADIMMAFDECVETPATWERTKESMGLTHAWAQRSLDYWKEHRHEVPWHNELDGSHQSLFGIVQGGMYKDLRAESAERLVEMDFPGYAIGGLAVGEAREVTREMIAHTLEYLPKDKPRYVMGVGYPDEIVEYARMGVDMMDCVLPTRAGRHGLLFTSQGRLNIKNKQYAEDQNPPDPACNCMVCRRYTRAYLRHLMHTGEPLALTLASEHNLAFYLDQMQALRNEFDQAE

SEQ ID NO: 61579 - protein, 394 aa, Terriglobus roseus
  misc_feature (1)..(394): tr|A0A1G7PH85|A0A1G7PH85_9BACT Queuine tRNA-ribosyltran sferase OS=Terriglobus roseus OX=392734 GN=tgt PE=3 SV= 1
MGGTAICAVPPIVFYNQRQMSLRFEIHRTENSMRRATLHLPHGSVETPVFMPVGTAASVKAVPQDILETLGDDGRGAEIILANTYHLYLRPGHELIRRAGGVHKFMSWNRPMLTDSGGFQVFSLAALRKITAEGVEFRSHLDGSKHFFSPEHSIDVQIALGADIIMAFDECTEHPATYERTRDSMALTHAWAQRSLDHFHSHCQDVPWFNELGQRQNLYGIVQGGMYKDLRTESANRLLEMRAPNGEGFDGYAIGGLAVGEPREVTREIIAHTLELLPKDKPRYVMGVGYPDEIVEYAQMGVDQMDCVLPTRAARHALLFTSEGRLNIRGKKFSEDHGQADPECHCPVCRRYSRAYLRHLFHTGEPLAATLASVHNLSFYLDTMRKLRGERIAG

SEQ ID NO: 61580 - protein, 408 aa, Terriglobus roseus
  misc_feature (1)..(408): tr|I3ZAX7|I3ZAX7_TERRK Queuine tRNA-ribosyltransferase OS=Terriglobus roseus (strain DSM 18391 / NRRL B-41598 / KBS 63) OX=926566 GN=tgt PE=3 SV=1
MSREKAGAFRRLNRTPSRRCFSPGHPPPSLQSKVMSLRFEIHNTHGNLRRGTLHLPHGSVQTPVFMPVGTAASVKAVPQDTLETLGDDGRGAEIILANTYHLYLRPGHDLIRRAGGVHKFMSWPRPMLTDSGGFQVFSLAALRKITPDGVEFRSHLDGSKHFFSPEHSIDVQIALGADIIMAFDECTEHPATYERTRDSMGLTHAWALRSLEHFHANAHNVPWFAELGSQRQNLYGIVQGGMYKDLRAESAARLTEMRDANGNGFDGYAIGGLAVGEPREVTREIIAHTLELLPKDKPRYVMGVGYPDEIVEYAKMGVDQMDCVLPTRAARHALMFTSEGRLNIRGKKFAEDHGPADPTCNCTTCRRYSRAYLRHLFHTGEPLAATLASVHNLHFYLETMRHLRDGSL

SEQ ID NO: 61581 - protein, 371 aa, Terriglobus saanensis
  misc_feature (1)..(371): tr|E8V4F6|E8V4F6_TERSS Queuine tRNA-ribosyltransferase OS=Terriglobus saanensis (strain ATCC BAA-1853 / DSM 23 119 / SP1PR4) OX=401053 GN=tgt PE=3 SV=1
MGLTFEVSKTTAAGGRRGVIGLPHGDVQTPVFMPVGTVASVKAVPQETVETIGAGGRGAEIILANTYHLYLRPGHELVRRMGGVHKFMSWRRPMLTDSGGFQVFSLKGLRKVKEEGVEFRSHLDGGKHFFSPEHSMAVQIALGADIMMAFDECTEHPATWQRAKDSMEMTHRWAQRSLDYFQAHASEVPWHEERGGRRQSLFGIVQGGMHKDLRTQSAETLVAMDFDGYAIGGLAVGEERDVTREMIAHTLEYLPKDKPRYVMGVGYPDEIEEYAKMGVDMMDCVLPTRAGRHGLVFTSQGRVNIKNKIHEEDGGPLDPACTCSVCARYSRGYIRHLFAAGEALGMTLASVHNLAFYLDTMERVRGEIAEG

SEQ ID NO: 61582 - protein, 345 aa, Terrimicrobium sacchariphilum
  misc_feature (1)..(345): tr|A0A146G9I3|A0A146G9I3_TERSA Queuine tRNA-ribosyltran sferase OS=Terrimicrobium sacchariphilum OX=690879 GN=t gt PE=3 SV=1
MPVGTQGTVKAVSPRELHELGAQIILGNTYHLHVRPGEKLISRLGGLHRFNGWDRPILTDSGGFQVFSLARLRKITEDGVHFQNHLDGTPTFIGPEQSMEIQRDLGSDIVMTFDECPPYPCEEAVASTSLDLTLRWAVRCKEWWASQPDESKPLLFGIVQGSSYPELRAKSAQELVKIGFDGYAVGGVSVGEPEPEMMAAIENAEPHLPQDRARYAMGLGTPPQMVEMVARGIDMFDCVLPTRLARNGTAFTAAGTMALKNAGYAEDPGPIEEGCTCYACANFTRAYIRHLIKAEEILGLRLVSLHNLHFYLNLMRTARRAIIEGNFAEFRRAFVAGYKKNEANA

SEQ ID NO: 61583 - protein, 379 aa, Terrimonas sp.
  misc_feature (1)..(379): tr|A0A2T7QFY2|A0A2T7QFY2_9BACT Queuine tRNA-ribosyltran sferase OS=Terrimonas sp. NS-102 OX=2171976 GN=tgt PE=3 SV=1
MAALQFELKTTDSQSKARAGIITTDHGSIPTPIFMPVGTAGSVKAVTQQQLKDEVNAKIILGNTYHLYLRPGTGILESAGGLHQFMNWNRPILTDSGGYQVFSLSGTRKIQEEGVVFQSHIDGSRHLFSPETVMDIQRSIGADIIMAFDECPPYPSDYKYAERSMHLTHRWLDRSFNRIEITSSKYEHTQNLFPIVQGGTYHDLRKMSCEYISSKNATGNAIGGLSVGEPEEMMYDLCGLCCDNLPVQKPRYLMGVGTPWNILECIALGIDMFDCVMPTRNGRNAMLFTSNGVINIDNKKWEKDYSPIDDGIACETSNYYSKAYLRHLMKSKEILGLTIASIQNLAFYLHVVTEARKHIEAGDFTSWMKESVVRFKQRL

SEQ ID NO: 61584 - protein, 373 aa, Terrisporobacter glycolicus
  misc_feature (1)..(373): tr|A0A1I3SQL3|A0A1I3SQL3_9FIRM Queuine tRNA-ribosyltran sferase OS=Terrisporobacter glycolicus OX=36841 GN=tgt PE=3 SV=1
MSAIRYELIKTCKQSGARLGRLHTPHGVIETPIFMPVGTQATVKAMTPEELKEIGSQIILSNTYHLYMRPGHDLVKEAGGLHKFMNWDKPILTDSGGFQVFSLGPLRKITEEGVHFRSHIDGSKHFISPEKAMEIQNALGSDIMMAFDECAPYPADREYVKNSLERTTRWLRRCKEAHKNTENQALFGIIQGGMYKDLREQSAKEILELDLPGYAVGGLSVGEPKPLMYEVLDYTVPLMPEDKPRYLMGVGSPDDLLEGVIRGIDMFDCVLPTRIARNGTAMTSQGKVVVRNAKYARDFTPLDPECDCYCCKNYTKAYIRHLVKANEILAARLISTHNLRFLLKLMEDIRQAIMEDRLLDFKDEFFSKYGYKL

SEQ ID NO: 61585 - protein, 371 aa, Terrisporobacter othiniensis
  misc_feature (1)..(371): tr|A0A0B3VKY3|A0A0B3VKY3_9FIRM Queuine tRNA-ribosyltran sferase OS=Terrisporobacter othiniensis OX=1577792 GN=t gt PE=3 SV=1
MSAIRYELIKTCKQSGARLGRLHTPHGVIETPIFMPVGTQATVKAMTPEELKEIGSQIILSNTYHLYMRPGHDLVKEAGGLHKFMNWDRPILTDSGGFQVFSLGPLRKITEEGVHFRSHIDGSKHFISPEKAMEIQNALGSDIMMAFDECAPYPADREYVKNSLERTTRWLKRCKEAHKNTENQALFGIIQGGMYKDLREQSAREILELDLPGYAVGGLSVGEPKPLMYEVLDYTVPLMPEDKPRYLMGVGSPDDLLEGVIRGIDMFDCVLPTRIARNGTAMTSQGKVVVRNAKYARDFTPLDPECDCYCCKNYTKAYIRHLVKANEILAARLISTHNLRFLLKLMEDVRQAIMEDRLLDFKDEFFAKYGY

SEQ ID NO: 61586 - protein, 431 aa, Tersicoccus phoenicis
  misc_feature (1)..(431): tr|A0A1R1L7Z3|A0A1R1L7Z3_9MICC Queuine tRNA-ribosyltran sferase OS=Tersicoccus phoenicis OX=554083 GN=tgt PE=3 SV=1
MPRSDFSFHVTARLTETTTSPAAGRAGVIDTPHGPIRTPAFIPVGTQAAVKAVLPEAVAELGGQAVLANAYHLYLQPGADIVDEAGGLGRFMNWPGPTFTDSGGFQVMSLGSGFKKVISMDLPAERQGADDAVAPGKERLADVDEDGVWFRSHLNGDRHRFTPEVSMGIQHQLGADITFAFDELTTLMNSRGYQEESLERTRRWAQRCLDEHARLTTQRSGKPYQALFGVIQGAQYEDLRRKACRDLAAMTSGMDDGEDGGGFDGYGIGGALEKENLGTIVGWCADELPEDRPRHLLGISEPDDVFTAIENGADTFDCVSPTRVARTSAVYTRDGRINLAGARYKRQFTPIDETCDCYTCAHYTVAYLRHLFKAKEMNAATLASIHNERFVVRMVDDARRALEDGTFFDLKADVLGRYYGRTAARGTTTVG

SEQ ID NO: 61587 - protein, 427 aa, Tersicoccus sp.
  misc_feature (1)..(427): tr|A0A1R1LXI7|A0A1R1LXI7_9MICC Queuine tRNA-ribosyltran sferase OS=Tersicoccus sp. Bi-70 OX=1897634 GN=tgt PE=3 SV=1
MPHDDFSFRVTARLNETTSSAGAGRAGVIDTPHGPIRTPAFIPVGTQAAVKAVLPEAIAELGGQAVLANAYHLYLQPGADIVDEAGGLGRFMNWPGPTFTDSGGFQVMSLGSGFKKVISMDLPAGDQGVDDAVAPGKERLADVDEDGVWFRSHLNGDRHRFTPEVSMGIQHQLGADIMFAFDELTTLMNSRGYQEESLERTRRWAQRCLDEHARLTTERTGRPYQALFGVIQGAQYEDLRRKACTDLAEMRAATAGGDGHGFDGYGIGGALEKENLGTIVGWCAQELPEDRPRHLLGISEPDDVFTAIENGADTFDCVSPTRVARTSAVYTRDGRINLAGARYKRQFTPIDETCDCYTCAHYTVAYLRHLFKAKEMNASTLASIHNERFVVRMVDDARRALEDGSFLDLKTEVLGRYYGTRMTTPAG

SEQ ID NO: 61588 - protein, 408 aa, Tessaracoccus aquimaris
  misc_feature (1)..(408): tr|A0A1Q2CLC0|A0A1Q2CLC0_9ACTN Queuine tRNA-ribosyltran sferase OS=Tessaracoccus aquimaris OX=1332264 GN=tgt PE =3 SV=1
MSFSFDVTHRLDDAPGRVGVIHTPHGDIETPAFVVVGTKATVKAVLPETVADLGAQAVLANAYHLYLQPGSDLIDEAGGLGAFMNWPGPTFTDSGGFQVMSLGAGFKKVLAMDTAGLQNDDVIAEGKTRMAHVDEDGVTFKSHLDGTRHRFTPEISMRIQHELGADIMFAFDELTTLMNTRGYQEASVERTHRWAERCLAAHAQLTRERADKPYQALFGVIQGAQYEDLRRSAARGLAELEVDGQSFDGFGLGGALEKENLGTIIGWMVDELPDDKPRHLLGISEPDDFFAAIEMGADTFDCVNPSRVARNAAIYTADGRYNVNTARHRRSFVPLEEGCDCYTCQHYTRAYLHHLFKAKEMLASTLATIHNERFTVRLVDAIRAAMRAGDFYAYRDEFLGRFYSTEPA

SEQ ID NO: 61589 - protein, 405 aa, Tessaracoccus bendigoensis
  misc_feature (1)..(405): tr|A0A1M6CZ81|A0A1M6CZ81_9ACTN Queuine tRNA-ribosyltran sferase OS=Tessaracoccus bendigoensis DSM 12906 OX=1123 357 GN=tgt PE=3 SV=1
MSFSFDVTHRLETSPGRAGVIHTPHGSIETPAFIVVGTKASVKAVLPEAVRDLGAQAVLANAYHLYLQPGSDLIDEAGGLGRFMNWPMPTFTDSGGFQVMSLGAGFKKVLAMDTAGLQNDDVIAEGKTRMAHVDEDGVTFKSHLDGDRHRFTPEVSMRIQHELGADIMFAFDELTTLMNTRGYQESSVERTHRWAARCLGAHAELTRQRADKPYQALFGVIQGAQYEDLRRRAARGLAELEVDGQRFDGFGLGGALEKENLGTIVGWMVDELPEDRPRHLLGISEPDDFFAAVEMGVDTFDCVNPSRVARNAAIYTADGRYNVNTARHRRSFIPLEDGCDCYTCLHYTRAYLHHLFKAKEMLASTLATIHNERFTVRLVDNIRAALVSGDFHAYRDEFLGRFYSA

SEQ ID NO: 61590 - protein, 407 aa, Tessaracoccus flavescens
  misc_feature (1)..(407): tr|A0A1Q2CTX7|A0A1Q2CTX7_9ACTN Queuine tRNA-ribosyltran sferase OS=Tessaracoccus flavescens OX=399497 GN=tgt PE =3 SV=1
MLVSFSFDVTHRLEGAPGRAGAIHTPHGDIETPAFVVVGTKATVKAVLPESVSDLGAQAVLANAYHLYLQPGSDLIDEAGGLSTFMNWPGPTFTDSGGFQVMSLGAGFKKVLAMDTAGLQNDDVIAEGKTRMAHVDEDGVTFKSHLDGNRHRFTPEISMRIQHELGADIMFAFDELTTLMNTRAYQESSVERTHRWAERCLAAHAQLTTERADKPYQALFGVIQGAQYEDLRRAAARGLASLEVDGQAFDGFGLGGALEKENLGTIIGWMVDELPEDKPRHLLGISEPDDFFAAIEMGADTFDCVNPSRVARNAAIYTADGRYNVNTARHRRSFIPLEEGCDCYTCTHYTRAYLHHLFKAKEMLASTLATIHNERFTVRLVDNIRAALKAGQFHAYKDEFLGRFYSA

SEQ ID NO: 61591 - protein, 408 aa, Tessaracoccus flavus
  misc_feature (1)..(408): tr|A0A1Q2CDR6|A0A1Q2CDR6_9ACTN Queuine tRNA-ribosyltran sferase OS=Tessaracoccus flavus OX=1610493 GN=tgt PE=3 SV=1
MTAAFSFDVTHRLDGAPGRAGVIHTPHGRIETPAFIVVGTKATVKAVLPEAVAELGGQAVLANAYHLYLQPGADLVDEAGGLGAFMNWPGPTFTDSGGFQVMSLGAGFKKVLAMDTAGLQDDDVIAEGKTRMAHVDDDGVTFKSHLDGTRHRFTPEVSMRIQHQLGADVMFAFDELTTLMNTRGYQEQSVERTHRWAERCLAEHRRLTDERAGKPYQALFGVIQGAQYEDLRRRAARGLAELEVDGQSFDGFGLGGALEKENLGEIIGWMVEELPESKPRHLLGISEPDDFFAAIEMGADTFDCVNPSRVARNAAIYTADGRYNVNTARHKRSFIPLEEGCDCYTCTHYTRAYIHHLFKAKEMLSSTLATIHNERFTVRLVDNIRAALREGRFYEYRDEFLGRFYART

SEQ ID NO: 61592 - protein, 411 aa, Tessaracoccus lapidicaptus
  misc_feature (1)..(411): tr|A0A1C0AKG8|A0A1C0AKG8_9ACTN Queuine tRNA-ribosyltran sferase OS=Tessaracoccus lapidicaptus OX=1427523 GN=tgt PE=3 SV=1
MTAGFSFDVTHRLDDARGRVGVIHTPHGDIETPAFIVVGTKATVKAVLPEAVADLGAQAVLANAYHLYLQPGSDLVDQAGGLGRFMNWPGPTVTDSGGFQVMSLGAGFKKVLAMDTAGLADDDVIADGKTRMAHVDDDGVTFRSHLDGTSHRFTPEVSMRIQHELGADIIFAFDELTTLMNTRAYQEASVERTHRWAERCLAEHQCLTRERGGRPYQALFGVIQGAQYEDLRRGAARGLAELEVDGRTFDGFGLGGALEKENLGTIISWMVDELPERKPRHLLGISEPDDLFAAVEAGADTFDCVNPSRVARNAAIYTADGRYNVNTARHRRSFIPLEEGCDCYTCTHYTRAYLHHLFKAKEMLSSTLATIHNERFTVRLVDQIRASLKSGDFYAFRDEFLGRFYRRGAGA

SEQ ID NO: 61593 - protein, 409 aa, Tessaracoccus oleiagri
  misc_feature (1)..(409): tr|A0A1G9LS31|A0A1G9LS31_9ACTN Queuine tRNA-ribosyltran sferase OS=Tessaracoccus oleiagri OX=686624 GN=tgt PE=3 SV=1
MSFSFEVGARIDGAPGRTGVIHTPHGDIETPAFIVVGTKATVKAVLPEAVADLGAQAVLANAYHLYLQPGSDVVDEAGGLGRFMNWPGPTFTDSGGFQVMSLGAGFKKVLAMDTEGLQDDDVIADGKTRRALVDEDGVTFKSHLNGDPHRFTPEVSMRIQHELGADIMFAFDELTTLMNTREYQEASVERTHRWAVRCLAEHRRLTEERVGKPYQALFGVVQGAQYEDLRRRAARGLAELEVDGQRFDGFGLGGALEKQRLGEITRWMVEELPDDRPRHMLGLSEPDDFFAAIEMGGDTFDCVNPSRVARNGAIYTADGRYNVNTARHKRSFVPLEEGCDCYTCRHYTRAYVHHLFKGKEMLASTLATIHNERFTVRLVDNIRAAIRTGDFHAYRDEFLGRFYAGAATA

SEQ ID NO: 61594 - protein, 408 aa, Tessaracoccus rhinocerotis
  misc_feature (1)..(408): tr|A0A553K476|A0A553K476_9ACTN Queuine tRNA-ribosyltran sferase OS=Tessaracoccus rhinocerotis OX=1689449 GN=tgt PE=3 SV=1
MSFGFEITGRLEGHGRTGTITTPHGSIETPAFVVVGTKATVKGVLPEQLTDLGAQAVLANAYHLYLQPGPDIVDEAGGLGAFMNWQGPTFTDSGGFQVMSLGSGFKKVLAMDTAGLADDDVVAEGKARLAHVDDDGVTFHSHLNGDRHRFTPEVSMGIQHQLGADVMFAFDELTTLMNTRAYQELSVERTHAWAVRCLAEHARLTRERSDKPYQALFGVVQGAQYEDLRRSAARGLAQLEVDGQSFDGYGLGGALEKQNLGTIIGWMADELPEDKPRHLLGISEPDDLFAAVAAGADTFDCVNPSRVARNAAIYTADGRYNVNTASSRRAFKPLDDGCDCYTCAHYTRAYLHHLFKAKEILASTLATIHNERFTVRLVDDIRAAVRAGDFDAFRTEFLGRFYAERSRS

SEQ ID NO: 61595 - protein, 405 aa, Tessaracoccus sp.
  misc_feature (1)..(405): tr|A0A3P1WTM8|A0A3P1WTM8_9ACTN Queuine tRNA-ribosyltran sferase OS=Tessaracoccus sp. OH4464_COT-324 OX=2491059 GN=tgt PE=3 SV=1
MTFFEIDSRLGSAPGRTGVIHTPHGDIETPAFIVVGTKATVKAVLPETVSELGAQAVLANAYHLYLQPGSELVDEAGGLGKFMNWPGPTFTDSGGFQVMSLGAGFKKVLAMDTTGLQNDDVIAEGKQRRAHVDEDGVTFVSHLNGDLHRFTPEVSMRIQHELGADIMFAFDELTTLMNTREYQEASVERTYRWAERCLAAHEQLTKERADKPYQALFGVIQGAQYEDLRRRAARGLAELEVAGRQFDGFGLGGALEKRRLGEIVGWMVDELPEEKPRHLLGISEPDDLFAAVEMGADTFDCVNPSRVARNAAIYTHDGRFNVNTSANRRAFVPLDEDCDCYTCAHYTRAYLHHLFKAKEMLASTLATIHNERFTVRLVDQIRRAIRSGEFYEFRDDFLGRFYAGR

SEQ ID NO: 61596 - protein, 406 aa, Tessaracoccus sp.
  misc_feature (1)..(406): tr|A0A1R1IJU6|A0A1R1IJU6_9ACTN Queuine tRNA-ribosyltran sferase OS=Tessaracoccus sp. ZS01 OX=1906324 GN=tgt PE= 3 SV=1
MSFSFDVTHHLEGAPGRAGVIHTPHGPIETPAFIAVGTKATVKAVLPESVAATGAQAVLANAYHLYLQPGSDIVDEAGGLGRFMNWPGPTFTDSGGFQVMSLGAGFKKVLAMDTKGMVDDDVIAEGKERRAHVDDDGVTFKSHLNGTMHRFTPEISMRIQHELGADIMFAFDELTTLMNTRGYQEDSVARTHAWAVRCLAEHARLTRERADKPYQALFGVIQGAQYEDLRRRAAQGLAALEVDGHGFDGFGLGGALEKENLGQIIGWMVEELPERKPRHLLGISEPDDLFAAVEMGADTFDCVNPSRVARNAAIYTADGRYNVNTAAHRRSFIPLEDGCDCYTCTHYTRAYLHHLFKAKEMLASTLATIHNERFTVRLVDTMRQTLKDGSCHAFRDEFLGRFYSGR

SEQ ID NO: 61597 - protein, 386 aa, Testudinibacter aquarius
  misc_feature (1)..(386): tr|A0A4R3YA42|A0A4R3YA42_9PAST Queuine tRNA-ribosyltran sferase OS=Testudinibacter aquarius OX=1524974 GN=tgt P E=3 SV=1
MKYELHQTDGRARRGRLTFQRPQGEFSVETPAFMPVGTYGTVKGMTPEEVKATGAQILLGNTFHLWLRPGQEVMKLHGDLHDFMQWHGPILTDSGGFQVFSLGDIRKIKEEGVHFRNPINGEKIFLSPEKSMEIQYDLGSDIVMIFDECTPYPADFDYAKNSMEMSLRWAKRSRDRFDELGNKNALFGIIQGGVYEELRKVSVEGLVDIGFDGYAVGGLAVGEPKEDMHRILEYVCPQIPQDKPRYLMGVGKPEDLVEGVRRGIDMFDCVMPTRNARNGHLFTADGVIKIRNAKYRDDTSPLEAECDCYTCKHYSKAYLYHLDKCGEILGARLNTIHNLRYYQRLMAQLREAIEKGELEQFVEQFYARIGKPVPPLNQYHAFSEVK

SEQ ID NO: 61598 - protein, 381 aa, Tetragenococcus halophilus
  misc_feature (1)..(381): tr|A0A424XQU5|A0A424XQU5_TETHA Queuine tRNA-ribosyltran sferase OS=Tetragenococcus halophilus subsp. halophilus DSM 20339 OX=1123358 GN=tgt PE=3 SV=1
MTQPAIKYRLIKKEKHTGARLGELITPHGTFPTPMFMPVGTLATVKTMSPEELKEMGAGVILSNTYHLWLRPGEDLVAEAGGLHKFMNWDQPILTDSGGFQVFSLADMRNIEEKGVHFRNHLNGLKMFLSPEKAIDIQNKLGSDIMMSLDECPPYDESYNYVKDSIERTSRWAERGLKAHANPQTQGVFGIVQGAGYKDLRKQSAKDLVSLDFPGYSIGGLSVGEPKQEMNRMLEYTTPLIPENKPRYLMGVGAADSLIDGAIRGIDMFDCVLPTRIARNGTCMTSKGRLVVKNAKFARDFRPIDEQCHCYTCRNYTRAYVRHLLKCDETFGIRLTTYHNLYFLLHLMEQVRQAIRDDQLLEFREQFFEAYGFNEENAKNF

SEQ ID NO: 61599 - protein, 381 aa, Tetragenococcus halophilus
  misc_feature (1)..(381): tr|A0A2H6CCV9|A0A2H6CCV9_TETHA Queuine tRNA-ribosyltran sferase OS=Tetragenococcus halophilus subsp. flandriens is OX=1513898 GN=tgt PE=3 SV=1
MTQPAIKYRLIKKEKHTGARLGELITPHGTFPTPMFMPVGTLATVKTMSPEELKEMGAGVILSNTYHLWLRPGEDLVAEAGGLHKFMNWDQPILTDSGGFQVFSLADMRNIEEKGVHFRNHLNGSKMFLSPEKAIDIQNKLGSDIMMSLDECPPYDECYNYVKDSIERTSRWAERGLKAHANPQTQGLFGIVQGAGYKDLRKQSAKDLVSLDFPGYSIGGLSVGEPKQEMNRMLEYTTPLIPEDKPRYLMGVGAADSLIDGAIRGIDMFDCVLPTRIARNGTCMTSKGRLVVKNAKFARDFRPIDEQCHCYTCRNYTRAYVRHLLKCDETFGIRLTTYHNLYFLLHLMEQVRQAIRDDQLLEFREQFFEEYGFNEENAKNF

SEQ ID NO: 61600 - protein, 381 aa, Tetragenococcus koreensis
  misc_feature (1)..(381): tr|A0A3G5F7G7|A0A3G5F7G7_9ENTE Queuine tRNA-ribosyltran sferase OS=Tetragenococcus koreensis OX=290335 GN=tgt P E=3 SV=1
MTQPAIQYRLIKKEKHTGARLGELITPHGTFPTPMFMPVGTLATVKTMSPEELKEMGAGVILSNTYHLWLRPGEDIVAEAGGLHKFMNWDQPILTDSGGFQVFSLADMRNIEEAGVHFRNHINGSKMFLSPEKAIDIQNKLGSDIMMSLDECPPYDESYDYVKNSIERTTRWAERGLKAHANPEMQGLFGIVQGAGHKDLRKQSAKDLVSLDFPGYSIGGLSVGEPKAEMNRMLEYTTPLIPENKPRYLMGVGAADSLIDGAIRGVDMFDCVLPTRIARNGTCMTSKGRLVVKNAKFARDFRPIDEQCNCYTCRNYTRAYVRHLLKCDETFGIRLTTYHNLHFLLHLMEQVRQAIRDDQLLEFREQFFEEYGFNEENAKNF

SEQ ID NO: 61601 - protein, 182 aa, Tetragenococcus muriaticus
  misc_feature (1)..(182): tr|A0A091C6S4|A0A091C6S4_9ENTE tRNA-guanine transglycos ylase OS=Tetragenococcus muriaticus PMC-11-5 OX=1302649 GN=TMUPMC115_0284 PE=4 SV=1
MRKQSAKDLVSLDFPGYSIGGLSVGEPKAEMNEMLEFTTPLIPESKPRYLMGVGAADSLIDGAIRGVDMFDCVLPTRIARNGTCMTSKGRLVVKNAKYARDFHPIDENCDCYTCRNYTRAYVRHLLKSNETFGIRLTTYHNLYFLLHLMAQVRQAIKEDQLLEFREQFFEEYGFNEKNAKNF

SEQ ID NO: 61602 - protein, 358 aa, Tetragenococcus muriaticus
  misc_feature (1)..(358): tr|A0A091C580|A0A091C580_9ENTE Queuine tRNA-ribosyltran sferase OS=Tetragenococcus muriaticus 3MR10-3 OX=130264 8 GN=tgt PE=3 SV=1
MITPHGTFPTPMFMPVGTLATVKTMSPEELKEMGAGVILSNTYHLWLRPGEDIVAQAGGLHKFMNWDQPILTDSGGFQVFSLADMRNIEEAGVHFRNHIDGSKMFLSPEKAVDIQNKLGSDIMMSLDECPPYNESHDYVKKSIERTTRWAQRGLEAHANPEKQGLFGIVQGAGYKDLRKQSAKDLVSLDFPGYSIGGLSVGEPKAEMNEMLEFTTPLIPESKPRYLMGVGAADSLIDGAIRGVDMFDCVLPTRIARNGTCMTSKGRLVVKNAKYARDFHPIDENCDCYTCRNYTRAYVRHLLKSNETFGIRLTTYHNLYFLLHLMAQVRQAIKEDQLLEFREQFFEEYGFNEKNAKNF

SEQ ID NO: 61603 - protein, 381 aa, Tetragenococcus osmophilus
  misc_feature (1)..(381): tr|A0A3G5FB62|A0A3G5FB62_9ENTE Queuine tRNA-ribosyltran sferase OS=Tetragenococcus osmophilus OX=526944 GN=tgt PE=3 SV=1
MTQPAIQYRLIKKEKHTGARLGELITPHGTFPTPMFMPVGTLATVKTMSPEELKEMGAGVILSNTYHLWLRPGEDIVAQAGGLHKFMNWDQPILTDSGGFQVFSLADMRNIEEAGVHFRNHIDGSKMFLSPEKAIDIQNKLGSDIMMSLDECPPYNESYDYVKKSIERTTRWAQRGLEAHANPGQQGLFGIVQGAGYKDLRKQSAKDLVSLDFPGYSIGGLSVGEPKEEMNKMLEFTTPLIPENKPRYLMGVGAADSLIDGAIRGIDMFDCVLPTRIARNGTCMTSRGRLVVKNAKYARDFHPIDENCDCYTCRNYTRAYVRHLLKSNETFGIRLTTYHNLYFLLHLMAQVRQAIKEDQLLEFREQFFEEYGFNEENAKNF

SEQ ID NO: 61604 - protein, 379 aa, Tetzosporium hominis
  misc_feature (1)..(379): tr|A0A264W0L3|A0A264W0L3_9BACL Queuine tRNA-ribosyltran sferase OS=Tetzosporium hominis OX=2020506 GN=tgt PE=3 SV=1
MTAIRYELLKKDKQTGARLGIVHTPHGSFETPTFMPVGTQATVKTMSPEEIKGMDAGIILSNTYHLWLRPGHDIIREAGGLHKFMNWDRAILTDSGGFQVFSLSDMRKIEEEGVHFRNHLNGDKLFLSPEKSMEVQNALGSDIMMAFDECPPYPASHEYMKASVERTSRWAERCMTAHTNTDKQGLFGIIQGGEYEDLRRQSAQDIISLDFPGYAIGGLSVGEPKDIMNRVLEFTTPLMPDNKPRYLMGVGSPDSLIDGAIRGVDMFDCVLPTRIARNGTMFTKKGRLVIKGAKFARDFGPVDETCDCYTCKNYSRAYLRHLFKADETFGLRLASTHNLHFLMNLMKDVRQAIREDRLLDFKEEFFEEYGYNKPNAKNF

SEQ ID NO: 61605 - protein, 378 aa, Thalassobacillus cyri
  misc_feature (1)..(378): tr|A0A1H4FBL7|A0A1H4FBL7_9BACI Queuine tRNA-ribosyltran sferase OS=Thalassobacillus cyri OX=571932 GN=tgt PE=3 SV=1
MAITYEFVKTCKQTGARLGRVHTPHGSFDTPTFMPVGTLATVKTMSPEELQEMNANIILSNTYHLWLRPGEDIIEEAGGLHKFMNWDGAILTDSGGFQVFSLSDLRQIEEEGVHFRNHISGEKLFLSPEKAMHIQNALGSDIMMAFDECPPYPAEYEYLKKSVERTSRWAERCLAAHKNPDKQGLFGIVQGGEYEELRRQSAEDLISLDFPGYAIGGLSVGEPKDVMNRVLDFTAPMLPENKPRYLMGVGSPDSLIDGSIRGIDMFDCVLPTRIARNGTCMTSNGRLVVRNAKFSRDFRPIDENCDCYTCRNYSRAYIRHLVKNNETFGFRLTTYHNLYFLLKLMEHVRQAIREDRLGDFREEFFEQYGFNKPNAKNF

SEQ ID NO: 61606 - protein, 376 aa, Thalassobacter sp.
  misc_feature (1)..(376): tr|A0A099T7W4|A0A099T7W4_9RHOB Queuine tRNA-ribosyltran sferase OS=Thalassobacter sp. 16PALIMAR09 OX=1225651 GN =tgt PE=3 SV=1
MTQTFSFSLHGTDGRARTGTVHTPRGDIRTPAFMPVGTAATVKAMMPENVRATGADILLGNTYHLMLRPTAERVARLGGLHKFMNWDRPILTDSGGFQVMSLGALRKLTEEGVTFKSHIDGSKHHLTPERSMEIQRLLGSDIVMCFDECPALPADRARIRESMELSMRWAKRSRDAFGDRPGHALFGIQQGGLEEDLRAESAEALRGIEFDGYAVGGLAVGEGQEAMFSCLDFAPEQLPKDKPRYLMGVGKPDDLVGAVKRGIDMFDCVLPSRSGRTGQAFTRRGVVNIKNARHMDDPRPLDAECTCPACSNYSRAYLHHVFRSQEILSSMLLTWHNLHYYQELMAAMRAAIASGTFADFETGFHAARAQGDIEPV

SEQ ID NO: 61607 - protein, 376 aa, Thalassobacter stenotrophicus
  misc_feature (1)..(376): tr|A0A0P1FHP5|A0A0P1FHP5_9RHOB Queuine tRNA-ribosyltran sferase OS=Thalassobacter stenotrophicus OX=266809 GN=t gt PE=3 SV=1
MTQTFSFSLHGTDGRARTGTVHTPRGDIRTPAFMPVGTAATVKAMMPESVRATGADILLGNTYHLMLRPTAERVARLGGLHKFMNWDRPILTDSGGFQVMSLGALRKLTEEGVTFKSHIDGSKHHLTPERSMEIQRLLGSDIVMCFDECPALPADRARIRESMELSMRWAKRSRDAFGDRPGHALFGIQQGGLEEDLRAESAEALRGIEFDGYAVGGLAVGEGQEAMFSCLDFAPEQLPKDKPRYLMGVGKPDDLVGAVKRGIDMFDCVLPSRSGRTGQAFTRRGVVNIKNARHMDDPRPLDAECTCPACSNYSRAYLHHVFRSQEILSSMLLTWHNLHYYQELMAAMRAAIASGTFADFETGFHAARAQGDIEPV

SEQ ID NO: 61608 - protein, 374 aa, Thalassobaculum litoreum
  misc_feature (1)..(374): tr|A0A1G7Q3T1|A0A1G7Q3T1_9PROT Queuine tRNA-ribosyltran sferase OS=Thalassobaculum litoreum DSM 18839 OX=112336 2 GN=tgt PE=3 SV=1
MTIGFETWAKDGAARRGRLTLAHGTIETPAFMPVGTAATVKAMRPESVAETGAEILLGNTYHLMLRPTAERIAELGGLHRFMNWNKPILTDSGGFQVMSLAGRRKLDKDGVTFQSHIDGSKHRLTPERSIEIQHLLGSDITMAFDECTPHPATHEQAADSMRLSMKWAARSKEAFTDRPGHTLFGIVQGSVYDDLRRESVEALTGIGFEGYAVGGLAVGEGQEEMFRVLEATTPHLPDDAPRYLMGVGKPGDLVGAVTRGIDMFDCVLPSRSGRTGQAQTRRGPVNLRNARHAADPRPLDADCACPACTGYSRAYLHHLQKADEILGPMLLTWHNLHYYQELMAGLRGAVEAGTLADFAAAFAEQQAAGDIPAL

SEQ ID NO: 61609 - protein, 376 aa, Thalassobium sp.
  misc_feature (1)..(376): tr|C7D7U8|C7D7U8_9RHOB Queuine tRNA-ribosyltransferase OS=Thalassobium sp. R2A62 OX=633131 GN=tgt PE=3 SV=1
MTQPFSFDLTATDGRARGGTIHTPRGDIRTPAFMPVGTAATVKAMMPESVAATGADILLGNTYHLMLRPTAERIARLGGLHKFMNWDKPILTDSGGFQVMSLAGLRKLTEKGVTFKSHIDGSKHELTPERSMEIQRLLGSDIVMCFDECPALPADRKRIAQSMEMSMRWAKRSRDAFGDRPGYALFGIQQGGLEQDLRQESAEALREIGFEGYAVGGLAVGEGQEAMFDCLDYAPEQLPTDKPRYLMGVGKPDDIVGAVARGIDMMDCVLPSRSGRTGQVFTRHGVVNIKNARHADDPRPLDENCSCPACSNYSRAYLHHVFRSQEMISGMLLTWHNLHYFQELMQGMRDAIEVGQFAQFQSDFHGARAQGDIDPL

SEQ ID NO: 61610 - protein, 382 aa, Thalassobium sp.
  misc_feature (1)..(382): tr|A0A2G2PQN9|A0A2G2PQN9_9RHOB Queuine tRNA-ribosyltran sferase OS=Thalassobium sp. OX=2030825 GN=tgt PE=3 SV=1
MQFELHSEITDGSSHARRGTITFPRGKIQTPAFMPVGTYGSVKGLNPDQVEALGAEIILGNTFHLMLRPGTEVIKEHGDLHDFIGWGKPILTDSGGFQVFSLGDMRKITEEGVAFRSPVNGDKVMMTPESSMQVQRDLGSDIVMIFDECTPYPATEKEAADSMRMSLRWAKRSKDAHGDNPSALFGIIQGGMYEELRDESLAGLQDIGFDGYAIGGLSVGEPKPDMMRVLRHVAPKMPQDKPRYLMGVGKPEDLVEGVRRGVDMFDCVMPTRNARNSHLFTSKGVLKIRNAANRSYNGPVDDECDCYTCKNFSRAYLHHLDKCKEILGATLNSIHNLHYYQTLMAGLRRSLEEGTFAGFVDEFYAKRGMKTPPLDENSGARE

SEQ ID NO: 61611 - protein, 375 aa, Thalassobius activus
  misc_feature (1)..(375): tr|A0A0P1IU65|A0A0P1IU65_9RHOB Queuine tRNA-ribosyltran sferase OS=Thalassobius activus OX=1715691 GN=tgt PE=3 SV=1
MTSRFSFELKATDGKARTGVISTPRGEIRTPAFMPVGTAATVKAMMPESVRATGADILLGNTYHLMLRPTAERIDRLGGLHKFMNWERPILTDSGGFQVMSLAGLRKLTEKGVTFQSHIDGSKHELTPERSMEIQKLLGSDIVMCFDECPALPADRDRIVESMRMSMRWAQRSKDAFGDRPGHALFGIQQGGLEQDFREESAKALRDIEFDGYAIGGLAVGEGQEAMFKVLDFAPDQLPVNKPRYLMGVGKPDDIVGAVKRGVDMMDCVLPSRSGRTGQVFTKRGVVNIKNARHADDPRPLDESVDSPARNYSRAYLHHVFRSNEMIAGMLLTWHNLRYFQDIMNEMRHAIAAGTFDAWEEEFHAMRALGDIEPI

SEQ ID NO: 61612 - protein, 376 aa, Thalassobius autumnalis
  misc_feature (1)..(376): tr|A0A0P1GE90|A0A0P1GE90_9RHOB Queuine tRNA-ribosyltran sferase OS=Thalassobius autumnalis OX=2072972 GN=tgt PE =3 SV=1
MSEKFSFEKLGQDGKARTGVIHTTRGDIRTPAFMPVGTAATVKAMMPESVAATGADILLGNTYHLMLRPTAERIDALGGLHKFMNWDKPILTDSGGFQVMSLAGLRKLTEKGVTFKSHIDGSRHELTPERSMEIQRLLGSDIVMCFDECPALPADRDTIAKSMRMSMRWAQRSRDAFGDRPGHALFGIQQGGLEQDFRQESAEALREIGFDGYAVGGLAVGEGQGAMFGCLDFAPDMLPEDKPRYLMGVGKPDDIVGAVARGIDMMDCVLPSRSGRTGQAFTRHGVVNIKNARHQDDPRPLDEQCSCPACSNYSRAYLHHVYRSQEMISGMLLTWHNLHYFQELMQGMRDAIAAGTFEAFQKDFHETRANGDIERL

SEQ ID NO: 61613 - protein, 376 aa, Thalassobius gelatinovorus
  misc_feature (1)..(376): tr|A0A0N7LVM2|A0A0N7LVM2_THAGE Queuine tRNA-ribosyltran sferase OS=Thalassobius gelatinovorus OX=53501 GN=tgt P E=3 SV=1
MTRRFEFEKLGQDGKARLGVIRSPRGEIRTPAFMPVGTAGTVKAMMPESVASTGADILLGNTYHLMLRPTAERIDRLGGLHKFMNWDKPILTDSGGFQVMSLSNLRKMSEEGVTFKSHIDGSRHTLTPERSMEIQRLLGSDIVMCFDECTPFPADPKVSMESMRLSMRWAQRSREAFGDRPGHALFGIQQGSIYRDQRERSAELLKAIEFEGYAVGGLAVGEGQDTMFEVLDYAPDMLPEDKPRYLMGVGKPDDIVGAVARGIDMMDCVLPTRSGRTGQVFTRHGVLNIKNARHQDDPRPVDESCSCPACRNYSRAYLHHVFRAQEMISGMLLTWHNLQYYQDLMQGMRGAIAGGTFDQFQSDFHAQRAQGDIEPL

SEQ ID NO: 61614 - protein, 380 aa, Thalassobius mediterraneus
  misc_feature (1)..(380): tr|A0A0P1GN67|A0A0P1GN67_9RHOB Queuine tRNA-ribosyltran sferase OS=Thalassobius mediterraneus OX=340021 GN=tgt PE=3 SV=1
MRCGMEKTFSFEKLGQDGKARTGVIHTTRGDIRTPAFMPVGTAATVKAMMPESVAATGADILLGNTYHLMLRPTAERIDRLGGLHKFMNWDKPILTDSGGFQVMSLADLRKLTEKGVTFKSHIDGSRHELTPERSMEIQRLLGSDIVMCFDECPALPADRDAIAKSMRLSMRWADRSREAFGDRPGHALFGIQQGGLEQDFRQESAEALRNIGFDGYAVGGLAVGEGQEAMFKCLDFAPDMLPEDKPRYLMGVGKPDDIVGAVARGIDMMDCVLPSRSGRTGQAFTRHGVVNIKNVRHKDDPRPLDENCTCPACSNYSRAYLHHVYRSQEMISGMLLTWHNLHYFQELMQGMRDAIAAGTFEAFQKTFHETRANGDIERL

SEQ ID NO: 61615 - protein, 376 aa, Thalassobius sp.
  misc_feature (1)..(376): tr|A0A2E9GB21|A0A2E9GB21_9RHOB Queuine tRNA-ribosyltran sferase OS=Thalassobius sp. OX=1979401 GN=tgt PE=3 SV=1
MQFSLQHQDKQSSARAGELITDHGKIETPIFMPVGTAGTVKAVHQRELENDIQAQIILGNTYHLYLRPGLDIIQKAGGIHKFNGWERPVLTDSGGYQVYSLADTRKITEEGVAFRSHISGNKLFFTPEYVMDIQRIIGADIIMAFDECTPYPCEYQYAKDSMHMTHRWLKRCCDRFDTTDSLYGYKQTLFPIVQGSTYKDLRIQSAETIASFEREGNAIGGLSVGEPHEDMYEMTELVCGILPKDKPRYLMGVGTPANILECIALGVDMFDCVMPTRNARNGMLFTTQGIINIRNAKWQDDFTPIDEELGGYVSTFYSKAYLRHLKHSDEYLAGMIASVHNLTFYLWLVKEARKHIIAGDFATWKDIMVKKLMVRL

SEQ ID NO: 61616 - protein, 375 aa, Thalassococcus halodurans
  misc_feature (1)..(375): tr|A0A1H5SCP5|A0A1H5SCP5_9RHOB Queuine tRNA-ribosyltran sferase OS=Thalassococcus halodurans OX=373675 GN=tgt P E=3 SV=1
MTQFSFALHATDGRARTGEISTPRGEIRTPAFMPVGTAATVKAMMPESVRATGADILLGNTYHLMLRPTAERIDRLGGLHKFMNWDRPILTDSGGFQVMSLADLRKMTEKGVTFKSHIDGSKHELTPERSMEIQRLLGSDIVMCFDECPALPASKDRIAESMRLSMRWAQRSRDAFGDRPGHALFGIQQGGLEQDLREESAKALQDIGFDGYAIGGLAVGEGQEAMFSCLDYAPDMLPVDKPRYLMGVGKPDDIVGAVKRGIDMMDCVLPSRSGRTGQAWTRRGQVNIKNARHQDDPRPLDEQCTCPACSNYSRAYLHHVFRAQEMISGMLLTWHNLHYFQELMQGMRDAIAAGRFAEFEAEFHAQRAEGDIERL

SEQ ID NO: 61617 - protein, 374 aa, Thalassococcus profundi
  misc_feature (1)..(374): tr|A0A369TQ13|A0A369TQ13_9RHOB Queuine tRNA-ribosyltran sferase OS=Thalassococcus profundi OX=2282382 GN=tgt PE =3 SV=1
MSTSFTLHATDGRARTGVISTPRGDIRTPAFMPVGTAGTVKAMLPGSVRATGADILLGNTYHLMLRPTAERVHRLGGLHKFMNWDRPILTDSGGFQVMSLADLRKLTEHGVTFKSHIDGSKHEITPERSMEIQRLLGSDIVMCFDECPALPATDEAVADSMRLSMRWAERSKLAFGDRPGHMLFGIQQGGVTEELRAESARALTGIGFDGYAIGGLAVGEGQEAMFGVLDYAPEMLPADKPRYLMGVGKPDDIVGAVKRGVDMMDCVLPSRSGRTGQAFTRHGVVNIKNARHQDDPRPLDEACTCPACRDYSRAYLHHVFRSHEMISGMLLTWHNLHYFQEIMQGIRDAIAAGTFADWEAAFHAGRAAGDIDPL

SEQ ID NO: 61618 - protein, 376 aa, Thalassococcus sp.
  misc_feature (1)..(376): tr|A0A4P6MI53|A0A4P6MI53_9RHOB Queuine tRNA-ribosyltran sferase OS=Thalassococcus sp. S3 OX=2017482 GN=tgt PE=3 SV=1
MTQRFSYELTATDGAARTGVISTPRGEIRTPAFMPVGTAATVKAMLPESVAATGADVLLGNTYHLMLRPTAERIDRLGGLHRFMNWEKPILTDSGGFQVMSLAGLRKLTEEGVTFKSHIDGSKHALTPERSMEIQRLLGSDIVMCFDECPALPATEERVAESMRLSMRWAARSREAFGDRPGHALFGIQQGGVTQDLRAESAEALRKIGFDGYAVGGLAVGEGQEAMFGVLDYAPAMLPEEKPRYLMGVGKPDDIVGAVARGIDMMDCVLPSRSGRTGQVFTRRGVLNIKNARHQDDPRPLDEDCTCPACQSYSRAYLHHVFRAQEMISGMLLTWHNLHYYQEIMSGMRTAISEGRFDAWQREFHAGRAEGDIEPL

SEQ ID NO: 61619 - protein, 385 aa, Thalassolituus oleivorans
  misc_feature (1)..(385): tr|A0A1L6KIH1|A0A1L6KIH1_9GAMM Queuine tRNA-ribosyltran sferase OS=Thalassolituus oleivorans OX=187493 GN=tgt P E=3 SV=1
MQFDLHHQETEGSFARRGTLRFPRGEVQTPAFMPVGTYGSVKGLNPDQVEDLGAEIILGNTFHLMLRPGTEVVKAHGDLHDFIGWDKPILTDSGGFQVFSLGDMRKITEEGVTFASPVNGDKVLMTPESSMQVQRDLGSDVVMIFDECTPYPATEKEAADSMRLSLRWAKRSKDAHGDNPSALFGIIQGGMYESLRDESLAGLLDIGFDGYAVGGLSVGEPKPDMMRVLRHIAPQMPVDKPRYLMGVGKPEDLVEGVRRGIDMFDCVMPTRNARNGHLFTHTGVVKLRNAANRSDTGPIDPECDCYTCKSYSRAYLHHLDRCREILGATLNSIHNLHYYQTLMAGLRRSLEEGTFAEFVNDFYAKRGKTTPSLDQHTDQFQESAE

SEQ ID NO: 61620 - protein, 395 aa, Thalassolituus oleivorans
  misc_feature (1)..(395): tr|M5DQN5|M5DQN5_9GAMM Queuine tRNA-ribosyltransferase OS=Thalassolituus oleivorans MIL-1 OX=1298593 GN=tgt PE =3 SV=1
MSTDTSRECFMQFDLHHQETEGSFARRGTLRFPRGEVQTPAFMPVGTYGSVKGLNPDQVEDLGAEIILGNTFHLMLRPGTEVVKAHGDLHDFIGWDKPILTDSGGFQVFSLGDMRKITEEGVTFASPVNGDKVLMTPESSMQVQRDLGSDVVMIFDECTPYPATEKEAADSMRLSLRWAKRSKDAHGDNPSALFGIIQGGMYESLRDESLAGLLDIGFDGYAVGGLSVGEPKPDMMRVLRHIAPQMPVDKPRYLMGVGKPEDLVEGVRRGIDMFDCVMPTRNARNGHLFTHTGVVKLRNAANRSDTGPIDPECDCYTCKSYSRAYLHHLDRCREILGATLNSIHNLHYYQTLMAGLRRSLEEGTFAEFVNDFYAKRGKTTPSLDQHTDQLQESAE

SEQ ID NO: 61621 - protein, 390 aa, Thalassolituus sp.
  misc_feature (1)..(390): tr|A0A558NAF9|A0A558NAF9_9GAMM Queuine tRNA-ribosyltran sferase OS=Thalassolituus sp. C2-1 OX=2597518 GN=tgt PE =3 SV=1
MSMTRECFMQFELHSEITDGSSHARRGTITFPRGKIQTPAFMPVGTYGSVKGLNPDQIEALGAEIILGNTFHLMLRPGTEVIKEHGDLHDFIGWDKPILTDSGGFQVFSLGDMRKITEEGVAFRSPVNGDKVMMTPESSMQVQRDLGSDIVMIFDECTPYPATEKQAADSMRMSLRWAKRSKDAHGDNPSALFGIIQGGMYEDLRDESLAGLLEIGFDGYAIGGLSVGEPKPDMMRVLRHVAPKMPQDKPRYLMGVGKPEDLVEGVRRGVDMFDCVMPTRNARNSHLFTSKGVLKIRNAANRTYNGPVDDECDCYTCKNFSRAYLHHLDKCKEILGATLNSIHNLHYYQTLMAGLRRSLEEGTFAGFVDEFYAKRGMKTPPLDQDSGARE

SEQ ID NO: 61622 - protein, 378 aa, Thalassomonas actiniarum
  misc_feature (1)..(378): tr|A0A0D8CRJ4|A0A0D8CRJ4_9GAMM Queuine tRNA-ribosyltran sferase OS=Thalassomonas actiniarum OX=485447 GN=tgt PE =3 SV=1
MQYELVTTDGKARRGRLIFDRGVVETPAFMPVGTYGTVKGMTTAEVEATGAHILLGNTFHLMLRPGTEIIEQHGDLHDFMNWHKPILTDSGGFQVFSLGAMRKITEKGVEFRSPVNGEKIMLTPERSMEVQRSLGSDIVMIFDECTPYPASHKEAKTSMELSLRWAQRSKDAHGDNPSALFGIVQGGMYEDLREVSVSGLKAIDFDGFAIGGLSVGEPKEDMIRILDHTTPLIPENKPRYLMGVGKPEDLVEGVRRGIDMFDCVMPTRNARNGHLFVTNGVIKIRNSRHKTDTGSLDPQCDCYTCKNYSRAYLHHLDKCNEILGAQLNTQHNLRFYQRVMQGLRDAIEQGKLDEFVEEFYALRDLPVPPLKGADKAED

SEQ ID NO: 61623 - protein, 377 aa, Thalassomonas sp.
  misc_feature (1)..(377): tr|A0A553FJE9|A0A553FJE9_9GAMM Queuine tRNA-ribosyltran sferase OS=Thalassomonas sp. M1454 OX=2594477 GN=tgt PE =3 SV=1
MKYDLINKDGKARRGRLTFDRGVVETPAFMPVGTYGTVKGMKTDEVKDTGAHIILGNTFHLMLRPGTEIIEQHGGLHGFMNWDKPILTDSGGFQVFSLGKMRKITEKGVEFRSPVNGEKIMLTPERSMEVQRSLGSDIVMIFDECTPYPATHEEAKVSMELSLRWAKRSKAAHGDNPSALFGIVQGGMYEDLRKVSAAGLIDIDFDGYAIGGLSVGEPKEEMIKVLDHTTDLIPENKPRYLMGVGKPEDLVEGVRRGIDMFDCVMPTRNARNGHLFVTDGIVKIRNARHKTDTGPLDPGCDCYTCKNYSRAYLHHLDKCNEILGSQLNTLHNLHFYQRVMQGLRDAIEQGKLDEFVQEFYAIRGLEVPPLNSSVTQE

SEQ ID NO: 61624 - protein, 378 aa, Thalassomonas viridans
  misc_feature (1)..(378): tr|A0A0D8DF68|A0A0D8DF68_9GAMM Queuine tRNA-ribosyltran sferase OS=Thalassomonas viridans OX=137584 GN=tgt PE=3 SV=1
MQYELVTTDGKARRGRLIFDRGVVETPAFMPVGTYGTVKGMTTAEVEATGAHILLGNTFHLMLRPGTEIIEQHGDLHDFMNWHKPILTDSGGFQVFSLGAMRKITEKGVEFRSPVNGEKIMLTPERSMEVQRSLGSDIVMIFDECTPYPASHKEAKTSMELSLRWAQRSKDAHGDNPSALFGIVQGGMYEDLREVSVNGLKAIDFDGFAIGGLSVGEPKEDMIRILDHTTPLIPENKPRYLMGVGKPEDLVEGVRRGIDMFDCVMPTRNARNGHLFVTNGVIKIRNSRHKTDTGPLDPECDCYTCKNYSRAYLHHLDKCNEILGAQLNTQHNLRFYQRVMQGLRDAIEQGKLDEFVEEFYALRDLPVPPLKGVDETED

SEQ ID NO: 61625 - protein, 380 aa, Thalassospira alkalitolerans
  misc_feature (1)..(380): tr|A0A1Y2LGV7|A0A1Y2LGV7_9PROT Queuine tRNA-ribosyltran sferase OS=Thalassospira alkalitolerans OX=1293890 GN=t gt PE=3 SV=1
MTEFRYELLATDGKARLGRIHTAHGVIDTPAFMPVGTAATVKGMLPENVADTGAQILLGNTYHLMLRPGAERIARLGGLHKFMNWDKPILTDSGGYQVMSLSKLRKITEDGVTFKSHIDGRKFALSPERSMEIQHLLGSTITMAFDECTPFPATEQQAADSMRMSMRWAKRSKDAFVNREGYALYGIQQGSVFENLRRESSEKLTELDLPGHSVGGLAVGEGQQIMFDTLDFCVDMLPANKPRYLMGVGKPSDLVGAVMRGIDQFDCVLPTRSGRNAQGFTHRGTLNLKNGRHRDDDRPLDDQCNCPACTKYSRAYLHHLIKAGEILGAVLLTWHNLAYYQDLMADMRKAIAEGRMDAFARDFHAAQEGGDIDPMPIIED

SEQ ID NO: 61626 - protein, 380 aa, Thalassospira lohafexi
  misc_feature (1)..(380): tr|A0A2N3LBU8|A0A2N3LBU8_9PROT Queuine tRNA-ribosyltran sferase OS=Thalassospira lohafexi OX=744227 GN=tgt PE=3 SV=1
MTEFRYELLATDGKARLGRIHTAHGVIDTPTFMPVGTAATVKAMLPENVADTGAQILLGNTYHLMLRPGAERIARLGGLHKFMNWDKPILTDSGGYQVMSLAKLRKITEDGVTFKSHIDGRKFNLTPERSMEIQHLLGSTITMAFDECTPFPATEQQARESMQMSMRWAKRSRDAFVNREGYALYGIQQGSVFEALRRESSEKLAELDLPGHSVGGLAVGEGQQIMFDTLDFCVDMLPANKPRYLMGVGKPSDLVGAVMRGIDQFDCVLPTRSGRNAQAFTHRGTLNLKNGRHRDDDRPLDDQCGCPACTKYSRAYLHHLIKAGEMLGSVLLTWHNLAYYQDLMRDMRSAISEGRMDAFARDFHAAQEGGDIDPVPIIED

SEQ ID NO: 61627 - protein, 380 aa, Thalassospira lucentensis
  misc_feature (1)..(380): tr|A0A367V6G2|A0A367V6G2_9PROT Queuine tRNA-ribosyltran sferase OS=Thalassospira lucentensis MCCC 1A00383 = DSM 14000 OX=1123365 GN=tgt PE=3 SV=1
MTEFRYELLAQDGKARLGRIYTAHGVIDTPTFMPVGTAATVKAMLPENVADTGAQILLGNTYHLMLRPGAERIARLGGLHKFMNWDKPILTDSGGYQVMSLAKLRKITEDGVTFKSHIDGRKFNLTPERSMEIQHLLGSTITMAFDECTPFPATEQQARESMQMSMRWAKRSRDAFVNREGYALYGIQQGSVFENLRRESSEKLTELDLPGHSVGGLAVGEGQQIMFDTLDFCVDMLPANKPRYLMGVGKPSDLVGAVMRGIDQFDCVLPTRSGRNAQAFTHRGTLNLKNGRHRDDDRPLDDQCGCPACTKYSRAYLHHLIKAGEMLGSVLLTWHNLAYYQDLMRDMRSAISEGRMDAFARDFHAAQEGGDIDPVPIIED

SEQ ID NO: 61628 - protein, 380 aa, Thalassospira lucentensis
  misc_feature (1)..(380): tr|A0A154L244|A0A154L244_9PROT Queuine tRNA-ribosyltran sferase OS=Thalassospira lucentensis OX=168935 GN=tgt P E=3 SV=1
MTEFRYELLATDGKARLGRIHTAHGVIDTPAFMPVGTAATVKGMLPENVADTGAQILLGNTYHLMLRPGAERIARLGGLHKFMNWDKPILTDSGGYQVMSLSKLRKITEDGVTFKSHIDGRKFALSPERSMEIQHLLGSTITMAFDECTPFPATEQQAADSMRMSMRWAKRSKDAFVEREGYALYGIQQGSVFESLRRESSEKLAELDLPGHSVGGLAVGEGQQIMFDTLDFCVDMLPANKPRYLMGVGKPSDLVGAVMRGIDQFDCVLPTRSGRNAQAFTHRGTLNLKNGRHRDDDRPLDDQCNCPACTKYSRAYLHHLIKAGEILGAVLLTWHNLAYYQDLMRGMRDAIAEGRMEQFARDFYAGQEGGDIDPVPIIED

SEQ ID NO: 61629 - protein, 380 aa, Thalassospira marina
  misc_feature (1)..(380): tr|A0A2N3KWD8|A0A2N3KWD8_9PROT Queuine tRNA-ribosyltran sferase OS=Thalassospira marina OX=2048283 GN=tgt PE=3 SV=1
MTEFRYELLAQDGKARRGRIHTAHGVIETPAFMPVGTAATVKGMMPESVAATGAQILLGNTYHLMLRPGAERIARLGGLHKFMNWDKPILTDSGGYQVMSLAGLRKITEEGVTFKSHIDGRKFSLSPERSMEIQHLLGSTITMAFDECTPFPATEEVAAESMRMSMRWAKRSRDAFVEREGYALYGIQQGSVFEHLRRESSEKLAELDLPGHSVGGLAVGEGQQVMFETLDFCVDMLPANKPRYLMGVGKPSDLVGAVMRGIDQFDCVLPTRSGRNAQAFTRRGTVNLKNGRHRDDDRPLDDQCSCPACSQYSRAYLHHLIKANEILGAMLLTWHNLQYYQDLMKGMRDAIDEGRMEAFARDFYAGQEGGDIDPVPMIQD

SEQ ID NO: 61630 - protein, 380 aa, Thalassospira mesophila
  misc_feature (1)..(380): tr|A0A1Y2L2H5|A0A1Y2L2H5_9PROT Queuine tRNA-ribosyltran sferase OS=Thalassospira mesophila OX=1293891 GN=tgt PE =3 SV=1
MTEFRYELLAKDGKARRGRIHTAHGTIETPAFMPVGTAATVKGMMPESVAATGAEILLGNTYHLMLRPGAERIARLGGLHKFMNWDKPILTDSGGYQVMSLSSLRKITEEGVTFKSHIDGRKFSLSPERSMEIQHLLGSTITMAFDECTPFPATEDVAAESMRMSMRWAKRSRDAFVNREGYALYGIQQGSVFENLRRESSDKLAELDLPGHSVGGLAVGEGQQVMFDTLDFCVDMLPANKPRYLMGVGKPSDLVGAVMRGIDQFDCVLPTRSGRNAQAFTHRGTVNLKNGRHRDDDRPLDDHCSCPACSQYSRAYLHHLIKANEILGAMLLTWHNLQYYQDLMKGMRDAIANGQMDAFAKQFYADQEGGDIDPVPMIQD

SEQ ID NO: 61631 - protein, 380 aa, Thalassospira permensis
  misc_feature (1)..(380): tr|A0A074J6J2|A0A074J6J2_9PROT Queuine tRNA-ribosyltran sferase OS=Thalassospira permensis NBRC 106175 OX=13535 32 GN=tgt PE=3 SV=1
MTEFRYELLATDGKARLGRIHTAHGVIDTPAFMPVGTAATVKGMLPENVADTGAQILLGNTYHLMLRPGAERIARLGGLHKFMNWDKPILTDSGGYQVMSLSKLRKITEDGVTFKSHIDGRKFALSPERSMEIQHLLGSTITMAFDECTPFPATEQQAADSMRMSMRWAKRSKDAFVEREGYALYGIQQGSVFENLRRESSEKLAELDLPGHSVGGLAVGEGQQIMFDTLDFCVDMLPANKPRYLMGVGKPSDLVGAVMRGIDQFDCVLPTRSGRNAQAFTHRGTLNLKNGRHRDDDRPLDDQCNCPACTKYSRAYLHHLIKAGEILGAVLLTWHNLAYYQDLMRGMREAIAAGRMEQFARDFYAGQEGGDIDPVPIIED

SEQ ID NO: 61632 - protein, 380 aa, Thalassospira povalilytica
  misc_feature (1)..(380): tr|A0A2N3KQ19|A0A2N3KQ19_9PROT Queuine tRNA-ribosyltran sferase OS=Thalassospira povalilytica OX=732237 GN=tgt PE=3 SV=1
MTEFRYELLAQDGKARLGRIHTAHGVIDTPTFMPVGTAATVKGMLPENVADTGAQILLGNTYHLMLRPGAERIARLGGLHKFMNWDKPILTDSGGYQVMSLAKLRKITEEGVTFKSHIDGRKFNLTPERSMEIQHLLGSTITMAFDECTPFPATEQQARESMQMSMRWAKRSKDAFVEREGYALYGIQQGSVFENLRRESSEKLAELDLPGHSVGGLAVGEGQQIMFDTLDFCVDMLPANKPRYLMGVGKPSDLVGAVMRGIDQFDCVLPTRSGRNAQAFTHRGTLNLKNGRHRDDDRPLDDQCNCPACTKYSRAYLHHLIKAGEILGAVLLTWHNLAYYQDLMRGMREAIAEGRMEAFARDFHAGQEGGDIDPVPIIED

SEQ ID NO: 61633 - protein, 380 aa, Thalassospira profundimaris
  misc_feature (1)..(380): tr|A0A367WQ64|A0A367WQ64_9PROT Queuine tRNA-ribosyltran sferase OS=Thalassospira profundimaris OX=502049 GN=tgt PE=3 SV=1
MTEFRYELLAQDGKARLGRIHTAHGVIDTPTFMPVGTAATVKGMLPENVADTGAQILLGNTYHLMLRPGAERIARLGGLHKFMNWDKPILTDSGGYQVMSLAKLRKITEEGVTFKSHIDGRKFNLTPERSMEIQHLLGSTITMAFDECTPFPATEQQAADSMRMSMRWAKRSKDAFVEREGYALYGIQQGSVFENLRRESSEKLAELDLPGHSVGGLAVGEGQQIMFDTLDFCVDMLPANKPRYLMGVGKPSDLVGAVMRGIDQFDCVLPTRSGRNAQAFTHRGTLNLKNGRHRDDDRPLDDQCNCPACTKYSRAYLHHLIKAGEILGAVLLTWHNLAYYQDLMRGMREAIAEGRMDAFARDFHAGQEGGDIDPVPIIED

SEQ ID NO: 61634 - protein, 380 aa, Thalassospira profundimaris
  misc_feature (1)..(380): tr|K2KV28|K2KV28_9PROT Queuine tRNA-ribosyltransferase OS=Thalassospira profundimaris WP0211 OX=1177928 GN=tgt PE=3 SV=1
MTEFRYELLAQDGKARLGRIHTAHGVIDTPTFMPVGTAATVKGMLPENVADTGAQILLGNTYHLMLRPGAERIARLGGLHKFMNWDKPILTDSGGYQVMSLAKLRKITEEGVTFKSHIDGRKFNLTPERSMEIQHLLGSTITMAFDECTPFPATEQQARESMQMSMRWAKRSKDAFVNREGYALYGIQQGSVFESLRRESSEKLAELDLPGHSVGGLAVGEGQQIMFDTLDFCVDMLPANKPRYLMGVGKPSDLVGGVMRGIDQFDCVLPTRSGRNAQAFTHRGTLNLKNGRHRDDDRPLDDQCGCPACTKYSRAYLHHLIKAGEILGAVLLTWHNLAYYQDLMRGMREAIAEGRMDAFARDFHVGQEGGDIDPVPIIED

SEQ ID NO: 61635 - protein, 380 aa, Thalassospira sp.
  misc_feature (1)..(380): tr|A0A3C0FU67|A0A3C0FU67_9PROT Queuine tRNA-ribosyltran sferase OS=Thalassospira sp. OX=1912094 GN=tgt PE=3 SV= 1
MTEFRYELLAQDGKARLGRIHTAHGVIDTPTFMPVGTAATVKGMLPENVADTGAQILLGNTYHLMLRPGAERIARLGGLHKFMNWDKPILTDSGGYQVMSLAKLRKITEEGVTFKSHIDGRKFNLTPERSMEIQHLLGSTITMAFDECTPFPATEQQARESMQMSMRWAKRSRDAFVNREGYALYGIQQGSVFENLRRESSEKLAELDLPGHSVGGLAVGEGQQIMFDTLDFCVDMLPSNKPRYLMGVGKPSDLVGAVMRGIDQFDCVLPTRSGRNAQAFTHRGTLNLKNGRHRDDDRPLDDQCGCPACTKYSRAYLHHLIKAGEILGAVLLTWHNLAYYQDLMRGMREAISEGRMDAFARDFHAGQEGGDIDPVPIIED

SEQ ID NO: 61636 - protein, 380 aa, Thalassospira sp.
  misc_feature (1)..(380): tr|A0A2E9WCQ5|A0A2E9WCQ5_9PROT Queuine tRNA-ribosyltran sferase OS=Thalassospira sp. OX=1912094 GN=tgt PE=3 SV= 1
MTEFRYEFLAQDGKARLGRIHTAHGVIDTPTFMPVGTAATVKAMLPENVADTGAQILLGNTYHLMLRPGAERIARLGGLHKFMNWDKPILTDSGGYQVMSLAKLRKITEDGVTFKSHIDGRKFNLTPERSMEIQHLLGSTITMAFDECTPFPATEQQARESMQMSMRWAKRSRDAFVEREGYALYGIQQGSVFENLRRESSEKLTELDLPGHSVGGLAVGEGQQIMFDTLDFCVDMLPANKPRYLMGVGKPSDLVGAVMRGIDQFDCVLPTRSGRNAQAFTHRGTLNLKNGRHRDDDRPLDDQCGCPACTKYSRAYLHHLIKAGEMLGSMLLTWHNLAYYQDLMRDMRSAISEGRMDAFARDFHAAQEGGDIDPVPIIED

SEQ ID NO: 61637 - protein, 380 aa, Thalassospira xiamenensis
  misc_feature (1)..(380): tr|A0A285TVX8|A0A285TVX8_9PROT Queuine tRNA-ribosyltran sferase OS=Thalassospira xiamenensis OX=220697 GN=tgt P E=3 SV=1
MTEFRYELLATDGKARLGRIHTAHGVIDTPAFMPVGTAATVKGMLPENVADTGAQILLGNTYHLMLRPGAERIARLGGLHKFMNWDKPILTDSGGYQVMSLSKLRKITEDGVTFKSHIDGRKFALSPERSMEIQHLLGSTITMAFDECTPFPATEQQAADSMRMSMRWAKRSKDAFVEREGYALYGIQQGSVFENLRRESSEKLAELDLPGHSVGGLAVGEGQQIMFDTLDFCVDMLPANKPRYLMGVGKPSDLVGAVMRGIDQFDCVLPTRSGRNAQAFTHRGTLNLKNGRHRDDDRPLDDQCNCPACTKYSRAYLHHLIKAGEILGAVLLTWHNLAYYQDLMRGMRDAIAEGRMEQFARDFYAGQEGGDIDPVPIIED

SEQ ID NO: 61638 - protein, 380 aa, Thalassospira xiamenensis
  misc_feature (1)..(380): tr|A0A0B4XYB2|A0A0B4XYB2_9PROT Queuine tRNA-ribosyltran sferase OS=Thalassospira xiamenensis M-5 = DSM 17429 OX =1123366 GN=tgt PE=3 SV=1
MTEFRYELLATDGKARLGRIHTAHGVIDTPAFMPVGTAATVKGMLPENVADTGAQILLGNTYHLMLRPGAERIARLGGLHKFMNWDKPILTDSGGYQVMSLSKLRKITEDGVTFKSHIDGRKFALSPERSMEIQHLLGSTITMAFDECTPFPATEQQAAESMRMSMRWAKRSKDAFVEREGYALYGIQQGSVFENLRRESSEKLAELDLPGHSVGGLAVGEGQQIMFDTLDFCVDMLPANKPRYLMGVGKPSDLVGAVMRGIDQFDCVLPTRSGRNAQAFTHRGTLNLKNGRHRDDDRPLDDQCNCPACTKYSRAYLHHLIKAGEILGAVLLTWHNLAYYQDLMRGMREAIAAGRMEQFARDFYAGQEGGDIDPVPIIED

SEQ ID NO: 61639 - protein, 380 aa, Thalassospira xianhensis
  misc_feature (1)..(380): tr|A0A367U7C2|A0A367U7C2_9PROT Queuine tRNA-ribosyltran sferase OS=Thalassospira xianhensis MCCC 1A02616 OX=117 7929 GN=tgt PE=3 SV=1
MTEFRYELLATDGKARLGRIHTAHGVIDTPAFMPVGTAATVKGMLPENVADTGAQILLGNTYHLMLRPGAERIARLGGLHKFMNWDKPILTDSGGYQVMSLSKLRKITEDGVTFKSHIDGRKFALSPERSMEIQHLLGSTITMAFDECTPFPATEQQAAESMRMSMRWAKRSKDAFVEREGYALYGIQQGSVFENLRRESSEKLAELDLPGHSVGGLAVGEGQQIMFDTLDFCVDMLPANKPRYLMGVGKPSDLVGAVMRGIDQFDCVLPTRSGRNAQAFTHRGTLNLKNGRHRDDDRPLDDQCNCPACTKYSRAYLHHLIKAGEILGAVLLTWHNLAYYQDLMRGMRDAIAQRRMEQFARDFYAGQEGGDIDPVPIIED

SEQ ID NO: 61640 - protein, 381 aa, Thalassotalea agarivorans
  misc_feature (1)..(381): tr|A0A1I0AJH3|A0A1I0AJH3_THASX Queuine tRNA-ribosyltran sferase OS=Thalassotalea agarivorans OX=349064 GN=tgt P E=3 SV=1
MKQKMTYDLLGKDGKARRGRLTFERGTVETPAFMPVGTYGTVKGMKAEEIKEIGAEIILGNTFHLMLRPGTDIIEQHGDLHDFINWDKPILTDSGGFQVFSLGAMRKITEEGVKFSSPVNGEKIMLTPERSMEVQRKLGSDIVMIFDECTPYPATHKEAKDSMEMSLRWAQRSKDAHGDNPNALFGIVQGGMYEDLRETSIEGLKSIEFDGYAIGGLSVGEPKEDMIRILDHTPDLIPENKPRYLMGVGKPEDLVEGVRRGIDMFDCVMPTRNARNGHLFVTDGVVKIRNAKNKTDTGPLDPECDCYTCKNYSKAYLHHLDKCNEILGSQLNTIHNLAYYQRLMKGLRDAIEQGKLDDFVADFYARRGKEVPPLAGSETTD

SEQ ID NO: 61641 - protein, 377 aa, Thalassotalea euphylliae
  misc_feature (1)..(377): tr|A0A3E0U5N3|A0A3E0U5N3_9GAMM Queuine tRNA-ribosyltran sferase OS=Thalassotalea euphylliae OX=1655234 GN=tgt P E=3 SV=1
MKYELINKDGKARRGRLTFERGTVETPAFMPVGTYGTVKGMKTEEIKEIGAEIILGNTFHLMLRPGTDIIEQHGDLHDFINWDKPILTDSGGFQVFSLGKMRKITEEGVKFSSPVNGEKIMLTPERSMEVQRALGSDIVMIFDECTPYPATHQEAKDSMELSLRWAQRSKDAHQGNPNALFGIVQGGMYEDLREVSVDGLKAIDFDGYAIGGLSVGEPKEDMIRILDHTTPLIPENKPRYLMGVGKPEDLVEGVRRGIDMFDCVMPTRNARNGHLFVSDGVVKIRNAKNKTDTGPLDPECDCYTCKNYSKAYLHHLDKCNEILGSQLNTIHNLRYYQRVMKGLRDAIEAGTLDDFVADFYARRGLPVPPLAEGSEQV

SEQ ID NO: 61642 - protein, 377 aa, Thalassotalea euphylliae
  misc_feature (1)..(377): tr|A0A3E0UIC3|A0A3E0UIC3_9GAMM Queuine tRNA-ribosyltran sferase OS=Thalassotalea euphylliae OX=1655234 GN=tgt P E=3 SV=1
MKYELINKDGKARRGRLTFERGTVETPAFMPVGTYGTVKGMKTEEIKEIGAEIILGNTFHLMLRPGTDIIEQHGDLHDFINWDKPILTDSGGFQVFSLGKMRKITEEGVKFSSPVNGEKIMLTPERSMEVQRALGSDIVMIFDECTPYPATHQEAKDSMELSLRWAQRSKDAHQGNPNALFGIVQGGMYEDLREVSVDGLKAIDFDGYAIGGLSVGEPKEDMIRILDHTTPLIPENKPRYLMGVGKPEDLVEGVRRGIDMFDCVMPTRNARNGHLFVSDGVVKIRNAKNKTDTGPLDPECDCYTCKNYSKAYLHHLDKCNEILGSQLNTIHNLRFYQRVMKGLRDAIEAGTLDDFVADFYARRGLPVPPLAEGSEQV

SEQ ID NO: 61643 - protein, 379 aa, Thalassotalea sp.
  misc_feature (1)..(379): tr|A0A516HAG8|A0A516HAG8_9GAMM Queuine tRNA-ribosyltran sferase OS=Thalassotalea sp. PS06 OX=2594005 GN=tgt PE= 3 SV=1
MKYELINQDGKARRGRLIFDRGVVETPAFMPVGTYGTVKGMTTDEVEATGAHILLGNTFHLMLRPGTEIIEQHGDLHDFMNWHKPILTDSGGFQVFSLGEMRKITEKGVEFRSPVNGEKIMLTPERSMEVQRSLGSDIVMIFDECTPYPATHEEAKASMELSLRWAKRSKDAHGDNPSALFGIVQGGMYEDLREISAQGLLDIDFDGYAIGGLSVGEPKEEMIKILDHTPDLIPKEKPRYLMGVGKPEDLVEGVRRGIDMFDCVMPTRNARNGHLFVTNGVVKIRNAKHKTDTGPLDPECDCYTCKNYSKAYLHHLDKCNEILGAQLNTMHNLRFYQRVMQGLRDAIEQGKLDDFVAEFYALRGMDVPPLEPNSGSNEE

SEQ ID NO: 61644 - protein, 377 aa, Thalassotalea sp.
  misc_feature (1)..(377): tr|A0A1Q6CMS9|A0A1Q6CMS9_9GAMM Queuine tRNA-ribosyltran sferase OS=Thalassotalea sp. PP2-459 OX=1742724 GN=tgt PE=3 SV=1
MSYELITKDGKARRGRLTFARGTVETPAFMPVGTYGTVKGMKSEEIEEIGAEIILGNTFHLMLRPGTDIIEQHGDLHDFIHWDKPILTDSGGFQVFSLGAMRKITEEGVKFSSPVNGEKIMLTPERSMEVQRKLGSDIVMIFDECTPYPATHVEAKESMELSLRWAQRSKDAHKENPNALFGIVQGGMYEDLREVSINGLKAIDFDGYAIGGLSVGEPKEDMVRILDHTAPLIPENKPRYLMGVGKPEDLVEGVRRGIDMFDCVMPTRNARNGHLFVTTGVVKIRNAKNKVDTGPLDEQCDCYTCKNYSRAYLHHLDKCNEILGSQLNTIHNLRFYQRIMKELRDAIEQGKLEEYVSEFYALRSLPVPPLAKGSEQV

SEQ ID NO: 61645 - protein, 370 aa, Thauera aminoaromatica
  misc_feature (1)..(370): tr|A0A5C7SCN4|A0A5C7SCN4_9RHOO Queuine tRNA-ribosyltran sferase OS=Thauera aminoaromatica OX=164330 GN=tgt PE=3 SV=1
MQFELLTTDGGARRGRLTLAHGVVETPVFMPVGTYGTVKAMTPAMLSDIGAQICLGNTFHLWLRPGLDIISAHQGLHRFMAWDKPILTDSGGFQVFSLGALRKISEEGVKFASPIDGAKLFLTPEISMQIQSVLNSDIVMIFDECTPYPATRDEAAKSMRLSQRWAKRSRDEFDRLENKNALFGIVQGGMYEDLRDESQAALEDIGFHGFAIGGLSVGEPKDDMARILAHTAPRLPQGKPRYLMGVGTPEDIVAGVAAGIDMFDCVMPTRNARNGWLFTRYGDIKIKNAVHKADTRPLDPSCDCYTCRNFSRAYLHHLHRTGEILGSMLNTVHNLRYYQTLTAELRAAIAAGEFAPYVQRFRGERATGTG

SEQ ID NO: 61646 - protein, 370 aa, Thauera aminoaromatica; identical to SEQ ID NO: 61645
  misc_feature (1)..(370): tr|N6Y2Q0|N6Y2Q0_9RHOO Queuine tRNA-ribosyltransferase OS=Thauera aminoaromatica S2 OX=1234381 GN=tgt PE=3 SV= 1

SEQ ID NO: 61647 - protein, 378 aa, Thauera aromatica
  misc_feature (1)..(378): tr|A0A2R4BL22|A0A2R4BL22_THAAR Queuine tRNA-ribosyltran sferase OS=Thauera aromatica K172 OX=44139 GN=tgt PE=3 SV=1
MHFELLATDRGARRGRLTLAHGVVETPVFMPVGTYGTVKAMTPAMLADIGAQICLGNTFHLWLRPGLEIIGAHGGLHRFMAWDKPILTDSGGFQVFSLGALRKISEEGVKFASPIDGAKLFLTPEISMQIQHVLNSDIVMIFDECTPYPATRDEAAKSMQLSQRWARRSRDEFDKLNDKADADPEKRNALFGIVQGGMYEDLRDESQAALEAIGFDGFAIGGLSVGEPKEDMARILAHTAPRLPQDKPRYLMGVGTPEDIVAGVAAGIDLFDCVMPTRNARNGWLFTRHGDIKIKNAVHKADTRPLDPSCDCYTCRHFSRAYLHHLHRSGEILGSMLNTVHNLRYYQTLTAELRAAIIAGEFAQYVQRFHRERATGTA

SEQ ID NO: 61648 - protein, 374 aa, Thauera chlorobenzoica
  misc_feature (1)..(374): tr|A0A1H5UAV0|A0A1H5UAV0_9RHOO Queuine tRNA-ribosyltran sferase OS=Thauera chlorobenzoica OX=96773 GN=tgt PE=3 SV=1
MRFELLATDCGARRGRLTLAHGVVETPVFMPVGTYGTVKAMTPSMLADIGAQICLGNTFHLWLRPGLEIIAAHGGLHRFMAWDKPILTDSGGFQVFSLGALRKISEEGVKFASPIDGAKLFLTPEISMQIQHVLNSDIVMIFDECTPYPASRDEAAQSMLLSQRWAKRSRDEFDKLSDRLENPNALFGIVQGGMYEDLRDESQAALEAIGFDGFAIGGLSVGEPKEDMARILAHTAPRLPAAKPRYLMGVGTPEDIVAGVAAGIDMFDCVMPTRNARNGWLFTRYGDIKIKNAVHKADPRPLDPSCDCYTCRNFSRAYLHHLHRSGEILGSMLNTVHNLRYYQTLTHELREAIVTGRFTARVHDFRAERATGTR

SEQ ID NO: 61649 - protein, 370 aa, Thauera humireducens
  misc_feature (1)..(370): tr|A0A127KA74|A0A127KA74_9RHOO Queuine tRNA-ribosyltran sferase OS=Thauera humireducens OX=1134435 GN=tgt PE=3 SV=1
MQFELLTTDGGARRGRLTLTHGVVETPVFMPVGTYGTVKAMTPAMLSDIGAQICLGNTFHLWLRPGLDIIRAHEGLHRFMGWDKPILTDSGGFQVFSLGALRKITEEGVKFASPIDGAKLFLTPEISMQIQSVLNSDIVMIFDECTPYPATRDEAAKSMRLSQRWARRSRDEFDRLENRNALFGIVQGGMYEDLRDESQAALEEIGFHGFAIGGLSVGEPKEDMARILAHTAPRLPQGKPRYLMGVGTPEDIVDGVAAGIDMFDCVMPTRNARNGWLFTRYGDIKIKNAVHKADTRPLDPSCDCYTCRNFSRAYLHHLHRTGEILGSMLNTVHNLRYYQTLTSELRDAIANGQFDAYVQRFRSERATGTQ

SEQ ID NO: 61650 - protein, 374 aa, Thauera linaloolentis
  misc_feature (1)..(374): tr|N6YZJ8|N6YZJ8_9RHOO Queuine tRNA-ribosyltransferase OS=Thauera linaloolentis 47Lol = DSM 12138 OX=1123367 G N=tgt PE=3 SV=1
MPNTMQFELLTTDGGARRGRLTLAHGTIETPVFMPVGTYGTVKAMTPDMLAGIGAQICLGNTFHLWLRPGLDIIRAHKGLHRFMAWDKPILTDSGGFQVFSLGALRKITEEGVKFASPIDGARLFLTPEISMQIQTTLNSDIVMIFDECTPYPATRDEAAKSMRLSQRWAKRSRDEFDRLGNPNALFGIVQGGMFEDLRDESLAALEDIGFHGFAIGGLSVGEPKDEMARILTHTAPRLPQGKPRYLMGVGTPEDIVAGVTAGIDMFDCVMPTRNARNGWLFTRYGDIKIKNAVHKADTRPLDPSCDCYTCRNFSRAYLHHLHRSGEILGSMLNTVHNLRYYQTLTAELRAAIAGNTFDAYVRRFREERAAGAH

SEQ ID NO: 61651 - protein, 370 aa, Thauera phenylacetica
  misc_feature (1)..(370): tr|N6YJP7|N6YJP7_9RHOO Queuine tRNA-ribosyltransferase OS=Thauera phenylacetica B4P OX=1234382 GN=tgt PE=3 SV= 1
MQFELLTTDGGARRGRLTLAHGTVETPVFMPVGTYGTVKAMTPAMLSDIGAQICLGNTFHLWLRPGLDIIAAHQGLHRFMAWDKPILTDSGGFQVFSLGALRKITEEGVKFASPIDGARLFLTPEISMQIQSVLNSDIVMIFDECTPYPATRDEAAKSMRLSQRWARRSRDEFDRLENKNALFGIVQGGMYEDLRDESQAALEDIGFHGFAIGGLSVGEPKEDMARILAHTAPRLPQGKPRYLMGVGTPEDIVEGVAAGIDMFDCVMPTRNARNGWLFTRYGDIKIKNAVHKADTRPLDPSCDCYTCRNFSRAYLHHLHRTGEILGSMLNTVHNLRYYQTLTSELREAIAAGTFAACVQRFRSERATGTN

SEQ ID NO: 61652 - protein, 370 aa, Thauera propionica
  misc_feature (1)..(370): tr|A0A235EWE2|A0A235EWE2_9RHOO Queuine tRNA-ribosyltran sferase OS=Thauera propionica OX=2019431 GN=tgt PE=3 SV =1
MQFELLTTDGGARRGRLTLAHGIVETPVFMPVGTYGTVKAMTPAMLADIGAQICLGNTFHLWLRPGLDIIAAHEGLHRFMAWDKPILTDSGGFQVFSLGALRKITEEGVKFASPIDGAKLFLTPEISMQIQTVLNSDIVMIFDECTPYPATRDEAAKSMRLSQRWAKRSRDEFDRLENRNALFGIVQGGMYEDLRDESQGVLEEIGFHGFAIGGLSVGEPKEDMARILAHTAPRLPQGKPRYLMGVGTPEDIVDGVAAGIDMFDCVMPTRNARNGWLFTRYGDIKIKNAVHKADTRPLDPSCDCYTCRNFSRAYLHHLHRTGEILGSMLNTVHNLRYYQTLTSELRDAIAVGQFDAYVQRFRSERATGTQ

SEQ ID NO: 61653 - protein, 370 aa, Thauera sp.; identical to SEQ ID NO: 61645
  misc_feature (1)..(370): tr|A0A0C3N5Q4|A0A0C3N5Q4_9RHOO Queuine tRNA-ribosyltran sferase OS=Thauera sp. SWB20 OX=1572758 GN=tgt PE=3 SV= 1

SEQ ID NO: 61654 - protein, 369 aa, Thauera sp.
  misc_feature (1)..(369): tr|A0A290ZIW3|A0A290ZIW3_9RHOO Queuine tRNA-ribosyltran sferase OS=Thauera sp. K11 OX=2005884 GN=tgt PE=3 SV=1
MQFELLATSGGARRGRMTLAHGTVETPVFMPVGTYGTVKAMTPAMLADVGAQICLGNTFHLWLRPGLEIIGAHAGLHRFMAWDKPILTDSGGFQVFSLGALRKIGEEGVKFASPIDGAKLFLTPEISMEIQTVLDSDIVMIFDECTPYPASRDEAAASMRLSQRWARRSRDEFDRRENPNALFGIVQGGMYEDLRDESLGALADIGFHGFAIGGLSVGEPKDDMQRILAHTAPRLPQGKPRYLMGVGTPEDIVAGVAAGIDMFDCVMPTRNARNGWLFTRYGDIKIKNAVHKADTQPLDPSCDCYTCRNFSRAYLHHLHRAGEILGSMLNTIHNLHYYQTLTAELRRSIEDQAFSAYVQRFRGERAAGA

SEQ ID NO: 61655 - protein, 370 aa, Thauera terpenica
  misc_feature (1)..(370): tr|T0AXC9|T0AXC9_9RHOO Queuine tRNA-ribosyltransferase OS=Thauera terpenica 58Eu OX=1348657 GN=tgt PE=3 SV=1
MQFELLTSDGGARRGRLTLAHGVVDTPVFMPVGTYGTVKAMTPTMLADIGAQICLGNTFHLWLRPGLDVVQAHAGLHRFMAWDKPILTDSGGFQVFSLGALRKITEEGVKFASPIDGAKLFLTPEISMQIQTVLNSDIVMIFDECTPYPATHDEAASSMRLSQRWARRSRDEFDRLENANALFGIVQGGMHEDLRDESLGALEEIGFHGFAIGGLSVGEPKEDMTRILAHTAPRLPQGKPRYLMGVGTPEDIVEGVAAGIDMFDCVMPTRNARNGWLFTRYGNVKIKNAVHKADTRPLDASCACYTCRNFSRAYLHHLHRTGEILGSMLNTVHNLHYYQTLTAEMRDAIAGGSFDAYVKRFRTERATGAL

SEQ ID NO: 61656 - protein, 374 aa, Thermacetogenium phaeum
  misc_feature (1)..(374): tr|K4LF33|K4LF33_THEPS Queuine tRNA-ribosyltransferase OS=Thermacetogenium phaeum (strain ATCC BAA-254 / DSM 1 2270 / PB) OX=1089553 GN=tgt PE=3 SV=1
MGFFHFQLLKKSKKSMARLGIIRTPRGVIHTPAFMPVGTQATVKTLTPEEVSDLGAEIILSNTYHLYLRPGTEIINKAGGLHRFMNWQGPILTDSGGFQVFSLGSLRRITDDGVHFRSHLDGSPHFISPEKSMEIQAVLGSDIAMAFDVCAPFPCSYEEALEAVERTTRWAERSLKAPHAPGQVVFGIVQGSVYPELRERSAREITALDFPGYAVGGLSVGEPKVIMYEVLEKTTPLLPEDRPRYLMGVGTADCLWEGVARGVDLFDCVLPTRIARNGTALTSKGKVVVRNAEFADDFSPIDADCGCYTCRNYSRAYLRHLFKAEEILGHRLLTIHNLYFTLGVMAEIRQAIREDRFEEHMDEFLKQLNSTNVE

SEQ ID NO: 61657 - protein, 391 aa, Thermaerobacter marianensis
  misc_feature (1)..(391): tr|E6SIX3|E6SIX3_THEM7 Queuine tRNA-ribosyltransferase OS=Thermaerobacter marianensis (strain ATCC 700841 / DS M 12885 / JCM 10246 / 7p75a) OX=644966 GN=tgt PE=3 SV=1
MAGWDGWFVVEHREAHSQARAGRLVTPHGVVETPVFMPVGTQAAVKTLSPHELRAVGAEIILSNTYHLYLRPGSDVVAAAGGLHRFMAWDGPILTDSGGFQVFSLASLRQVTDDGVRFRSHLDGSEHLFTPERSMAVQRDLGADIIMCFDECLAYPARRDEVEASVDRTTRWAQRCHRFWQEEGNPERQALFGIVQGGAYPELRRRSAEALQELDFPGYAVGGLSVGEPAGVTVAVLDATVPLLPADRPRYLMGVGTPDLILEAVWRGIDMMDCVLPTRMARHGTVYTSEGKLTVRNAAFARDFRPLDPACDCYACRHFTRAYIRHLLKVNETLGMRLTTLHNLRYLHRFMERLRQAVREDRLPEFRAAFYRGEGAVLGFRPPEPAALPEA

SEQ ID NO: 61658 - protein, 391 aa, Thermaerobacter sp.
  misc_feature (1)..(391): tr|A0A371Z7Z4|A0A371Z7Z4_9FIRM Queuine tRNA-ribosyltran sferase OS=Thermaerobacter sp. PB12/4term OX=2293838 GN =tgt PE=3 SV=1
MGRWDGWFTVEHQEAHSHARAGRLHTPHGVVETPVFMPVGTQAAVKTLSPHELHQVGAQIILSNTYHLYLRPGSQVVAEAGGLHRFMAWHRPILTDSGGFQVFSLAALRQVTGDGVRFRSHLDGSEHFFTPELSMAVQRDLGADIIMCFDECLAYPARRDEVAASVERTTRWARRCHRAWQEDGHPDRQALFGIVQGGAYPDLRRRSAEELVELDFPGYAVGGLSVGEPAGVTVAVLDVTVPLLPTGRPRYLMGVGTPDLILEAVWRGIDMMDCVLPTRMARHGTVYTSQGRITVRNAAYARDFGPLDPACDCYACRHFSRAYIRHLLKVNETLGMRLTTIHNLRYLQRFMERLRQAVREDRLPEFRAAFYREEGAALGFHPPEPEPLPAG

SEQ ID NO: 61659 - protein, 391 aa, Thermaerobacter sp.
  misc_feature (1)..(391): tr|A0A4P7GU03|A0A4P7GU03_9FIRM Queuine tRNA-ribosyltran sferase OS=Thermaerobacter sp. FW80 OX=2546351 GN=tgt P E=3 SV=1
MSGWDGWFTIEHREAHSQARTGRLATPHGTVETPVFMPVGTQAAVKTLSPHELRAVGAQIILSNTYHLYLRPGSAVVAAAGGLHRFMAWEGPILTDSGGFQVFSLASLREVTADGVRFRSHLDGSEHLFTPELSMAVQRDLGADIIMCFDECLAFPAPYDAVAASVERTTRWARRCHRAWREEGRPDRQALFGIVQGGVYADLRRRSAEALVELDLPGYAVGGLSVGEPAGLTVAVLEAVVPLLPADRPRYLMGVGTPDLILEAVWRGIDMMDCVLPTRMARHGTVFTSEGRLTVRNAAFARDFRPLDPACDCYACRHFTRAYIRHLLKVNETLGMRLTTIHNLRYLHRFMERLRQAVRADRLPEFRAAFYAGEGAALGFRPPEPATLPGA

SEQ ID NO: 61660 - protein, 391 aa, Thermaerobacter subterraneus
  misc_feature (1)..(391): tr|K6PZE2|K6PZE2_9FIRM Queuine tRNA-ribosyltransferase OS=Thermaerobacter subterraneus DSM 13965 OX=867903 GN= tgt PE=3 SV=1
MGRWDGWFTVEHHEVHSHARAGRLHTPHGVVETPVFMPVGTQAAVKTLSPHELHQVGAQIILSNTYHLYLRPGSQVVAEAGGLHRFMAWDRPILTDSGGFQVFSLAALRQVTGDGVRFRSHLDGSEHFFTPELSMAVQRDLGADIIMCFDECLAYPARRDEVEASVERTTRWARRCHRAWQEDGDPDRQALFGIVQGGAYPDLRRRSAEELAELDFPGYAVGGLSVGEPAGVTVAVLDVTVPLLPAGRPRYLMGVGTPDLILEAVWRGIDMMDCVLPTRMARHGTVYTSQGRITVRNAAYARDFGPLDPACDCYACRHFSRAYIRHLLKVNETLGMRLTTIHNLRYLQRFMERLRQAVREDRLPEFRAAFYREEGAALGFRPPEPEPLPAG

SEQ ID NO: 61661 - protein, 378 aa, Thermanaeromonas toyohensis
  misc_feature (1)..(378): tr|A0A1W1W180|A0A1W1W180_9THEO Queuine tRNA-ribosyltran sferase OS=Thermanaeromonas toyohensis ToBE OX=698762 G N=tgt PE=3 SV=1
MTPVSFEVIKVEKTFGARLGRLITPHGVVHTPVFMPVGTQATVKTMTPEEVESLGAEIILSNTYHLYLRPGAEVIREAGGLHRFMNWHRPILTDSGGFQVFSLASLREVRPEGVLFRSHLDGSTHFMGPQESMAVQEALGSDIAMAFDECVAYPASYEEVEAAVERTTRWAEECLKVHKRQDQAVFGIIQGGVFPDLRRRSAQEITSLDFPGYGIGGLSVGEPKSMMYAILEELRPFLPESKPRYLMGVGSPDCLLEGVKRGIDMFDCVLPTRIARNGTVLTSRGKLVVRNAIYARDFRPLDPECDCYTCRNFTRAYIRHLIKANEVLGLRLTTIHNLYFIFRLMDRIRQAIAEDRLLEMSEEFYSRYQATEGGEENF

SEQ ID NO: 61662 - protein, 372 aa, Thermanaerothrix daxensis
  misc_feature (1)..(372): tr|A0A0P6YK64|A0A0P6YK64_9CHLR Queuine tRNA-ribosyltran sferase OS=Thermanaerothrix daxensis OX=869279 GN=tgt P E=3 SV=1
MTIASFAFELIARQGRARAGVIHTPHGPILTPIFAPVGTQATVKAVTPAQLEEHGVTLVLSNTYHLYLRPGAELIAELGGLHRFMSWPHPILTDSGGFQVFSLSENRRVDDEGVTFRSHIDGSLHRLTPEIAIEVQEKLGADIIMAFDECAPPYDRAYNERALERTHRWAERCLKAKTRSDQALFGIVQGGIFLDLREQSARFLTGLGFPGYAIGGLSVGETKAEMHAVLELVDGLLPEDKPRYLMGVGTPQDIINGILRGVDMFDCVLPTRLARHHAAMTRTGRLNMMNAAYARDSRPIDPECTCYTCRHFTRAYLRHLIVAREMLAATLLSIHNITTLITLVSEARSAILAGRFEQFAAEFFAAQETLPS

SEQ ID NO: 61663 - protein, 367 aa, Thermanaerovibrio acidaminovorans
  misc_feature (1)..(367): tr|D1B5Y5|D1B5Y5_THEAS Queuine tRNA-ribosyltransferase OS=Thermanaerovibrio acidaminovorans (strain ATCC 49978 / DSM 6589 / Su883) OX=525903 GN=tgt PE=3 SV=1
MGFRVVAECPVTGARAGELTTAHGVVKTPVFMPVGTQATVKAMAPFELKALGAQIILGNTYHLFLRPGEELVERAGGLHRFMGWDRPILTDSGGFQVFSLAELRTLSDEGVVFRSHLDGSRHVMTPERAVRIQERLGSDIAMCFDECVKYPTTYEYSMGAVKRTLAWARRCLAAKTRDDQLLFGIVQGSVFEDQRIACAEALMEMDFPGYSIGGLSVGESHQEMYRILDCLKGVLPKGKPRYLMGVGHPSNLLEGIARGVDMFDCVLPTRNGRNGTVFTSRGRLNVKNLSLAEDFTPLDPDCTCYACRNFSRAYIRHLYKAGEILAMRLCTWHNLHFLISLVEGARRAILEGTFPEYRERFLRTFEG

SEQ ID NO: 61664 - protein, 372 aa, Thermanaerovibrio velox
  misc_feature (1)..(372): tr|H0UQH5|H0UQH5_9BACT Queuine tRNA-ribosyltransferase OS=Thermanaerovibrio velox DSM 12556 OX=926567 GN=tgt P E=3 SV=1
MSFKVVAQCPVTGARAGELVTSHGVVRTPVFMPVGTQATVKAMAPFELKAIGAQIILGNTYHLFLRPGEDLVEKAGGLHRFMNWDRPILTDSGGFQVFSLAELRTLSDDGVVFRSHLDGKRHLMTPERAVAIQEKLGSDIAMCFDECVKYPSSYEYSMEAMKRTIRWARRCREAHGRQDQLLFGIVQGSVFEDQRLMCAEALMEMDFPGYSIGGLSVGESHQEMYRILDCLKGVLPQQKPRYLMGVGHPSNLMEGISRGVDMFDCVLPTRNGRNGTVFTSRGKLNVKNLSLAEDFTPLDPECSCYACRNFSRAYIRHLYKAGEILAMRLCTWHNLHFLVSLVEGARRAIIEGTFPEYKERFLRVFEGDSADG

SEQ ID NO: 61665 - protein, 374 aa, Thermincola ferriacetica
  misc_feature (1)..(374): tr|A0A0L6W674|A0A0L6W674_9FIRM Queuine tRNA-ribosyltran sferase OS=Thermincola ferriacetica OX=281456 GN=tgt PE =3 SV=1
MAVKFELIKECKQTKARLGRLHTPHGIINTPVFMPVGTQATVKTMTPEELKDIGAEIILSNTYHLYLRPGSKLIREAGGLHKFMNWDRPILTDSGGFQVFSLGPLRKITEDGVEFRSHLDGSKHFMTPELATEVQMDLGSTIAMAFDECAPYPCTFEYAREALERTTRWAERCKKAHNRMDQALFGIVQGGMYRELREQSARELVELDFPGYAIGGLSVGEPKPLMYEVLDYTTPLLPADKPRYLMGVGSPDCIIEGVIRGVDMFDCVLPTRIARNGTAMTSGGKVVIRNAVYARDFTPLDHECDCYTCRNYSRAYIRHLFKAEEILALRLVTIHNLYFLLRLMEHLRKAIAEDCVPEFRKRFFEKYGYDGEEI

SEQ ID NO: 61666 - protein, 374 aa, Thermincola potens; identical to SEQ ID NO: 61665
  misc_feature (1)..(374): tr|D5XEJ3|D5XEJ3_THEPJ Queuine tRNA-ribosyltransferase OS=Thermincola potens (strain JR) OX=635013 GN=tgt PE=3 SV=1

SEQ ID NO: 61667 - protein, 387 aa, Thermoactinomyces sp.
  misc_feature (1)..(387): tr|A0A151Z163|A0A151Z163_9BACL Queuine tRNA-ribosyltran sferase OS=Thermoactinomyces sp. AS95 OX=1811386 GN=tgt PE=3 SV=1
MVSSIGGNTLAVKYELIKTCKQSGARLGRLHTPHGTIDTPIFMPVGTQATVKTMSPEELKEMNAQIILSNTYHLFLRPGHDIVREAGGLHAFMNWDRPILTDSGGFQVFSLSKLRDITEEGVTFRSHISGEKLFIGPEKAMEIQNALGADIIMAFDECPPYPADREYVKASTERTYRWLKRCMKAHQRPAEQALFGIVQGGMYQDLREESARQLVDLDLPGYAVGGLSVGESKELMYEVLDYTTPLLPGHKPRYLMGVGSPDALIEGSIRGIDMFDCVLPTRIARNGTAMTSQGRVVVRNAKYARDFTALDPECDCYTCRNYTKAYLRHLIKADETFGLRLITYHNLYFLLELMKQVRQAILEDRLLDFRDAFMMKYYGSLHPEKPF

SEQ ID NO: 61668 - protein, 378 aa, Thermoactinomyces sp.
  misc_feature (1)..(378): tr|A0A1K1U6Z8|A0A1K1U6Z8_9BACL Queuine tRNA-ribosyltran sferase OS=Thermoactinomyces sp. DSM 45891 OX=1761907 G N=tgt PE=3 SV=1
MAVRYELLKQCKQSGARLGRLHTPHGVIETPIFMPVGTLATVKTMSPEELKEMDAQIILSNTYHLFIRPGHEIVKEAGGLHQFMNWDRPILTDSGGFQVFSLGDLRKITEEGVQFRSHLSGEKLFLSPEKVMAIQNALGADIIMAFDECPPYPAEYEYVKNSTERTYRWLKRCKEAHDRPEDQALFGIVQGGEYRELREESARQLVDLDLPGYAVGGLSVGEPHEMMFEILGYTTPLLPKDKPRYLMGVGSPEALIQGAILGVDMFDCVLPTRIARNGTTMTSGGRLVVRNAKFTRDFGPLDPNCDCYTCRNYSRAYLRHLIKADETFGLRLTTYHNLYFLLNLMHQVRQAIMEDRLLDFRDEFMMKYYGTLNPVQKF

SEQ ID NO: 61669 - protein, 391 aa, Thermoactinomyces vulgaris
  misc_feature (1)..(391): tr|A0A0N0YDG6|A0A0N0YDG6_THEVU Queuine tRNA-ribosyltran sferase OS=Thermoactinomyces vulgaris OX=2026 GN=tgt PE =3 SV=1
MVISDANLVGGNILAVRYELIKTCKQSGARLGRLHTPHGTIETPIFMPVGTQATVKTMSPEELKEMNAQIILSNTYHLFLRPGHDIVKEAGGLHSFMNWDRPILTDSGGFQVFSLSQLRNITEEGVTFRSHLSGEKLFISPEKAMEIQNALGADIIMAFDECPPHPAEKAYVKASTERTYRWLERCIKAHARPHDQALFGIVQGGMHQDLREESAKQLVELDLPGYAVGGLSVGEPKEVMYEVLSYTTPHLPVHKPRYLMGVGSPDALIQGAILGIDMFDCVLPTRIARNGTTMTSQGRLVVRNAKFARDYTPLDPACDCYTCRNYTRAYLRHLIKADETFGLRLTTYHNLYFLLKLMEQVRQAIREDRLLDFRDEFMMKYYGSLNPNAAF

SEQ ID NO: 61670 - protein, 375 aa, Thermoanaerobacter brockii
  misc_feature (1)..(375): tr|E8US90|E8US90_THEBF Queuine tRNA-ribosyltransferase OS=Thermoanaerobacter brockii subsp. finnii (strain ATC C 43586 / DSM 3389 / AKO-1) OX=509193 GN=tgt PE=3 SV=1
MAAIKYRLIKKDSRTNARLGILETPHGIIETPVFMPVGTQATVKSMTPEELKEIGATIILSNTYHLYLRPGHKIIEKAGGLHKFMNWDRAILTDSGGFQVFSLNSLRKITEDGVEFRSHIDGSRHFFTPEKVIEIQNALGSDIMMSFDECAPYPADYDYVKKSMELTIKWAERGKRAHKNTEKQALFGIVQGGTYEDLRKECAQRLVDMDFPGYSIGGLSVGEPKNVMYDIVDLTTEYLPEDKPRYLMGVGSPDDLIEGVIRGVDMFDCVLPTRIARNGTVFTSKGKLIVRDAPYAEDFSPLDEECDCYTCRNYSRAYIRHLFKANEILAARLATIHNLYFLIKLMERIREAIRQDRLLEFKKQFFKKYGYKEEY

SEQ ID NO: 61671 - protein, 375 aa, Thermoanaerobacter ethanolicus; identical to SEQ ID NO: 61670
  misc_feature (1)..(375): tr|C7IUL7|C7IUL7_THEET Queuine tRNA-ribosyltransferase OS=Thermoanaerobacter ethanolicus CCSD1 OX=589861 GN=tg t PE=3 SV=1

SEQ ID NO: 61672 - protein, 376 aa, Thermoanaerobacter italicus
  misc_feature (1)..(376): tr|D3T8J8|D3T8J8_THEIA Queuine tRNA-ribosyltransferase OS=Thermoanaerobacter italicus (strain DSM 9252 / Ab9) OX=580331 GN=tgt PE=3 SV=1
MAAIKYWLIKKDSRTKARLGILETPHGAIETPVFMPVGTQATVKAMTPEELKEIGATIILSNTYHLYLRPGHKIIEKAGGLHKFMNWDRAILTDSGGFQVFSLSSLRKITEDGVEFRSHIDGSRHFFTPEKVIEIQNALGADIIMSFDECAPYPADYEYVKKSMEFTIKWAERGKKAHRYTEKQALFGIVQGGTYEDLRRECTQRLVDMDFPGYSIGGLSVGEPKNVMYDMVDLTTENLPEDKPRYLMGVGSPDDLIEGVIRGVDMFDCVLPTRIARNGTVFTSKGKLIVRDAPYAEDFFPLDEECDCYTCKNYSRAYIRHLFKAGEILAARLATLHNLYFLIKLMERIREAIKQDRLLEFKKEFFEKYYGNKEDY

SEQ ID NO: 61673 - protein, 375 aa, Thermoanaerobacter kivui
  misc_feature (1)..(375): tr|A0A097AR80|A0A097AR80_THEKI Queuine tRNA-ribosyltran sferase OS=Thermoanaerobacter kivui OX=2325 GN=tgt PE=3 SV=1
MAAIKYQLIKKDSRTKARLGILQTSHGIIETPVFMPVGTQATVKTMTPEELKEIGATIILSNTYHLYLRPGHKLIEKAGGIHKFMNWDRAILTDSGGFQVFSLSSLREITEEGVEFRSHIDGSKHFFTPEKVIEIQNALGADIIMSFDECAPYPADYGYVKNSMELTIKWAERGKKAHKNTDKQALFGIVQGGTYEDLRKECANRLVEMDFPGYSIGGLSVGEPKNLMYDILDLTTDYLPEDKPRYLMGVGSPDDLIEGVIRGVDMFDCVLPTRIARNGTVFTSKGKLVVRNAAYAEDFSPLDDECECYTCKNYSRAYIRHLFKANEILAARLATIHNLYFLVKLMERIREAIRQDRLLEFKKQFFEKYGYKEEY

SEQ ID NO: 61674 - protein, 376 aa, Thermoanaerobacter mathranii; identical to SEQ ID NO: 61672
  misc_feature (1)..(376): tr|D7ANM1|D7ANM1_THEM3 Queuine tRNA-ribosyltransferase OS=Thermoanaerobacter mathranii subsp. mathranii (strai n DSM 11426 / CIP 108742 / A3) OX=583358 GN=tgt PE=3 SV =1

SEQ ID NO: 61675 - protein, 375 aa, Thermoanaerobacter pseudethanolicus; identical to SEQ ID NO: 61670
  misc_feature (1)..(375): sp|B0K959|TGT_THEP3 Queuine tRNA-ribosyltransferase OS= Thermoanaerobacter pseudethanolicus (strain ATCC 33223 / 39E) OX=340099 GN=tgt PE=3 SV=1

SEQ ID NO: 61676 - protein, 376 aa, Thermoanaerobacter siderophilus
  misc_feature (1)..(376): tr|I8R1I3|I8R1I3_9THEO Queuine tRNA-ribosyltransferase OS=Thermoanaerobacter siderophilus SR4 OX=880478 GN=tgt PE=3 SV=1
MAAIKYHLIKKDSKTKARLGILETPHGIIETPVFMPVGTQATVKSMTPEELKEIGATIILSNTYHLYLRPGHKIIEKAGGLHKFMNWDRAILTDSGGFQVFSLNSLRKITEDGVEFRSHIDGSRHFFTPEKVIEIQNALGSDIMMSFDECAPYPADYDYVKKSMELTIKWAERGKRAHKNTEKQALFGIVQGGTYEDLRKECAQRLVDMDFPGYSIGGLSVGEPKNVMYDIVDLTTEYLPEDKPRYLMGVGSPDDLIEGVIRGVDMFDCVLPTRIARNGTVFTSKGKLIVRDAPYAEDFSPLDEECDCYTCRNYSRAYIRHLFKANEILAARLATLHNLYFLIKLMGKIREAIRQDRLLEFKKEFFKKYYRNKEEY

SEQ ID NO: 61677 - protein, 375 aa, Thermoanaerobacter sp.
  misc_feature (1)..(375): tr|A0A3F3EF75|A0A3F3EF75_9THEO Queuine tRNA-ribosyltran sferase OS=Thermoanaerobacter sp. X561 OX=588857 GN=tgt PE=3 SV=1
MAAIKYRLIKKDSRTNARLGILETPHGVIETPVFMPVGTQATVKAMTPEELKEIGATIILSNTYHLYLRPGHKIIEKAGGLHRFMNWDRAILTDSGGFQIFSLSSLRKIKEEGVEFRSHIDGSKHFFTPEKVIEIQNALGSDIIMSFDECAPYPADYEYVKNSMELTIKWAERGKKAHKNTEKQALFGIVQGGIYEDLRKECAQRLVEMDFPGYSIGGLSVGEPKNVMYDIVDLTTEYLPENKPRYLMGVGSPDDLIEGVIRGVDMFDCVLPTRIARNGTVFTSKGKLIVRDAPYAEDFSPLDEECDCYTCKNYSRAYIRHLFKANEILAARLATIHNLYFLIKLMERIREAIRQDRLLEFKKQFFKKYGYKEEY

SEQ ID NO: 61678 - protein, 375 aa, Thermoanaerobacter sp.; identical to SEQ ID NO: 61677
  misc_feature (1)..(375): sp|B0K0M1|TGT_THEPX Queuine tRNA-ribosyltransferase OS= Thermoanaerobacter sp. (strain X514) OX=399726 GN=tgt P E=3 SV=1

SEQ ID NO: 61679 - protein, 375 aa, Thermoanaerobacter thermocopriae; identical to SEQ ID NO: 61677
  misc_feature (1)..(375): tr|A0A101D7R8|A0A101D7R8_9THEO Queuine tRNA-ribosyltran sferase OS=Thermoanaerobacter thermocopriae OX=29350 GN =tgt PE=3 SV=1

SEQ ID NO: 61680 - protein, 376 aa, Thermoanaerobacter thermohydrosulfuricus
  misc_feature (1)..(376): tr|M8CNA9|M8CNA9_THETY Queuine tRNA-ribosyltransferase OS=Thermoanaerobacter thermohydrosulfuricus WC1 OX=1198 630 GN=tgt PE=3 SV=1
MAAIKYHLIKKDSKTKARLGILETPHGIIETPVFMPVGTQATVKSMTPEELKEIGATIILSNTYHLYLRPGHKIIEKAGGLHKFMNWDRAILTDSGGFQVFSLNSLRKITEDGVEFRSHIDGSRHFFTPEKVIEIQNALGSDIMMSFDECAPYPADYDYVKKSMELTIKWAERGKRAHKNTEKQALFGIVQGGTYEDLRKECAQRLVDMDFPGYSIGGLSVGEPKNVMYDIVNLTTEYLPEDKPRYLMGVGSPDDLIEGVIRGVDMFDCVLPTRIARNGTVFTSKGKLIVRDAPYAEDFSPLDEECDCYTCRNYSRAYIRHLFKANEILAARLATLHNLYFLIKLMGKIREAIRQDRLLEFKKEFFKKYYRNKEEY

SEQ ID NO: 61681 - protein, 376 aa, Thermoanaerobacter thermohydrosulfuricus; identical to SEQ ID NO: 61680
  misc_feature (1)..(376): tr|A0A1G7H746|A0A1G7H746_THETY Queuine tRNA-ribosyltran sferase OS=Thermoanaerobacter thermohydrosulfuricus OX= 1516 GN=tgt PE=3 SV=1

SEQ ID NO: 61682 - protein, 376 aa, Thermoanaerobacter uzonensis
  misc_feature (1)..(376): tr|A0A1M5A1R3|A0A1M5A1R3_9THEO Queuine tRNA-ribosyltran sferase OS=Thermoanaerobacter uzonensis DSM 18761 OX=11 23369 GN=tgt PE=3 SV=1
MTAIKYHLIKKDSKTKARLGIIETPHGIIETPVFMPVGTQATVKSMTPEELKEIGATIILSNTYHLYLRPGQKIIEKAGGLHKFMNWDRAILTDSGGFQVFSLSSLRKITEDGVEFRSHIDGSRHFFTPEKVIEIQNALGSDIMMSFDECAPYPADYDYVKKSMELTIKWAERGKRAHKNTEKQALFGIVQGGTYEDLRKECVQRLVDIDFPGYSIGGLSVGEPKNVMYDIVDLTTEYLPEDKPRYLMGVGSPDDLIEGVIRGVDMFDCVLPTRIARNGTVFTSKGKLIVRDAPYAEDFSPLDEECDCYTCRNYSRAYIRHLFKANEILAARLATLHNLYFLIKLMKKIREAIRQDQLLEFKKEFFKKYYGNKEEY

SEQ ID NO: 61683 - protein, 376 aa, Thermoanaerobacter wiegelii
  misc_feature (1)..(376): tr|G2MSZ7|G2MSZ7_9THEO Queuine tRNA-ribosyltransferase OS=Thermoanaerobacter wiegelii Rt8.B1 OX=697303 GN=tgt PE=3 SV=1
MAAIKYHLIKKDSKNKARLGILETPHGIIETPVFMPVGTQATVKSMTPEELKEIGATIILSNTYHLYLRPGHKIIEKAGGLHKFMNWDRAILTDSGGFQVFSLNSLRRITEDGVEFRSHIDGSRHFFTPEKVIEIQNALGSDIMMSFDECAPYPADYDYVKKSMELTIKWAERGKRAHKNTEKQALFGIVQGGTYEDLRKECAQRLVDMDFPGYSIGGLSVGEPKNVMYDIVDLTTEYLPEDKPRYLMGVGSPDDLIEGVIRGVDMFDCVLPTRIARNGTVFTSKGKLIVRDAPYAEDFSPLDEECDCYTCRNYSRAYIRHLFKANEILAARLATLHNLYFLIKLMKKIREAIRQDQLLEFKKEFFKKYYGNKEEY

SEQ ID NO: 61684 - protein, 371 aa, Thermoanaerobacteraceae bacterium
  misc_feature (1)..(371): tr|A0A3A9JVG4|A0A3A9JVG4_9THEO Queuine tRNA-ribosyltran sferase OS=Thermoanaerobacteraceae bacterium SP2 OX=229 2448 GN=tgt PE=3 SV=1
MRFEVLKKAENSRARLGLLQTPHGTIETPVFMPVGTQATVKTMTPEELEQIGAKIILGNTYHLYLRPGHKVVEEAGGLHKFMNWNRSILTDSGGYQVFSLGELREIREEGVTFRSHIDGSLHFIGPETSIEIQNALGADIIMSFDECIPYPATYDYVKNSVQRTSRWAERCKKAHVNPKQTLFGIVQGGLYKDLREESAKDLVSLDFEGYSIGGLSVGEPKENMYEVLDYTVPLLPEEKPRYLMGVGSPDAIFEGVLRGIDMFDCVLPTRIARNGTVFTRKGKLVVRNAVYARDFSPLDHDCDCYVCRNYTRAYIRHLINAKEVLGIRLTTIHNLYFLLNLMKDIRRAIEGGYLSEFKNEFFESFGYKQEY

SEQ ID NO: 61685 - protein, 373 aa, Thermoanaerobacteraceae bacterium
  misc_feature (1)..(373): tr|A0A5D8QGI5|A0A5D8QGI5_9THEO Queuine tRNA-ribosyltran sferase OS=Thermoanaerobacteraceae bacterium A05MB OX=2 606906 GN=tgt PE=3 SV=1
MGQFRYELIKEEKNTRARLGRIYTPHGVIETPIFMPVGTQATVKAMTPEELKDIGAQIILSNTYHLYLRPGHNIVKKAGGLHNFMHWDRPILTDSGGYQVFSLSDLREINEEGVYFKSHLDGSRHFIGPEKAMEIENALGADIIMCFDECAPYPSEWEYVKRSSDMTIKWAQRCKKAHNRPDEQALFGILQGGIYEDIRTENAKRMVDMDFPGYSIGGLSVGEPKNIMLDIIELVEEYMPKDKPRYLMGVGSPDLLIEGSIRGVDMFDCVLPTRIARNGTVMTSHGKLVIRNAQYAEDFTPLDDECDCYVCKNYTRAYIRHLFKAGEILAARLATYHNIYFLIRLMERIREAIKNDSLLDFRKEFFAKYGYEL

SEQ ID NO: 61686 - protein, 371 aa, Thermoanaerobacterales bacterium
  misc_feature (1)..(371): tr|A0A3G2R7G3|A0A3G2R7G3_9FIRM Queuine tRNA-ribosyltran sferase OS=Thermoanaerobacterales bacterium SK-G1 OX=23 16383 GN=tgt PE=3 SV=1
MRFEVLKKAENSRARLGLLQTPHGTIETPVFMPVGTQATVKTMTPEELEQIGAKIILGNTYHLYLRPGHKVVEEAGGLHKFMNWNRSILTDSGGYQVFSLGELREIREEGVTFRSHIDGSLHFIGPETSIEIQNALGADIIMSFDECIPYPATYDYVKNSVQRTSRWAERCKKAHVNPKQTLFGIVQGGLYKDLREESAKDLVSLDFEGYSIGGLSVGEPKENMYEVLDYTVPLLPEEKPRYLMGVGSPDAIFEGVLRGIDMFDCVLPTRIARNGTVFTRKGKLVVRNAVYARDFSPLDHDCDCYVCRNYTRAYIRHLINAKEVLGIRLTTIHNLYFLLNLMKDIRRAIEGGYLSEFKNEFFESFGYKQEF

SEQ ID NO: 61687 - protein, 372 aa, Thermoanaerobacterales bacterium
  misc_feature (1)..(372): tr|A0A124FJ09|A0A124FJ09_9FIRM Queuine tRNA-ribosyltran sferase OS=Thermoanaerobacterales bacterium 50_218 OX=1 635288 GN=tgt PE=3 SV=1
MGLFHFEVIKECKKTRARLGKIHTPRGIINTPAFMPVGTQATVKTLTPDEVTALGADVILCNTYHLYLRPGTEIIEAAGGLHRFMNWKGPILTDSGGFQVFSLASLRKVSDQGVEFRSHLDGSLHFITPEKAIEIQEVLGSDIAMVFDECVPFPCSYGDALTAVERTTRWAKRCLRVHSRTDQVVFGIVQGSVYPELRARSALDLVNLDFAGYAIGGLSVGEPKPMMYGILDCTVPFLPERKPRYLMGVGTADCILEAVARGIDLFDCVLPTRIARNGTALTRWGKLVVRNAEYAADFSPIDPECSCYTCRNFTRAYLRHLFKAGEILGHRLLTIHNLHFTLNLMEKIRQAILEDRFLEFKSEFLNGFRITK

SEQ ID NO: 61688 - protein, 374 aa, Thermoanaerobacterium aotearoense
  misc_feature (1)..(374): tr|W9E8S7|W9E8S7_9FIRM Queuine tRNA-ribosyltransferase OS=Thermoanaerobacterium aotearoense SCUT27 OX=1421016 GN=tgt PE=3 SV=1
MTAIKYDLVKKEKNTKARLGVLHTPHGDIETPVFMPVGTQATVKAMTPEELKEIGANIILSNTYHLYLRPGHELIKKAGGLHKFMNWDRAILTDSGGFQVFSLGPLRKITEEGVEFRSHIDGSKHFLTPEKVIEIENALGADIIMSFDECAPYPADYGYVKNSMELTLRWARRGKDAHKNTERQALFGIVQGGTYDDLRKECANRLVDMDFPGYSIGGLSVGEEKQLMYHVVDLTTDFLPQDKPRYLMGVGSPGDLIEGVIRGVDMFDCVLPTRIARNGTVLTSTGRLIVRDAPHAEEFIPLDSECDCYTCKNFSRAYIRHLFKANEILAARLATIHNLRFLTRLMEGIREAIKQDKLLEFKSQFYKKYGYKEE

SEQ ID NO: 61689 - protein, 374 aa, Thermoanaerobacterium saccharolyticum; identical to SEQ ID NO: 61688
  misc_feature (1)..(374): tr|I3VVZ7|I3VVZ7_THESW Queuine tRNA-ribosyltransferase OS=Thermoanaerobacterium saccharolyticum (strain DSM 86 91 / JW/SL-YS485) OX=1094508 GN=tgt PE=3 SV=1

SEQ ID NO: 61690 - protein, 374 aa, Thermoanaerobacterium sp.
  misc_feature (1)..(374): tr|A0A1X2FZR3|A0A1X2FZR3_9FIRM Queuine tRNA-ribosyltran sferase OS=Thermoanaerobacterium sp. PSU-2 OX=1930849 G N=tgt PE=3 SV=1
MTAIKYDLLKREKNTKARLGVLHTPHGDIETPVFMPVGTQATVKAMTPEELKEIGANIILSNTYHLYLRPGHELIKKAGGLHKFMNWDRAILTDSGGFQVFSLGPLRKITEEGVEFRSHIDGSRHFLTPEKVIEIENALGADIIMSFDECAPYPADYGYVKNSMELTLRWAKRGKEAHKNTDKQALFGIVQGGTYDDLRKECANRLVDMDFPGYSIGGLSVGEEKQLMYHVVDLTTDFLPQDKPRYLMGVGSPDDLIEGVIRGVDMFDCVLPTRIARNGTVLTSTGRLIVRDAPHAEEFIPLDAECDCYTCKNFSRAYIRHLFKANEILAARLATIHNLRFLTRLMEGIREAIKQDKLLEFKSQFYKKYGYKEE

SEQ ID NO: 61691 - protein, 374 aa, Thermoanaerobacterium sp.
  misc_feature (1)..(374): tr|A0A285BC13|A0A285BC13_9FIRM Queuine tRNA-ribosyltran sferase OS=Thermoanaerobacterium sp. RBIITD OX=1550240 GN=tgt PE=3 SV=1
MTAIKYDLIKRDSRTKARLGVLHTPHGDIETPVFMPVGTQATVKSMTPEELKNIGAKIILSNTYHLYLRPGHELIKKAGGLHKFMNWDRAILTDSGGFQVFSLGPLRKITEEGVEFHSHLDGSKHFLTPEKVIEIENALGADIIMSFDECTPYPADYDYVKKSMEMTVRWAKRGKEAHKNTNKQALFGIVQGGTYDDLRKECTNMLVDMDFPGYSIGGLSVGEEKELMYHVVDYTTEFLPQDKPRYLMGVGSPDDLIECVIRGIDMFDCVLPTRIARNGTVLTSKGRLIIRDAPHAEEFMPLDDECDCYACRNFSRAYIRHLFKANEILAARLATIHNLRFLVKLMEDIRDAIMQDKLLEFKSQFYQKYGYEEE

SEQ ID NO: 61692 - protein, 374 aa, Thermoanaerobacterium thermosaccharolyticum
  misc_feature (1)..(374): tr|D9TNV3|D9TNV3_THETC Queuine tRNA-ribosyltransferase OS=Thermoanaerobacterium thermosaccharolyticum (strain ATCC 7956 / DSM 571 / NCIB 9385 / NCA 3814) OX=580327 G N=tgt PE=3 SV=1
MTAIKYDLIKKEKMTKARLGVLHTPHGDIETPVFMPVGTQATVKTMTPEELKEIGARIILSNTYHLYLRPGHEVIKKAGGLHKFMNWDRAILTDSGGFQVFSLGPLRKITEDGVEFRSHLDGSRHFLTPEKVIEIENALGADIIMSFDECAPYPADYDYVKNSMEMTLRWAKRGKEAHKNIDKQALFGIVQGGTYDDLRRECANRLVDMDFPGYSIGGLSVGEEKELMYHVVDYTTDLLPQDKPRYLMGVGSPDDLIEGVIRGVDMFDCVLPTRIARNGTVLTSSGRLIVRDAPHAEEFIPLDSECDCYTCKNFSRAYIRHLFKANEILAARLATIHNLRFLTKLMEDIREAIKQDKLLEFKSQFYKKYEYKEE

SEQ ID NO: 61693 - protein, 374 aa, Thermoanaerobacterium thermosaccharolyticum; identical to SEQ ID NO: 61692
  misc_feature (1)..(374): tr|A0A223I2B7|A0A223I2B7_THETR Queuine tRNA-ribosyltran sferase OS=Thermoanaerobacterium thermosaccharolyticum OX=1517 GN=tgt PE=3 SV=1

SEQ ID NO: 61694 - protein, 381 aa, Thermoanaerobacterium xylanolyticum
  misc_feature (1)..(381): tr|F6BGK0|F6BGK0_THEXL Queuine tRNA-ribosyltransferase OS=Thermoanaerobacterium xylanolyticum (strain ATCC 499 14 / DSM 7097 / LX-11) OX=858215 GN=tgt PE=3 SV=1
MTAIKYDLLKREKNTKARLGVLHTPHGDIETPVFMPVGTQATVKAMTPEELKEIGANIILSNTYHLYLRPGHELIKKAGGLHKFMNWDRAILTDSGGFQVFSLGPLRKITEEGVEFRSHIDGSRHFLTPEKVIEIENALGADIIMSFDECAPYPADYGYVKNSMELTLRWAKRGKEAHKNTDKQALFGIVQGGTYDDLRKECANRLVDMDFPGYSIGGLSVGEEKQLMYHVVDLTTDYLPQDKPRYLMGVGSPDDLIEGVIRGVDMFDCVLPTRIARNGTVLTSTGRLIVRDAPHAEEFIPLDAECDCYTCKNFSRAYIRHLFKANEILAARLATIHNLRFLTRLMEDIRNAIKQDKLLEFKSQFYKKYGYKYFGNMSRGD

SEQ ID NO: 61695 - protein, 375 aa, Thermoanaerobaculum aquaticum
  misc_feature (1)..(375): tr|A0A062XUF9|A0A062XUF9_9BACT Queuine tRNA-ribosyltran sferase OS=Thermoanaerobaculum aquaticum OX=1312852 GN= tgt PE=3 SV=1
MGRNGTFRVVAREGFARAGELETPHGIVRTPAFMPVGTAGSVKGLAPWELARLAPEMVLANTYHLLLRPGIEVVAELGGLHRFMGWSGPILTDSGGFQVFSLAQLRRVSQEGVLFRSHIDGTEFLLTPESCMDAQRRLGVDVAMALDVCPALPASRETLEQAVKLTGLWARRCRQALPAGEGPLVFGIVQGGLELDLRRQALEALLPLDFDGYALGGFSVGEPPEAMWQAVGVLAPELPEDRPRYLMGVGTVRDILEAVAAGVDLFDCVIPTRNARNGLLHTSRGPVVVKHARYRGCPEPPDPQCTCPTCQTCSLAYLRHLYLAREAAYVVLATVHNLHFYLTLMRQVRSAIIDGRFAELRQGISADLAAAVEAS

SEQ ID NO: 61696 - protein, 377 aa, Thermobacillus composti
  misc_feature (1)..(377): tr|L0EG59|L0EG59_THECK Queuine tRNA-ribosyltransferase OS=Thermobacillus composti (strain DSM 18247 / JCM 1394 5 / KWC4) OX=717605 GN=tgt PE=3 SV=1
MAIKYELIKVCKQSGARLGRVHTPHGSFDTPAFMPVGTQATVKTVSPEELKAMDAGIILSNTYHLFLRPGHKLIERAGGLHRFMNWDRAILTDSGGFQVFSLSAMRKIKEEGVEFRSHLNGDRLFLSPELATEIQNALGSDIMMAFDECPPYPADYDYVKQSVERTSRWAERCLKAHARPDDQGLFAIVQGGMYEDLRRQSAADLTSLDFPGYAIGGLSVGEPKDVMYEVLDYTVPLLPADKPRYLMGVGSPDALIEGSIRGIDMFDCVLPTRIARNGTCMTSRGRLVVRNARYAEDFGPLDPACDCYTCRNYSRAYIRHLIKADETFGIRLTTIHNLHFLLKLMQDVRQAIMEDRLLDFRDRFFAEYGLFDNDKGF

SEQ ID NO: 61697 - protein, 382 aa, Thermobacillus sp.
  misc_feature (1)..(382): tr|A0A3E0QQP7|A0A3E0QQP7_9BACL Queuine tRNA-ribosyltran sferase OS=Thermobacillus sp. OX=2108467 GN=tgt PE=3 SV =1
MGSDNVAIKYELIKVCKQSGARLGRVHTPHGSFDTPAFMPVGTQATVKTVSPEELKAMDAGIILSNTYHLFLRPGHKLIERAGGLHRFMNWDRAILTDSGGFQVFSLSAMRKIKEEGVEFRSHLNGDRLFLSPELATEIQNALGSDIMMAFDECPPYPADYDYVKQSVERTSRWAERCLKAHARPDDQGLFAIVQGGMYEDLRRQSAADLTSLDFPGYAIGGLSVGEPKDVMYEVLDYTVPLLPADKPRYLMGVGSPDALIEGSIRGIDMFDCVLPTRIARNGTCMTSRGRLVVRNARYAEDFGPLDPACDCYTCRNYSRAYIRHLIKADETFGIRLTTIHNLHFLLKLMQDVRQAIMEDRLLDFRDRFFAEYGLFDNDKGF

SEQ ID NO: 61698 - protein, 385 aa, Thermobacillus sp.
  misc_feature (1)..(385): tr|A0A1Y3Q913|A0A1Y3Q913_9BACL Queuine tRNA-ribosyltran sferase OS=Thermobacillus sp. ZCTH02-B1 OX=1858795 GN=t gt PE=3 SV=1
MERTGSDNVAIRYELIKVCKQSGARLGRVHTPHGSFDTPAFMPVGTQATVKTVSPEELKEIGAGIILSNTYHLFLRPGHKLIERAGGLHRFMNWDRAILTDSGGFQVFSLAEMRKIREEGVEFRSHLNGDRLFLSPELATEIQNALGSDIMMAFDECPPYPADYEYVRQSVARTSRWAERCLKAHARPEEQALFGIVQGGMYEDLRRQSAADLTSLDFPGYAIGGLSVGEPKHVMYEVLEYTVPLLPADKPRYLMGVGSPDALIEGAIRGIDMFDCVLPTRIARNGTCMTSRGRLVVRNAKYAEDFGPIDPACDCYTCRNYSRAYIRHLIKADETFGIRLTTIHNLHFLMKLMQDVRQAILEDRLLDFRDRFFAEYGLFDNPHGF

SEQ ID NO: 61699 - protein, 394 aa, Thermobaculum terrenum
  misc_feature (1)..(394): tr|D1CFZ2|D1CFZ2_THET1 Queuine tRNA-ribosyltransferase OS=Thermobaculum terrenum (strain ATCC BAA-798 / YNP1) OX=525904 GN=tgt PE=3 SV=1
MDIDHTQFSFEVQATDGLARAGILTTPHGDIKTPVFMPVGTQATVKAMKPEDVDALGAQIVLSNTYHLYLRPGVEIVAKAGGLHKFMRWPKPILTDSGGFQVFSLASRREVLDEGVRFRSHIDGSEHLFTPENVIKYQEFLGADIIMAFDECAPYPADKSYVKEAMERTHRWLERCIASKTRPDQALFGIVQGGIWLDLREESALFVSSMDLPGYGIGGLSVGEDKEQMLEALSVVTAILPMDKPRYLMGVGSPEDLLNGIALGVDMFDCVLPTRNARNGALLVPTGRLNIRNAQFKEDFTPIQEDCDCYTCSNFTRAYLHHLFRAEELLAYTLATTHNLRFLVRLMDGAREAILKGEFEDYRQQFLAGFQPPDPEARKLNRERRFAGLLEETK

SEQ ID NO: 61700 - protein, 378 aa, Thermobrachium celere
  misc_feature (1)..(378): tr|R7RSS0|R7RSS0_9CLOT Queuine tRNA-ribosyltransferase OS=Thermobrachium celere DSM 8682 OX=941824 GN=tgt PE=3 SV=1
MGAIRYELIKTCKQSGARLGRLHTPHGVIETPIFMPVGTQATVKTMTPEELKEIGAQIILSNTYHLYMRPGEKLVEKAGGLHKFMNWDRPILTDSGGFQVFSLSKLRDITEEGVTFRSHIDGSKHFISPEKAIEIENALGADIIMAFDECLPYPCDYDYAKNSLYRTIRWAERCLKAHKNTEKQALFGIIQGGMYRDLREESVREMIKLDFPGYAVGGLSIGEPKDIMYEVLDWTVHLLPENKPRYLMGVGSPDALLEGVIRGVDMFDCVLPTRIARNGTVFTSKGKLVVRNAEYAEDFRPLDEECDCYACRNYTRAYIRHLFKAKEILGARLTTIHNLRFLLRLMENVRQAIMEDRLLDFKEEFFEKYGYNEGKWTF

SEQ ID NO: 61701 - protein, 373 aa, Thermoclostridium caenicola
  misc_feature (1)..(373): tr|A0A1M6G8V2|A0A1M6G8V2_9FIRM Queuine tRNA-ribosyltran sferase OS=Thermoclostridium caenicola OX=659425 GN=tgt PE=3 SV=1
MPAIRYELIKTCKQSGARLGRIHTPHGSFETPVFMPVGTQATVKGMSPDELKEIDAHIILSNTYHLFLRPGSELVRDAGGLHGFMNWDRSILTDSGGFQVFSLSDLRDITEEGVTFRSHIDGSKKFMSPEISIKTQNDLGADIIMAFDECAPYPCDFDYARKSMEMTTRWAKRCKQAHARPEDQALFGIVQGSVYPELRKESAKQITDLDFPGYAVGGLSVGEPGEVMKEMLEITVPLLPADKPRYLMGVGSPDYLIEGVIRGIDMFDCVLPTRIGRNGTVFTSSGRIIVRDAKYARDFSPMDPECDCYACRNFTRAYIRHLFKTGEILGLRLATWHNLRFLINLMSDIRQAIREDRLLDFRKEFFTRFGYPL

SEQ ID NO: 61702 - protein, 377 aa, Thermoclostridium stercorarium
  misc_feature (1)..(377): tr|A0A1B1YKD3|A0A1B1YKD3_THEST Queuine tRNA-ribosyltran sferase OS=Thermoclostridium stercorarium subsp. leptos partum DSM 9219 OX=1346611 GN=tgt PE=3 SV=1
MAAVTYELIHVCKQTGARLGRVHTPHGSFDTPVFMPVGTQATVKGMSPDELKEIGAGIILSNTYHLYLRPGHELIKKAGGLHRFMNWDRPILTDSGGFQVFSLAELRDITEEGVTFRSHIDGSKHFLSPEKSIEIQNALGSDIIMAFDECAPYPCDYEYAKKSMEMTTRWAERCLKAHKNPEKQALFGIVQGSVYEDLRRESAKQLTAMDFPGYAIGGLSVGEPGEVMMEMLEKTVPYLPENKPRYLMGVGSPDYLIDGSIRGIDMFDCVLPTRIGRNGTVFTSKGRIIIRDAKYAEDFSPIDEECDCYVCRNFTRAYIRHLFKAGEMLGLRLATWHNLRFLIRLMENIREAIRNDCLGDFRNEFFRKFGYDTKTGI

SEQ ID NO: 61703 - protein, 377 aa, Thermoclostridium stercorarium; identical to SEQ ID NO: 61702
  misc_feature (1)..(377): tr|L7VPC4|L7VPC4_THES1 Queuine tRNA-ribosyltransferase OS=Thermoclostridium stercorarium (strain ATCC 35414 / DSM 8532 / NCIMB 11754) OX=1121335 GN=tgt PE=3 SV=1

SEQ ID NO: 61704 - protein, 375 aa, Thermocrinis albus
  misc_feature (1)..(375): tr|D3SQ45|D3SQ45_THEAH Queuine tRNA-ribosyltransferase OS=Thermocrinis albus (strain DSM 14484 / JCM 11386 / H I 11/12) OX=638303 GN=tgt PE=3 SV=1
MLFRIIASCGRARRGILFTPHGEIHTPVFMPVGTQGTVKAMIHRLLEEIGTQIILGNTYHLYLRPGVEVIKKAGGLHNFISWRKPILTDSGGFQVFSLSRGRKDGRARVKVREEGVEFRDHLAGDLHFFTPELVIKIQEAFGSDIMMPLDECVEYPTTYAYAKEALERTIRWLDRSISAKERQDQALFGIVQGAFFEDLRRESALRTVERELDGYAIGGLSVGEPKNMMYDITELVCEYLPWEKPRYLMGVGLPEDLLEAIDRGVDMFDCVAPTRFARTGTLFTSYGRLNIRNERFKKDFSPPDPQCDCYTCKNFSRAYLRHLFQSEEISAYILNTIHNLYFYHKLMEGARRAIEEGRFGEYKRQWLEKLEMGVI

SEQ ID NO: 61705 - protein, 376 aa, Thermocrinis minervae
  misc_feature (1)..(376): tr|A0A1M6SKC3|A0A1M6SKC3_9AQUI Queuine tRNA-ribosyltran sferase OS=Thermocrinis minervae OX=381751 GN=tgt PE=3 SV=1
MFSFRVLKSDGSARLGELVTPHGVIKTPVFMPVGTQGTVKAMIPSLLEEVGAQIILGNTYHLYLRPGVEVVEGAGGLHRFIGWHKPILTDSGGFQVFSLSRERNDKRSSVKVLEEGVEFKDHLSGDRHFFTPEKVVQIEEALGADIIMPLDVCIEYPTTYARAKEAVELTIRWLDRSIRVKRREDQVLFAIVQGSVYEDLRLESAYMSMERDLFGYAIGGLSVGEPKEEMYRITRVVCSVLPWDKPRYLMGVGLPEDIVEAVASGVDMFDCVAPTRMARTGTLFTSQGRINIKSKIYEKDYDPPDPNCDCYTCSNFSRAYLRHLYKAEEISAYILNTIHNLRFYHRLMEDIRRSIEESRFEEFRKNFLRSWLRTSY

SEQ ID NO: 61706 - protein, 377 aa, Thermocrinis ruber
  misc_feature (1)..(377): tr|W0DFR5|W0DFR5_9AQUI Queuine tRNA-ribosyltransferase OS=Thermocrinis ruber OX=75906 GN=tgt PE=3 SV=1
MFKFEVLKADGKARRGRLYTPHGVIETPVFMPVGTQGTVKAMIHKLLEDIGTQIILGNTYHLYLRPGLEVIESAGGLHNFIGWKKPILTDSGGFQVFSLAKDRLKDGRSKVKVEEDGVYFKDHLAGDTHFFTPEFVIKAQEIFGSDIIMPLDECVEYPTTYAYAKSALERTLRWLDRSIKAKTREDQVLFGIVQGAFFEDLRRESALRTMERELFGYAIGGLSVGEPKEIMIEMAQLVCEELPWEKPRYLMGVGMPEDLLMAIGVGVDMFDCVAPTRMARTGTLFTSQGKLNIRKEIYKKDFSPPDPECDCYTCQNFSRAYLRHLFHAEEISAYILNTIHNLHFYHRLMEGARKAIEEGNFDSYRKGWLERLSVAVG

SEQ ID NO: 61707 - protein, 374 aa, Thermodesulfatator autotrophicus
  misc_feature (1)..(374): tr|A0A177E8I3|A0A177E8I3_9BACT Queuine tRNA-ribosyltran sferase OS=Thermodesulfatator autotrophicus OX=1795632 GN=tgt PE=3 SV=1
MASIFQIEKKCPQTGARTGFLFTRRGVIETPVFMPVGTQASVKTLTPEEVSGLGARIILANTYHLFLRPGHELIARHGGLHRFMNWPRSILTDSGGYQVFSLAKLCKIEEEGARFQSHLDGQEYLLTPELSMEIQAGLDSDIRMVLDTCIPYPCSYDEAKRLTELTHRWEKRSLLAWQKNHRESLVFGITQGGMFEDLRRYSARVIANFDFHGHAIGGLSVGEPHDLMIEMLEASLSELPEEKPRYLMGVGTPQDILEAVSRGVDMFDCVLPTRNARRGTLFTSFGKISLKQSRYKDDERPIDPECQCYTCRNYSRAYLRHLFMAGELLVYRLNTIHNLHFYLCFMEGIRDAIRKGRFEEFKKHYYERKEESEC

SEQ ID NO: 61708 - protein, 374 aa, Thermodesulfatator indicus
  misc_feature (1)..(374): tr|F8ACJ5|F8ACJ5_THEID Queuine tRNA-ribosyltransferase OS=Thermodesulfatator indicus (strain DSM 15286 / JCM 1 1887 / CIR29812) OX=667014 GN=tgt PE=3 SV=1
MARIFQIEKKCPQTKARTGFLFTRRGIIETPVFMPVGTQASVKSLTPEDVSGLGARIILANTYHLFLRPGHELIARLGGLHCFMNWPRSILTDSGGFQVFSLAKLCKIEEDGARFQSHLNGQEYLLTPELSMEIQAGLDSDIRMVLDTCIPYPCPYEEAKRLTELTHRWEERSRLAWQKNHRESLLFGITQGGMFEDLRRYSAKVITSLDFHGYAIGGLSVGEPHDLMLKMLEASIEELPEGKPRYLMGVGTPHDILEAVSRGVDMFDCVLPTRNARRGTLYTSFGKISIKQARYKDDDRPIDPECQCYTCRNYSRAYLRHLFMAGELLVYRLNTIHNLHFYLCFMERIRNAIRKGHFEEFKKHYYERKEEVEC

SEQ ID NO: 61709 - protein, 372 aa, Thermodesulfatator sp.
  misc_feature (1)..(372): tr|A0A432UFI4|A0A432UFI4_9BACT Queuine tRNA-ribosyltran sferase OS=Thermodesulfatator sp. OX=1874629 GN=tgt PE= 3 SV=1
MLPVFKILKKDRQTEARWGLLLTRRGAVETPVFMPVATGGTVKALPPETVAGLSARVILANTYHLWLRPGPEIIRRAGGLHRFMNWPRVILTDSGGFQVFSLAPLREILEDGVRFRSHLDGAELFLTPEKSLEIQEALDADLRMVLDVCLPYPSSREEAERFTALTHYWAERSLKWWKKRDPRGALLLGIVQGGMFEDLRRQSARTLVSLEFEGYALGGLSVGEPKETMWRMLEVTLPELPEDRPRYLMGVGTPEDILEAVARGVDMFDCVLPTRNARRGTVFTSQGTFHIRNAPYKEDFRPLDPLCDCYTCRHYTRAYLRHLFQAGELLVYYLLTLHNLAFYLRFMREIRKALREGRFAAFREEFYARKGA

SEQ ID NO: 61710 - protein, 377 aa, Thermodesulfitimonas autotrophica
  misc_feature (1)..(377): tr|A0A3N5AZU1|A0A3N5AZU1_9THEO Queuine tRNA-ribosyltran sferase OS=Thermodesulfitimonas autotrophica OX=1894989 GN=tgt PE=3 SV=1
MALRFEILKQDGAARLGRLYTPHGVVDTPVFMPVGTQGTVKAMTPEELRALGAQMILANTYHLYLRPGTEIIREAGGLHRFMHWDGPILTDSGGYQVFSLAPLRRLTAEGVIFRSHLDGSEHLFTPEKVVALQEALGSDIAMVLDECPPYPASREEVTAAVARTTAWAERSLAAQSAAQALFGIVQGGVYRDLREQSARELVALDFPGYAIGGLSVGEPKELMYQVLDWTVPLLPPEKPRYLMGVGHPDDIIEAVARGVDMFDCVLPTRLGRHGGALTPFGRLNIRNACYARDFGPLVPGCDCYACQNYSRAYLHHLVRAGEILGLRLLTTHNLHFLLKLTAEIRAAIARGELGLLRARWRERCGGNRTVLEAEGDT

SEQ ID NO: 61711 - protein, 371 aa, Thermodesulfobacteriales bacterium
  misc_feature (1)..(371): tr|A0A524JUS7|A0A524JUS7_9BACT Queuine tRNA-ribosyltran sferase OS=Thermodesulfobacteriales bacterium OX=252804 0 GN=tgt PE=3 SV=1
MFTFEIHKKDESTKARLGQMTTAHGVVDTPAFMPVATQATVKSLSPQEILDLGFQMVISNAYHLYLRPGHKTVEKLGGLHKFMSWNKSITTDSGGYQVLSLSKTRKIKDDGILFRSHLDGSEHMFTPEKCIEIQEALGVDIMMCLDECPPYPSTYEYMRKSVDLTSRWARLCKESKKRTDNALFGIVQGGVFKELRERSAHDLIDIGFEGYAVGGLGIGEESQKTYEITEHTLGILPLDKPRYLMGLGKPEDIVTAVSMGVDLFDCVIPTRNARNGTLFTSRGKLVIKNAQFAEDERPIDEGCECYTCRTFSRAYLRHLYIAKETLVLRLLTIHNLYYYAELMRGIRGSIKSCDFPNYISRVQSIEGEREN

SEQ ID NO: 61712 - protein, 381 aa, Thermodesulfobacterium commune
  misc_feature (1)..(381): tr|A0A3B8N4R9|A0A3B8N4R9_9BACT Queuine tRNA-ribosyltran sferase OS=Thermodesulfobacterium commune OX=1741 GN=tg t PE=3 SV=1
MFKFHVLYESQITQARIGMLITHRGVVETPVFMPVGTQATIKAVPPEKIASLGYRIVLANTYHLYLRPGAEVIKNLGGLHRFMSWPRLILTDSGGFQVYSLSQFRTIKEEGILFKSHLDGSEHFITPVEALEIQTKLGSDIAMVLDTCIPYPLSYEETKALTELTHRWALESFKYRQRHKNTKQAVFGIIQGGMFVDLRQKSASFITSLEFDGYAIGGLSVGEPLELRNEMIEVSVIFMPKDKPRYLMGVGTPLDIAEAVARGVDMFDCVLPTRNARRGSLFTSQGPLSIKSSRFKTDSEPIDPNCTCYTCRNFSRGYLRHLFHTKELLVYQLLTLHNLFYYAKLIEKIKQSIKQETLLNLIQELKELYLKNTQKEAVLWT

SEQ ID NO: 61713 - protein, 373 aa, Thermodesulfobacterium commune
  misc_feature (1)..(373): tr|A0A075WYG2|A0A075WYG2_9BACT Queuine tRNA-ribosyltran sferase OS=Thermodesulfobacterium commune DSM 2178 OX=2 89377 GN=tgt PE=3 SV=1
MFKFHVLYESQTTQARIGMLINHRGVVETPVFMPVGTQATIKAVPPENIASLGYRVVLANTYHLYLRPGAEVIKDLGGIHRFMRWPRLILTDSGGFQVYSLSQFRTIKEDGIIFKSHLDGSEHFITPVEALEIQTKLGSDIAMVLDTCIPYPLSYEETKALTELTHRWALESFKYRQRHKNTKQAVFGIIQGGMFVDLRQKSTSFITSLEFDGYAIGGLSVGEPLELRNEMIEVSTSFMPKDKPRYLMGVGTPIDIAEAVARGVDMFDCVLPTRNARRGSLFTSQGPLSIKSSRFKTDSEPIDPNCGCYTCRNFSKGYLRHLFHTKELLVYQLLTLHNLFYYAKLIEKIKQNIKQETLLNLIQELKELYSKTT

SEQ ID NO: 61714 - protein, 377 aa, Thermodesulfobacterium geofontis
  misc_feature (1)..(377): tr|F8C1X4|F8C1X4_THEGP Queuine tRNA-ribosyltransferase OS=Thermodesulfobacterium geofontis (strain OPF15) OX=7 95359 GN=tgt PE=3 SV=1
MFKFQILYQSRKNQARIGAIITHRGVIETPVFMPVGTQGTIKTMPPEIVSSLGYNIILSNTYHLYLRPGPDIIQELGGIHKFMNWKKLILTDSGGFQVYSLSQFRKITEEGILFKSHINGTEHFFSPIMVLEIQKKLGSDILMVLDTCIPYPLSYEETKNLTELTHKWAVESFEYWQRHKNEKQAVFGIIQGGMYEDLRRYSAKFITSLEFDGYAIGGLSVGEPLETRNQMIETSLEYMPYHKPRYVMGIGTPLDIIDAVIRGIDMFDCVLPTRNARRGTVFTSKGFLSIKNASFKSDSLPLDPECECYTCRNFSRGYLRHLFHAKELLVYFLLTLHNLFYYAKLMKHIKNAIKTETLENLREEVAQYYLKNFNDSK

SEQ ID NO: 61715 - protein, 376 aa, Thermodesulfobacterium geofontis
  misc_feature (1)..(376): tr|A0A2N7PPA2|A0A2N7PPA2_9BACT Queuine tRNA-ribosyltran sferase OS=Thermodesulfobacterium geofontis OX=1295609 GN=tgt PE=3 SV=1
MFKFEVHYQSKKTQARIGTIVTHRGVIETPVFMPVGTQGTIKAMPPEVVNSLGYEIILSNTYHLYLRPGVDIIKELGGIHKFINWKKIILTDSGGFQVYSLSQFRKITEEGIIFKSHIDGTEHFFSPVTTMEIQKKLRSDIMMVLDTCIPYPLSYEETKNLTELTHKWAIESFEYWQRHKNEKQAVFGIIQGGMYEDLRKYSAKFVTSLEFDGYAIGGLSVGEPLELRNHMIEISIEYMPYNKPRYVMGIGTPLDIIDAVIRGIDMFDCVLPTRNARRGTVFTSKGLLSIKNANLKDDSSPLDPECECYTCRNYSRGYLRHLFHAKELLVYFLLTLHNLFYYAKLMRHIKEAIKNETLEIFREELAEYYFKNNSSE

SEQ ID NO: 61716 - protein, 371 aa, Thermodesulfobium acidiphilum
  misc_feature (1)..(371): tr|A0A2R4VYA5|A0A2R4VYA5_9FIRM Queuine tRNA-ribosyltran sferase OS=Thermodesulfobium acidiphilum OX=1794699 GN= tgt PE=3 SV=1
MRENLIMIKEKFTQKNIGKFNFRIEENSSFFQLFSNTRIRQGQLNIRGKIAKTPLFMPVATRGTVRALTPSQLKEIGFEMILSNTYHLHERPGEEVINKLGGLHKFMNWDGLILTDSGGYQVFSLSNYRRVTDDGVVFRSILDGKEIFFTPEKVLEIQKKLNSDVAIFLDECPEYPCNAKREEESLKRTIKFAERSIKVEKNPGQLFFGVVQGGMNFKLRQECAQALLSLGVDGLAIGGLSIGEEPSLTKEVLLATLEVIPPGKPRYLMGVGSDILEYIKMGIDMFDSVFPTRIARHGSAILYNKGRINISNKRFKEDESPLDRNCDCYTCRNFSRAYLRHLFVCDELLGKTLLSIHNLTVLYKTVRALNS

SEQ ID NO: 61717 - protein, 367 aa, Thermodesulfobium narugense
  misc_feature (1)..(367): tr|M1E734|M1E734_9FIRM Queuine tRNA-ribosyltransferase OS=Thermodesulfobium narugense DSM 14796 OX=747365 GN=t gt PE=3 SV=1
MIMIRENFVQENMEKFSSQSKNCSSFFQLISNKGIRQGQFNIRGKVAKTPLFMPVATRGTVRGVSPSQLKEIGFEMILANTYHLHERPGEEVISKLGGLHRFMNWDGLILTDSGGYQVFSLSNYRKVTDEGVVFRSVLDGKEIFLTPEKVLEIQKKLNSDIAIFLDECPEYPCSAKREEESLIRTLKFAQSSIKVEKNPGQLFFGVVQGGMNFKLRQECVHALLSLGVDGLAIGGLSVGEEPSLTKEVLLATLEVIPPDKPRYLMGVGSDILEYIKMGVDMFDSVFPTRIARHGSAILYNKGRINISNKRFKEDESPLDEDCDCYTCRNFSRAYLRHLFVCGELLGKTLLSIHNLTVLYKTVRALNS

SEQ ID NO: 61718 - protein, 381 aa, Thermodesulforhabdus norvegica
  misc_feature (1)..(381): tr|A0A1I4SAZ4|A0A1I4SAZ4_9DELT Queuine tRNA-ribosyltran sferase OS=Thermodesulforhabdus norvegica OX=39841 GN=t gt PE=3 SV=1
MDRVFSFSVLNKDPSCNARLGRLHTAHGSVDTPVFMPVGTQATVKSLDPEDLQKMNCRIILGNTYHLYLRPGTEVISRFGGLHGFMGWDGAILTDSGGFQVFSLAKIREISEEGVLFHSHIDGSRHMMTPEKAIEIQEILGSDIAMSFDECTPYPVDREYARLSMERTLRWAIRGKKRHGKVDQALFGIVQGSVFADLRMECLERLVEIGFDGYALGSLSVGEPKEMMLEVLEKTLPQFPEDAPRYLMGVGTPEDIVEGVRLGVDMFDCVLPTRNARNGTLFTSFGRINIKNSAYVVDGSPVDPECDCYTCRKFSRAYLRHLYVSRELLAYRLNTIHNVHYYLSLMEKIREAITKGNFMEWRKEFYAKRWEQNEAELHFRG

SEQ ID NO: 61719 - protein, 379 aa, Thermodesulfovibrio aggregans
  misc_feature (1)..(379): tr|A0A0U9HN10|A0A0U9HN10_9BACT Queuine tRNA-ribosyltran sferase OS=Thermodesulfovibrio aggregans OX=86166 GN=tg t PE=3 SV=1
MQFKILKKDGFARTALLETKRGVIHTPAFMPVGTNGTVKAMTPEEVRDIGYEIILSNTYHLYLRPGHETIKEIGGIHRFINWQGPILTDSGGFQIYSLASLRKITSEGVEFRSHIDGSLHFISPERAIEIQIALGSDIMMVFDECVPYPAEKQYVEKSIKLTKDWAERCKNYFEKQRTNQSLFGIIQGGVYDDLREKSLEEIVKIGFDGYAIGGLSVGEPKEDMYRVVKNVTPLMPEDKPRYLMGVGDLIDVLHAVEHGIDMFDCVMPTRNARNGTLFTSRGRISIKRSEFKDDSTALDPECDCYTCRNYTKAFLRHLYMCREILSMRLNTIHNLYFYCKFFEKMRTAIAEGRFQDFKKEWLPVLEKNFSSEPDDFHHS

SEQ ID NO: 61720 - protein, 372 aa, Thermodesulfovibrio aggregans
  misc_feature (1)..(372): tr|A0A2J6WJG3|A0A2J6WJG3_9BACT Queuine tRNA-ribosyltran sferase OS=Thermodesulfovibrio aggregans OX=86166 GN=tg t PE=3 SV=1
MQFKILKKDGFARNAIIETKRGIINTPVFMPVGTNGTVKAMTPEEIWEIGYEIILSNTYHLYLRPGHEIIKKLGGIHKFINWHGPILTDSGGFQIYSLASLRKITPQGVEFRSHIDGSLHFITPEKAIEIQLALGSDIMMVLDECVPYPAEKEYVKKSLKLTEDWAKRCKDYFEKHRNDQALFGIIQGGIYEELRQKAMEGIVKIDFDGYALGGLSVGEPKEDMYRVIKNIAHLMPEEKPRYLMGVGDLMDVLHAVEHGIDMFDCVIPTRNARNGTLFTSQGRISIKRSEFKEDNSPLDPDCDCYTCRNYTKAFLRHLYMCREILSMRLNTIHNLYFYCRFFEKMREAIAEGRFQDFKKQWIPVLEKNFSPE

SEQ ID NO: 61721 - protein, 373 aa, Thermodesulfovibrio sp.
  misc_feature (1)..(373): tr|A0A1C3FDD4|A0A1C3FDD4_9BACT Queuine tRNA-ribosyltran sferase OS=Thermodesulfovibrio sp. N1 OX=1871110 GN=tgt PE=3 SV=1
MQFKILKKDGYARAGIIESERGVVHTPCFMPVGTNGTVKAMTPEELSMIGYEIILSNTYHLYLRPGHEIIKKLGGIHKFINWKLPILTDSGGFQIYSLSSLRKINTEGVEFRSHLDGSLHFLTPEKSIEIQQALGSDIMMVLDECIPYPSEKEYVEKSLQLTTEWAKRCKEHFEKNKTSQAIFGIVQGGFYIELRNKALKELLKIGFDGYALGGLSVGEPKEEMYQIIKNMAPVMPEDKPRYLMGVGDLMDVLYAVEWGIDMFDCVMPTRNARNGTLFTSQGRISIKRTEFKEDPLPLDPACDCYTCKNYSRAYLRHLYMCREILSMRLNTIHNLYFYCQFFRKMREAIKKGEFQIFKSQWLPILEKNACFKE

SEQ ID NO: 61722 - protein, 388 aa, Thermodesulfovibrio sp.
  misc_feature (1)..(388): tr|A0A1G3Y2Q2|A0A1G3Y2Q2_9BACT Queuine tRNA-ribosyltran sferase OS=Thermodesulfovibrio sp. RBG_19FT_COMBO_42_12 OX=1802373 GN=tgt PE=3 SV=1
MKFNTIKTDGNARAGLIETDRGKIHTPAFMPVGTLGTVKAMSPDELKEMGAEIILCNTYHLYLRPGHEVISVLGGIHKFMNWDRPILSDSGGFQVFSLSALRKIEENGVYFKSHLDGSMHFIGPKEAMEIQSLLGSDIAMVLDDCTPFPSTYEYASESLERTIKWAKECKEYHEKMKDVGQIPPNPPLLKGGERGLYNHESVRQLFGIIQGSLFEDLRKKSAEELQNIGFDGYAVGGLSVGEPKEEMHRMIYFTAPLLPAEKPRYLMGIGELKDVLAAVEAGFDMFDCVMPTRNARNGTLFTSSGKISIKREEFKADRGPLDPVCNCYTCRNYSRGYLRHIFLSKEILSMRLNTIHNLYFYFNFFRNMRKSIIEGIFTEFKTKWEAIL

SEQ ID NO: 61723 - protein, 383 aa, Thermodesulfovibrio yellowstonii
  misc_feature (1)..(383): sp|B5YHX4|TGT_THEYD Queuine tRNA-ribosyltransferase OS= Thermodesulfovibrio yellowstonii (strain ATCC 51303 / D SM 11347 / YP87) OX=289376 GN=tgt PE=3 SV=1
MRFKILQKDGLARTGIIETQRGIIHTPAFMPVGTNGTVKAMTPEEVRQIGYEIILSNTYHLYLRPGHETIKMIGGIHKFINWHCPILTDSGGFQIYSLASLRKITLEGVEFRSHIDGSLHFINPEKAIDIQLALGSDIMMVLDECIPYPADEEYVEKSIKLTTEWAKRCKEHFEKQDTYQALFGIIQGGVFSDLRIRALEELLKIDFHGYAIGGLSVGEPKTDMYKIVKDISPLMPEDKPHYLMGVGDLIDVLHAVEHGIDMFDCVIPTRNARNGTLFTSQGRISIKRSEFKEDLSPLDPDCDCYTCKNYSRAFLRHLYTCREILSMRLNTIHNLYFYCRFFEKMRQAIAERRFQEFKKEWLPVLEKNFYQESNDFHHSLENY

SEQ ID NO: 61724 - protein, 377 aa, Thermoflavifilum aggregans
  misc_feature (1)..(377): tr|A0A2M9CXD0|A0A2M9CXD0_9BACT Queuine tRNA-ribosyltran sferase OS=Thermoflavifilum aggregans OX=454188 GN=tgt PE=3 SV=1
MAIGFHIVQEDVHTRARAGCITTDHGMIETPIFMPVGTAGAVKTLLQQQLDQDLQAPIILGNTYHLYLRPGTDVLQQAGGLHRFMHWNGALLTDSGGYQVFSLAKIRKITEEGVWFQSHIDGSKHFFSPQRVMEIQRRIGADIVMAFDECTPYPCTHAYARASLQLTHRWLDVCLACFQEQGLYGYSQTLFPIVQGSVYADLRRASAEYIAAKETAGYAIGGLSVGEPEQMMYEMTALVNEILPTGKPRYLMGVGTPWNILESIALGVDMFDCVMPTRNGRNGMLFTWQGIINIRNKKWATDFSVIDEYTTGPVSTYYSKAYLRHLFVSNEISGLQIATLHNLSFYLQLVREARKHILQGDFLSWKNEIIPRLKSRL

SEQ ID NO: 61725 - protein, 378 aa, Thermoflavimicrobium dichotomicum
  misc_feature (1)..(378): tr|A0A1I3R789|A0A1I3R789_9BACL Queuine tRNA-ribosyltran sferase OS=Thermoflavimicrobium dichotomicum OX=46223 G N=tgt PE=3 SV=1
MAIRYELIKECKQSGARLGRIHTPHGTIDTPIFMPVGTQATVKTMSPEELKEMGAQIILSNTYHLFLRPGHEIVKEAGGLHSFMNWDRAILTDSGGFQVFSLSQFRNITEEGVTFRSHLSGEKLFISPEKAMEIQNALGSDIMMAFDECPPYPAEREYVEESTERTYRWAKRCIEAHQRPDEQALFGIVQGGMYQDLRERSAKQLVELDLPGYAVGGLSVGEPKELMYEVLSYTTPLLPKDKPRYLMGVGSPDALIHGVIHGIDMFDCVLPTRIARNGTTMTSQGRLVIRNAKFARDFTPLDPACDCYTCRNYTRAYLRHLIKADETLGIRLTTYHNLYFLLRLMEKIRQAIREDRLLDFRDEFMLQYYGSLTPQSAF

SEQ ID NO: 61726 - protein, 378 aa, Thermoflavimicrobium sp.
  misc_feature (1)..(378): tr|A0A364K8J2|A0A364K8J2_9BACL Queuine tRNA-ribosyltran sferase OS=Thermoflavimicrobium sp. FBKL4.011 OX=213747 6 GN=tgt PE=3 SV=1
MAIRYELIKECKQSGARLGRIHTPHGTIDTPIFMPVGTQATVKTMSPEELKEMDAQIILSNTYHLFLRPGHEIVKEAGGLHSFMNWDRAILTDSGGFQVFSLSQLRKITEEGVSFRSHLSGEKLFIGPEKAMEIQNALGSDIMMAFDECPPYPAEREYVEASTERTYRWAKRCIAAHQRPDEQALFGIVQGGMFRDLRERSARQLVDLDLPGYAVGGLSVGEPKELMYEVLSYTTPLLPKDKPRYLMGVGSPDALIQGAIYGIDMFDCVLPTRIARNGTTMTSQGRLVIRNAKFARDFTPLDPNCDCYTCRNYTRAYLRHLIKADETLGIRLTSYHNLYFLLKLMKQVRRAIQEDRLLDFQNEFMLQYYGSLTPQTAF

SEQ ID NO: 61727 - protein, 342 aa, Thermoflexia bacterium
  misc_feature (1)..(342): tr|A0A3M1E2T4|A0A3M1E2T4_9CHLR Queuine tRNA-ribosyltran sferase OS=Thermoflexia bacterium OX=2420334 GN=tgt PE= 3 SV=1
MPVGTQATVKAMSPRDLKDVGATMILANTYHLYLRPGDERIARLGGLHRFMAWDGPILTDSGGYQVFSLARMRRVDADGVTFRSHIDGSEHRFTPEKVIAIQENLGADIITCLDECAPPTDYEYNLQALERTHAWAQRCREAHRRDDQALFGIVQGGVFPDLRERSARFITGLGFDGYAIGGLSVGEPKEQTYAVLEWMDDLLPADRPRYLMGVGTPQDLVEGVARGVDMFDCVLPTRMGRNGGALTRWGRINLRNARYAEDPSPLLPDCTCYTCIHFSRAYLRHLILANEILGAHLLTLHNLYLMLTIAREIREAILAGRFTAYREEHESQRAREEPEELS

SEQ ID NO: 61728 - protein, 376 aa, Thermoflexibacter ruber
  misc_feature (1)..(376): tr|A0A1I2E8U5|A0A1I2E8U5_9BACT Queuine tRNA-ribosyltran sferase OS=Thermoflexibacter ruber OX=1003 GN=tgt PE=3 SV=1
MKFELQATDIQSKARAGIITTDHGTIQTPIFMPVGTVGTVKAVHQRELEQDIKAQIILGNTYHLYLRPKLDIIEKAGGLHKFNGWSRSILTDSGGYQVYSLAANRKIKEEGVIFQSHIDGSKHLFTPENVMDIQRTIGADIIMAFDECPPYPCEYQYAKNSMELTHRWLRRCCERFDSTEGKYGYSQTLFPIIQGSTFKDLRVQSAETIASFEREGNAIGGLSVGEPVEEMYAMTELVCDILPKDKPRYLMGVGTPANILEAITLGVDMFDCVMPTRNARNGMIFTSQGILNMKNEKWKDDLSPLDPTIGGYVSTFYSKAYLRHLIVSGELLGGQIASIQNLTFYLWLVRQAREHILAGDYRTWKDYMVKQVMQRL

SEQ ID NO: 61729 - protein, 385 aa, Thermoflexus hugenholtzii
  misc_feature (1)..(385): tr|A0A2A9HG93|A0A2A9HG93_9CHLR Queuine tRNA-ribosyltran sferase OS=Thermoflexus hugenholtzii OX=1495650 GN=tgt PE=3 SV=1
MTAAAAFRFELTTRPAGPVAPRTGRLHTAHGIVETPVFMPVGTLATVKTLLPAEVAETGASIILVNAYHLYLRPGHRLIERLGGVHRFMRWDRPILSDSGGFQVFSLASLRKVTEDGVRFRSHIDGSEHHYTPELAMEVQQALGVDIAMPLDHVVPGDAPYEAAAEAVQRTLRWYRRCREAAPGLPTFAIIQGGTHPALRRYHAREALQAEPPGFSIGGLSVGEPKARMWETVELTNAELPIERPRYLMGVGSPEDLVEGIARGIDMFDCVLPTRLGRNGALFTDTGRLTIRNAANREVDAPPDPVCDCLACRQFSLAYLHHLFRNDELLGHRLATHHNLRYLARLVERARQAIRDGSFEQFRREFLARYRTADEEARLASRRRM

SEQ ID NO: 61730 - protein, 393 aa, Thermoflexus hugenholtzii
  misc_feature (1)..(393): tr|A0A212QX79|A0A212QX79_9CHLR Queuine tRNA-ribosyltran sferase OS=Thermoflexus hugenholtzii JAD2 OX=877466 GN= tgt PE=3 SV=1
MRSAQPEPWQSSGDETMRAEPIRFTLLARDGRARAGFLDTPHGRIPTPCFAPVGTQGAVKTVPAWDLEALGAKLILANTYHLYLRPGDERIARLGGLHRFMGWDGPILTDSGGFQIFSLQGLREVDDDGVTFRSHLDGSLHRFTPEKAIRIQENLGADLIMCLDECPPPLDYDYNVRALERTHRWAERCRAAHTRPDQALFGIVQGGVFEDLRTRSARFLIGLDFPGYAIGGLSVGEPKALTYRVLELMDALLPEEKPRYLMGVGTLLDFVEAVARGVDLFDCVMPTRVARHGTAITRTGRLNLRNALYAEDPRPIDETCGCPTCGRFSRAYLRHLFNVGEPLAMYLTTLHNLYTMFRFMEDMRQAILEGRFAEFRAAVLEAHAALAPEEADR

SEQ ID NO: 61731 - protein, 412 aa, Thermogemmatispora argillosa
  misc_feature (1)..(412): tr|A0A455T141|A0A455T141_9CHLR Queuine tRNA-ribosyltran sferase OS=Thermogemmatispora argillosa OX=2045280 GN=t gt PE=3 SV=1
MDVLAARSGPFAFTIEVENPPVPSASTWARACTLQTPHGTIQTPMFMPVGTQATVKCLTPEEVQAAGAQIILANTYHLMLRPGSQLIDSFGGLHHFMRWPGPILTDSGGFQVFSLGHLRTLTEEGVTFKSHLDGSLHLLTPERGLQIEAELGADFVLPLDICSGYPCSPQEARTAMERTHRWAMRALEAFYKHPHRPERPQALFGIVQGAFEPELRQESARFIGSLPFFGLSIGGLSVGEPKALMWELLRVTTPALPREKPRHLLGVGSPEDLIMGIDLGMDLFDCVLPTRVARHGGLFTRRGRVNIKRARFRAERGPVEEGCDCYTCRNYSAAYLHHLARAEEQLYYRLGSIHNLRFMLRLAAEARAAILAGTFPAFRDAFLASYVPASETAREEQRAKWLARAAARALSS

SEQ ID NO: 61732 - protein, 398 aa, Thermogemmatispora tikiterensis
  misc_feature (1)..(398): tr|A0A328VJY5|A0A328VJY5_9CHLR Queuine tRNA-ribosyltran sferase OS=Thermogemmatispora tikiterensis OX=1825093 G N=tgt PE=3 SV=1
MDVENPPVPSAPTWARACTLQTPHGQIQTPIFMPVGTQATVKCLTPEEVQATGAQIILANTYHLMLRPGSELIDSFGGLHAFMRWPGPMLTDSGGFQVFSLGHLRTLTEEGVTFKSHLDGSLHLLTPERGLQIEAELGADFVLPLDICSGYPCTPQEARQAMERTHRWALRALEAFTQRPHRPERPQALFGIVQGAFEPELRQESARFIGSLPFFGLSIGGLSVGEPKALMWELLRATTPALPREKPRHLLGVGSPEDLIMGIDLGMDLFDCVLPTRVARHGGLFTRRGRVNIKRARFRTEHGPVEEGCDCYTCRNYSAAYLHHLARAEEQLYYRLGSIHNLRFMLRLAAEARAAILAGTFPAFRDAFLASYVPASETAREEQRVKWLARMASRATSS

SEQ ID NO: 61733 - protein, 386 aa, Thermogutta terrifontis
  misc_feature (1)..(386): tr|A0A286RFV1|A0A286RFV1_9PLAN Queuine tRNA-ribosyltran sferase OS=Thermogutta terrifontis OX=1331910 GN=tgt PE =3 SV=1
MSTVGGEIFSVVRTDSQTLARCGILRTAHGIVHTPAFMPVGTQATIKGLLPHLVEGTGTEIILSNTYHLLLRPKPETVAALGGLHRFMGWHKPILTDSGGFQVFSLAQLTRIEERGAVFRSHLDGSLVELTPERAIEVQELLGSDIAMVLDHVVALPNERSVIEDAMERSLRWAERCQKAHQRKDQWLFGIVQGGLEPDLRLRCVEELVQMGFDGYAIGGLSVGEPPAEMYRILDVVAPSLPAERPRYLMGVGRPIDLLEAIARGVDLFDCVMPTRNGRNAMAFTEAGPLRMRNACHERDPRPMDPTCPCLACTFSRGYIRHLFMAREMLGPILVSLHNIAFYQRLLRQARAAIEAGSFGDFLEEKRATWSRTTMEDEDELENRSS

SEQ ID NO: 61734 - protein, 373 aa, Thermohalobacter berrensis
  misc_feature (1)..(373): tr|A0A419TB14|A0A419TB14_9CLOT Queuine tRNA-ribosyltran sferase OS=Thermohalobacter berrensis OX=99594 GN=tgt P E=3 SV=1
MMAVKYELIKKSNECNARLGRLHTPHGIVETPIFMPVGTKATVKTMTPEELKEIGAQIILSNTYHLYLRPGHDLVEEAGGLHKFMNWDKPILTDSGGFQVFSLGDLRKITEEGVEFRSHLDGSKHFISPEKSIEIQNSLGADIIMAFDECPPYPSDRDYVKKSLERTTRWAKRCKDAHKNPETQALFGIVQGGMYKDLREQSAKEIIDLDFPGYAIGGLSVGEPKEIMYEVLDYTAPLLPEDKPRYLMGVGSPNYLFEGVIRGIDMFDCVLPTRIARNGTVLTSHGRLVVRNAEYARDFSPLDPECDCYACKNYTRAYIRHLFKANEILAARLATIHNLYFLLKLMENIRKAIKEDRLLEYREEFYKKYGYIK

SEQ ID NO: 61735 - protein, 374 aa, Thermohydrogenium kirishiense
  misc_feature (1)..(374): tr|A0A4R4AA09|A0A4R4AA09_9FIRM Queuine tRNA-ribosyltran sferase OS=Thermohydrogenium kirishiense OX=937254 GN=t gt PE=3 SV=1
MTAIKYDLIKKEKMTKARLGVLHTPHGDIETPVFMPVGTQATVKTMTPEELKEIGARIILSNTYHLYLRPGHEVIKKAGGLHKFMNWDRAILTDSGGFQVFSLGPLRKITEDGVEFRSHLDGSRHFLTPEKVIEIENALGADIIMSFDECAPYPADYDYVKNSMEMTLRWAKRGKEAHKNIDKQALFGIVQGGTYDDLRRECANRLVDMDFPGYSIGGLSVGEEKELMYHVVDYTTDLLPQDKPRYLMGVGSPDDLIEGVIRGVDMFDCVLPTRIARNGTVLTSSGRLIVRDAPHAEEFIPLDSECDCYTCKNFSRAYIRHLFKANEILAARLATIHNLRFLTKLMEDIREAIKQDKLLEFKSQFYKKYGYKEE

SEQ ID NO: 61736 - protein, 372 aa, Thermoleophilia bacterium
  misc_feature (1)..(372): tr|A0A2G4H4G5|A0A2G4H4G5_9ACTN Queuine tRNA-ribosyltran sferase OS=Thermoleophilia bacterium OX=2026888 GN=tgt PE=3 SV=1
MSTPGDFSVQATDGKARAATLVTAHGAIQTPVFMPVGTLGTVKGVDPDELKTIGTQILLGNTYHLHLKPGEDLIAELGGLHRFMAWDGPILTDSGGFQVFSLADTRTIDDDGVSFRSVYDGDLVRLRPEDAMAIQAALGSDIAMCLDEVPKPDAPLAELAVAVERTTRWAARCKATTPAPGQLRFGIVQGGVEPALRERSATDLLEIGFDGYAIGGLAVGEEREATFRITDSTAALLPVDRPRYFMGIGDPEGILRVIAAGVDMFDCVLPTRLGRTGAAMTSNGRLNMRNAAFARDPDPLDPRCECPTCQRFSRAYIRHLVMQKELLGMRLLSVHNIAFLLALCTAAREAIIEQRFDAFLATSLERLMTGAD

SEQ ID NO: 61737 - protein, 420 aa, Thermoleophilum album
  misc_feature (1)..(420): tr|A0A1H6FK35|A0A1H6FK35_THEAL Queuine tRNA-ribosyltran sferase OS=Thermoleophilum album OX=29539 GN=tgt PE=3 S V=1
MLADRPTARADGPRLRFVVEARDGDARAGLLQLRHATIATPVFVPLASAATVRTLDFDDVERLGYRLLLGNTFLLMLRPGAELVARFGGLREFSGWQGAFITDSGGFQVFSLGHGSVADEIKGSRSRPAGERLLLGIDERGARFRSYVDGSEQLLTPERSMAVQAALASDIALAFDECTPFHAGREYTERALERTNRWLDRCIAWQRANAPSWQALYGIVQGGVWEDLRERSKAHLLTSDIDGIAIGGSLGRDKQQMRQVVAWSVRDLPDALPRHLLGIGDVEDLLDAVALGIDSFDCATPTRLARHGTALVPEPARRFRLDLAKAASRDDARPLVEGCPCTVCARHTRAYLHYLVRAGEPSAGRLLTLHNLAFMEALMSGIRAAIREGRFQQYRAAVLAGEEPFGGRCAAPGERPHTAG

SEQ ID NO: 61738 - protein, 379 aa, Thermolongibacillus altinsuensis
  misc_feature (1)..(379): tr|A0A4R1QG77|A0A4R1QG77_9BACI Queuine tRNA-ribosyltran sferase OS=Thermolongibacillus altinsuensis OX=575256 G N=tgt PE=3 SV=1
MTPIRYELIKTCKQTGARLGILHTPHGSFETPMFMPVGTLATVKTLSPEELKEMGAGVILSNTYHLWLRPGHEIVKEAGGLHKFMNWDRGILTDSGGFQVFSLSEFRRIEEEGVYFRNHLNGDKLFLSPEKAMEIQNALGSDIMMAFDECPPYPATYEYMKQSVERTSRWAERCLKAHKRPNEQGLFGIVQGGEFEDLRKQSAQDLVSLDFPGYAVGGLSVGEPKEVMNRVLEFTTPLLPANKPRYLMGVGSPDSLIDGAIRGIDMFDCVLPTRIGRNGTVMTSEGRVVIKNAKYARDFSPLDPNCDCYTCRNYTRAYIRHLIKCDETFGIRLTSYHNVYFLIKLMEQVRQAIREDRLGDFREEFFERYGFNKPNAKNF

SEQ ID NO: 61739 - protein, 391 aa, Thermomicrobiales bacterium
  misc_feature (1)..(391): tr|A0A524J218|A0A524J218_9CHLR Queuine tRNA-ribosyltran sferase OS=Thermomicrobiales bacterium OX=2482790 GN=tg t PE=3 SV=1
MTAPYVGRAARYEVTTAAPTDGSTRARSGRLTLTHGIVETPQFMPVGTNATVKALSPDDIRATGASIILSNTYHLYLRPGHDRIARLGGLHQFMAWDGPILTDSGGYQVVSLGDLRVVDDDGVTFRSHLDGSTHRFTPELATEVQEALGSDIAVAFDQPVFPSSPREMVADATDRTHRWAERSLAAHTREDQAIFGIVQGGLDPDLRAASTRTIAALPFDGICIGGLAGDETPAQRDATLDIAIPILADDPRPRYLMGLGSPADLLEAVHRGIDLFDSVLPARVARNGQLWVPGGRLNLRNQRFLDDSSPVQEDCPCILCQHHSRAYLAHLFRARELLAYRLATCHNLTFTLDFMARIRAAIRSGTFPVAMPGLRAHAGRISGGEGAAMSA

SEQ ID NO: 61740 - protein, 387 aa, Thermomicrobiales bacterium
  misc_feature (1)..(387): tr|A0A5C7JCQ6|A0A5C7JCQ6_9CHLR Queuine tRNA-ribosyltran sferase OS=Thermomicrobiales bacterium OX=2482790 GN=tg t PE=3 SV=1
MGATAGDFSFDLVATDPRSRARCGCVYTRKGPIQTPVFMPVGTQATVKTLHPHEVERIGAQIVLANTYHLMLRPGSELIDMAGGLHAFMRWDRPILTDSGGFQIFSLAQQARVTEEGVQFRSHIDGSLHMLTPERAVDIQAQLGSDIMMALDHLIGLPAKPRKIFDATMRTHRWLDRCVSALAESDRSRKGVLFGICQGGMEPDLRRLSAQCVAAADVSGVAVGGLSVGETKAEMAEMLDIVVPELPECKPRYLMGVGSPEDLWNGVAQGIDMFDCVLPTRLARNGSVFTPDGRIDILHRSHRASFIPIDQDCDCATCQQFDRAYLHHLFRAREILGLRLASVHNLRFLVRQMESMRPAILNGTFGSARAAFLDRYRVAGPRIGSNA

SEQ ID NO: 61741 - protein, 430 aa, Thermomicrobium roseum
  misc_feature (1)..(430): tr|B9KZ97|B9KZ97_THERP Queuine tRNA-ribosyltransferase OS=Thermomicrobium roseum (strain ATCC 27502 / DSM 5159 / P-2) OX=309801 GN=tgt PE=3 SV=1
MLLVRPPRQPCAILDRQGIPNRETNGATPLIEGIDEQGMNGKGRFRIIARDMATMARRGVLHTRRGPVQTPAFMPVGTQATVKSLTPEEVRATGSEIVLANTYHLFLRPGLEVLETVGGLHAFMGWDGPILTDSGGFQVYSLAQLRDVTERGVRFRSHIDGSLRELTPEIVIELQMLFGSDVLMPLDDVVGFSESDERQQEAMARTHRWLQRSLHRFQELTAAFAEEKRPLLFGIVQGGFDPSRRVESAHFVASLPVDGLAIGGLSVGEPKDLLYAMLDATAGELPDDRPRYLMGVGAPDDLWRAVAYGIDLFDCVLPTRLARHGALFTPTGRVDITGARFRLHTSPVDETCDCYTCRRFSAAYLHHLFRARELLGYRLATIHNVRFLQRQMETMRRAIEEGTFAAHMERFLSSYEASTALTSSDRLVNG

SEQ ID NO: 61742 - protein, 375 aa, Thermomonas haemolytica
  misc_feature (1)..(375): tr|A0A4R3MZH1|A0A4R3MZH1_9GAMM Queuine tRNA-ribosyltran sferase OS=Thermomonas haemolytica OX=141949 GN=tgt PE= 3 SV=1
MSRMEFQLLKTDGAARRGRITFPRGVIETPAFMPVGTYGSVKGVLPQQVRELGAQIILGNTFHLFLRPGLEVIAAHGGLHGFARWDGPILTDSGGFQVFSLAHRRKITEAGVTFAAPTDGRKVFLGPEESMRIQKVLGSDIVMIFDECPPVNDKHGQPVHRRVVEKSMELSLRWAERSKKAHEGNDAALFGIVQGGVHHDLRTRSAEGLQQIGFDGYAVGGLAVGESEDERNAMLDHTCPQLPADRPRYLMGVGRPEDLVEAVARGIDMFDCVMPTRNARNGHFFTATGVVRVRNSQYEHDLRPIEEGCDCVACAGGFSRSYLRHLDRCNEMLGPVLGTLHNLRYYQRLMAQMREAIAAGTFADFRESFHAMRRP

SEQ ID NO: 61743 - protein, 378 aa, Thermomonas hydrothermalis
  misc_feature (1)..(378): tr|A0A1M4UCU6|A0A1M4UCU6_9GAMM Queuine tRNA-ribosyltran sferase OS=Thermomonas hydrothermalis OX=213588 GN=tgt PE=3 SV=1
MSRMRFTLLGSDGAARRGRISFPRGEVETPAFMPVGTYGSVKGVLPQQVRDLGAQIILGNTFHLFLRPGLEVIEAHGGLHGFARWDGPILTDSGGFQVFSLAHRRKITEDGVTFAAPTDGRKVFLGPEESMRIQKVLGSDIVMIFDECPPVHGKDGQPVHRRVVEKSMELSLRWAERSKRAHEGNDAALFGIVQGGVHPDLRTRSAQGLLQIGFDGYAVGGLAVGESEDERNAMLDHTCPQLPSDRPRYLMGVGRPEDLVEAVARGIDMFDCVMPTRNARNGHYFTAAGVVRVRNAKYEHDLRPIEEGCDCVACAGGFSRAYLRHLDRCNEMLAPILGTLHNLRYYQRLMAQMRDAIAARQFQAFREAFYAARRGAQT

SEQ ID NO: 61744 - protein, 374 aa, Thermomonas sp.
  misc_feature (1)..(374): tr|A0A5B7ZS97|A0A5B7ZS97_9GAMM Queuine tRNA-ribosyltran sferase OS=Thermomonas sp. SY21 OX=2202149 GN=tgt PE=3 SV=1
MSRMDFELLGTDGAARRGRITFPRGTIETPAFMPVGTYGSVKGVLPHQIEDLGAEIILGNTFHLFLRPGLDVIEAHGGLHGFARWDRPILTDSGGFQVFSLAHRRKITEAGVTFAAPTDGSKVFLGPEESMHIQKVLGSDIVMIFDECPPVTVDGQPVDKRVVERSMELSLRWAARSKIAHEGNDAALFGIVQGGVHHDLRSRSAEGLRGIGFDGYAIGGLAVGETEAERNAMLDHTAPQLPEDRPRYLMGVGRPEDLVEAVARGVDMFDCVMPTRNARNGHFFTSTGTIRIRNAQYERDLRPIEEGCDCYSCAGGFSRSYLRHLDRCNEMLAPMLGTLHNLRYYQRLMAQIRAAIETGTFAAFRESFYAARRA

SEQ ID NO: 61745 - protein, 376 aa, Thermophagus xiamenensis
  misc_feature (1)..(376): tr|A0A1I2AD51|A0A1I2AD51_9BACT Queuine tRNA-ribosyltran sferase OS=Thermophagus xiamenensis OX=385682 GN=tgt PE =3 SV=1
MQYQIEKRDPKSSARSGKIFTDHGEIPTPIFMPVGTVGTVKGIHVKDLEEEVNAPIILGNTYHLYLRPGLEVLKEAGGLHQFMGWNRSILTDSGGFQVFSLSERRKLTEKGAEFRSHLDGSKHLFTPESVVDIQRTIGADIMMAFDECPSGDAPYSYAVQSMELTHRWLKRGIEQFKKSNPLYGYEQTFFPIVQGAGYAELRKRSAEYVASFDMDGNAIGGLAVGEPEEVMYQMIEVVNAILPQDKPRYLMGVGTPVNILEAISLGVDMFDCVMPTRNGRNGMIFTSQGIINIKNEKWKTDFSPIDEQGHCFFDLHYSKAYLRHLFVAREMLGPQIASIHNLSFYLWLVSEARRQIESGCFSTWKDQMVKQLARRL

SEQ ID NO: 61746 - protein, 371 aa, Thermosediminibacter oceani
  misc_feature (1)..(371): tr|D9RXQ6|D9RXQ6_THEOJ Queuine tRNA-ribosyltransferase OS=Thermosediminibacter oceani (strain ATCC BAA-1034 / DSM 16646 / JW/IW-1228P) OX=555079 GN=tgt PE=3 SV=1
MKFKVLKWAEDCKARTGLLETPHGIIETPVFMPVGTQATVKTLTPDELEQIGAKIILSNTYHLYLRPGHRIIEEAGGLHRFMNWEGSILTDSGGYQVFSLGELREIREEGVTFRSHIDGSLHFISPETSIEIQNSLGADIIMAFDECIPYPATYEYVKNSVERTTRWAERCKKHHKNEKQTLFGIVQGGLYKDLREKSARDLVSMDFKGYAVGGLSVGEPKEHMYEVLDYTVPLLPEDKPRYLMGVGSPDAIFEGIIRGIDMFDCVLPTRIARHGTVFTARGRLVVKNAAYARDFSPLDPECDCYVCKNYTRAYIRHLINANEVLGIRLTTIHNLYFLLSLMEKIRRAIEGGYLLEFKQEFFKKFGYDQGS

SEQ ID NO: 61747 - protein, 370 aa, Thermosinus carboxydivorans
  misc_feature (1)..(370): tr|A1HT80|A1HT80_9FIRM Queuine tRNA-ribosyltransferase OS=Thermosinus carboxydivorans Nor1 OX=401526 GN=tgt PE =3 SV=1
MAITFELIKQCSKTGARAGRLYTPHGVFETPIFMPVGTQATVKAMSPDELKAMGAGIILSNTYHLYLRPGHELVAEAGGLHGFMHWDRGILTDSGGFQVFSLGPLRKITEEGVAFRSHIDGSKHFLSPEKATEIQMALGADIIMAFDECVPYPAEYDYAKASTERTTRWAERCKKAHTRKDQALFGIVQGGMYKDLRAMSARDLVAMDFPGYAVGGLSVGEPKPLMYEILEYTVPLLPANKPRYLMGVGTPDCLVEGVMYGIDMFDCVFPTRVARNGTVMTSRGKLVVKNAEYARDFRPIDPDCECYTCRNFSRAYIRHLLKAEEIFGLRLTTIHNLHFLLNFMRNMRKAILEDRFLAFRQEFRAQYQLH

SEQ ID NO: 61748 - protein, 367 aa, Thermosipho africanus
  misc_feature (1)..(367): sp|B7IDU1|TGT_THEAB Queuine tRNA-ribosyltransferase OS= Thermosipho africanus (strain TCF52B) OX=484019 GN=tgt PE=3 SV=1
MGLKFELLKTSGNARRGRIYLPHGVVETPTFMPVGTNANVKLMTPKLLDEIGAQIILGNAFHLYLKPGLDVFRFHGGIHNFMNWQKPVLTDSGGFQVFSLREGRKITEDGVLIRSPLDGSKHMITPELSMEIQHAIGSDIVMAFDYCAEPGISHQDAVVALELTSLWAERSLKKLRSLSDQAIFGIVQGAFFKDLRLRSAKEITSMNFDGFAIGGLSVGEEYDITLDMTKFTAPLLPENKPRYFMGAGSPKLIVDLVDSGIDMFDSVLPTRVARHGQALTWKGKLNIRSAKYKFSKEPIDESCGCYTCKNFSRSYIRHLFDRGEVLGQILLTIHNLHFMMDLSKKIRESIENDTFQELRGEVLKYYA

SEQ ID NO: 61749 - protein, 367 aa, Thermosipho africanus
  misc_feature (1)..(367): tr|K2PG23|K2PG23_9BACT Queuine tRNA-ribosyltransferase OS=Thermosipho africanus H17ap60334 OX=1161912 GN=tgt P E=3 SV=1
MGLKFELLKTSGNARRGRIYLPHGVVETPTFMPVGTNANVKLMTPKLLDEIGAQIILGNAFHLYLKPGLDVFRFHGGIHNFMNWQKPVLTDSGGFQVFSLREGRKITEDGVLIRSPLDGSKHMITPELSMEIQHAIGSDIVMAFDYCAEPGISHQDAVVALELTSLWAERSLKKLRSLSDQAIFGIVQGAFFKDLRLRSAKEITSMNFDGFAIGGLSVGEEYNITLDMTKFTVPLLPENKPRYFMGAGSPKLIVDLVDSGIDMFDSVLPTRVARHGQALTWKGKLNIRSAKYKFSKEPIDESCGCYTCKNFSRSYIRHLFDRGEVLGQILLTIHNLHFMMDLSKKIRESIENDTFQELRGEVLKYYA

SEQ ID NO: 61750 - protein, 367 aa, Thermosipho atlanticus
  misc_feature (1)..(367): tr|A0A1M5R0V1|A0A1M5R0V1_9BACT Queuine tRNA-ribosyltran sferase OS=Thermosipho atlanticus DSM 15807 OX=1123380 GN=tgt PE=3 SV=1
MALKFELIKVLGKARRGRIYLPHGIVETPTFMPVGTNANVKLMTPKELEEVGAQIILGNAFHLYLKPGMEVLKFHGGINNFIGWHKPVLTDSGGFQVFSLREGRKVTDEGVLIKSPLDGSKHMITPELSMEIQNAINSDIVMAFDYCAEPGIEYDKAVRALELTTKWAERSLKRIRELSDQAIFGIVQGAFFHDLRERSAREITSMEFDGFAIGGLSVGEEYDITLKMTEFTVPFLPENKPRYFMGAGSPKLIVDLVYNGVDIFDSVLPTRVARHGQALTWIGKLNIRAAKFKFDKSPIEETCTCYTCKNFSRSYIRHLFDRREVLGQILLTIHNLHFMMDLSKKIRDSIEEGTFEKLRGEVLKHYD

SEQ ID NO: 61751 - protein, 367 aa, Thermosipho melanesiensis
  misc_feature (1)..(367): sp|A6LMW2|TGT_THEM4 Queuine tRNA-ribosyltransferase OS= Thermosipho melanesiensis (strain DSM 12029 / CIP 10478 9 / BI429) OX=391009 GN=tgt PE=3 SV=1
MALKFELLKTHKNARRGRIYLPHGVVETPTFMPVGTNANVKLMTPENLEEIGAQIILANAFHLYLKPGMEVLRHHNGIHDFMNWEKPILTDSGGFQVFSLRKGRKITKEGVLIKSPLDGSMRMITPELSMEIQNSIGSDIVMAFDYCAEPGISHQDAVVALELTTLWAERSLKSIRNMSDQSIFGIVQGAFYKDLRERSAKEITSMDFDGFAIGGLSVGEGYDITLEMTEFTVPLLPENKPRYFMGAGAPRLIVDLVNLGVDIFDSVLPTRVARHGQALTWKGKMNVRAAKYKFDKSPIDDECTCYTCRNYSRSYIRHLFDRGEVLGQMLLTIHNLHFMMDLSKKIRESIDGGYFEKLRGEVLKYYD

SEQ ID NO: 61752 - protein, 365 aa, Thermosipho sp.
  misc_feature (1)..(365): tr|A0A1L7BGT0|A0A1L7BGT0_9BACT Queuine tRNA-ribosyltran sferase OS=Thermosipho sp. 1063 OX=1462747 GN=tgt PE=3 SV=1
MKFELLKTTKNARRGRIYLPHGVVETPTFMPVGTNANVKLMTPENLKNVGAQIILANAFHLYLKPGIEVLKHHDGIHNFMNWDRPVLTDSGGFQVFSLRKGRKITKDGVLIKSPLDGSMHMITPELSMEIQNAIGSDIVMAFDYCAEPGITHQEAVYALELTTQWAERSLKKIRSLSDQAIFGIVQGAFFKDLRERSAKEITSMNFDGFAIGGLSVGEEYNLTLEMTEFTVPLLPENKPRYFMGAGAPKLIVDLVNLGVDVFDSVLPTRVARHGQALTWKGKINIRAAKHKFDKTPIDKECKCYTCRNYSRSYLRHLFDRGEALGQILLTIHNLHFMMDLSKRIRESIDNNTFEDLRGEVLKYYA

SEQ ID NO: 61753 - protein, 372 aa, Thermosporothrix hazakensis
  misc_feature (1)..(372): tr|A0A326U8F2|A0A326U8F2_9CHLR Queuine tRNA-ribosyltran sferase OS=Thermosporothrix hazakensis OX=644383 GN=EI4 2_05377 PE=3 SV=1
MHASKEQKHTENGARTLQLPHGLLKLPVYLPDATLGVVRAVDSTDLEQCGVQALVMNTYHLMQRPGSSTIQALGGLHTMSAWEHPIITDSGGFQAYSLIQQNARFGTLDADGITFKPEGATRKFQLTPEKAVQLQFSYGSDIVMCLDYCTHVDAPDDVQRLSVMRTIEWAKRCKREYERLLKQKKLAEEKRPLLFAVIQGGGSRELRKQCAEALLDIGFDGFGYGGWPLDKQGRLLADIIRYTRELIPAQYPMHALGVGHPSNVAECVQIGYEIFDSAMPTRDARHGRLYCFQDSAQEKWFQYIYVGDDKHIKNKRPVSEVCDCLCCRHYSLGYLHHLFKVGDTLYYRLATLHNLRFMTMLTERLRAHYVHN

SEQ ID NO: 61754 - protein, 397 aa, Thermosporothrix hazakensis
  misc_feature (1)..(397): tr|A0A326TQT7|A0A326TQT7_9CHLR Queuine tRNA-ribosyltran sferase OS=Thermosporothrix hazakensis OX=644383 GN=tgt PE=3 SV=1
MSTVFEFTIDAECSESWARAGTLRTPHGTIRTPIFMPVGTQATVKSVSPEELKAVGAQIILSNTYHLMLRPGSQLIDTFGGLHSFMHWDGPILTDSGGFQVWSLGHLRKLNEDGVTFKSHLDGSYHTLTPERVMQIEAEIGADIILPLDICAPYPCPPQEARKAMEQTHRWEERALIEKERQRPEQALFGIVQGAFEPELRSESARIIGSMPFTGFSIGGLSVGEPKATMWEMLRYVTPELPREKPRHLLGVGSPEDLVMGVGLGMDMFDCVLPTRVARHGGLFTRSGRISIKAARYRTATGPIEEGCDCYTCRNYSAAYVHHLLRAEEQLYYRLGTIHNLRFMLRLAAELREAIITGNYIAYRDEFLERYKPASEAVREQQREKWKAAARARQAQG

SEQ ID NO: 61755 - protein, 372 aa, Thermosporothrix sp.; identical to SEQ ID NO: 61753
  misc_feature (1)..(372): tr|A0A455SQ02|A0A455SQ02_9CHLR Queuine tRNA-ribosyltran sferase OS=Thermosporothrix sp. COM3 OX=2490863 GN=KTC_ 52640 PE=3 SV=1

SEQ ID NO: 61756 - protein, 397 aa, Thermosporothrix sp.
  misc_feature (1)..(397): tr|A0A455STC7|A0A455STC7_9CHLR Queuine tRNA-ribosyltran sferase OS=Thermosporothrix sp. COM3 OX=2490863 GN=tgt PE=3 SV=1
MSTVFEFTIDAECSESWARAGTLRTPHGTIRTPIFMPVGTQATVKSVSPEELKAVGAQIILSNTYHLMLRPGSQLIDTFGGLHSFMHWDGPILTDSGGFQVWSLGHLRKLNEDGVTFKSHLDGSYHTLTPERVMQIEAEIGADIILPLDICAPYPCPPQEARKAMEQTHRWEERALIEKERQRPEQALFGIVQGAFEPELRSESARIIGSMPFTGFSIGGLSVGEPKATMWEMLRYVTPELPREKPRHLLGVGSPEDLVMGVGLGMDMFDCVLPTRVARHGGLFTRSGRISIKAARYRTASGPIEEGCDCYTCRNYSAAYVHHLLRAEEQLYYRLGTIHNLRFMLRLAAELREAIIAGNYIAYRDEFLERYKPASEAVREQQREKWKAAARARQAQG

SEQ ID NO: 61757 - protein, 371 aa, Thermosulfidibacter takaii
  misc_feature (1)..(371): tr|A0A0S3QS12|A0A0S3QS12_THET7 Queuine tRNA-ribosyltran sferase OS=Thermosulfidibacter takaii (strain DSM 17441 / JCM 13301 / NBRC 103674 / ABI70S6) OX=1298851 GN=tgt PE=3 SV=1
MKFSVFKEDVTTKARIGVIETPRYIAKTPIFMPVGTLGTVKTLSPQELKELGATIILGNTYHLYLRPGVEIIGKLGGLHKFASWNRLILTDSGGFQVHSLSPLRKIKEDGVEFRSHLDGSTHFFTPEEVIRIQCVLGSDFVMPLDWCVSYPASEVEVGKSVKLTIAWAIRSKECPLQSHQSLFAIVQGGMAESLRRYCAQVLVDMDFPGYAIGGLSVGEPKNLMWEMIEFTASLLPKDKPRYLMGVGKPEDIVFAVMCGVDMFDCVLPTRCARNGLLFTSKGKLRIKNNPYRDQDIPVDEDCDCYTCRNFSRAYLRHLFVNDEILALRLNTIHNVHFYMRLMEEIRSRIASGTFNQWARRFIEEYPSLEAT

SEQ ID NO: 61758 - protein, 376 aa, Thermosulfurimonas dismutans
  misc_feature (1)..(376): tr|A0A179D5I6|A0A179D5I6_9BACT Queuine tRNA-ribosyltran sferase OS=Thermosulfurimonas dismutans OX=999894 GN=tg t PE=3 SV=1
MWGYFHILERDTHTKARLGRLVTRRGIIETPVFMPVATAGSIKAVPPEVVTGLGTRVILANTYHLYLRPGLEIIRQSGGLHSFMNWQRVILTDSGGFQVYSLAQFRKIQEEGVHFKSHIDGSEHLLTPELALEIQEVLNSDIRMVLDVCIPYPCDRKKAKELTALTHRWAERSKNFWEKRENKGALLFGIAQGGMFEDLRRESARVIVEMDFDGYAVGGLSVGEPRDLMLEMLSATLSAFPEDRPRYLMGVGTPEDILEAVAMGVDMFDCVLPTRNARRGTIFTSEGKLSIRNAPFKNDFRPLDPNCQCYTCRNYTRAYLRHLFISGELLVYYLLTVHNLYFYLKLMAKIRKAIAEGRFMEFKADFYQRKEEILCG

SEQ ID NO: 61759 - protein, 378 aa, Thermosynechococcus elongatus
  misc_feature (1)..(378): sp|Q8CWM7|TGT_THEEB Queuine tRNA-ribosyltransferase OS= Thermosynechococcus elongatus (strain BP-1) OX=197221 G N=tgt PE=3 SV=1
MFEFVCQQECAHTQARAGLFHTPHGTVATPRFMPVGTLANVKTLTPEHLKAAGAQMILANTYHLHLQPGEDIVAAAGGLHCFMGWSGPILTDSGGFQVFSLSEMRQISDQGVVFRSPHDGQIIELSPEGAIAIQEALGADVIMAFDECPPYPASREAVIQATQRTLQWLERCIVAKQRSDQALFAIVQGGVYADLRRECAEAMVPYDLPGYAIGGVSVGEPNRIMHEIVAVTAPLLPVHKPRYLMGVGTHLEMLRAIAAGVDLFDCVIPTRLARHGCAIVQGQRWNLKNARFRRDYEPLDPTCPCYTCRTFSRAYLSHLVRAKELLAYTLLSIHNVTELIRFTQAARQAILEERFAAFAAEWEQRLVVDAEEPDAALL

SEQ ID NO: 61760 - protein, 378 aa, Thermosynechococcus sp.
  misc_feature (1)..(378): tr|A0A5C2M4I0|A0A5C2M4I0_9CYAN Queuine tRNA-ribosyltran sferase OS=Thermosynechococcus sp. CL-1 OX=2583530 GN=t gt PE=3 SV=1
MFEFVCQQDCAHTQARAGLFHTPHGAVATPRFMPVGTLANVKTLTPEHLKAAGAQMVLANTYHLHLQPGEDIVAAAGGLHRFMGWSGPILTDSGGFQVFSLSEMRQISDQGVVFRSPHDGQIIELSPERAIAIQEALGADVIMAFDECPPYPASREAVIQATQRTLHWLERCIAAKQRSDQALFAIVQGGVYADLRRECAAAMLPYDLPGYAIGGVSVGEPNSAMHEIVAVTAPLLPAHKPRYLMGVGTHLEMLRAIAAGVDLFDCVIPTRLARHGCAIVQGQRWNLKNARFRRDYEPLDPTCPCYTCTTFSRAYLSHLVRAKELLAYTLLSIHNVTELIRFTQAARQAILEERFVAFAAEWEQRLVVDAEEPDAALL

SEQ ID NO: 61761 - protein, 378 aa, Thermosynechococcus sp.
  misc_feature (1)..(378): tr|V5V6Z8|V5V6Z8_9CYAN Queuine tRNA-ribosyltransferase OS=Thermosynechococcus sp. NK55a OX=1394889 GN=tgt PE=3 SV=1
MFEFVCQQECAHTQARAGLFHTPHGTVATPRFMPVGTLANVKTLTPEHLKAAGAQMILANTYHLHLQPGEDIVAAAGGLHCFMGWSGPILTDSGGFQVFSLSEMRQISDQGVVFRSPHDGQIIELSPERAIAIQEALGADVIMAFDECPPYPASREAVIQATQRTLHWLERCIAAKQRSDQALFAIVQGGVYADLRRECAEVMVPYDLPGYAIGGVSVGEPNSAVHEVVAVTAPLLPVHKPRYLMGVGTHLEMLRAIAAGVDLFDCVIPTRLARHGCAIVQGQRWNLKNARFRRDYDPLDPTCPCYTCRTFSRAYLSHLVRAKELLAYTLLSIHNVTELIRFTQAARQAILEERFAAFAAEWEQRLVVNAEEPDAALL

SEQ ID NO: 61762 - protein, 368 aa, Thermosyntropha lipolytica
  misc_feature (1)..(368): tr|A0A1M5P9I6|A0A1M5P9I6_9FIRM Queuine tRNA-ribosyltran sferase OS=Thermosyntropha lipolytica DSM 11003 OX=1123 382 GN=tgt PE=3 SV=1
MLKFKVIKKDASSGARLGELETAHWKCKTPIFMPVGTQATVKTLTPEDLYEIGADIILSNTYHLYLRPGADLVEKAGGLHKFMNWKRGILTDSGGFQVFSLSKLRKITDEGVYFNSHIDGSRHFLTPQKVMEIEQKLGADIAMCFDECAPYPCTYEYAKEALRRTSLWAKICREHHKREDQALFGIVQGSIFDDLRRKSAEDIVALDFPGYAVGGLSVGEPKSEMYRILELTHTLLPEDKPRYLMGVGAPEDLVEGVKRGIDMFDCVLPTRLARHGTAFTHQGRITVRNAGFAEDFSPVDPWCDCYVCKNYSRAYIRHLIKAEEILASRLLSYHNIYFLTSLMAKIRQALAEGRFGEFYDNFFRQYKP

SEQ ID NO: 61763 - protein, 372 aa, Thermotalea metallivorans
  misc_feature (1)..(372): tr|A0A140L8Y6|A0A140L8Y6_9CLOT Queuine tRNA-ribosyltran sferase OS=Thermotalea metallivorans OX=520762 GN=tgt P E=3 SV=1
MAIKYELIKECRQSGARLGLLHTPHGTIETPVFMPVGTQATVKAMTPEELKEIHAQIILSNTYHLYLRPGHQLVEKAGGLHKFMNWDRAILTDSGGFQVFSLGDLRKISEEGVEFRSHLDGSKHFISPEKAIEIENALGADIIMAFDECAPYPADRTYVKNSLERTTRWAKRCKEAHKKPDQQALFGIIQGGMYRDLREQSAKEITALDFPGYAVGGLSVGEPKPLMYEILEYTTPLMPKDRPRYLMGVGSPDCLIEGVIRGIDMFDCVLPTRIARNGTAMTSFGKVVIKNAQYAEDFAPLDPNCGCNTCRNYSKAYLRHLYKAQEILSARLVTYHNLYFLLNLMKNIRDAIKADRLLDYRKEFFEKYGYEV

SEQ ID NO: 61764 - protein, 369 aa, Thermotoga maritima
  misc_feature (1)..(369): sp|Q9X1P7|TGT_THEMA Queuine tRNA-ribosyltransferase OS= Thermotoga maritima (strain ATCC 43589 / MSB8 / DSM 310 9 / JCM 10099) OX=243274 GN=tgt PE=1 SV=1
MEFEVKKTFGKARLGVMKLHHGAVETPVFMPVGTNASVKLLTPRDLEEAGAEIILSNTFHLMLKPGVEIIKLHRGLHNFMGWKRPILTDSGGFQVFSLPKIRIDDEGVVFRSPIDGSKVFLNPEISMEVQIALGSDICMVFDHCPVPDADYEEVKEATERTYRWALRSKKAFKTENQALFGIVQGGIYPDLRRESALQLTSIGFDGYAIGGLSIGEERSLTLEMTEVTVEFLPEDKPRYFMGGGSPELILELVDRGVDMFDSVFPTRIARHGTALTWNGKLNLKASYNKRSLEPVDERCGCYTCKNFTRSYIHHLFDRGEVLGQILLTIHNINFMISLMKEVRRSIESGTFKELKSKVVEVYSSGGVNV

SEQ ID NO: 61765 - protein, 365 aa, Thermotoga maritima
  misc_feature (1)..(365): tr|R4P3I7|R4P3I7_THEMA Queuine tRNA-ribosyltransferase OS=Thermotoga maritima (strain ATCC 43589 / MSB8 / DSM 3109 / JCM 10099) OX=243274 GN=tgt PE=3 SV=1
MKKTFGKARLGVMKLHHGAVETPVFMPVGTNASVKLLTPRDLEEAGAEIILSNTFHLMLKPGVEIIKLHRGLHNFMGWKRPILTDSGGFQVFSLPKIRIDDEGVVFRSPIDGSKVFLNPEISMEVQIALGSDICMVFDHCPVPDADYEEVKEATERTYRWALRSKKAFKTENQALFGIVQGGIYPDLRRESALQLTSIGFDGYAIGGLSIGEERSLTLEMTEVTVEFLPEDKPRYFMGGGSPELILELVDRGVDMFDSVFPTRIARHGTALTWNGKLNLKASYNKRSLEPVDERCGCYTCKNFTRSYIHHLFDRGEVLGQILLTIHNINFMISLMKEVRRSIESGTFKELKSKVVEVYSSGGVNV

SEQ ID NO: 61766 - protein, 369 aa, Thermotoga naphthophila
  misc_feature (1)..(369): tr|D2C3M8|D2C3M8_THENR Queuine tRNA-ribosyltransferase OS=Thermotoga naphthophila (strain ATCC BAA-489 / DSM 1 3996 / JCM 10882 / RKU-10) OX=590168 GN=tgt PE=3 SV=1
MEFEVKKTFGKARLGVMKLHHGAVETPVFMPVGTNANVKLLTPRDLEEAGAEIILSNTFHLMLKPGVEIIKLHRGLHNFMGWKRPILTDSGGFQVFSLPKIRIDDEGVVFRSPIDGSKIFLNPEISMEVQIALGSDICMVFDHCPVPDADYEEVKEATERTYRWALRSKKAFKTENQALFGIVQGGIYPDLRRESALQITSIGFDGYAIGGLSIGEERSLTLEMTEVTVEFLPEDKPRYFMGGGSPELILELVNRGVDMFDSVFPTRIARHGTALTWNGKLNLKASYNKRSLEPVDERCGCYTCKNFTRSYIHHLFDRGEVLGQILLTIHNINFMISLMKEVRRSIEDGTFNELKSRVVEVYSSGGVNV

SEQ ID NO: 61767 - protein, 369 aa, Thermotoga neapolitana
  misc_feature (1)..(369): sp|B9K8N7|TGT_THENN Queuine tRNA-ribosyltransferase OS= Thermotoga neapolitana (strain ATCC 49049 / DSM 4359 / NS-E) OX=309803 GN=tgt PE=3 SV=1
MEFEVKKTSGKARVGVLKLPHGVVRTPVFMPVGTNANVKLLTPRDLEEAGAEIVLSNTFHLMLKPGVEIIRLHGGLHKFMGWKKPILTDSGGFQVFSLPKLKIDDEGVTFKSPIDGSKVFLSPEISMEVQIALGSDICMAFDHCPPPDADYEVVKEATERTYRWALRSKEAFKTENQVLFGIVQGGVYPDLRKKSALQITSIGFDGYAIGGLSIGEERSLTLEMTEITVEYLPEDRPRYFMGGGSPELILELVDRGVDMFDSVFPTRIARHGTALTWKGRLNLKASYNKRSLDPVDEQCGCYTCKNFTRSYIHHLIDRGEVLGQILLSLHNVSFMISFMDEVRRSIEEGTFREFKGKMIDVYSSGGVSV

SEQ ID NO: 61768 - protein, 369 aa, Thermotoga petrophila; identical to SEQ ID NO: 61764
  misc_feature (1)..(369): sp|A5IM22|TGT_THEP1 Queuine tRNA-ribosyltransferase OS= Thermotoga petrophila (strain RKU-1 / ATCC BAA-488 / DS M 13995) OX=390874 GN=tgt PE=3 SV=1

SEQ ID NO: 61769 - protein, 396 aa, Thermotoga sp.; identical to SEQ ID NO: 59857
  misc_feature (1)..(396): tr|A0A101EUB4|A0A101EUB4_9THEM Queuine tRNA-ribosyltran sferase OS=Thermotoga sp. 50_1627 OX=1635260 GN=tgt PE= 3 SV=1

SEQ ID NO: 61770 - protein, 369 aa, Thermotoga sp.
  misc_feature (1)..(369): sp|B1LB70|TGT_THESQ Queuine tRNA-ribosyltransferase OS= Thermotoga sp. (strain RQ2) OX=126740 GN=tgt PE=3 SV=1
MEFEVKKTFGKARLGVMKLHHGAVETPVFMPVGTNANVKLLTPRDLEEAGAEIILSNTFHLMLKPGVEIIKLHRGLHNFMGWKRPILTDSGGFQVFSLPKIRIDDEGVVFRSPIDGSKVFLNPEISMEVQIALGSDICMVFDHCPVPDADYEEVKEATERTYRWALRSKKAFKTENQALFGIVQGGIYPDLRRESALQLTSIGFDGYAIGGLSIGEERSLTLEMTEVTVEFLPEDKPRYFMGGGSPELILELVDRGVDMFDSVFPTRIARHGTALTWNGKLNLKASYNKRSLEPVDERCGCYTCKNFTRSYIHHLFDRGEVLGQILLTIHNINFMISLMKEVRRSIESGTFKELKSKVVEVYSSGGVNV

SEQ ID NO: 61771 - protein, 368 aa, Thermotogae bacterium
  misc_feature (1)..(368): tr|A0A3D6DA58|A0A3D6DA58_9BACT Queuine tRNA-ribosyltran sferase OS=Thermotogae bacterium OX=2053689 GN=tgt PE=3 SV=1
MTFEVFHKDGNARTGVLHTVHGDVETPVFAPVATNATVRFVPHVFLHDMGYRMILSNTFHLLLKPGEDVIRSFGGLHRFMSWSGAILTDSGGFQVFSLPHRKITDEGVEFRSPIDGSLIFLTPERATEFQELLGSDIAMVLDVCMNPYEAEDEIWRSVDRTLKWAVRCKEVHTRSDQALFGIVQGGISEKLRQYSAEETVRIGFDGYAVGGLSVGETIEETLAMLDVVLPILPEDKPRYFMGLGTPELILESVERGIDIFDCVYPTRVGRHGTAMTWTGRLNVKSAVYRMDPRPVDEKCDCYTCKNFSRGYIHHLFNRKEALGMILLSIHNLYFMNQFVRKIRDAIQEGRFQDFKQEFLSSTSLEVSK

SEQ ID NO: 61772 - protein, 383 aa, Thermotogae bacterium
  misc_feature (1)..(383): tr|A0A1V6H2B2|A0A1V6H2B2_9BACT Queuine tRNA-ribosyltran sferase OS=Thermotogae bacterium ADurb.Bin062 OX=185292 3 GN=tgt PE=3 SV=1
MNSTKSFTLQTQAGSEKIGEALSAGRNGFLRLPHGDVETPVFMPVGTQAAVKCLLPGQLKEIGTQILLSNTFHLYLRPGHEDIRFHGGLHRFMGWDRPILTDSGGFQVFSLSKLNKITDEGVVFRSPLDGSEHFFTPELTVEIQEALGSDIAMVFDECAPHDAPETYIRQAMKRTYEWAKRFYKAHSKEDQMVFGIVQGGVSIPLRQESAEQITSIPFDGYAIGGLSVGEPESVTLAALEATCAYLPKDKPRYLMGVGTPELIFASVALGVDMFDCVLPTRSARHATLYTSGGKVHIKSAKYKRNREPLDPRCDCYTCRHFSRGYLQHLYARSEVSGMVLGSLHNIRFLTAMMENIRISIRERRFEAYRKAFFDRYRNQDGSE

SEQ ID NO: 61773 - protein, 296 aa, Thermotogales bacterium
  misc_feature (1)..(296): tr|A0A117MBF0|A0A117MBF0_9BACT Queuine tRNA-ribosyltran sferase (Fragment) OS=Thermotogales bacterium 46_20 OX= 1635293 GN=XE05_0454 PE=3 SV=1
MLSYEIISNSSTSRARVGRLNTSHGEILTPAFMPVGTNGTVKSLWQHELIEIGSQIILGNAFHLYLRPGLDVIEHFGGLHDFISWKGPILTDSGGFQVFSIRNKVVEDDGVRFRSPLDGSKLFITPELSMEIQMTLGSDIAMAFDECVEPGVSREYIEESVARTSVWARRCLNSHSGKQALFGIVQGGFFEDLRARSAEEICSMPFDGFAIGGLSVGEKFAITKDMLSFTVTFLPEDRPRYVMGIGSPEMIVVAVENGVDMFDCVLPTRIGRHGTALTSRGKVNLKAAKWRYDKDP

SEQ ID NO: 61774 - protein, 371 aa, Thermovenabulum gondwanense
  misc_feature (1)..(371): tr|A0A162M4U9|A0A162M4U9_9FIRM Queuine tRNA-ribosyltran sferase OS=Thermovenabulum gondwanense OX=520767 GN=tgt PE=3 SV=1
MKFEVIKFSEKTRARRGKIFTFHGEIDTPVFMPVGTQASVKTMAPHELEELGAKIILGNTYHLYLRPGHKLIEEAGGLHKFMNWRGSILTDSGGYQVFSLGELREIREEGVTFRSHIDGSIHFISPEISIEIQNSLGADIIMCFDECIPYPSTYEYVKNSVERTTRWAQRCKKHHKKSEQALFGIVQGGLFEELRKKSAKDITDLDFEGYAVGGLSVGEPKQEMYKVLDYTVPLLPENKPRYLMGVGSPDALFEGVIRGIDMFDCVLPTRIARHGTVFTKKGKLVVRNAKYAKDFSPLDPECDCYVCKNFSRAYIRHLLNAGEILGLRLTTYHNLHFLLKIMEEIRKAIEGDYLLELKEEFFKKFGYEDEL

SEQ ID NO: 61775 - protein, 366 aa, Thermovibrio ammonificans
  misc_feature (1)..(366): tr|E8T4Q6|E8T4Q6_THEA1 Queuine tRNA-ribosyltransferase OS=Thermovibrio ammonificans (strain DSM 15698 / JCM 12 110 / HB-1) OX=648996 GN=tgt PE=3 SV=1
MKFRILAQEGFARSASFMGTHGQTETPCFMPVGTLGAVKGLTWEQVKGMGYSLVLANVYHLYLRPGLEVIEAAGGLHSFIGWNGLILTDSGGFQVFSLGRLMKIKEEGIEFRSHVDGSKHFFSPEFVVEFEERIGVDIGMVLDECTPYPATYEYAKHSMERTLRWAKRSIEARTTDKTALFGIVQGGVYEDLRLKCVEELVKLPFDGFAIGGLSVGEPKEEMYRITRLVAPKLPPDKPRYLMGVGTPEDILEAVEAGVDMFDCVMPTRNARNGTLFTSRGKINIKAAKYRKDFSPPDPECDCYTCRNFSKAYLRHLYASGEMNASILNTIHNLHFYAKLMERIREAIKGGYFTEFKREFLAKYRGG

SEQ ID NO: 61776 - protein, 368 aa, Thermovibrio guaymasensis
  misc_feature (1)..(368): tr|A0A420W656|A0A420W656_9BACT Queuine tRNA-ribosyltran sferase OS=Thermovibrio guaymasensis OX=240167 GN=tgt P E=3 SV=1
MEFKVLSTCGEARYGKLKGTHGETETPCFMPVGTLGAVKGVTWKNVKEMGYSLVLSNVYHLYLRPGLEVIEEAGGIHSFTGWKDLILTDSGGFQVFSLGSLMKLTEEGVEFCSHLDGSKHFFTPEFVIEFEERIGVDIGMVLDECTPYPATYDYAKHSMERTLRWAKRSIEARTTDRTALFGIVQGGVYEDLRLKCVEEITRLPFEGFAIGGLSVGEPKEEMYRITRLVAPNLPSDKPRYLMGVGTPEDILEAVEAGVDMFDCVMPTRNARNGTLFTSYGKVNIKAAKYKKDFTPLDPNCDCYTCRNFTKAYLRHLYVSREVNSVILNTIHNLHFYAKLMEGIREAIKEGRFAQFKEEFLRKFRGEGS

SEQ ID NO: 61777 - protein, 373 aa, Thermovirga lienii
  misc_feature (1)..(373): tr|G7V8T0|G7V8T0_THELD Queuine tRNA-ribosyltransferase OS=Thermovirga lienii (strain ATCC BAA-1197 / DSM 17291 / Cas60314) OX=580340 GN=tgt PE=3 SV=1
MLKFKLEATCNKTKARAGVIETPHGKIETPVFMPVGTRATVKAMAPFELKAIGAQIILSNTYHLYLRPGADVVAEAGGLHNFMGWDRPILTDSGGFQVFSLSTLREITDDGVLFQSHLDGTRHFMTPEKATLVQEQLGSDIAMCFDECVPYPCSPENSYKAVERTIAWAERCKKAHKRSDQSLFGIVQGSVYPEQRIYCASELKKMDFPGYAIGGLSVGEPHEKMYQMLDVLSEELPHEKPRYLMGVGYPLNLLEGVARGVDMFDCVLPTRNGRNGTVFTYSGRINLKNKAYERDFSPIDPNCNCYACRNFSKAYIRHLYRSGEILASRLCTWHNLHFLVDLMSKARIAILEGSFEDFKRRFEDNFNDEGGRR

SEQ ID NO: 61778 - protein, 385 aa, Thermus aquaticus
  misc_feature (1)..(385): tr|B7A8H2|B7A8H2_THEAQ Queuine tRNA-ribosyltransferase OS=Thermus aquaticus Y51MC23 OX=498848 GN=tgt PE=3 SV=1
MSPFRFQVTARAGRARVGLLPTPHGTVETPLFMPVGTQGSVKGLLPRDLKEIGSQVLLANTYHLLLRPGPERVRAFGGLHGFAGWKGPWLTDSGGFQVMSLGHLRRIDERGVVFQSHLNGDLVELTPERSIAVQEALGADLIMAFDECPPYPSPREYLKASLERTLRWLERSLKAKTRPDQGLFGITQGGTDPTLRRLSTLETLRFDLPGYAIGGLAVGESKEEMFPMVELSTALLPEERPRYLMGVGHPEDLVAAMGLGVDLFDCVYPTRTGRFGSALVPEGRLNLKNARHLEEKEPLEEGCDCYACQNFSRGYIAHLVRSGEMLGAILLSLHNLRFLHRLTEGAKAAIREGRYGDFARAFAERRFGREVPLWFREALASGGHW

SEQ ID NO: 61779 - protein, 385 aa, Thermus aquaticus
  misc_feature (1)..(385): tr|A0A0N0BLF1|A0A0N0BLF1_THEAQ Queuine tRNA-ribosyltran sferase OS=Thermus aquaticus OX=271 GN=tgt PE=3 SV=1
MSPFRFQVTARAGRARVGLLATPHGTVETPLFMPVGTQGSVKGLLPRDLKEIGSQVLLANTYHLLLRPGPERVRAFGGLHGFAGWKGPWLTDSGGFQVMSLGHLRRIDERGVVFQSHLNGDLVELTPERSIAVQEALGADLIMAFDECPPYPSPREYLKASLERTLRWLERSLKAKTRPDQGLFGITQGGTDPTLRRLSTLETLRFDLPGYAIGGLAVGESKEEMFPMVELSTALLPEERPRYLMGVGHPEDLVAAMGLGVDLFDCVYPTRTGRFGSALVPEGRLNLKNARHLEEKGPLEEGCDCYACQSFSRGYIAHLVRSGEMLGAILLSLHNLRFLHRLTEGAKAAIREGRYGDFARAFAERRFGREVPLWFREALAAGGHW

SEQ ID NO: 61780 - protein, 385 aa, Thermus arciformis
  misc_feature (1)..(385): tr|A0A1G7DGC2|A0A1G7DGC2_9DEIN Queuine tRNA-ribosyltran sferase OS=Thermus arciformis OX=482827 GN=tgt PE=3 SV= 1
MDPFRFQVEARAGRARAGRLSTPHGAVETPLFMPVGTAGSVKGLMPKDLKAIGSQVLLANTYHLLLRPGPERVRALGGLHGFAGWEGPWLTDSGGFQVMSLGHMRRIDEEGVIFQSHLDGRLIKLTPERSIAVQEALGADLIMAFDECPPYPSPREYLQASLERTLRWLERSLKAKTRPDQALFGIAQGGTEPDLRRRSTLETIRFDLPGYAIGGLAVGEPKEAMFAMVELSTRLLPEDRPRYLMGVGHPEDLVAAMGLGVDLFDCVYPTRTGRFGSALVPEGRLNLKNARFLEDKRPLEEGCDCYTCKTFSRAYLAHLVRAGEMLGGILLSLHNLRHLHRLTEAAREAIREGRYGDFAREFARRRFGQEVPAWFREALAAGGHW

SEQ ID NO: 61781 - protein, 385 aa, Thermus brockianus
  misc_feature (1)..(385): tr|A0A1J0LSA9|A0A1J0LSA9_THEBO Queuine tRNA-ribosyltran sferase OS=Thermus brockianus OX=56956 GN=tgt PE=3 SV=1
MKPFAFSVEAQSGRARVACLFTPHGVVETPLFMPVGTQGSVKGLLPKDLKEIGSQILLANTYHLLLRPGPERVRALGGLHGFAGWRGPWLTDSGGFQVMSLGHLRRIDEEGVVFQNHLDGSLIRLTPERSLAVQEALGADIVMAFDECPPYPASRDYLKASLERTLRWLERSLKAKTREDQALFGITQGGTDPELRRLSTEETLRFDLPGYAIGGLAVGEPKEAMFRMVELSTRLLPEARPRYLMGVGHPEDLVAAMGLGVDLFDCVYPTRTGRFGSALVPEGRLNLKNARFLEEKGPLEEGCDCYACQTFSRGYIAHLVRAGEMLGGILLSLHNLRYLHRLTEEARRAIREGTYGDFARAFAERRFGKEVPRWFREALAAGGHW

SEQ ID NO: 61782 - protein, 384 aa, Thermus filiformis
  misc_feature (1)..(384): tr|A0A0A2WR95|A0A0A2WR95_THEFI Queuine tRNA-ribosyltran sferase OS=Thermus filiformis OX=276 GN=tgt PE=3 SV=1
MSFAFHRLAQTGRARLGRLETPHGTVTTPLFMPVGTQGSVKGLLPKDLEEIGSQILLANTYHLLLRPGPERVRALGGLHGFAGWKGPWLTDSGGFQVMSLGHLRRIDEEGVVFQSHLNGDLVHLTPERSIAVQEALGADIIMAFDECPPYPSSRAYLEASLERTLRWLERSLRAKTRTDQALFGIAQGGTDPGLRRRSTLETIRFDLPGYAIGGLAVGEPKEEMFRMVALSTELLPEGRPRYLMGVGHPEDLVAAIGLGVDLFDCVYPTRTGRFGYALVPEGRLNLKSGRHLEEATPLDPECDCYACRTFSRAYLAHLVRAGEMLGAVLLSLHNLRYLHRLTEAARAAIGRGAYGDFALAFAERRFGKGVPPWFLEALRAGGHL

SEQ ID NO: 61783 - protein, 385 aa, Thermus oshimai
  misc_feature (1)..(385): tr|K7R352|K7R352_THEOS Queuine tRNA-ribosyltransferase OS=Thermus oshimai JL-2 OX=751945 GN=tgt PE=3 SV=1
MNFFHFQITHKAGRARTGLLHTPHGPVETPLFMPVGTQGSVKGLMPRDLKEIGSQILLANTYHLLLRPGPERVRALGGLHGFAGWRGPWLTDSGGFQVMSLGHLRRIDEKGVVFQSHLNGDLVELTPERSVAVQEALGSDIAMALDECPPYPSSRAYLEASLERTLRWLERSLKAKTRPDQALFGIAQGGTEADLRRRSTLETIRFDLPGYAIGGLAVGEPKEAMFRMVELSTALLPEEKPRYLMGVGHPEDLVAAMGLGVDLFDCVYPTRTGRFGYALVPEGRLNLKSGRHLEDPRPLEEGCDCYACRTFSRAYLSHLVRSGEMLGAVLLSLHNLRFLHRLTEGAREAIRQGQYGDFARAFAERRFGKEIPPWFREALVAGGHW

SEQ ID NO: 61784 - protein, 385 aa, Thermus parvatiensis
  misc_feature (1)..(385): tr|H7GGM9|H7GGM9_9DEIN Queuine tRNA-ribosyltransferase OS=Thermus parvatiensis OX=456163 GN=tgt PE=3 SV=1
MEPFSFQVEARAGRARVGRLFTPHGAVETPLFMPVGTAGSVKGLMPKDLEAIGSQVLLANTYHLLLRPGPERVRALGGLHGFAGWKGPWLTDSGGFQVMSLGHMRRIDEEGVVFQSHLDGRLIKLTPERSIAVQEALGADLIMAFDECPPYPSPREYLEASLERTLRWLERSLKAKTRPDQALFGIAQGGTDPELRRRSTLETIRFDLPGYAIGGLAVGEPKEAMFAMVELSTRLLPEDRPRYLMGVGHPEDLVAAMGLGVDLFDCVYPTRTGRFGSALVPEGRLNLKNARFLEDRRPLEEGCDCYTCQTFSRAYLAHLVRAGEMLGGILLSLHNLRHLHRLTEAARQAIREGRYGDFAREFAGRRFGREVPPWFREALAAGGHW

SEQ ID NO: 61785 - protein, 385 aa, Thermus scotoductus
  misc_feature (1)..(385): tr|E8PQK4|E8PQK4_THESS Queuine tRNA-ribosyltransferase OS=Thermus scotoductus (strain ATCC 700910 / SA-01) OX= 743525 GN=tgt PE=3 SV=1
MDPFCFAIQARSGRARVGLLTTPHGRVETPLFMPVGTAGSVKGLLPRDLQEIGSQVLLANTYHLLLRPGPERVRTLGGLHRFAGWDGPWLTDSGGFQVMSLGHLRRIDEEGVVFQSHLDGSLIRLTPERSIAIQEALGADFIMAFDECPPYPSSPEYLKASLERTLRWLERSLKAKTRPDQALFGIAQGGTDAGLRALATRETLRFDLPGYAIGGLAVGETKEEMFPMVALSTEILPEAKPRYLMGVGHPEDLVAAMGLGVDLFDSVYPTRTGRFGSALVPEGRINLKNAQYLEDKRPLEEGCDCYACQTFSRAYIAHLVRAGEMLGGILLSLHNLRFLHRLTERAREAIRQGSYGAFAREFAERRFGKEIPPWFREAMAAGGHW

SEQ ID NO: 61786 - protein, 385 aa, Thermus scotoductus
  misc_feature (1)..(385): tr|A0A430S072|A0A430S072_THESC Queuine tRNA-ribosyltran sferase OS=Thermus scotoductus OX=37636 GN=tgt PE=3 SV= 1
MDPFRFAIQARSGRARVGLLTTPHGRVETPLFMPVGTQGSVKGLLPKDLKAIGSQVLLANTYHLLLRPGPERVRALGGLHRFAGWDGPWLTDSGGFQVMSLGHLRRIDEEGAVFQSHLDGRLIKLTPERSVAVQEALGADLIMAFDECPPYPASRDYLKASLERTLRWLERSLKAKTRPDQALFGIAQGGTEPDLRRRSTLETIRFDLPGYAIGGLAVGEPKEAMFRMVALSTELLPETKPRYLMGVGHPEDLVAAMGLGVDLFDCVYPTRTGRFGSALVPEGRINLKNAQYLEDKRPLEEGCDCYACQTFSRAYLAHLVRAREMLGGILLSLHNLRFLHRLTERAREAIRQGSYGAFAREFAERRFGKEIPPWFREAMAAGGHW

SEQ ID NO: 61787 - protein, 385 aa, Thermus sp.
  misc_feature (1)..(385): tr|W2U4L3|W2U4L3_9DEIN Queuine tRNA-ribosyltransferase OS=Thermus sp. NMX2.A1 OX=570924 GN=tgt PE=3 SV=1
MDPFCFAIQARSGRARVGLLTTPHGRVETPLFMPVGTQGSVKGLLPKDLKAIGSQVLLANTYHLLLRPGPERVRALGGLHRFAGWDGPWLTDSGGFQVMSLGHLRRIDEEGVVFQSHLDGSLIRLTPERSIAIQEALGADFIMAFDECPPYPSSPEYLKASLERTLRWLERSLKAKTRPDQALFGIAQGGTDAGLRALATRETLRFDLPGYAIGGLAVGETKEEMFPMVALSTEILPEAKPRYLMGVGHPEDLVAAMGLGVDLFDSVYPTRTGRFGSALVPEGRINLKNAQYLEDKRPLEEGCDCYACQTFSRAYIAHLVRAGEMLGGILLSLHNLRFLHRLTERAREAIRQGSYGAFAREFAERRFGKEIPPWFREAMAAGGHW

SEQ ID NO: 61788 - protein, 385 aa, Thermus sp.
  misc_feature (1)..(385): tr|G8NCH0|G8NCH0_9DEIN Queuine tRNA-ribosyltransferase OS=Thermus sp. CCB_US3_UF1 OX=1111069 GN=tgt PE=3 SV=1
MEAFRFTVLARSGRARAGLFHTPHGPVQTPLFMPVGTQGSVKGLLPKDLEAIGSQVLLANTYHLLLRPGPERVRALGGLHGFAGWKGPWLTDSGGFQVMSLGHLRRIDEEGVVFQSHLDGSPLRLTPEESLKVQEALGADIVMAFDECPPYPSPRAYLKASLERTLRWLERSLRAKTRPDQALFGIAQGGTDPELRALSTRETVRFRLPGYAIGGLAVGEPKEAMFPMVALSTEILPEDRPRYLMGVGHPEDLVAAIGLGVDLFDSVYPTRTGRFGSALTLEGRINLKNARFLEDPRPLEEGCDCYTCQTFSRAYLAHLVRTGEMLGGILLSLHNLRHLHRLTEAAREAILRGEYGAFAQAFAQRRFGKEVPRWFQEALAAGGHA

SEQ ID NO: 61789 - protein, 385 aa, Thermus tengchongensis
  misc_feature (1)..(385): tr|A0A4Y9F9G7|A0A4Y9F9G7_9DEIN Queuine tRNA-ribosyltran sferase OS=Thermus tengchongensis OX=1214928 GN=tgt PE= 3 SV=1
MEPFRFQLLARSGRARVGRLQTPHGPVETPLFMPVGTQGSVKGLLPKDLKAIGSQVLLANTYHLLLRPGPERVRTLGGLHGFAGWRGPWLTDSGGFQVMSLGHLRRIDEEGVVFQSHLDGSLVRLTPERSIAVQEALGADFIMAFDECPPYPSSPEYLKASLERTLRWLERSLKAKTRPDQALFGIAQGGTDPELRALSTRETLRFDLPGYAIGGLAVGEPKEAMFPMVALSTEILPEDRPRYLMGVGHPEDLVAAMGLGVDLFDSVYPTRTGRFGSALTPEGRINLKNARFLEDPRPLEEGCDCYACQHFSRAYIAHLVRAGEMLGGILLSLHNLRHLHRLTEGAREAIRRGDYGAFAWAFAERRFGKEVPAWFREAMAAGGHW

SEQ ID NO: 61790 - protein, 385 aa, Thermus thermophilus
  misc_feature (1)..(385): sp|Q5SLI7|TGT_THET8 Queuine tRNA-ribosyltransferase OS= Thermus thermophilus (strain HB8 / ATCC 27634 / DSM 579 ) OX=300852 GN=tgt PE=3 SV=1
MDPFRFQVEARAGRARVGRLFTPHGAVETPLFMPVGTAGSVKGLMPKDLEAIGSQVLLTNTYHLLLRPGPERVRALGGLHGFAGWKGPWLTDSGGFQVMSLGHMRRIDEEGVVFQSHLDGRLIKLTPERSIAVQEALGADLIMAFDECPPYPSPREYLEASLERTLRWLERSLKAKTRPDQALFGIAQGGTDPELRRRSTLETIRFDLPGYAIGGLAVGEPKEAMFAMVELSTRLLPEDRPRYLMGVGHPEDLVAAMGLGVDLFDCVYPTRTGRFGSALVPEGRLNLKNARFLEDRRPLEEGCDCYTCQTFGRAYLAHLVRAGEMLGGILLSLHNLRHLHRLTEAARQAIREGRYGDFAREFARRRFGREVPPWFREALAAGGHG

SEQ ID NO: 61791 - protein, 385 aa, Thermus thermophilus
  misc_feature (1)..(385): tr|F6DHI8|F6DHI8_THETG Queuine tRNA-ribosyltransferase OS=Thermus thermophilus (strain SG0.5JP17-16) OX=762633 GN=tgt PE=3 SV=1
MDPFRFQVEARAGRARVGRLFTPHGAVETPLFMPVGTAGSVKGLMPKDLEAIGSQVLLANTYHLLLRPGPERVRALGGLHGFAGWKGPWLTDSGGFQVMSLGHMRRIDEEGVVFQSHLDGRLIKLTPERSIAVQEALGADLIMAFDECPPYPSPREYLEASLERTLRWLERSLKAKTRPDQALFGIAQGGTDPELRRRSTLETIRFDLPGYAIGGLAVGEPKEAMFAMVELSTRLLPEDRPRYLMGVGHPEDLVAAMGLGVDLFDCVYPTRTGRFGSALVPEGRLNLKNARFLEDRRPLEEGCDCYTCQTFSRAYLAHLVRAGEMLGGILLSLHNLRHLHRLTEAARQAIREGRYGDFAREFAGRRFGREVPPWFREALAAGGHW

SEQ ID NO: 61792 - protein, 371 aa, Thioalbus denitrificans
  misc_feature (1)..(371): tr|A0A369CCU4|A0A369CCU4_9GAMM Queuine tRNA-ribosyltran sferase OS=Thioalbus denitrificans OX=547122 GN=tgt PE= 3 SV=1
MKYELVAEDGMARRGRLHFPRGTVATPAFMPVGTYGTVKAMTPEEVRATGAEIILGNTFHLMLRPGTGVVATHGDLHDFMHWDGPILTDSGGFQVFSLGAMRRISEAGVTFQSPVNGDRVFLGPEESMAVQRALGADIVMIFDECTPYPADERTARASMELSLRWARRSREAHGDNPAALFGIVQGGMYPELRAESLAGLREIGFDGYAIGGLSVGEPKAEMLRILDATAPALPADRPRYLMGVGTPEDIVEAVRRGVDMFDCVMPTRNARNGYLFTSTGVVKIRNAANRGDPRPLDEQCGCYTCRNYSRAYLHHLDRCREILGARLNTIHNLHYYQVLMRGLREAIAAGELENYVTRFYAGRAQRPAPVS

SEQ ID NO: 61793 - protein, 371 aa, Thioalkalivibrio denitrificans
  misc_feature (1)..(371): tr|A0A1V3NBN1|A0A1V3NBN1_9GAMM Queuine tRNA-ribosyltran sferase OS=Thioalkalivibrio denitrificans OX=108003 GN= tgt PE=3 SV=1
MEFDLIANDGVARRGRLTFARGTVETPAFMPVGTYGTVKTMTPEELEGLGAEIILGNTFHLMLRPGTDVIRAHGDLHDFMHWERPILTDSGGFQVFSLADLRKITEEGVKFRSPVDGAEILLTPERSMAVQRALGSDIVMIFDECTPFPATEDVARESMELSLRWAARSREAHGDNPAALFGIVQGGMYPALRQHSLEGLMAVGFDGYAIGGLSVGEGMEERHRVLDALMPLMPRERPRYLMGVGKPEDIVEAVRRGVDMFDCVIPTRNARNGFLYTREGVMRIRNSRYRDDTGPVDPSCGCYTCRNYSRAYLKHLEKCNEILGARLSTVHNLHYYLSLMGEMREAIASGGFDDWVAGFYALRSQPLPSVP

SEQ ID NO: 61794 - protein, 371 aa, Thioalkalivibrio halophilus
  misc_feature (1)..(371): tr|A0A1V3A0H1|A0A1V3A0H1_9GAMM Queuine tRNA-ribosyltran sferase OS=Thioalkalivibrio halophilus OX=252474 GN=tgt PE=3 SV=1
MQFEHLGSDGAARRGRLTFPRGEVETPAFMPVGTYGTVKAMTPEELTGLGAQIILGNTFHLMLRPGTEIIRAHGDLHDFMHWEGPILTDSGGFQVFSLAEMRKISEEGVRFQSPVDGSKVLMTPESSMQVQRELGSDIVMIFDECTPYPATHDEARRSMELSLRWADRSRQAHGDNPAALFGIVQGGMIPELRRESAAGLRSIGFDGYAIGGLSVGEPEDERLATLDVTLPELPVEQPRYLMGVGRPEDIVEAVRRGVDMFDCVMPTRNARNGFLYTREGVLRIRNARFRDDTRPIDPECGCYACRNYSRAYLKHLDKCNEILGSRLATTHNLHYYQDLMRGMRGAIAEGALDAFVADFYGRRGMDVPAVP

SEQ ID NO: 61795 - protein, 355 aa, Thioalkalivibrio nitratireducens
  misc_feature (1)..(355): tr|L0DY88|L0DY88_THIND Queuine tRNA-ribosyltransferase OS=Thioalkalivibrio nitratireducens (strain DSM 14787 / UNIQEM 213 / ALEN2) OX=1255043 GN=tgt [H] PE=3 SV=1
MTFERGTVETPAFMPVGTYGTVKAMTPEELRETGAEIILGNTFHLMLRPGTDVIRAHGDLHGFMHWDGPILTDSGGFQVFSLANLRKISEEGVRFQSPVDGSPIHLTPEDSMWVQRELGSDIVMIFDECTPYPSTEDQARESMELSLRWAQRSREAHGDNPAALFGIVQGGMFPELRARSAEALRAIGFDGYAVGGLSVGEPEAKRLRVLDATLPLMPPERPRYLMGVGRPEDIVEAVRRGVDMFDCVMPTRNARNGFLYTREGILRIRNARYRDDTAPVDPACGCYTCRHYSRAYLKHLDKCNEILGPRLATIHNLRYYQDLMRGLREAIAAGELERFVVDFYSMRGMSVPAVA

SEQ ID NO: 61796 - protein, 371 aa, Thioalkalivibrio paradoxus
  misc_feature (1)..(371): tr|W0DLL6|W0DLL6_9GAMM Queuine tRNA-ribosyltransferase OS=Thioalkalivibrio paradoxus ARh 1 OX=713585 GN=tgt PE =3 SV=1
MKFELQATDQKARRGRMTFARGSVETPAFMPVGTYGTVKAMTPEELRETGAEIILGNTFHLMLRPGTGVIRAHGDLHEFMHWDGPILTDSGGFQVFSLADLRKISEEGVHFQSPVDGSAIRLTPEDSMRVQRELGADIVMIFDECTPYPATEDQAQESMELSLRWAKRSREAHGDNPAALFGIVQGGMFPALRARSAEALRAIGFDGYAVGGLSVGEPEAERLGVLDATLPLLPPEFPRYLMGVGRPEDIVEAVRRGVDMFDCVMPTRNARNGFLYTREGILRIRNARYRDDTAPVDPACGCYTCRHYSRAYLKHLDKCNEILGPRLATIHNLHYYQDLMRGLRDAIAAGELERFVADFYSMRGMPVPAVA

SEQ ID NO: 61797 - protein, 371 aa, Thioalkalivibrio sp.
  misc_feature (1)..(371): tr|D3S9V8|D3S9V8_THISK Queuine tRNA-ribosyltransferase OS=Thioalkalivibrio sp. (strain K90mix) OX=396595 GN=tg t PE=3 SV=1
MEFEHLGQDGAARRGRLRFPRGEVDTPAFMPVGTYGTVKAMTPEELRELGAQIILGNTFHLMLRPGTEVIRAHGDLHDFMHWEGPILTDSGGFQVFSLAEMRKISEEGVRFQSPVDGSKVLMTPESSMRVQRELGSDIVMIFDECTPYPATEDEARQSMELSLRWAARSREAHGDNPAALFGIVQGGMYPALRRESAAGLREIGFDGYAIGGLSVGETEDERLATLDVTVPLLPEDRPRYLMGVGRPEDIVEAVRRGVDMFDCVMPTRNARNGFLYTREGVLRIRNARFRDDTGPVDPECGCYTCRNYSRAYLKHLDKCNEILGSRLATTHNLHYYQDLMHGLRESIAGGTLQDFVADFYGRRGMEVPPVP

SEQ ID NO: 61798 - protein, 371 aa, Thioalkalivibrio sp.
  misc_feature (1)..(371): tr|A0A318VNY4|A0A318VNY4_9GAMM Queuine tRNA-ribosyltran sferase OS=Thioalkalivibrio sp. ALE21 OX=1158175 GN=tgt PE=3 SV=1
MQFEHLGSDGAARRGRLTFPRGEVETPAFMPVGTYGTVKAMTPEELTGLGAQIILGNTFHLMLRPGTEIIRAHGDLHDFMHWEGPILTDSGGFQVFSLAEMRKISEEGVRFQSPVDGSKVLMTPESSMQVQRELGSDIVMIFDECTPYPATHDEARRSMELSLRWADRSRQAHGDNPAALFGIVQGGMIPELRRESAAGLRSIGFDGYAIGGLSVGEPEDERLTTLDVTLPQLPVEQPRYLMGVGRPEDIVEAVRRGVDMFDCVMPTRNARNGFLYTREGVLRIRNARFRDDTRPIDPECGCYACRNYSRAYLKHLDKCNEILGSRLATTHNLHYYQDLMRGMREAIAEGALDAFVADFYHRRGMDVPAVP

SEQ ID NO: 61799 - protein, 371 aa, Thioalkalivibrio sulfidiphilus
  misc_feature (1)..(371): sp|B8GTQ4|TGT_THISH Queuine tRNA-ribosyltransferase OS= Thioalkalivibrio sulfidiphilus (strain HL-EbGR7) OX=396 588 GN=tgt PE=3 SV=1
MKFELIANDGAARRGRLSFPRGTVETPAFMPVGTYGTVKAMTPEELEGIGAEIILGNTFHLMLRPGTEVIQLHGDLHDFMHWEKPILTDSGGFQVFSLADLRKITEEGVKFRSPVDGSEILLTPERSMDVQRALGSDIVMIFDECTPYPATEDQARESMELSLRWAARSKVAHGDSPSALFGIVQGGMYPALRSRSLEGLVDVGFDGYAIGGLSVGEGMEERHHVLDHLMPEMPAERPRYLMGVGKPEDIVEAVRRGVDMFDCVIPTRNARNGFLYTREGVMRIRNSRFRTDTGPIDESCDCYTCRNYSRAYLKHLDKCNEILGARLNTIHNLHYYQTLMRELRGAIAEGRLEAWVAEFYGRRSQAVPSVP

SEQ ID NO: 61800 - protein, 371 aa, Thioalkalivibrio versutus
  misc_feature (1)..(371): tr|A0A0G3G384|A0A0G3G384_9GAMM Queuine tRNA-ribosyltran sferase OS=Thioalkalivibrio versutus OX=106634 GN=tgt P E=3 SV=1
MEFENLAADGAARRGRLHFPRGTVETPAFMPVGTYGTVKAMTPEELRELGAEIILGNTFHLMLRPGTEVIRAHGDLHDFMHWEGPILTDSGGFQVFSLAEMRKISEEGVRFQSPVDGSKVLMTPESSMQVQRELGSDIVMIFDECTPYPATADEARQSMELSLRWAARSRTAHGDNPAALFGIVQGGMYPDLRRESAEGLQAIGFDGYAIGGLSVGEPEDERLQTLDATLPLLPQDRPRYLMGVGRPEDIVEAVRRGVDMFDCVMPTRNARNGFLYTREGVLRIRNARFRDDVGPVDPECGCYTCRHYSRAYLKHLDKCNEILGSRLATTHNLHYYQDLMRGLREAIAAGALSEFVADFYGRRGMAIPPVP

SEQ ID NO: 61801 - protein, 371 aa, Thioalkalivibrio versutus
  misc_feature (1)..(371): tr|A0A1V3BV39|A0A1V3BV39_9GAMM Queuine tRNA-ribosyltran sferase OS=Thioalkalivibrio versutus OX=106634 GN=tgt P E=3 SV=1
MEFENLAADGAARRGRLHFPRGTVETPAFMPVGTYGTVKAMTPEELRELGAEIILGNTFHLMLRPGTEVIRAHGDLHDFMHWEGPILTDSGGFQVFSLAEMRKISEEGVRFQSPVDGSKVLMTPESSMQVQRELGSDIVMIFDECTPYPATLDEARQSMELSLRWAARSRTAHGDNPAALFGIVQGGMYPDLRRESAEGLQAIGFDGYAIGGLSVGEPEDERLQTLNATLPLLPQDRPRYLMGVGRPEDIVEAVRRGVDMFDCVMPTRNARNGFLYTREGVLRIRNARFRDDVGPVDPECGCYTCRHYSRAYLKHLDKCNEILGSRLATTHNLHYYQDLMRGLREAIAAGALNEFVADFYSRRGMAIPPVP

SEQ ID NO: 61802 - protein, 388 aa, Thiobaca trueperi
  misc_feature (1)..(388): tr|A0A4R3N419|A0A4R3N419_9GAMM Queuine tRNA-ribosyltran sferase OS=Thiobaca trueperi OX=127458 GN=tgt PE=3 SV=1
MEFERLGQDGLARRGRLTFARGTVETPAFMPVGTYGTVKAMTPEELLEIGAEIVLGNTFHLMLRPGTEIVRRLGDLHGFMHWDKPILTDSGGFQVFSLGELRKITEEGAKFQSPVDGSPVFLSPEISMQVQRELGSDIVMIFDECTPYPASEEQARTSMELSLRWAARSRAAHGDNPAALFGIVQGGMHERPRAESLEGLMRIGFDGYAIGGLSVGEPEEDRLRVLDFLADKLPTDRPRYLMGVGTPEDIVAAVQRGIDMFDCVMPTRNARNGHLFTHQGVVRIRNAANRTDERPLDPLCDCYTCRHYSRAYLHHLDKCKEILGARLATIHNLRYYQTLMRGLREAIAAGRLASFVAEFRALRETGQADAASTPWSNASAGRTDSPSI

SEQ ID NO: 61803 - protein, 367 aa, Thiobacillaceae bacterium
  misc_feature (1)..(367): tr|A0A4R1BL51|A0A4R1BL51_9PROT Queuine tRNA-ribosyltran sferase OS=Thiobacillaceae bacterium LSR1 OX=2528202 GN =tgt PE=3 SV=1
MKFDLLTTSGLARRGRLELAHGVVETPVFMPVGTYGAVKSVTPDEVEALGAQIVLGNTFHLWLRPGLEVVAAFGGLHDFMAWRGPILTDSGGFQVYSLTHLRKITEEGVKFASPLDGARLMLTPEQSMAIQRTLNSDIVMIFDECTPYPADWQTAKISMELSLRWAARSKAAHQGNPNALFGIVQGGMYEDLRDRSLAELGRIGFDGYAIGGLSVGEPKEDMVRILAYTAPRLPADRPRYLMGVGTPEDIVQAVGQGIDMFDCVMPTRNARHGVLFTRYGDLRIKNARHRTDTGPIDPSCDCYTCRNFSRAYLHHLFRAGESLAGRLNTIHNLHYYQTLMRELRQAIEAGRYTEFVAAFNNDRMAAC

SEQ ID NO: 61804 - protein, 367 aa, Thiobacillus denitrificans
  misc_feature (1)..(367): sp|Q3SH61|TGT_THIDA Queuine tRNA-ribosyltransferase OS= Thiobacillus denitrificans (strain ATCC 25259) OX=29241 5 GN=tgt PE=3 SV=1
MKFDLLRTDGGARRGQLHLAHGVVQTPVFMPVGTYGTVKAMSPTEIADIGFEMLLSNTFHLWLRPGLEVIEAHGGLHRFMGWDKPILTDSGGFQVFSLGKLRKITEEGVKFASPTNGDKLFLTPETSMQIQRTLNSDIVMIFDECTPYPATERQAADSMRMSLRWAARSKAAHAGNPNALYGIVQGGMYEALRDESARELIGMDFDGYAIGGLSVGEPKDDMTRILAHTAPQLPADKPRYLMGVGTPSDLVAAVAAGIDQFDCVLPTRNARHGILFTRRGEIRIRNARWKLDTAPIDEECDCYACRHFTRAYVHHLIRAGEILGARLTTLHNLHYYHRLMAEVRAAIDAQRFSEFVARFHATQALGW

SEQ ID NO: 61805 - protein, 367 aa, Thiobacillus denitrificans
  misc_feature (1)..(367): tr|A0A119CYD3|A0A119CYD3_THIDE Queuine tRNA-ribosyltran sferase OS=Thiobacillus denitrificans OX=36861 GN=tgt P E=3 SV=1
MKFDLLTTDGGARRGQLHLAHGTVQTPAFMPVGTYGTVKAMSPFELTEIGFEMVLSNTFHLWLRPGLEVIEKFGGLHRFMGWDKPILTDSGGFQVFSLGKLRKITEEGVKFASPINGDKLFLTPEISMQIQHTLNSDIVMIFDECTPYPATEREAADSMRMSLRWAERSKTAHAGNPNALYGIVQGGMFETLRDESARELIGMDFDGYAIGGLSVGEPKDDMARILAHTAPQLPAHKPRYLMGVGTPSDLVAAVAQGIDQFDCVLPTRNARHGILYTRHGDMRIRNARWKTDTAPIDDECTCHTCTHFSRAYVHHLIRANEILGARLATIHNLHYYHRLMADMRTAIEAHRFADFTARFHEMQTCGW

SEQ ID NO: 61806 - protein, 367 aa, Thiobacillus sp.
  misc_feature (1)..(367): tr|A0A1Q4EN46|A0A1Q4EN46_9PROT Queuine tRNA-ribosyltran sferase OS=Thiobacillus sp. 0-1251 OX=1895858 GN=tgt PE =3 SV=1
MKFDLLATDGGARRGQLQLAHGTVQTPVFMPVGTYGTVKAMSPAELTDIGFEMVLSNTFHLWLRPGLEVIEKFDGLHRFMGWDKPILTDSGGFQVFSLGKLRKITEDGVKFASPINGDKLFLTPEISMQIQRTLNSDIVMIFDECTPYPATEREAADSMRLSLRWAARSKAAHAGNPNALYGIVQGGMYEGLRDESARELIAMDFDGYAIGGLSVGEPKDDMTRILAHTAPQLPADKPRYLMGVGTPSDLVAAVAQGIDQFDCVLPTRNARHGILFTRRGEMRIRNARWKTDTAPIDDECDCHTCTHFSRAYVHHLIRAGEILGARLATIHNLHYYHRLMAEMRAAIEAHRFADFTARFHEMQTHGW

SEQ ID NO: 61807 - protein, 367 aa, Thiobacillus sp.
  misc_feature (1)..(367): tr|A0A1Q4GTY4|A0A1Q4GTY4_9PROT Queuine tRNA-ribosyltran sferase OS=Thiobacillus sp. 65-29 OX=1895862 GN=tgt PE= 3 SV=1
MKFDLLAIDAGARRGRLQLAHGTVETPAFMPVGTYGTVKAMAPAEITEIGYEMVLSNTFHLWLRPGLAVIEKFGGLHRFMGWERPILTDSGGFQVFSLGKLRKISEEGVKFSSPINGDKLFLTPEISMHIQRTLNSDIVMIFDECTPYPASEREAADSMRLSLRWAARSKAAHADNPNALYGIVQGGMYESLRDESAGELIAMDFDGYAIGGLSVGEPKDDMARILAHTAPRLPSDKPRYLMGVGTPADLVAAVAQGIDQFDCVLPTRNARHGILFTRRGELRIRNARWKLDTAPIDPECDCHACTHFSRAYVHHLIRAGEILGARLATIHNLHYYHRLMADMRAAVESGQFAGFAARFHELQSSGW

SEQ ID NO: 61808 - protein, 369 aa, Thiocapsa marina
  misc_feature (1)..(369): tr|F9U701|F9U701_9GAMM Queuine tRNA-ribosyltransferase OS=Thiocapsa marina 5811 OX=768671 GN=tgt PE=3 SV=1
MDFDLLANDGLARRGRLTFARGMVETPAFMPVGTYGTVKAMTPEELTDLGAEIVLGNTFHLMLRPGTEIIRRCGDLHAFMHWERPILTDSGGFQVFSLGELRKITEEGVHFRSPVDGSPVFLSPEISMQVQRELGSDIVMIFDECTPYPADEAQARASMALSLRWAARSRVAHGDNPSALFGIVQGGMHEEPRAESLDGLMTIGFDGYAVGGLSVGETEAERLRILDFLADKLPKDRPRYLMGVGTPEDIVAAVGRGIDMFDCVMPTRNARNGDLFTHQGKVRIRNAANRTDEGPVDPLCDCYCCRHYSRAYLHHLDKCKEILGARLQTIHNLHYYQTLMRGLREAIAAGRYADFVREFEALRATPDPA

SEQ ID NO: 61809 - protein, 369 aa, Thiocapsa rosea
  misc_feature (1)..(369): tr|A0A495V655|A0A495V655_9GAMM Queuine tRNA-ribosyltran sferase OS=Thiocapsa rosea OX=69360 GN=tgt PE=3 SV=1
MDFDLLANDGLARRGRLRFMRGTVETPAFMPVGTYGTVKAMTPEELTDLGAEIVLGNTFHLMLRPGTEIIRRCGDLHGFMHWERPILTDSGGFQVFSLGELRKITEEGVHFRSPVDGSPVFLSPEISMQVQRTLGSDIVMIFDECTPYPADETQARTSMALSLRWAARSREAHGENPSALFGIVQGGMHEGPRAESLDGLMTIGFDGYAVGGLSVGETEAERLRILDFLADKLPADRPRYLMGVGTPEDIVAAVGRGIDMFDCVMPTRNARNGDLFTHQGKVRIRNAAHRTDEGPVDPLCDCYCCRHYSRAYLHHLDKCKEILGARLQTIHNLHYYQTLMRGLREAIAAGRYGAFVSEFEALRATPAPA

SEQ ID NO: 61810 - protein, 369 aa, Thiocapsa roseopersicina
  misc_feature (1)..(369): tr|A0A1H2WUK3|A0A1H2WUK3_THIRO Queuine tRNA-ribosyltran sferase OS=Thiocapsa roseopersicina OX=1058 GN=tgt PE=3 SV=1
MDFDLLAVDGLARRGRLSFARGTVETPAFMPVGTYGTVKAMTPEELTDLGAEIVLGNTFHLMLRPGTEIIRRCGDLHGFMHWERPILTDSGGFQVFSLGELRKITEEGVHFRSPVDGSPVFLSPEISMQVQRELGSDIVMIFDECTPYPADEAQARASMALSLRWAARSREAHGDNPSALFGIVQGGMHERPRAESLDGLMTIGFDGYAVGGLSVGETEAERLCILDFLSDRLPTDRPRYLMGVGTPEDIVAAVGRGIDMFDCVMPTRNARNGDLFTHQGKVRIRNAANRTDEGPLDPLCDCYCCRHYSRAYLHHLDKCKEILGARLQTIHNLHYYQTLMRGLREAIAAGRYAAFVGEFEALRATPDPA

SEQ ID NO: 61811 - protein, 369 aa, Thiocapsa sp.
  misc_feature (1)..(369): tr|A0A0U5E1F2|A0A0U5E1F2_9GAMM Queuine tRNA-ribosyltran sferase OS=Thiocapsa sp. KS1 OX=610332 GN=tgt PE=3 SV=1
MDFDLLAVDGLARRGRLSFARGTVETPAFMPVGTYGTVKAMTPEELTDLGAEIVLGNTFHLMLRPGTEIIRRCGDLHGFMHWERPILTDSGGFQVFSLGELRKISEEGVHFRSPVDGSPVFLSPEISMQVQRALGSDIVMIFDECTPYPADEAQARASMALSLRWAARSREAHGDNPSALFGIVQGGMHEGPRAESLDGLMSIGFDGYAVGGLSVGETEAERLRILDFLGDRLPTDRPRYLMGVGTPEDIVAAVGRGIDMFDCVMPTRNARNGDLFTHQGKVRIRNAANRTDEGPLDPLCDCYCCRHYSRAYLHHLDKCKEILGARLQTIHNLHYYQTLMRGLREAIAAGRYAAFVGEFEALRAGSRSS

SEQ ID NO: 61812 - protein, 376 aa, Thioclava arenosa
  misc_feature (1)..(376): tr|A0A2A4CNG7|A0A2A4CNG7_9RHOB Queuine tRNA-ribosyltran sferase OS=Thioclava arenosa OX=1795308 GN=tgt PE=3 SV= 1
MSQKFSFALHATDGAARTGVISTPRGEIRTPAFMPVGTAATVKAMMPESVRATGADIILGNTYHLMLRPTAERIDRLGGLHKFMNWERPILTDSGGFQVMSLASLRKLTEEGVRFSSHIDGSKHMLTPERSMEIQKLLGSDIVMAFDECPALPATDDEVAKSMRLSMRWAQRSRDAFGDRPGHALFGIMQGGVTRELREESAEALTRIGFDGYAVGGLAVGEGQEAMFGVLDYAPGFLPEDKPRYLMGVGKPDDIVGAVERGIDMMDCVLPSRSGRTGQAWTRRGQVNIKNARHQDDPRPLDEACTCPACRNYSRAYLHHVFRAGEMISGMLLTWHNLHYYQELMQGLRDAIAAGSLKQFVADFHAQRAMGDIEPL

SEQ ID NO: 61813 - protein, 375 aa, Thioclava atlantica
  misc_feature (1)..(375): tr|A0A085TWB8|A0A085TWB8_9RHOB Queuine tRNA-ribosyltran sferase OS=Thioclava atlantica OX=1317124 GN=tgt PE=3 S V=1
MTRFSFSLTATDGRARTGTISTPRGEIRTPAFMPVGTAATVKAMMPESVAATGADILLGNTYHLMLRPGAERVARLGGLHKFMNWQKPILTDSGGFQVMSLAGLRKLTEEGVRFSSHVDGSKHLLTPERSMEIQKLLGSDIVMAFDECPALPATDEEVAKSMRLSMRWAQRSRDAFGDRPGHALFGIQQGGVTRELREESAEKLKEIGFEGYAVGGLAVGEGQEAMFGVLDYAPGMLPQDKPRYLMGVGKPDDIVGAVERGIDMMDCVLPSRSGRTGQAWTRRGQVNIKNARHQDDPRPLDENCTCPACRNYSRAYLHHVYRAGEMISGMLLTWHNLHYYQELMAGLRAAIAEGELARFVAEFHAMRDAGDIEPL

SEQ ID NO: 61814 - protein, 375 aa, Thioclava dalianensis
  misc_feature (1)..(375): tr|A0A074THN7|A0A074THN7_9RHOB Queuine tRNA-ribosyltran sferase OS=Thioclava dalianensis OX=1185766 GN=tgt PE=3 SV=1
MTKFSFTRNATDGAARTGVIDTPRGQIRTPAFMPVGTAATVKAMMPESVAATGADILLGNTYHLMLRPTAERIAGLGGLHTFMNWDKPILTDSGGFQVMSLASLRKLTEEGVRFASHIDGSKHMLTPERSMEIQKLLGSDIVMCFDECPALPATEAEVAASMRLSMRWAQRSRDAFGDRPGHALFGIQQGGVTRELRAESAEKLKEIGFDGYAVGGLAVGEGQEAMFGVLDYACDMLPEDKPRYLMGVGKPDDIVGAVERGIDMMDCVLPSRSGRTGQAWTRRGQVNIKNARHADDPRPLDEACSCPACSNYSRAYLHHVFRSQEMISGMLLTWHNLHYYQELMAGLRAAISEGRLAAFVADFHALRAQGDIEPL

SEQ ID NO: 61815 - protein, 375 aa, Thioclava electrotropha
  misc_feature (1)..(375): tr|A0A1W9XUN1|A0A1W9XUN1_9RHOB Queuine tRNA-ribosyltran sferase OS=Thioclava electrotropha OX=1549850 GN=tgt PE =3 SV=1
MTKFSFTLKATDGAARTGTISTPRGEIRTPAFMPVGTAATVKAMMPESVAATGADILLGNTYHLMLRPGAERVARLGGLHKFMNWDKPILTDSGGFQVMSLASLRKLTEDGVTFASHVDGSKHMLSPERSMEIQKLLGSDIVMCFDECPALPATEEEVAKSMRLSMRWAQRSRDAFGDRPGHALFGIQQGGVTRELREESAEKLKEIGFEGYAVGGLAVGEGQEAMFGVLDYAPGMLPQDKPRYLMGVGKPDDIVGAVERGIDMMDCVLPSRSGRTGQAWTRRGQVNIKNARHADDPRPLDEACTCPACSNYSRAYLHHVFRSGEMISGMLLTWHNLHYYQELMAGLRAAIDEGALARFVSEFHETRAAGDIEPL

SEQ ID NO: 61816 - protein, 375 aa, Thioclava indica
  misc_feature (1)..(375): tr|A0A074KIJ3|A0A074KIJ3_9RHOB Queuine tRNA-ribosyltran sferase OS=Thioclava indica OX=1353528 GN=tgt PE=3 SV=1
MSKFSFTLNATDGAARTGVISTPRGEIRTPAFMPVGTAATVKAMMPESVAATGADILLGNTYHLMLRPTAERIARLGGLHKFMNWNKPILTDSGGFQVMSLASLRKLTEEGVRFASHIDGSKHMLTPERSMEIQKLLGSDIVMAFDECPALPATDAEVAKSMRLSMRWALRSREAFGDRPGYALFGIQQGGVTRELRAESAEKLTEIGFEGYAVGGLAVGEGQEVMFGVLDYAPDMLPVDKPRYLMGVGKPDDIVGAVERGIDMMDCVLPSRSGRTGQAWTRRGQINIKNARHADDPRPLDEGCTCPACRNYSRAYLHHVFRSQEMISGMLLTWHNLHYYQDLMQGLRDAIAAGTLAQFVAAFHAKRAEGDIEPI

SEQ ID NO: 61817 - protein, 375 aa, Thioclava pacifica
  misc_feature (1)..(375): tr|A0A074J8A4|A0A074J8A4_9RHOB Queuine tRNA-ribosyltran sferase OS=Thioclava pacifica DSM 10166 OX=1353537 GN=t gt PE=3 SV=1
MTKFSFTLKATDGRARTGTISTPRGEIQTPAFMPVGTAATVKAMMPESVAATGADILLGNTYHLMLRPGAERVARLGGLHKFMNWNKPILTDSGGFQVMSLSSLRKLTEEGVTFASHVDGSKHMLSPERSMEIQKLLGSDIVMCFDECPALPATEDEVAKSMRLSMRWAQRSRDAFGDRPGHALFGIQQGGVTRELREESAEKLKEIGFDGYAVGGLAVGEGQEAMFGVLDYAPEMLPTDKPRYLMGVGKPDDIVGAVERGIDMMDCVLPSRSGRTGQAWTRRGQVNIKNARHADDPRPLDEACTCPACQNYSRAYLHHVFRAGEMISGMLLTWHNLHYYQELMAGLRAAITEGELARFVAEFHETRAMGDIEPL

SEQ ID NO: 61818 - protein, 375 aa, Thioclava sp.
  misc_feature (1)..(375): tr|A0A4R7KL68|A0A4R7KL68_9RHOB Queuine tRNA-ribosyltran sferase OS=Thioclava sp. ES.032 OX=1798206 GN=tgt PE=3 SV=1
MTKFSFTLKATDGAARTGTISTPRGEIRTPAFMPVGTAATVKAMMPESVAATGADILLGNTYHLMLRPGAERVARLGGLHKFMNWDKPILTDSGGFQVMSLASLRKLTEEGVTFASHVDGSKHMLSPERSMEIQKLLGSDIVMCFDECPALPATEDEVAKSMRLSMRWAQRSRDAFGDRPGHALFGIQQGGVTRELREESAEKLKEIGFEGYAVGGLAVGEGQEAMFGVLDYAPGMLPQDKPRYLMGVGKPDDIVGAVERGIDMMDCVLPSRSGRTGQAWTRRGQVNIKNARHADDPRPLDEACTCPACSNYSRAYLHHVFRSGEMISGMLLTWHNLHYYQELMAGLRAAIDEGALARFVSEFHDTRAMGDIEPL

SEQ ID NO: 61819 - protein, 375 aa, Thioclava sp.
  misc_feature (1)..(375): tr|A0A1T2B505|A0A1T2B505_9RHOB Queuine tRNA-ribosyltran sferase OS=Thioclava sp. DLFJ4-1 OX=1915313 GN=tgt PE=3 SV=1
MTKFSFTLKATDGAARTGTISTPRGEIRTPAFMPVGTAATVKAMMPESVAATGADILLGNTYHLMLRPGAERVARLGGLHKFMNWDKPILTDSGGFQVMSLASLRKLTEEGVTFASHVDGSKHMLSPERSMEIQKLLGSDIVMCFDECPALPATEEEVAKSMRLSMRWAQRSRDAFGDRPGHALFGIQQGGVTRELREESAEKLKEIGFEGYAVGGLAVGEGQEAMFGVLDYAPGMLPQDKPRYLMGVGKPDDIVGAVERGIDMMDCVLPSRSGRTGQAWTRRGQVNIKNARHADDPRPLDEACTCPACSNYSRAYLHHVFRSGEMISGMLLTWHNLHYYQELMAGLRAAIDEGALARFVSEFHETRAMGDIEPL

SEQ ID NO: 61820 - protein, 366 aa, Thiocystis violascens
  misc_feature (1)..(366): tr|I3YFB6|I3YFB6_THIV6 Queuine tRNA-ribosyltransferase OS=Thiocystis violascens (strain ATCC 17096 / DSM 198 / 6111) OX=765911 GN=tgt PE=3 SV=1
MEFDLLGRDGLARRGHLRFARGTVETPAFMPVGTYGTVKAMTPEELLEIGAEIVLGNTFHLMLRPGTDVIRRCGDLHRFMHWERPILTDSGGFQVFSLGDLRRITEEGVHFQSPIDGSPVFLSPEVSMRVQRELGSDIVMIFDECTPYPADEDRARASMELSLRWAARSRAAHGDNPAALFGIVQGGMHERPRAESLDGLQAIGFDGYAIGGLSVGEPEADRLRVLDFLADKLPVDRPRYLMGVGTPEDIVAAVRRGIDMFDCVMPTRHARNGYLFTHQGTVKIRNAIHRTDDGPLDPLCDCYTCRHYSRAYLHHLDKCKEILGARLATIHNLRYYQTLMRGLREAIAAGRLDGFVAEFEGLRALT

SEQ ID NO: 61821 - protein, 367 aa, Thioflavicoccus mobilis
  misc_feature (1)..(367): tr|L0GX30|L0GX30_9GAMM Queuine tRNA-ribosyltransferase OS=Thioflavicoccus mobilis 8321 OX=765912 GN=tgt PE=3 S V=1
MRFELFARDGAARRGRLTFERGVVETPAFMPVGTYGTVKAMTPEELEGLGAQIILGNTFHLMLRPGTEVIRRCGDLHGFMHWPGPILTDSGGFQVFSLGELRRISEAGVHFKSPIDGSPVFLGPEESMAVQQALGSDIVMIFDECTPYPAEPDQVRASMELSLRWAARSKAAHGDNPAALFGIVQGGMDEGLRAASLEGLQEIGFDGYAVGGLSVGEPPAERLRVLDFLAGRLPPERPHYLMGVGTPGDIVAAVCRGIDMFDCVMPTRNARNGHLFTHQGVVRIRNARYRDDEGPLDAFCDCYTCRNYSRAYLHHLDRCNEILGARLNSLHNLYYYQSLMRDLREAIAAGRLAGFVADFEARAATGR

SEQ ID NO: 61822 - protein, 373 aa, Thioflexothrix psekupsii
  misc_feature (1)..(373): tr|A0A251X6M2|A0A251X6M2_9GAMM Queuine tRNA-ribosyltran sferase OS=Thioflexothrix psekupsii OX=1570016 GN=tgt P E=3 SV=1
MFFEKIAQDKQARHGRLVFTRGVVDTPAFMPVGTVGSVKAMSPENVMATGAQIILGNTFHLMLRPGTAVIQAHGDLHDFMHWSQPILTDSGGFQVFSLGKMRTISEKGVLFRSPINGDKVFLGPEESMAVQKALGADIVMIFDECTPYPATETQARDSMQLSLRWADRSKKAHEGNTAALFGIVQGGMYEFLRQESLHGLQAIDFDGYAIGGLSVGEPKEERMRILNSITPQMPADKPRYLMGVGTPSDIVEAVRCGIDMFDCVMPTRNARNGHLFTRHGVVKIRNSRHRHDTRPLDEQCTCYTCQHYSRAYLHHLDRSKEILGAHLNTVHNLHYYQFLMQGLRSAIQMQQLDAFVTDFYRMQQCNDAINEWH

SEQ ID NO: 61823 - protein, 371 aa, Thiogranum longum
  misc_feature (1)..(371): tr|A0A4R1HDL3|A0A4R1HDL3_9GAMM Queuine tRNA-ribosyltran sferase OS=Thiogranum longum OX=1537524 GN=tgt PE=3 SV= 1
MQYELINKDGRARRGRLAFERGVVETPAFMPVGTYGTVKGMRPEQVAESGAQILLGNTFHLMLRPGTDIIRAHGDLHDFMNWQGPILTDSGGFQVFSLDELRKITEQGVEFRSPVNGDKVFLGPEQSMAVQCALGADIVMIFDECTPYPASTEQVRDSMQLSLRWAQRSREAHGDSPAALFGIVQGGMYPDLRLESLKGLKDIGFDGYAIGGLSVGEPHEERILVLDTLDPALPGDAPRYLMGVGTPEDIVEAVRRGIDMFDCVMPTRNARNGHLFTTQGTLRLRNARFREDTGPLDPECDCYTCQHYSRAYLYHLDRCNEILGAHLNTVHNLRYYQRLMAGLREAIQSGRLEAFVTDFYAKRGQSAPPVP

SEQ ID NO: 61824 - protein, 371 aa, Thiohalobacter thiocyanaticus
  misc_feature (1)..(371): tr|A0A1Z4VQL6|A0A1Z4VQL6_9GAMM Queuine tRNA-ribosyltran sferase OS=Thiohalobacter thiocyanaticus OX=585455 GN=t gt PE=3 SV=1
MQFELIATDGQARRGRLTFDRGTVETPAFMPVGTYGTVKAMTPEEVSDTGAEIILGNTFHLMLRPGTEIIRRHGDLHDFMHWNGPILTDSGGFQVFSLGEMRKITEQGVQFQSPVDGSKVFLGPEESMRVQRELGADIVMIFDECTPYPADEKQARESMELSLRWAERSRAAHGDNPAALFGIVQGGMYPELRAQSLAGLQGIGFDGYAIGGLSVGETEAERIRILDALAPILPTDRPRYLMGVGRPEDIVEAVRRGVDMFDCVLPTRNARNGYLFTHRGTVKIRNSASRRDTGPLDPDCGCYTCRNYSRAYLHHLDKCNEILGSRLNTIHNLYYYQTLMRGLREAVAAGELAAYVADFYARRDPAAPSMA

SEQ ID NO: 61825 - protein, 371 aa, Thiohalobacter thiocyanaticus
  misc_feature (1)..(371): tr|A0A426QGJ0|A0A426QGJ0_9GAMM Queuine tRNA-ribosyltran sferase OS=Thiohalobacter thiocyanaticus OX=585455 GN=t gt PE=3 SV=1
MQFELIATDGHARRGRLSFDRGTVETPAFMPVGTYGTVKAMTPEEVRDTGAGIILGNTFHLMLRPGTEIIRSHGDLHDFMHWDGPILTDSGGFQVFSLGDMRRITEQGVHFQSPVDGSRVFLGPEESMRVQRELGADIVMIFDECTPYPADADQARASMELSLRWAERSRIAHGDNPAALFGIVQGGMYPELRATSLSGLEAIGFDGYAIGGLSVGETEAERIRILDALAPILPGERPRYLMGVGRPEDIVEAVRRGVDMFDCVLPTRNARNGYLFTHRGTVKIRNSASRRDTGPLDPDCDCYTCRNYSRAYLHHLDRCNEILGSRLNTIHNLYYYQTLMRGLRAAVAAGGLEAFVADFYARRDQAPPSVA

SEQ ID NO: 61826 - protein, 368 aa, Thiohalomonas denitrificans
  misc_feature (1)..(368): tr|A0A1G5Q1P7|A0A1G5Q1P7_9GAMM Queuine tRNA-ribosyltran sferase OS=Thiohalomonas denitrificans OX=415747 GN=tgt PE=3 SV=1
MKFDLLKTDGPARRGRMYFERGTVETPAFMPVGTYGTVKAMTPEELQGIGAEIILGNTFHLMLRPGTEVIAAHGDLHDFMHWEGPILTDSGGFQVFSLGKMRKITEEGVRFQSPVDGSRVFLGPEESMAVQRELGSDIVMIFDECTPYPADERQSRASMELSLRWARRSKEAHGENPNALFGIVQGGMYPHLRDESLAGLTEIGFDGYAIGGLSVGEPKEEMLAILDHTGPGMPEDRPRYLMGVGRPEDIVEAVLRGIDMFDCVMPTRNARNGHLFTRRGVIRIRNARYEKDTRPLDLECGCYTCQNYSRAYLRHLHRTNEILGARLNTIHNLFHYQALMKRLREAIAAGRLKAFVSEFYSRLAEGVA

SEQ ID NO: 61827 - protein, 371 aa, Thiohalophilus thiocyanatoxydans
  misc_feature (1)..(371): tr|A0A4R8IR17|A0A4R8IR17_9GAMM Queuine tRNA-ribosyltran sferase OS=Thiohalophilus thiocyanatoxydans OX=381308 G N=tgt PE=3 SV=1
MKFELLQSDGEARRGRLTFDRGTVETPAFMPVGTYGTVKAMTPEELRELGAEIVLGNTFHLMLRPGTEVIEAHGDLHDFMHWDGPILTDSGGFQVWSLGKLRKLSEAGVDFASPVDGSRHFMGPEESMAVQRTLGSDIVMVFDECTPYPASEAEARTSMELSLRWAERCKVAHGDNAAALFGIVQGGMYESLRQASLDGLTRMGFDGYAIGGLSVGEPKEDMLRILDYLGPRMPVDTPRYLMGVGKPEDLVEGVRRGIDMFDCVMPTRNARNGFIFTSTGLLRIRNSQFRTDTRPLDETCDCYTCRHYSRAYLRHLDKTGEILGARLNTLHNLHYYQQLMAQLRAAIAAGNLGGFVADFYDKRSQALPAMS

SEQ ID NO: 61828 - protein, 378 aa, Thiohalorhabdus denitrificans
  misc_feature (1)..(378): tr|A0A0P9C8Z4|A0A0P9C8Z4_9GAMM Queuine tRNA-ribosyltran sferase OS=Thiohalorhabdus denitrificans OX=381306 GN=t gt PE=3 SV=1
MTDTPDFSFDLLATDGAARRGRVVTGRGPIDTPAFMPVGTAGTVKGMLPEQVAATGAQILLGNAYHLMLRPGAERVAEFGGLHRFMNWDGPILTDSGGYQVLSLTDLRKLDENGVTFRSHIDGSYWEMTPESSVEIQRLLDADITMVFDECPPYPCEEDEAKRSLDLTLRWAERSKAAFENRPGYGLFGIVQGGVHDHLREESARRLVEMGFHGYAVGGLAVGEPAAERNHTLEVTTPVLPTDRPRYLMGVGKPVDLVDAVERGIDMFDCVLPTRSGRRGLAFTWGGDLKLTNARFRDDHEPLDPNSSCPASRDYSKGYLHHLFRSGELLGWVLLTWHNLHFYQELMAAMRAAVEEGRFADFAAAFRERQAKPKQAGA

SEQ ID NO: 61829 - protein, 366 aa, Thiohalospira halophila
  misc_feature (1)..(366): tr|A0A1I1QXT5|A0A1I1QXT5_9GAMM Queuine tRNA-ribosyltran sferase OS=Thiohalospira halophila DSM 15071 OX=1123397 GN=tgt PE=3 SV=1
MDYRLDATDGPARTGELTFPRGRVPTPAFMPVGTYGTVKAMTPEAVAETGAGIILGNTFHLMLRPGTEVIAAHGDLHDFMNWHGPILTDSGGFQVWSLGKLRKVEEAGVHFRSPVDGAKIFMGPEESMAVQRALGADIVMIFDECTPYPADEATARASMELSLRWAERSREAHGDNPAALFGIVQGGMYPELRAESLAGLQAIGFDGYAIGGLSVGEPPELMNAILDDLVPRMPADRPRYLMGVGRPEDIVEAVRRGVDMFDCVMPTRNARNGHLFTSEGVVRIRHARHRLDTGPADPACDCYTCQHYSRAYLRHLHRCGEILAAQLMTLHNLHFYQRLMADLRAAIAAGELEAFATDFLGRRSQA

SEQ ID NO: 61830 - protein, 375 aa, Thiolapillus brandeum
  misc_feature (1)..(375): tr|W0TIZ5|W0TIZ5_9GAMM Queuine tRNA-ribosyltransferase OS=Thiolapillus brandeum OX=1076588 GN=tgt PE=3 SV=1
MKFELHHTDSAARQGKLTFARGPIDTPAFMPVGTYGTVKAMTPEELEGMGAQIILGNTFHLWLRPGTEVIKAHGDLHDFTHWEKPILTDSGGFQVYSLGQMRRITEEGVHFRSPVNGSRVFMGPEESMAIQRDLGSDIVMIFDECTPYPATEEEARHSMELSLRWARRSREAHGDNPAALFGIVQGGVYNDLRQRSLDGLMEIGFDGYAVGGLSVGEPPQDRWRVLDYLADRLPRDKPRYLMGVGTPQDIVEAVSRGIDMFDCVMPTRNARNGHLFTHEGVVRIRNACHEKDTGPVDPHCDCYTCRNYSRAYLRHLQRCNEILGARLNTIHNLYYYQKLMADLRQAISGNRLASFREDFYAARGLPLPSLQGDIL

SEQ ID NO: 61831 - protein, 372 aa, Thiomicrorhabdus sp.
  misc_feature (1)..(372): tr|A0A4P9K3Y9|A0A4P9K3Y9_9GAMM Queuine tRNA-ribosyltran sferase OS=Thiomicrorhabdus sp. G1 OX=2580412 GN=tgt PE =3 SV=1
MEFELDNTDGRARRGRLKFARGVVETPAFMPVGTYGSVKGMTPEEIKDTGAQIILGNTFHLALRPGTDIIELHGDLHDFTHWDGPILTDSGGFQVFSLGKMRKIKEEGVTFRSPVNGEKIFMGPEESMEIQRKLGSDIVMIFDECTPYPATHKEARESMELSMRWAKRSKDAHGDNPSALFGIVQGGMYEDLRVQSIEGLKEIEFDGYAIGGLSVGEPKDEMMATLDFTEPHMPKDKPRYLMGVGKPEDLVEAVRRGIDMFDCVMPTRNARNGFLFSRQGVVKLRNAKHKTSLEPIDKECGCYTCQNYTLSYLHHLDKCREIQGARLNTIHNLHYYQDLMQGLRDAISENRLEAFVEEFYAGIGQPVPPLAD

SEQ ID NO: 61832 - protein, 370 aa, Thiomicrospira aerophila
  misc_feature (1)..(370): tr|W0DUT4|W0DUT4_9GAMM Queuine tRNA-ribosyltransferase OS=Thiomicrospira aerophila AL3 OX=717772 GN=tgt PE=3 S V=1
MKFELDKQDGRARRGRLKFARGTVETPAFMPVGTYGSVKGMTPEEITDTGAQIMLGNTFHLAIRPGTDIIKLHGDLHDFMHWKGPILTDSGGFQVFSLGKMRKITEEGVTFANPVNGSKIFMGPEESMQIQRDLGSDIVMIFDECTPYPASHIEADVSMRLSLRWAQRSKEAHGDNPSALFGIVQGGMYADLRKESAEKLQQIGFDGYAIGGLSVGEPKEDMKRVLDATEPLLPKDKPRYLMGVGKPEDIVEAVRRGIDMFDCVIPTRNARNGFLFTHSGVVKIRNAVNKTSLEPIDAQCDCYTCKNYTRAYLHHLDKCGEIQGARLNTIHNLHYYQKLMRDIRQSIAEQRFEQFVVDFYIARGLEVPPL

SEQ ID NO: 61833 - protein, 371 aa, Thiomicrospira cyclica
  misc_feature (1)..(371): tr|F6DD20|F6DD20_THICA Queuine tRNA-ribosyltransferase OS=Thiomicrospira cyclica (strain DSM 14477 / JCM 11371 / ALM1) OX=717773 GN=tgt PE=3 SV=1
MEFELDNQDGRARRGRLKFERGTVETPAFMPVGTYGSVKGMTPEEITQTGAQIILGNTFHLAIRPGTEIIKLHGDLHDFMHWQGPILTDSGGFQVFSLGKMRKITEAGVTFANPVNGSKIFMGPEESMQIQRDLGSDIVMIFDECTPYPATHIEADVSMRLSLRWAQRSKEAHGDNPAALFGIVQGGMYADLRKESAEKLQQIGFDGYAIGGLSVGEPKEDMKRVLDATEPLLPNDKPRYLMGVGKPEDIVEAVRRGIDMFDCVIPTRNARNGFLFTHTGVVKIRNAVHKTSLEPVDAQCDCYTCQNYSRAYLHHLDKCGEIQGARLNTIHNLHYYQTLMRDIRTAISHHQFEQFVVDFYAARGLSVPPLS

SEQ ID NO: 61834 - protein, 370 aa, Thiomicrospira sp.
  misc_feature (1)..(370): tr|A0A3S9TNH9|A0A3S9TNH9_9GAMM Queuine tRNA-ribosyltran sferase OS=Thiomicrospira sp. S5 OX=1803865 GN=tgt PE=3 SV=1
MKFELDKQDGRARRGRLIFDRGVVETPAFMPVGTYGSVKGMMPEEVADTGAQIILGNTFHLAIRPGTDIIEQHGDLHDFINWPGPILTDSGGFQVFSLGKMRKIVEEGVHFRNPVNGSRLFMGPEESMEIQRKLGSDIVMIFDECTPYPASHEVAAESMRLSLRWAERSKNAHEGNPSALFGIVQGGMYEDLREESIQALMEIGFDGYAIGGLSVGEPKEEMMATLDFTEPHMPTDKPRYMMGVGKPEDIVEAVRRGIDMFDCVIPTRNARNGFLFTHTGVVKIRNAVHKTSLEPLDAKCDCYTCRNYTRAYLHHLDKCGEIQGARLNTIHNLHYYQLLMKGLRDAIASNSLDAFVADFYAERDEAVPPL

SEQ ID NO: 61835 - protein, 370 aa, Thiomicrospira sp.
  misc_feature (1)..(370): tr|A0A0X3TQ94|A0A0X3TQ94_9GAMM Queuine tRNA-ribosyltran sferase OS=Thiomicrospira sp. XS5 OX=1775636 GN=tgt PE= 3 SV=1
MKFELDKQDGRARRGRLIFDRGVVETPAFMPVGTYGSVKGMMPEEVADTGAQIILGNTFHLAIRPGTDIIEQHGDLHDFINWPGPILTDSGGFQVFSLGKMRKIVEEGVHFRNPVNGSRLFMGPEESMEIQRKLGSDIVMIFDECTPYPASHEVAAESMRLSLRWAERSKKAHEGNPSALFGIVQGGMYEDLREESIQALMEIGFDGYAIGGLSVGEPKEEMMATLDFTEPHMPKDRPRYMMGVGKPEDIVEAVRRGVDMFDCVIPTRNARNGFLFTHTGVIKIRNAVHKTSLEPLDAKCDCYTCRNYTRAYLHHLDKCGEIQGARLNTIHNLHYYQLLMKGLRDAIASDSLDAFVADFYAERDEAVPPL

SEQ ID NO: 61836 - protein, 379 aa, Thiomonas arsenitoxydans
  misc_feature (1)..(379): tr|D6CR15|D6CR15_THIA3 Queuine tRNA-ribosyltransferase OS=Thiomonas arsenitoxydans (strain DSM 22701 / CIP 110 005 / 3As) OX=426114 GN=tgt PE=3 SV=1
MLQFTVHHTAGQARRGTLTLNHGRIDTPQFMPVGTYGTVKGITPDGLKAAGAQIILGNTFHLWLRPGLDVVRQFGGLHRFIGWDAPILTDSGGFQVWSLGAMRKISEEGVRFASPVNGDKLFLTPEVSMQIQTVLGSDIVMQFDECTPYDVDRAGQKHITTEAEARESMELSLRWAARCKAEFARLENPNALFGIVQGGMFEPLRDASLDGLAALDLPGYAIGGLSVGEPKDDMLRLLRHTAPRLPAHKPRYLMGVGTPEDLVDGVSAGIDLFDCVMPTRNARNGHLFTRFGDLRIRNARFKQDERPLDDTCTCATCRQFSRAYLHHLDRCGEMLFGMLATTHNLHYYLQLMRGMRTALDAEAFDAFVAQFHADRARGV

SEQ ID NO: 61837 - protein, 379 aa, Thiomonas bhubaneswarensis
  misc_feature (1)..(379): tr|A0A0K6HXM9|A0A0K6HXM9_9BURK Queuine tRNA-ribosyltran sferase OS=Thiomonas bhubaneswarensis OX=339866 GN=tgt PE=3 SV=1
MLQFTVHHTSGQARRGTLTLNHGVIDTPQFMPVGTYGTVKGITPEGLKAAGAQIILGNTFHLWLRPGLDVVRQFGGLHRFIGWDAPILTDSGGFQVWSLGAMRKISEEGVKFASPVNGDKLFLTPEVSMQIQTVLNSDIVMQFDECTPYDVTRGGQKHITTESEARASMELSLRWAARCKAEFARLENPNALFGIVQGGMFEHLRDASLDGLAALDLPGYAIGGLSVGEPKDDMLRLLRHTAPRLPANKPRYLMGVGTPEDLVAGVAAGIDLFDCVMPTRNARNGHLFTRYGDLRIRNARFKLDERPLDETCTCPTCRQFSRAYLHHLDRCGEMLFGMLATTHNLHYYLQLMRDMRAALDAGTFDAFVTQFRADRARGV

SEQ ID NO: 61838 - protein, 380 aa, Thiomonas delicata
  misc_feature (1)..(380): tr|A0A238D0M7|A0A238D0M7_THIDL Queuine tRNA-ribosyltran sferase OS=Thiomonas delicata OX=364030 GN=tgt PE=3 SV= 1
MLQFTIHRTAGHARRGTLTLNHGSIETPQFMPVGTYGTVKGITPAGLKDAGAQIILGNTFHLWLRPGLDVVRAFGGLHRFIGWDAPILTDSGGFQVWSLGRSAKISEEGVRFASPVNGDKLFLTPEVSMQIQTVLDADIVMQFDECTPYDVQRGGETHITTETEARASMELSLRWAARCKAEFARLDNPNALFGIVQGGMFESLRDASLAGLVDLDLPGYAIGGLSVGEPKEDMLRLLRHTAPRLPGHKPRYLMGVGTPEDLVDGVAAGIDLFDCVMPTRNARNGHLFTRFGDLRIRNARFKLDQRPIDETCACPACRQFSRAYLHHLDRCREMLFGMLATAHNLHYYLGLMREMREALDAGRFDDFVERFRRDRARGVA

SEQ ID NO: 61839 - protein, 379 aa, Thiomonas intermedia
  misc_feature (1)..(379): tr|D5X3U9|D5X3U9_THIK1 Queuine tRNA-ribosyltransferase OS=Thiomonas intermedia (strain K12) OX=75379 GN=tgt PE =3 SV=1
MLQFTVHHTAGQARRGTLTLNHGVIDTPQFMPVGTYGTVKGITPEGLKAAGAQIILGNTFHLWLRPGLDVVRQFGGLHRFIGWDAPILTDSGGFQVWSLGAMRKISEEGVRFASPVNGDKLFLTPEVSMQIQTVLGSDIVMQFDECTPYDVDRAGQKHITTEAEARESMELSLRWAARCKTEFARLKNPNALFGIVQGGMFEPLRDASLDGLTALDLPGHAIGGLSVGEPKDDMLRLLRHTAPRLPAHKPRYLMGVGTPEDLVDGVSAGIDLFDCVMPTRNARNGHLFTRFGDLRIRNARFKQDERPIDDTCTCPTCRQFSRAYLHHLDRCGEMLFGMLATTHNLHYYLQLMRDTRTALDAEAFDAFVAQFHADRARGV

SEQ ID NO: 61840 - protein, 380 aa, Thiomonas sp.
  misc_feature (1)..(380): tr|A0A259P986|A0A259P986_9BURK Queuine tRNA-ribosyltran sferase OS=Thiomonas sp. 15-66-11 OX=1970452 GN=tgt PE= 3 SV=1
MLQFTIHRTAGHARRGTLTLNHGSIETPQFMPVGTYGTVKGITPAGLKDAGAQIILGNTFHLWLRPGLDVVRAFGGLHRFIGWDAPILTDSGGFQVWSLGRSAKISEEGVRFASPVNGDKLFLTPEVSMQIQTVLDADIVMQFDECTPYDVQRGGETHITTETEARASMDLSLRWAARCKAEFARLDNPNALFGIVQGGMFESLRDASLAGLVDLDLPGYAIGGLSVGEPKEDMLRLLRHTAPRLPGHKPRYLMGVGTPEDLVDGVAAGIDLFDCVMPTRNARNGHLFTRFGDLRIRNARFKLDQRPIDETCACPACRQFSRAYLHHLDRCREMLFGMLATAHNLHYYLGLMREMREALDAGRFDDFVERFRRDRARGVA

SEQ ID NO: 61841 - protein, 382 aa, Thiomonas sp.
  misc_feature (1)..(382): tr|A0A078BDD7|A0A078BDD7_9BURK Queuine tRNA-ribosyltran sferase OS=Thiomonas sp. CB2 OX=554131 GN=tgt PE=3 SV=1
MSPMLQFTVHHTAGQARRGTLTLNHGVIDTPQFMPVGTYGTVKGITPDGLKTAGAQIILGNTFHLWLRPGLDVVRQFGGLHRFIGWDAPILTDSGGFQVWSLGAMRKISEEGVRFASPVNGDKLFLTPEVSMQIQTVLGSDIVMQFDECTPYDVDRAGQKHITTEAEARESMELSLRWAARCKTEFARLENPNALFGIVQGGMFEPLRDASLDGLAALDLPGYAIGGLSVGEPKDDMLRLLRHTAPRLPAHKPRYLMGVGTPEDLVDGVSAGIDLFDCVMPTRNARNGHLFTRFGDLRIRNARFKQDERPIDDTCTCATCRQFSRAYLHHLDRCGEMLFGMLATTHNLHYYLQLMRGMRTALDAEAFESFVAQFHADRARGV

SEQ ID NO: 61842 - protein, 376 aa, Thioploca ingrica
  misc_feature (1)..(376): tr|A0A090AIN8|A0A090AIN8_9GAMM Queuine tRNA-ribosyltran sferase OS=Thioploca ingrica OX=40754 GN=tgt PE=3 SV=1
MPIESFQILATEEQARCGCLRLPRGTIETPAFMPVGTYGTVKAMTPEQVRATHADIILCNTFHLMLRPGTAVIRAHGGLHDFIHWTRPILTDSGGFQVFSLGERRKISEAGVTFSSPIDGAKVFLGPEESMAVQRELGADIVMVFDECTPYPATAPQARDSMELSLRWAARSKIAHGDNPAALFGIVQGGMYEPLRQASLAGLMDIDFDGYALGGLSVGEPKAEMQRILNFIAPQLPSDKPRYLMGVGTPTDIVAAVCSGIDMFDCVMPTRNARNGHLFTSQGVVRIRQSRYRYDTNPLDPHCDCYTCQNYSRAYLHHLDKAREILGAHLNTFHNLYYYQTFMRELRQAIMTQQLQSWVRNFYAMQKEKSPPLNYS

SEQ ID NO: 61843 - protein, 373 aa, Thiopseudomonas denitrificans
  misc_feature (1)..(373): tr|A0A4R6TY11|A0A4R6TY11_9GAMM Queuine tRNA-ribosyltran sferase OS=Thiopseudomonas denitrificans OX=1501432 GN= tgt PE=3 SV=1
MSFMQFELLATDGRARRGRLTFPRGTVETPVFMPVGTYGTVKGMLPRDIKDIGAQIILGNTFHLWLRPGTEVIREHGDLHNFMQWQGPILTDSGGFQVFSLGAMRKIREEGVYFSSPVDGRKVFMGPEESMQVQRELGSDVVMIFDECTPYPADFDVAERSMELSLRWARRSKIAHGDNPSALFGIVQGGMHEALRQRSLEGLCEIGFDGLAIGGLSVGEPKEDMIRILDFLPPLMPPDTPRYLMGVGTPADLVEGVRRGIDMFDCVMPTRNARNGHLFVDTGVVKIRNAVHRHDDSPLDATCDCYTCQNFSRAYLHHLVRCGEMLGSMLNTIHNLRHYQVLMAGLREAIQQGTLSRFVEEFYAKRGLPVPAL

SEQ ID NO: 61844 - protein, 370 aa, Thiorhodococcus drewsii
  misc_feature (1)..(370): tr|G2E2K9|G2E2K9_9GAMM Queuine tRNA-ribosyltransferase OS=Thiorhodococcus drewsii AZ1 OX=765913 GN=tgt PE=3 SV =1
MEFDLLGQDGLARRARLTFERGTVETPAFMPVGTYGTVKAMTPEELLEVGAEIVLGNTFHLMLRPGTEIIRRLGDLHDFMHWDKPILTDSGGFQVFSLGELRKITEEGVHFQSPIDGSKVFLSPEVSMQVQRELGSDIVMIFDECTPYPADEAQTRASMELSLRWAARSREAHGDNPSALFGIVQGGMHEGPRADSLEGLTRIGFDGYAIGGLSVGEPEEDRLRILDFLSDKMPTDRPRYLMGVGTPEDIVAAVQRGIDMFDCVMPTRNARNGYLFTHQGIVKIRNAANRTDEGPLDPLCDCYTCRHYSRAYLHHLDRCKEILGARLATIHNLHYYQTLMRGLREAIAAGKLDAFVSHFKEQRRPRAVRV

SEQ ID NO: 61845 - protein, 416 aa, Thiorhodospira sibirica
  misc_feature (1)..(416): tr|G4E196|G4E196_9GAMM Queuine tRNA-ribosyltransferase OS=Thiorhodospira sibirica ATCC 700588 OX=765914 GN=tgt PE=3 SV=1
MVCVCQPRPWLLRRGRFIMHTCCLHGCVCSCSQAMAFNLTSNLSRFFMHRSYLSFESLGSDGPARRGRLHFARGVVDTPAFMPVGTYGTVKAMLPEQLQASGAQIILGNTFHLMLRPGTGIIQAHGDLHDFMHWSGPILTDSGGFQVFSLAKLRQLSEEGVRFRSPVDGSVVWLTPERSMEVQRLLGADVVMIFDECTPYPATYAEAEQSMQLSLRWAQRSRQAHGDHSAALFGIVQGGMYPALRQQSLAGLQAIGFDGYAIGGLSVGETTEERHAVLDALMPQMPTQTPRYLMGVGRPEDIVEAVRRGVDMFDCVIPTRNARNGFLYTRQGVMRIRNSRYQDDTRPIDESCTCYTCRHYSRAYLRHLDKCKEILGAQLNTLHNLHYYQTLMHELREAIAEKRLAAYIQNFYAARA

SEQ ID NO: 61846 - protein, 384 aa, Thiorhodovibrio sp.
  misc_feature (1)..(384): tr|H8Z0U3|H8Z0U3_9GAMM Queuine tRNA-ribosyltransferase OS=Thiorhodovibrio sp. 970 OX=631362 GN=tgt PE=3 SV=1
MRFEVLQRDGLARRSRLELPRGSIDTPAFMPVGTYGTVKGLTPEEVRALGAQIILGNSFHLMVRPGTDIISAHGDLHDFMHWDGPILTDSGGFQVFSLGELRKITEQGVHFRSPVDGAKLFMGPEESMAVQRALGADIVMIFDDCTPYPATREQARTSMELSLRWAGRSKVAHGDNPAALFGIVQGGMFTDLRAASLEGLLEMGFDGFAVGGLSVGEPPDQREQVLDHLASLLPADKPHYLMGVGTPLDIIAAVQRGIDMFDCVMPTRNARNGHLFTSQGVVRIRNAVHKTDTGPLDPACDCATCRHYSRAYLHHLDKCNEMLGARLNTLHNLSYYQRLMRELRAAIEQGRLTALARGIAEVYAASRIEKRSAEDGGVRSTRWF

SEQ ID NO: 61847 - protein, 370 aa, Thiothrix caldifontis
  misc_feature (1)..(370): tr|A0A1H4A3Y4|A0A1H4A3Y4_9GAMM Queuine tRNA-ribosyltran sferase OS=Thiothrix caldifontis OX=525918 GN=tgt PE=3 SV=1
MSHMQFDLLATDGNARRGRLTFPRGTVETPAFMPVGTYGTVKAMTPEELQGMGAEIILGNTFHLMLRPGTDIVKLHGDLHGFMHWEKPILTDSGGFQVFSLAEMRKISEEGVRFQSPVNGSKVLMTPESSMQVQRDLGSDIVMIFDECTPFPATPDEARHSMELSLRWAKRSKDAHEGNLSALFGIVQGGMYEELRKVSAHGLLDIGFDGYAIGGLSVGEPKDERDKVLECTLPELPTDRPRYLMGVGKPEDIVEAVKRGVDMFDCVIPTRNARNGFLFTRYGTLKIRNSQYQHDTRPIDEQCGCYTCQHYSRAYLRHLDKCGEILSARLNTIHNLYYYQELMRGIRAAISEGRFEAFVSEFYALRQKND

SEQ ID NO: 61848 - protein, 368 aa, Thiothrix eikelboomii
  misc_feature (1)..(368): tr|A0A1T4W5V4|A0A1T4W5V4_9GAMM Queuine tRNA-ribosyltran sferase OS=Thiothrix eikelboomii OX=92487 GN=tgt PE=3 S V=1
MSHLQFELLKTEGLARRGRLTFPRGVVETPAFMPVGTYGTVKAMTPEELKGIGAQIILGNTFHLMLRPGTEIVRLHGDLHEFMHWDKPILTDSGGFQVFSLAAMRKISEQGVRFQSPVNGNPILMTPESSMQVQRELGSDIVMIFDECTPYPATYAEAKRSMELSLRWAARSKTAHADNPAALFGIVQGGVYADLRLQSAEQLQSLEFDGYAVGGLAVGEPKEERDRILEVTVPQLPADKPHYLMGVGKPEDLVEGVLRGIDMFDCVIPTRNARNAFLFTRYGQLKLRNSQYQHDTRPIDEHCGCYTCQNYSRAYLRHLDKCGEILGARLNTIHNLYYYQELMQGIRSALEADRFAEFVREFYALRAH

SEQ ID NO: 61849 - protein, 369 aa, Thiothrix lacustris
  misc_feature (1)..(369): tr|A0A1Y1QVY7|A0A1Y1QVY7_9GAMM Queuine tRNA-ribosyltran sferase OS=Thiothrix lacustris OX=525917 GN=tgt PE=3 SV =1
MQFDLLTTDGNARRGRLTFPRGTVETPAFMPVGTYGTVKAMTPEELQGIGAEIILGNTFHLMLRPGTEIVQLHGDLHGFMHWEKPILTDSGGFQVFSLAEMRKISEEGVRFQSPVNGAKVLMTPESSMQVQRELGSDIVMIFDECTPFPATPDEARHSMELSLRWAKRSKDAHEGNPSALFGIVQGGMYEDLRKVSAHGLLDIGFDGYAIGGLSVGEPKDERDKVLECTLPELPTDRPRYLMGVGKPEDIVEGVKRGVDMFDCVIPTRNARNGFLFTRYGTLKIRNSQYQHDTRPIDKQCGCYTCQHYSRAYLRHLDKCTEILGARLNTIHNLYYYQELMRDIRAAIAAGAFETFVHDFYALRTAAEDS

SEQ ID NO: 61850 - protein, 368 aa, Thiothrix lacustris
  misc_feature (1)..(368): tr|A0A1Y1QJ32|A0A1Y1QJ32_9GAMM Queuine tRNA-ribosyltran sferase OS=Thiothrix lacustris OX=525917 GN=tgt PE=3 SV =1
MQFNLLATDGAARRGRLTFPRGTVETPAFMPVGTYGTVKAMTPEELQGLGAEIILGNTFHLMLRPGTDIVRLHGDLHGFMHWEKPILTDSGGFQVFSLAEMRKISEEGVRFQSPVNGAKVLMTPESSMQVQRELGSDIVMIFDECTPYPATHKEAQDSMELSLRWAKRSKDAHQGNPSALFGIVQGGMYEELRKVSAHGLLDIGFDGYAIGGLSVGEPKDERDKVLECTLPELPADRPRYLMGVGKPEDIVEAVRRGVDMFDCVIPTRNARNGFLFTRYGTLKIRNSQYQHDTRPLDEQCGCYTCQHYSRAYLRHLDKCGEILGARLNTIHNLYYYQELMRDIRAAIAENRFEAFVRDFYALRQAQVS

SEQ ID NO: 61851 - protein, 370 aa, Thiothrix nivea
  misc_feature (1)..(370): tr|A0A2G6HN41|A0A2G6HN41_9GAMM Queuine tRNA-ribosyltran sferase OS=Thiothrix nivea OX=1031 GN=tgt PE=3 SV=1
MQFKLITSTGPARRGQLTFPRGSVQTPAFMPVGTYGTVKAMTPEELAGMGAEIILGNTFHLMLRPGTDIIRAHGDLHDFMHWQQPILTDSGGFQVFSLAEMRKITEEGVYFQSPVDGSRHLMSPESSMQVQRELGSDIVMIFDECTPYPATYDQTRESMLLSLRWAARSKAAHTGNPSALFGIVQGGMYDDLRKQSAQQLQEIGFDGYAIGGLSVGEPKAERDAVLETTVPELPADKPRYLMGVGKPEDIVEGVRRGIDLFDCVIPTRNARNGFLFTRYGTLKIRNAKHQHDTGPIDAQCGCYTCQHYSRSYLRHLDKCGEILGARLNTIHNLYYYQELMRGLRQALDEGQFAEFVQEFYTLRSGDKERL

SEQ ID NO: 61852 - protein, 365 aa, Thiothrix sp.
  misc_feature (1)..(365): tr|A0A5C7RK57|A0A5C7RK57_9GAMM Queuine tRNA-ribosyltran sferase OS=Thiothrix sp. OX=1032 GN=tgt PE=3 SV=1
MQFQLLKTEGMARRGRLSFPRGEVETPAFMPVGTYGTVKAMTPEELNGIGAQIILGNTFHLMLRPGTEIVRLHGDLHEFMHWDKPILTDSGGFQVFSLAAMRKISEEGVRFQSPVNGSPILMTPESSMQVQRELGSDIVMIFDECTPYPASHTEAKQSMELSLRWAARSKAAHEGNPSALFGIVQGGVYEDLRLQSAEQLQKIDFDGYAVGGLAVGEPKEDRDRILEATVPHLPANKPHYLMGVGKPEDIVEGVLRGIDMFDCVIPTRNARNAFLFTRYGQLKLRNSQYQQDTRPIDEQCGCYTCQHYSRAYLRHLDKCGEILGARLNTIHNLYYYQELMQGIRAALEAGRLNEFVREFYALRAH

SEQ ID NO: 61853 - protein, 95 aa, Thiothrix sp.
  misc_feature (1)..(95): tr|A0A432UT33|A0A432UT33_9GAMM tRNA guanosine(34) trans glycosylase Tgt (Fragment) OS=Thiothrix sp. OX=1032 GN= tgt PE=4 SV=1
FLYTRWGIIKIRNARYRHDTQPLDSTCACYTCQNYSRAYLRHLDKCGEILGARLNTIHNLFYYQQLMRELRDAIAAGTLAEYIREFYAQQSVSVS

SEQ ID NO: 61854 - protein, 371 aa, Thiotrichaceae bacterium
  misc_feature (1)..(371): tr|A0A2A4WEE8|A0A2A4WEE8_9GAMM Queuine tRNA-ribosyltran sferase OS=Thiotrichaceae bacterium OX=2030882 GN=tgt P E=3 SV=1
MQFELLGSDGEARRGRLRFERGDVETPAFMPVGTCATVKSMTPESVRETGADIILGNTFHLMLRPGTEIVEAHGGLHHFMNWQRPILTDSGGFQVFSLGKLRKITEEGVTFRSPVNGDKIFLGPEESIAVQRSLGSDVVMIFDECTPHPATEEEARTSMALSLRWADRSKTAHGESTSALFGIIQGGMFESLRDRSLRGLLDIGFDGYAIGGLSVGEPKEDMMRVLSHITPHMPASKPRYLMGVGKPEDIVEAVRRGIDMFDCVMPTRNARNGHLFVHSGVIRIRNAQYRNDTQPLDLGCGCYTCQNYSRAYLRHLAASNEMLGATLNSMHNLFYYQEVMSGLRAAIDAGELELFVAEFYAKRAQAVPPVS

SEQ ID NO: 61855 - protein, 364 aa, Thiotrichaceae bacterium
  misc_feature (1)..(364): tr|A0A2A5G488|A0A2A5G488_9GAMM Queuine tRNA-ribosyltran sferase OS=Thiotrichaceae bacterium OX=2030882 GN=tgt P E=3 SV=1
MLFKLSKKNDGARRGQLSFDRGTIETPAFMPVGTYGTVKAMTPEELTGTGAEIVLGNTFHLMLRPGTEIIRKHGDLHNFMHWQKPILTDSGGFQVYSLAKMRKITENGVIFNSPVDGRKIELTPEYSMQIQKDLGSDIVMIFDECTPYPATEIEAMESMQLSLRWAERCKTAHQGNPSALFGIVQGGMYETLRHESVAGLTTLDFDGYAIGGLSVGEPMEERNQVLDFTVPKLPVDKPRYLMGVGRPEDIIEAVRRGIDMFDCVIPTRHARTGFLYTSTGILKIRNSRYKDDIRPVDENCQCYTCQNYTRSYLRHLDKCGEILYSRLSTIHNLYYYQQLMREIREAIENERFEEFANEFYAGIQ

SEQ ID NO: 61856 - protein, 372 aa, Thiotrichales bacterium
  misc_feature (1)..(372): tr|A0A259DX08|A0A259DX08_9GAMM Queuine tRNA-ribosyltran sferase OS=Thiotrichales bacterium 17-46-47 OX=1970602 GN=tgt PE=3 SV=1
MQFTLLKQQGKARRGRMVFERGVVETPAFMPVGTYGAVKGVSPEEVGDVGAQILLGNTFHLFLRPGLEVIESFGGLHNFMNWQGPILTDSGGFQVFSLGELRKITEQGVKFQSPVDGAKIFIGPEESMHIQTVLGSDIVMIFDECTPYPATHDQARFSMELSLRWAQRSRDAYQGKGALFGIVQGGMYEDLRDISLKGLVDIGFDGYAIGGLSVGEPKADMARILDHTAHQLPTDKARYVMGIGKPEDLVEAVRHGADMFDCVMPTRNARNCHIFTRRGVMKLRNTRYKKDTKPIDPHCSCYACRNFSRGYLHHLDKLRESLGARLNTIHNLHYYQQLMQDIRKALDEDRFDAFVEQFYAEQAMGVDALDVA

SEQ ID NO: 61857 - protein, 369 aa, Thiotrichales bacterium
  misc_feature (1)..(369): tr|A0A1H6FGY5|A0A1H6FGY5_9GAMM Queuine tRNA-ribosyltran sferase OS=Thiotrichales bacterium HS_08 OX=1899563 GN= tgt_2 PE=3 SV=1
MNFTLSHQDQHARRGTLQFARGQVETPAFMPVGTYGTVKGMRPEEVRATGAQIILGNTFHLMLRPGIEIIQQHGGLHGFAHWDGPILTDSGGFQVFSLGKMRKITEAGVTFQSPVDGATVFLDPEISMQVQRALDADIVMVFDECTPHPATWAQAKDSMELSLRWALRSKTAHGDNPHALFGIVQGGMYEDLRDHSLAGLKDIGFDGYAIGGLSVGEPKADMMRILEHLGPQMPTHHPRYLMGVGTPEDLLDAVWRGIDMFDCVMPTRNARNGHLFTRHGTLRIRNHRHKHDTRPLDESCDCYTCQHYSRAYLHHLDKAREMLGSHLNTVHNLHYYQTLMREVRAAIENQHLEAFMRETKALWAAGLPD

SEQ ID NO: 61858 - protein, 367 aa, Bathymodiolus puteoserpentis
  misc_feature (1)..(367): tr|A0A483ALW0|A0A483ALW0_9BACT Queuine tRNA-ribosyltran sferase OS=thiotrophic endosymbiont of Bathymodiolus pu teoserpentis (Logatchev) OX=343240 GN=tgt PE=3 SV=1
MKFKLKNTNDKARRGTMIFARGTVETPAFMPVGTYGTVKAMTPEEVEGIGAQIILGNTFHLSITPGTDVIKAHGDLHDFMHWQGPILTDSGGFQVFSLGDMRKISEAGVDFRSPKDGAKIFMGPEESIKIQSDLGSDIVMIFDECTPYPADKVTAEQSMQLSLRWAQRSKDAHQALGNENALFGIVQGGMYEDLRQQSAKKLIEIDFDGYAIGGLSVGEPKEEMIKVLDFLPEQLPDDKPRYLMGVGTPSDLVEAVERGIDMFDCVMPTRNARNGYLFTSSGIVKIRNAQYKLDTKPLDKRCGCYTCQNYSRSYLHHLQRKNEILGARLNTIHNLYYYQDLMKGMREVIEKGVFAEFKQLFYKMQNE

SEQ ID NO: 61859 - protein, 378 aa, Thiovulum sp.
  misc_feature (1)..(378): tr|J0LB82|J0LB82_9HELI Queuine tRNA-ribosyltransferase OS=Thiovulum sp. ES OX=1177931 GN=tgt PE=3 SV=1
MEFTVKATDGKARRGILKTAHSTIQTPVFMPVGTVATMKGLDTVDLNQYLKPEIILANTYHLYLKPSHKTVKNMGGLHKFTGFPKSFLTDSGGFQAFSLKDSKTDEVGIHFKSHIDGSKHFFTPEKVVDIQNDLGSDIMMVLDDLIALPAEEKRIRESIERTTRWAKNSLEYFLQKREKGIGLDQNIFAIVQGGTNLNFREKSAKELTGIEYQNRSFDGFAIGGLSVGEPNQAMYDTVEFTAPLLPTDKPRYLMGVGTPEDLIENVYRGIDMFDCVMPTRNARNGTIFTTFGRLSIKASRFKEDSKPIDEKCNCYTCQNYSRSYLNHLFRAKEITYVRLATMHNLHYYLNLMSEIRDAIEKGEFENYRKEFYRLRENS

SEQ ID NO: 61860 - protein, 380 aa, Thorsellia anophelis
  misc_feature (1)..(380): tr|A0A1I0BZX9|A0A1I0BZX9_9GAMM Queuine tRNA-ribosyltran sferase OS=Thorsellia anophelis DSM 18579 OX=1123402 GN =tgt PE=3 SV=1
MSSSKSKMRYELINTDGKARRGRLHFHRGVVETPAFMPVGTYGTVKGMTPEEVAETGAHILLGNTFHLWLRPGQEVIKAHGDLHDFMQWHGPILTDSGGFQVFSLGAMRKISEEGVSFKHPINGSTIFLSPEKSMEIQFDLGSDVVMIFDECTPYPADREYAAKSMALSLRWSQRSRAKFDELNNPNALFGIIQGGIYEDLRDESLSGLIDIGFDGYAVGGLAVGEPKEDMHRILDYICPKIPEDKPRYLMGVGKPEDLVEGVRRGIDMFDCVMPTRNARNGHLFVSKGVIKIRNAKYKNDTGKLDEECDCYTCKNYTLAYLHHLDKCNEILGARLNTIHNLRYYQRLMSELRTAIEENSLDTYITSFYTKIGKPIPNTK

SEQ ID NO: 61861 - protein, 390 aa, Tibeticola sediminis
  misc_feature (1)..(390): tr|A0A3N4U7R6|A0A3N4U7R6_9BURK Queuine tRNA-ribosyltran sferase OS=Tibeticola sediminis OX=1917811 GN=tgt PE=3 SV=1
MLTFELLATDPASHARRGRLTLNHGVVETPIFMPVGTYGTVKGVMPRSLHEMGAQIILGNTFHLWMRPGLDVVRSFGGLHRFEQWHRPILTDSGGFQVWSLGAMRKITEEGVHFASPVNGDKLFMSPEVSMQIQTVLNSDIVMQLDECTPYETSGHVTTEAEARASMEMSLRWAARSKAEFERLENPNALFGIVQGGMFEHLRQESLEALVAMDFPGYAVGGVSVGEPKDEMRRIMAHTPHRLPAHKPRYLMGVGTPEDLVEGVACGVDMFDCVMPTRNARNGTLFTRYGDLKIRNARHKTDPQPIDPSCTCYACAGASGVPWEAGGREGFSRAYVHHLDRCGEMLGPMLTTVHNLHYYLNLMREIRAALDAGGYTEFRQRFAADRARGI

SEQ ID NO: 61862 - protein, 379 aa, Tindallia californiensis
  misc_feature (1)..(379): tr|A0A1H3NDY6|A0A1H3NDY6_9CLOT Queuine tRNA-ribosyltran sferase OS=Tindallia californiensis OX=159292 GN=tgt PE =3 SV=1
MKKIFTKTGSSSESLARTGMVETYHGKFETPIFMPVGTQATVKTMTPEELRECEAQIILSNTYHLYMRPGSDLVEKAGGLHRFMNWKHPILTDSGGFQVFSLGHLNKITEEGVTFQSHIDGSRHFISPEKAVEIQNQLGADIMMVFDECVPYPSDHEYVRNSVDRTTRWAKRCMDAHRNQDKQHLFGIVQGGMYHDLRKRSAEALIDLDFPGYGIGGLSVGEPKKIMYDVLDHLMPIMPPDKPRYLMGVGSPDALIHGVLRGVDMFDCVLPTRIARNGTAMTSEGPVIIKNAKHFESWAPLDSDCQCYCCRNYSRAYLRHLFKSNEILGLRLLSIHNISFLLELMKGIRKAIKNDCLIDYCQAFYRRYYQEELVFNFIP

SEQ ID NO: 61863 - protein, 379 aa, Tindallia magadiensis
  misc_feature (1)..(379): tr|A0A1I3A9W8|A0A1I3A9W8_9CLOT Queuine tRNA-ribosyltran sferase OS=Tindallia magadiensis OX=69895 GN=tgt PE=3 S V=1
MKKIFTKTGSSSESLARTGIVETYHGKFETPIFMPVGTQATVKTMTPEELKECEAQIILSNTYHLYMRPGSDLVEKAGGLHRFMNWKHPILTDSGGFQVFSLGHLNKITEEGVTFQSHIDGSRHFISPEKAVEIQNQLGADIMMVFDECIPYPSDHEYVRNSVDRTTRWAKRCIDAHRNQDKQHLFGIVQGGMYHDLRKRSAEALIDLDFPGYGIGGLSVGEPKKIMYDVLDHLMPIMPQDKPRYLMGVGSPDALIHGVLRGVDMFDCVLPTRIARNGTAMTSEGPVIIKNAKHFESWIPLDSDCQCYCCRNYSRAYLRHLFKSNEILGLRLLSIHNISFLLELMKGIRKAIKNDCLIDYCQEFYRRYYQEELVFNLIT

SEQ ID NO: 61864 - protein, 380 aa, Tindallia sp.
  misc_feature (1)..(380): tr|A0A424Y6H6|A0A424Y6H6_9CLOT Queuine tRNA-ribosyltran sferase OS=Tindallia sp. MSAO_Bac2 OX=2293856 GN=tgt PE =3 SV=1
MAKTIFRKEASSSESFARTGLLQTSHGSVETPIFMPVGTQATVKTMTPEEIETCGAQIILSNTYHLYMRPGSELVEKAGGLHQFMNWKKPILTDSGGFQVFSLGHLNKITEEGVTFQSHIDGSRHFISPEKAVEIQNQLGSDIMMVFDECIPYPSDYQYVLQSVDRTTRWAKRCLDAHRNTDKQHLFAIIQGGMYSELRKRSADALLEMDFPGYGIGGLSVGEPKETMYEVLNDLMPNMPENKPRYLMGVGSPDCLIHGVLRGVDMFDCVLPTRIARNGTAMTSEGPVIIKNAKHFDSWEPLDANCQCYCCRNYSRAYLRHLFKANEILGLRLMTIHNITFLLDLMEKMRQGIREDRLLSFCKDFYRAYYKQELQFNLNP

SEQ ID NO: 61865 - protein, 373 aa, Tissierella creatinini
  misc_feature (1)..(373): tr|A0A4T9WIF4|A0A4T9WIF4_9FIRM Queuine tRNA-ribosyltran sferase OS=Tissierella creatinini OX=43143 GN=tgt PE=3 SV=1
MMGIKFDLLKESQDSKARLGLIHTPHGDIETPIFMPVGTRATVKAMTPEEVKGLGAQIILSNTYHLYLKPGHELVKDAGGLHKFMNWDGPILTDSGGFQVFSLGDLRKIKEEGVEFRSHIDGSKHFLSPEKSIEIQNALGSDIMMAFDECAPYPSSYEYVKQSMERTTRWAKRCKDYHKDWDRQGLFGIVQGGMYKDLREISAKALVEMDFPGYAIGGLSVGEPKEMMCDILDFTTPILPKNKPRYLMGVGTPDYLFEAVIRGIDMADCVLPTRIARNGTVMTSKGKLVIRNGKYAKDFNPLDDECDCYACKNYSRAYIRHLFNVDEILGARLATTHNLRFLIKLMENIRQAIKEDRLMEYRSEFYEKFGYTE

SEQ ID NO: 61866 - protein, 371 aa, Tissierella creatinophila
  misc_feature (1)..(371): tr|A0A1U7M393|A0A1U7M393_TISCR Queuine tRNA-ribosyltran sferase OS=Tissierella creatinophila DSM 6911 OX=112340 3 GN=tgt PE=3 SV=1
MAIKFDLIKESKDSKARLGKITTPHGEIETPIFMPVGTRATVKTMTPEEVKDLGAQIILANTYHLYLKPGHELVKEAGGLHKFMNWDGPILTDSGGFQVFSLGDLRKIKEEGVEFRSHIDGSKQFISPEKSIEIQNALGSDIMMCFDECTPYPSTYEYAKESMERTTRWAQRCKEAHKNTDKQSLFGIVQGGMYKDLREKSAKDLVAMDFPGYAIGGVSVGEPKEMMCEILDFTTPLLPKDKPRYNMGVGTPDYLFESVIRGIDMADCVMPTRIARNGTVMTSNGRLVIRNAKYAKDFGKLDPECDCYSCKNYSRAYIRHLFNVDEILGARLATIHNLYFLIKLMENIRTAIKEDRLMEYREEFYKKYGYN

SEQ ID NO: 61867 - protein, 374 aa, Tissierella praeacuta
  misc_feature (1)..(374): tr|A0A3F3S5R1|A0A3F3S5R1_9FIRM Queuine tRNA-ribosyltran sferase OS=Tissierella praeacuta OX=43131 GN=tgt PE=3 S V=1
MAIRFELLKEAKDCKARLGKLYTPHGVIETPIFMPVGTRATVKAMTPEEVKGLGAQIILSNTYHLYLRPGHKLIEEAGGLHKFMNWDGPILTDSGGFQVFSLGDLRKIKEEGVEFRSHIDGSKHFISPEKSIEIQNSLGSDIMMCFDECTPYPATYEYAKHSMERTTRWAKRCKDYHKNWDKQGLFGIVQGGMYKDLREQSAKELVELDFPGYAIGGLSVGEPKELMCELLDFTTPLLPKDKPRYNMGVGTPDYLFESVIRGIDMADCVLPTRIARNGTALTSQGKIVIRNAKYAKDFTPLDPECDCYACTNYSRAYIRHLFNVDEILGARLTTIHNLYFLIKLMENIRKAIKEDRILEYKDEFYKKYGYNDKN

SEQ ID NO: 61868 - protein, 374 aa, Tissierella praeacuta; identical to SEQ ID NO: 61867
  misc_feature (1)..(374): tr|A0A1M4ZER1|A0A1M4ZER1_9FIRM Queuine tRNA-ribosyltran sferase OS=Tissierella praeacuta DSM 18095 OX=1123404 G N=tgt PE=3 SV=1

SEQ ID NO: 61869 - protein, 374 aa, Tissierella sp.
  misc_feature (1)..(374): tr|A0A265Q2D8|A0A265Q2D8_9FIRM Queuine tRNA-ribosyltran sferase OS=Tissierella sp. P1 OX=1280483 GN=tgt PE=3 SV =1
MAIRFELLKEAKDSKARLGKLYTPHGVIETPIFMPVGTRATVKAMTPEEVKGLGAQIILSNTYHLYLRPGHKLIEEAGGLHRFMNWDGPILTDSGGFQVFSLGDLRKIKEEGVEFRSHIDGSKHFISPEKSIEIQNSLGSDIMMCFDECTPYPATYEYAKHSMERTTRWAKRCKDYHKNWDKQGLFGIVQGGIYKDLREQSAKELVELDFPGYAIGGLSVGEPKELMCEILDFTTPLLPKDKPRYNMGVGTPDYLFESVIRGIDMADCVLPTRIARNGTVLTSQGKLVIRNAKYSRDFTKLDPECDCYACTNYSRAYIRHLFNVDEILGSRLTTIHNLYFLIKLMENIRNAIKEDRLLEYKEEFYKKYGYNDKN

SEQ ID NO: 61870 - protein, 375 aa, Tissierellales bacterium
  misc_feature (1)..(375): tr|A0A3D3QS13|A0A3D3QS13_9FIRM Queuine tRNA-ribosyltran sferase OS=Tissierellales bacterium OX=2053631 GN=tgt P E=3 SV=1
MAIKYELIKESKETKARLGRIVTPHGEIETPVFMPVGTRATVKTMTPEEVKDLGAKIILSNTYHLYLKPGHDLVKEAGGLHRFMNWNGPILTDSGGFQVFSLGELRKIKEEGVEFRSHIDGSKHFISPETSIDIQNALGSDIMMCFDECVPYPADYEYAKQSMERTTRWAKRCKEHHKDWNTQALFGIIQGGMFRDLREQSAKDLVEMDFCGYAVGGLSVGEPMDVMCEVLDYTTPLLPRDKPRYLMGVRSPDYLFEAVIRGIDMADCVLPTRIARNGTAMTSHGKVVIRNGKYSRDFTPLDPECDCYTCRNYTRAYIRHLFNVDEILALRLTTIHNLYFLIKLMERIREAIKEDRLLELKDEFYKKYGYTQLLE

SEQ ID NO: 61871 - protein, 371 aa, Tissierellia bacterium
  misc_feature (1)..(371): tr|A0A133YUY6|A0A133YUY6_9FIRM Queuine tRNA-ribosyltran sferase OS=Tissierellia bacterium KA00581 OX=1588751 GN =tgt PE=3 SV=1
MLKYELIKKDKFSKARLGKIYTNRGIIETPIFMPVGTRATVKAMNVDELKEIGSQIILGNTYHLYLRPGQEIIRAAGGLHKFMNWDRPILTDSGGFQVFSLGAIRKITEEGVMFRSHIDGSKHFISPEKSMEIQNDLGSDIMMAFDECAPYPASYDYVKNSMERTIRWLKRCKEYHKNTENQALFGIIQGGMYKDLRKISAIETCSMDLPGYAVGGLSVGEPKDVMIEYLNYTTEFMPEDKPRYLMGVGTPDYLFEAVEAGIDMADCVLPTRLGRNGTAITTYGKVVIKNAKYAKDFTPLDETCDCYACKNHTKAYIRHLMNVNEILGARLLSTHNLRFLLKTMENIRQAIREDRFLEYKKEFYKNYGYEK

SEQ ID NO: 61872 - protein, 371 aa, Tissierellia bacterium
  misc_feature (1)..(371): tr|A0A095YLF9|A0A095YLF9_9FIRM Queuine tRNA-ribosyltran sferase OS=Tissierellia bacterium S7-1-4 OX=1284708 GN= tgt PE=3 SV=1
MSFEFEVLKKDDRTKARVGVLKTPHGDIPTPIFMPVGTRATVKTLSNNELLDLNTKIILSNTYHLFLRPGDELIKKAGGLHKFMNWKLPILTDSGGFQVFSLTENRQITEEGVHFRSHIDGSKVFLSPEKSISVQENLGSDIMMAFDECAPYPADYNYIKHSMERTLRWLERCVNAKTRDDQALFGIVQGGMYKDLRKLSAIETCKFDLKGYAVGGLSVGEPIEVLKEMLDTCTDYMPEDKPRYHMGVGSPDYLFESVERGIDMADCVLPTRIARNGAAFTKYGRINLKNAKFTEDFTPIEEDCDCYACRNHTKAYIRHLVMNGEILGGRLLSLHNVRFLLKLMENIRKSVIDGNFLEYKEEFYKNYGYLD

SEQ ID NO: 61873 - protein, 389 aa, Tistlia consotensis
  misc_feature (1)..(389): tr|A0A1Y6CGR2|A0A1Y6CGR2_9PROT Queuine tRNA-ribosyltran sferase OS=Tistlia consotensis USBA 355 OX=560819 GN=tg t PE=3 SV=1
MSAPATTSGAGLGFELFARDGAARRGRLTTAHGTVETPAFMPVGTVATVKGMMPEQVAATGAEILLGNTYHLMLRPGAERIAALGGLHRFMNWPKPILTDSGGFQVMSLASLRRLDEDGVTFKSHLDGSAHRLTPERAVEIQDLLDSNVTMVLDECTPFPATEEQAASSMRLSMRWAERCKAAFRLRPGYGLFGIVQGGVYPALRHESAAALRGIGFDGYAIGGLAVGEPPETMLAVLQETAPALPAERPRYLMGVGRPQDLVESVRRGVDLFDCVLPTRSGRTGRGYTADGEVNMKNARHRDDPRPLDAACGCPLCSGYSRAYLHHLFRAGEMLGPILLTLHNLTFYQTLMRGLRGAIETGSLEDFAAAFHEAYGRGDLPEYVAPTPA

SEQ ID NO: 61874 - protein, 367 aa, Tistrella mobilis
  misc_feature (1)..(367): tr|A0A162JZW6|A0A162JZW6_9PROT Queuine tRNA-ribosyltran sferase OS=Tistrella mobilis OX=171437 GN=tgt PE=3 SV=1
MAEDGMARRGRIVTAHGAIDTPAFMPVGTAGTVKGLTPEQVAATGAQILLGNTYHLMLRPGAERVDRLGGLHRFMNWPAPILTDSGGFQVMSLAALRKLDDDGVTFRSHLDGSKIRLTPERSIEIQRLLDATITMCFDECTPYPATYDQAASSMRLSMRWAERCRTAFTDRPGYALFGIVQGGVHGDLRAESVERLTEIGFEGYAVGGLAVGEGFELMCSTLDVTTPLMPRDKPRYLMGVGRPQDLVAAVRRGIDMFDCVMPTRSGRTGQAFTRRGPVNIRNARHADDPRPLDDRCGCPACTQYSRAYLHHLHKASEILGAVLLTQHNLWYYQDLMREMRAAIPEGRMEAFAAEFEAGLAAGDIPPL

SEQ ID NO: 61875 - protein, 394 aa, Tistrella mobilis
  misc_feature (1)..(394): tr|I3TKX4|I3TKX4_TISMK Queuine tRNA-ribosyltransferase OS=Tistrella mobilis (strain KA081020-065) OX=1110502 G N=tgt PE=3 SV=1
MTTTPHDQNPTRAIAGEGAEPRFGYTLMAEDGMARRGRIVTAHGAIDTPAFMPVGTAGTVKGLTPEQVAATGAQILLGNTYHLMLRPGAERVDRLGGLHRFMNWPAPILTDSGGFQVMSLAALRKLDDDGVTFRSHLDGSKIRLTPERSIEIQRLLDATITMCFDECTPYPATYDQAASSMRLSMRWAERCRTAFTDRPGYALFGIVQGGVHGDLRAESVERLTEIGFEGYAVGGLAVGEGFELMCSTLDVTTPLMPRDKPRYLMGVGRPQDLVAAVRRGIDMFDCVMPTRSGRTGQAFTRRGPVNIRNARHADDPRPLDDRCGCPACTQYSRAYLHHLHKSSEILGAVLLTQHNLWYYQDLMRGMRAAIPEGRMEAFAAEFEAGLAEGDIPPL

SEQ ID NO: 61876 - protein, 394 aa, Tistrella sp.
  misc_feature (1)..(394): tr|A0A2E3ENM3|A0A2E3ENM3_9PROT Queuine tRNA-ribosyltran sferase OS=Tistrella sp. OX=2024861 GN=tgt PE=3 SV=1
MTTTPHDQNPTRAIAGEGAEPRFGYTLMAEDGMARRGRIVTAHGAIDTPAFMPVGTAGTVKGLTPEQVAATGAQILLGNTYHLMLRPGAERVDRLGGLHRFMNWPAPILTDSGGFQVMSLAALRKLDDDGVTFRSHLDGSKIRLTPERSIEIQRLLDATVTMCFDECTPYPATYDQAASSMRLSMRWAERCRTAFTDRPGYALFGIVQGGVHGDLRAESVERLTEIGFEGYAVGGLAVGEGFELMCSTLDVTTPLMPRDKPRYLMGVGRPQDLVAAVRRGIDMFDCVMPTRSGRTGQAFTRRGPVNIRNARHADDPRPLDDRCGCPACTQYSRAYLHHLHKASEILGAVLLTQHNLWYYQDLMREMRAAIPEGRMEVFAAEFEAGLAAGDIPPL

SEQ ID NO: 61877 - protein, 414 aa, Unknown
  misc_feature (1)..(414): tr|A0A563D8S0|A0A563D8S0_9BACT Queuine tRNA-ribosyltran sferase OS=TM7 phylum sp. oral taxon 346 OX=713049 GN=t gt PE=3 SV=1
MNQPLVFRITHRLPGTLARAGTIETPHGTIQTPAFIVGGTKATVKALTVEQVKACGGQSILANTYHLMQRPGAEIIHKAGGLGKFMDYDGPTFTDSGGFQIFSLGIAYKKGIDAVAHTQKGNAAQAVKSANQLAKVTDQGAQFRSHLDGKYIMMTPESSMELQHAIGADIHMAFDELTAPLAARGTIVKAMQRTHAWAERCLVRHDELNAEHLARGENLQALYGVVQGARDETLRRQSANFLGQRNFDGYGIGGVFQPGEIADVVRWVCETLPEDKPRHLLGLGSQPADLFLGVEYGIDTFDCVAPTRQARNGALYTFDGRINISNARFREDFAPIDAECDCYTCQHHTRAYINHLFRADEILGATLASIHNERFVVSTVDQIRASLLDGTFFDFKRSFLTRYYGDNLPIGVTL

SEQ ID NO: 61878 - protein, 399 aa, Unknown
  misc_feature (1)..(399): tr|A0A563DEQ3|A0A563DEQ3_9BACT Queuine tRNA-ribosyltran sferase OS=TM7 phylum sp. oral taxon 348 OX=671231 GN=t gt PE=3 SV=1
MNQALKFDITHKLAGRLGRTGIIITPHGQIETPAFIPVGTQATLKSLVPEQLKDTGAQACLVNAYHLYLRPGHDVIDEAGGIHKFMNWDKPTFSDSGGFQVMSLGAGFKKVIDMNGEGGNNVTNKKDKLATIDNDGVTFKSHLDGSFHRFTPEISMQIQHGIGADITFAFDELTTLYHNYNYQVESLKYRTHPWAERSLLEHKRLNSVRTHRPPQALFGVVQGANYEDLRRQSAQFLGKMDFDGYGLGGALEKSRIGEIVRWMNEELPEDKPRHMLGISEPDDIFSCIENGADTFDCVSPARVGRNGALYTKNGRINIKRAEFKRDFRPFDEECDCYTCKNYSRAYLHHLFKTGELLSNTLATIHNERFIVRLVDNIRSSIKNNTFYDFKNEFLNNYYQ

SEQ ID NO: 61879 - protein, 373 aa, Tolumonas auensis
  misc_feature (1)..(373): sp|C4L7L3|TGT_TOLAT Queuine tRNA-ribosyltransferase OS= Tolumonas auensis (strain DSM 9187 / TA4) OX=595494 GN= tgt PE=3 SV=1
MKFELKKTEGRARRGRLVFDRGVVETPAFMPVGTYGTVKGMTPEEVKDTGAQILLGNTFHLWLRPGQDIMRKHGDLHDFMNWHGPILTDSGGFQVFSLGHIRKIKEEGVHFRNPINGEKIFLSPEKSMEIQNDLGSDVVMIFDECTPYPATHDVAKKSMEMSLRWATRSRQRFDELENKNALFGIIQGGVYEDLRDVSLKGLLDIGFDGYAVGGLAVGEPKEDMHRILKHVCPQIPEDKPRYLMGVGKPEDLVEGVRRGIDMFDCVMPTRNARNGHLFTTDGVVKIRNAKYKDDVTSLDAECDCYTCKNYTKSYLHHLDRCNEMLGARLNTIHNLRYYQRLMQGLRDAIDAGTLDDFVADFYQRQDKPVPSLD

SEQ ID NO: 61880 - protein, 379 aa, Tolypothrix bouteillei
  misc_feature (1)..(379): tr|A0A0C1R7I0|A0A0C1R7I0_9CYAN Queuine tRNA-ribosyltran sferase OS=Tolypothrix bouteillei VB521301 OX=1479485 G N=tgt PE=3 SV=1
MTAQFSFQRLANCSQTKARVGIFSTPHGIVETPRFMPVGTLANVKTITPSQLEETGAQMVLCNTYHLHLQPGEAIVAGGGGLHKFMGWKGPILTDSGGFQVFSLSEMRKISEEGVTFRSPHDGQIINLTPERSIEIQNTLGADVIMAFDECPPYPATRQEVEAATQRTYRWLKRCISAHQRQDQALFGIVQGGVYLDLRSQAALALAELDLPGYAIGGVSVGEPPELISHVVKATAPLLPPEKPRYLMGVGTYREIAIAIASGVDLFDCVIPTRWARHGTAMVQGERWNLKNAKFREDFTPIDNTCPCYACRNFSRAYISHLVRAQEILAYTLLSIHNITELIRFTQKIREAILNDTFAIDFASWLEQGAEDLGLENGD

SEQ ID NO: 61881 - protein, 349 aa, Tolypothrix campylonemoides
  misc_feature (1)..(349): tr|A0A0C2LW46|A0A0C2LW46_9CYAN Queuine tRNA-ribosyltran sferase OS=Tolypothrix campylonemoides VB511288 OX=1245 935 GN=tgt PE=3 SV=1
MPVGTLANVKTLTPAQLRDTQAQMILCNTYHLHLQPGEAIVAGGGGLHKFMGWNGPILTDSGGFQVFSLSEMRKISEEGVTFRSPHDGQIINLTPERSIEIQNILGADVIMAFDECPPYPASREDVEAATLRTYRWLERCIAAHKRSDQALFGIVQGGVHLDLRSSAAVALAQLDLPGYAIGGVSVGEPPELIAKIVEATAPLLPPEKPRYLMGVGTYREMAIAIASGVDLFDCVIPTRWARHGTAMVQGERWNLKNAQFRQDFTPLDETCPCYTCQNFSRAYLSHLVRSQEILAYTLLSIHNITELIRFTQRIRKAILEDRFATEFAQWLTVESTEDSIEKHSGLIND

SEQ ID NO: 61882 - protein, 332 aa, Tolypothrix sp.; identical to SEQ ID NO: 55476
  misc_feature (1)..(332): tr|A0A0D6KLC3|A0A0D6KLC3_9CYAN Queuine tRNA-ribosyltran sferase OS=Tolypothrix sp. PCC 7601 OX=1188 GN=tgt PE=3 SV=1

SEQ ID NO: 61883 - protein, 337 aa, Tolypothrix sp.
  misc_feature (1)..(337): tr|A0A218QT36|A0A218QT36_9CYAN Queuine tRNA-ribosyltran sferase OS=Tolypothrix sp. NIES-4075 OX=2005459 GN=tgt PE=3 SV=1
MPVGTLANVKTLTPAQLKDTGAQMVLSNTYHLHLQPGEGIVAGGGGLHKFMGWNGPMLTDSGGFQVFSLSEMRKITEDGVRFRSPHDGQIINLTPERSIEIQNTLGADVIMAFDECPPYPATRQEVEAATARTYRWLQRCIAAHQRSDQALFGIVQGGVYLDLRSQAAVALAKLDLPGYAIGGVSVGEPPELIANIVQATAPLLPPDKPRYLMGVGTYREMAIAIASGVDLFDCVIPTRWARHGTAMVLGDRWNLKNAKFREDFTPLDETCGCYTCQNFTRAYISHLVRSQEILAYTLLSIHNISELIRFTQKIREAILGDRFTTEFGHWLTPGEMG

SEQ ID NO: 61884 - protein, 332 aa, Tolypothrix tenuis; identical to SEQ ID NO: 51925
  misc_feature (1)..(332): tr|A0A1Z4MXV4|A0A1Z4MXV4_9CYAN Queuine tRNA-ribosyltran sferase OS=Tolypothrix tenuis PCC 7101 OX=231146 GN=tgt PE=3 SV=1

SEQ ID NO: 61885 - protein, 428 aa, Tomitella sp.
  misc_feature (1)..(428): tr|A0A516X7A9|A0A516X7A9_9ACTN Queuine tRNA-ribosyltran sferase OS=Tomitella sp. HY188 OX=2597660 GN=tgt PE=3 S V=1
MYGHSRGRHPGHVWFDGPVTDTGEFFSVSTRMESGLGRTGRIRTPHGDIRTPAFVAVGTKATVKAVPPESIAELGAQAVLANAYHLYLQPGSDIVEEAGGLGAFMNWPGPTFTDSGGFQVLSLGAGFKKVLAMESVSVQADDVIAAGKERLAHVDDDGVTFKSHLDGSRHRFTPEVSMGIQHRLGADIIFAFDELTTLMNTRGYQEESVERTRRWAQRCLDEHRRLTAERAGKPRQALFGVVQGAQYEDLRRQAAQGLVALRDSEGGGFDGYGIGGALEKRNLGTIVGWVSEELPEDKPRHLLGISEPEDLFVAVENGADTFDCVQPSRVARNAALYAPDGRFNITTARNRRDFGPIDADCDCYTCAHYSRAYLHHLFKAKEHLAATLATIHNERFTVRMVDGIRTAIDRGEYAEYKREVLGRFAGGS

SEQ ID NO: 61886 - protein, 375 aa, Trabulsiella guamensis
  misc_feature (1)..(375): tr|A0A085AE94|A0A085AE94_9ENTR Queuine tRNA-ribosyltran sferase OS=Trabulsiella guamensis ATCC 49490 OX=1005994 GN=tgt PE=3 SV=1
MKFELDTTDGRARRGRLVFDRGVVETPAFMPVGTYGTVKGMTPEEVEATGAQIILGNTFHLWLRPGQEIMKLHGDLHDFMHWKGPILTDSGGFQVFSLGDIRKITEQGVHFRNPINGDPIFLDPETSMEIQYDLGSDIVMIFDECTPYPADWDYAKRSMEMSLRWAKRSRDRFDGLGNKNALFGIIQGSVYEDLRDISVKGLVEIGFDGYAVGGLAVGEPKADMHRILEHVCPQIPADKPRYLMGVGKPEDLVEGVRRGIDMFDCVMPTRNARNGHLFVTDGVVKIRNAVHKSDTSPLDAECDCYTCRNYSRAYLHHLDRCNEILGARLNTIHNLRYYQRLMAGLRKAIEEGKLESFVADFYQRQGRPVPPLNVD

SEQ ID NO: 61887 - protein, 375 aa, Trabulsiella odontotermitis
  misc_feature (1)..(375): tr|A0A0L0H312|A0A0L0H312_9ENTR Queuine tRNA-ribosyltran sferase OS=Trabulsiella odontotermitis OX=379893 GN=tgt PE=3 SV=1
MKFELDTTDGRARRGRLVFDRGVVETPAFMPVGTYGTVKGMTPEEVEATGAQIILGNTFHLWLRPGQEIMKLHGDLHDFMQWKGPILTDSGGFQVFSLGDIRKITEQGVHFRNPINGDPIFLDPEKSMEIQYDLGSDIVMIFDECTPYPADWDYAKRSMEMSLRWAKRSRDRFDGLGNKNALFGIIQGSVYEDLRDISVKGLVEIGFDGYAVGGLAVGEPKADMHRILEHVCPQIPADKPRYLMGVGKPEDLVEGVRRGIDMFDCVMPTRNARNGHLFVTDGVVKIRNAVHKSDTSPLDSECDCYTCRNYSRAYLHHLDRCNEILGARLNTIHNLRYYQRLMAGLRKAIEEGKLENFVADFYQRQGRPVPPLNVD

SEQ ID NO: 61888 - protein, 376 aa, Tranquillimonas alkanivorans
  misc_feature (1)..(376): tr|A0A1I5MM49|A0A1I5MM49_9RHOB Queuine tRNA-ribosyltran sferase OS=Tranquillimonas alkanivorans OX=441119 GN=tg t PE=3 SV=1
MPERFSYELKATDGKARTGVISTPRGEIRTPAFMPVGTAGTVKAMLPESVRATGADILLGNTYHLMLRPTAERIDRLGGLHRFMNWNRPILTDSGGFQVMSLAELRKLTERGVTFRSHIDGSRHEITPERSMEIQRLLGSDIVMAFDECPALPADRKRIEDSMRLSMRWASRSKEAFGDRPGHALFGIQQGGLEQDLREESAKALRDIGFDGYAVGGLAVGEGQEAMFGVLDFAPDMLPADKPRYLMGVGKPDDIVGAVARGIDMMDCVLPSRSGRTGQAWTRHGVVNIKNARHADDPRPLDEHCTCPACTGYSRAYLHHVFRAGEMISGMLLTWHNLHYYQELMQGMRDAIAAGRFAEFERDFHAQRAEGDIAPL

SEQ ID NO: 61889 - protein, 376 aa, Tranquillimonas sp.
  misc_feature (1)..(376): tr|A0A438AMC0|A0A438AMC0_9RHOB Queuine tRNA-ribosyltran sferase OS=Tranquillimonas sp. M0103 OX=2486419 GN=tgt PE=3 SV=1
MSDGFSYELHATDGKARTGVIRTPRGDIRTPAFMPVGTAGTVKAMMPESVRETGADILLGNTYHLMLRPGAERVARLGGLHRFMNWDRPILTDSGGFQVMSLSDLRKLTEEGVTFRSHVDGSKHHLSPETSMEIQRLLGSDIVMCFDECPALPATEEQVAASMRMSMRWAQRSRDAFGDRPGHALFGIQQGGVTPALREESARALTEIGFDGYAIGGLAVGEGQEAMFGVLDYAPGMLPVDKPRYLMGVGKPADIVGAVARGVDMMDCVLPSRSGRTGQAFTRRGVVNIKNARHADDARPLDEACTCPACRSYSRAYLHHVFRAGEMISGMLLTWHNLHYFQQIMAGMRAAIAEGRFADWQADFDRGQAQGDIDPI

SEQ ID NO: 61890 - protein, 380 aa, Treponema azotonutricium
  misc_feature (1)..(380): tr|F5YBN9|F5YBN9_TREAZ Queuine tRNA-ribosyltransferase OS=Treponema azotonutricium (strain ATCC BAA-888 / DSM 13862 / ZAS-9) OX=545695 GN=tgt PE=3 SV=1
MGSIFAIDQQDSSCSARTGTLDLPHGKVSTPVFMPVGTNATVKALTREDLKEIGFDIVLSNTYHLYLRPGTEVISAANGLHNFMGWDRNILTDSGGFQVFSLAPFRKITEEGVKFRSHIDGSYHFLSPEKVVEVQALFGSDIQMQLDVCTPWGVERKEAVRALETTSLWMNRAKQAWETELAKGEYKGLFFPIVQGNFFKELREESAKRVIDADCPGIAIGGLSVGESEELFLEFLNYTAALLPKEKPRYVMGIGTPEYILGAIENGIDMFDCVFPTRTGRNGHVFTHKGCFALKKAENTLNFSPIDEECGCKVCRSYSRAYLRHLFKAQEILCSMLASYHNLYFLNDLVLKARRAIGENRFLEFKKEFLGRYEQSEEKI

SEQ ID NO: 61891 - protein, 378 aa, Treponema berlinense
  misc_feature (1)..(378): tr|A0A1T4NYL8|A0A1T4NYL8_9SPIO Queuine tRNA-ribosyltran sferase OS=Treponema berlinense OX=225004 GN=tgt PE=3 S V=1
MMNIFDIKHESSDGKARTGTLHLPHGDVQTPVFMPVGTNATVKALTKDDLDEIGFEIILANTYHLYLRPGSDVIEEAGGLHGFSGWEKNFLTDSGGFQVWSLSKLRKITEEGAMFASNIDGSRHLFTPEKIVDVQAQFNSDIQMQLDVCSGWGIDKKEALHSLEITENWLKRAKSEWLKKQDEGYKGILLPIVQGNFFEDLRIRSAEFVTSMEMPAIAIGGLSVGEPAEVFASMLDFTVNHLPKEKAKYVMGIGTPDYILDAVHSGIDMFDCVLPTRNARNGSYFTHDGKLSIKQERFIHDFGPVDSECNCKVCRNYSRSYLRHLFKEQEILSSMLASYHNLYFLHNMMKEIRLAIEENRFEEYRTNFLKRYHAGNIK

SEQ ID NO: 61892 - protein, 382 aa, Treponema brennaborense
  misc_feature (1)..(382): tr|F4LM04|F4LM04_TREBD Queuine tRNA-ribosyltransferase OS=Treponema brennaborense (strain DSM 12168 / CIP 1059 00 / DD5/3) OX=906968 GN=tgt PE=3 SV=1
MTTTPDFFTELHADTSSRARTGIVRLPHGTVKTPVFMPVGTNATVKAMTKDDLSEIGFEIILANTYHLYLRPGVEILEQAGGLHGFSGWNGNFLTDSGGFQVFSLAPFRKITGEGVRFKSHIDGSSHLLTPESVVDLQSRFNSDIQMQLDVCTGFDIPEAKAKEALAVTTDWALRAKNEWLQKRDAGYQGALFPIVQGNFYRDLRAQSAEFVSGLDTPGIAIGGLSVGEPFDVYADMLEYTAQLLPRNKPRYVMGIGTPDYILEAVSNGVDMFDCVLPTRNARNGSYFTRDGTIAIKNARYATDFSPIDSECTCKVCREYSRAYLRHLFKEQEILSSMLASYHNLAFLHTMIAEVRTAIAEDRFASYKAAFLKRFNAGGAAE

SEQ ID NO: 61893 - protein, 379 aa, Treponema bryantii
  misc_feature (1)..(379): tr|A0A1I3K3P4|A0A1I3K3P4_9SPIO Queuine tRNA-ribosyltran sferase OS=Treponema bryantii OX=163 GN=tgt PE=3 SV=1
MSEVLKIFDIKHKNKDSRARTGTVHLPHGDVRTPVFMPVGTNATVKAMPKDFLEEIDFDIILANTYHLFLRPGPDLIKEAGGLHGFSQWKKNFLTDSGGFQVFSLSKLRKITDEGVRFQSHIDGSYHMFTPENVVQTQTKFNSDIQMQLDVCSGWGVERKEAERALKITSDWLLRAKGEWEKQREAGYEGMLFPIVQGNFFEDLRQKSAEFVSSLDMPGIAIGGLSVGEPPAEFTKYLNYTVQYLPEDKPKYVMGIGTPEYILDAVQAGIDMFDCVLPTRNARNGSYFTRRGMLSIKQERWIHDFGPIDPECNCKVCRTYSRSYLRHLFKEQEILSSILASYHNLYFLNNMLKEIRVAIDEDRFEEYRKEFLEKFHTGV

SEQ ID NO: 61894 - protein, 379 aa, Treponema bryantii
  misc_feature (1)..(379): tr|A0A1H9A8V5|A0A1H9A8V5_9SPIO Queuine tRNA-ribosyltran sferase OS=Treponema bryantii OX=163 GN=tgt PE=3 SV=1
MSEVLKIFDIKHKASGSRARTGTIHLPHGDVRTPVFMPVGTNATVKAMPKDFLEEIDFDIILANTYHLFLRPGPDLIKEAGGLHGFSQWKKNFLTDSGGFQVFSLSKLRKITDEGVRFQSHIDGSYHMFTPENVVQTQTKFNSDIQMQLDVCSGWGVERKEAEKALRITSDWLLRAKGEWEKQREAGYEGILFPIVQGNFFEDLRQKSAEFVSSLDMPGIAIGGLSVGEPPAEFTKYLNYTVQYLPEDKPKYVMGIGTPEYILDAVQAGIDMFDCVLPTRNARNGSYFTRRGMLSIKQERWIHDFGPVDPECNCKVCRTYSRSYLRHLFKEQEILSSILASYHNLYFLNNMLKEIRVAIDEDRFEQYRTDFLEKFHQGV

SEQ ID NO: 61895 - protein, 382 aa, Treponema caldarium
  misc_feature (1)..(382): tr|F8F3D2|F8F3D2_TRECH Queuine tRNA-ribosyltransferase OS=Treponema caldarium (strain ATCC 51460 / DSM 7334 / H1) OX=744872 GN=tgt PE=3 SV=1
MSETIFSVVHKDASSKARTGIIQLPHGPVETPVFMPVGTNGTVKAITVDDLHEIGFQIILSNTYHLYLRPGTGVIDAAGGLHRFIHWDKNILTDSGGFQVFSLAPFRKITEGGAKFRSHIDGSYHLLSPERVVEIQSILGSDIQMQLDVCTSYGTNYKDAEKALIITDKWLKRAKSAWEAVTDDGIYQGKLFAIVQGNFYKDLRQRSAELVVAADTPGIAIGGLSVGEPFEVFTEYLQYTTALLPEHKPRYVMGIGTPEFILEAIEQGVDMFDCVFPTRTGRNGLLFTRQGPITIKKGKYEYDFNPIDEECTCKVCRNYSRSYLRHLYRTGEILSSILASYHNLYFLHDLVRSARRAIQENRYTSFKKDFLYSYKSGTSKNE

SEQ ID NO: 61896 - protein, 379 aa, Treponema denticola
  misc_feature (1)..(379): sp|Q73QK5|TGT_TREDE Queuine tRNA-ribosyltransferase OS= Treponema denticola (strain ATCC 35405 / CIP 103919 / D SM 14222) OX=243275 GN=tgt PE=3 SV=1
MKEKKEIFTLLHQDAASPARTGVLELPHGKVLTPAFMPVGTAATVKAMTKDDLDEIGFEIILANTYHLFLRPGIEVIKAAGGLHGFSDWKKNFLTDSGGFQVFSLSQLRKITEEGVKFQSHIDGSRQFLSPEIAVELQTGFNSDIQMQLDICSSFGISKTQTLADLKITMNWLDRAFAAWHNTPHEYDGALFPIVQGGFFEDLRLQSLEAILKHEPRGIAIGGLSIGEPKDLYQEYLSFTAKHIPKNKPLYVMGIGTPDYILEAVKNGVDIFDCVLPSRNARNGNLFTHEGAISIKRKEYEFDFNPIDSQCKCKVCRQYTRAYLRHLFRTKEILYSMLATYHNLAFLYSMVQDIREAIQNDSFNDYYKNFLKKYENRLD

SEQ ID NO: 61897 - protein, 379 aa, Treponema denticola
  misc_feature (1)..(379): tr|A0A0E2EPX2|A0A0E2EPX2_TREDN Queuine tRNA-ribosyltran sferase OS=Treponema denticola AL-2 OX=999426 GN=tgt PE =3 SV=1
MKEKKEIFTLLHQDATSPARTGVLELPHGKVLTPAFMPVGTAATVKAMTKDDLDEIGFEIILANTYHLFLRPGIEVIKAAGGLHGFSGWKKNFLTDSGGFQVFSLSQLRKITEEGVKFQSHIDGSRQFLSPEIAVELQTGFNSDIQMQLDICSSFGISKTQTLADLKITMNWLDRAFAAWHNTPDEYDGALFPIVQGGFFEDLRLQSLEAILKHEPRGIAIGGLSIGEPKDLYQEYLSFTAKHIPKNKPLYVMGIGTPDYILEAVKNGVDIFDCVLPSRNARNGNLFTHEGAISIKRKEYEFDFNPIDSQCKCKVCRQYTRAYLRHLFRTKEILYSMLATYHNLAFLYSMVQDIREAIQNDSFNDYYKNFLKKYENRLD

SEQ ID NO: 61898 - protein, 343 aa, Treponema lecithinolyticum
  misc_feature (1)..(343): tr|U2K1H2|U2K1H2_TRELE Queuine tRNA-ribosyltransferase OS=Treponema lecithinolyticum ATCC 700332 OX=1321815 GN =tgt PE=3 SV=1
MPVGTNASVKGVSKDDLAEIGFEIILANTYHLYLRPGADILEKAGGLHGFSGWNKNFLTDSGGFQVFSLAPFRKITNEGVRFQSHIDGSRHILTPETVADIQARFNSDIQMQLDVCTGYGITEKKAVEALRITENWARRAKAQWEKRRAEGYEGMLFPIVQGNFFKDLRIQSAEFVASLDLPGIAIGGLSVGEPYELYCEMLAFTASLLPPHKVRYVMGIGTPEYILTAVANGIDMFDCVLPTRNGRNGSYFTKDGPIAIKKACYAADFSPIDSECTCKVCKNYSRAYLHHLYKNNEIAASMLGSYHNLAFLYNMMIEVRSAIREGRFEDYRSAFLSRYGGRK

SEQ ID NO: 61899 - protein, 376 aa, Treponema maltophilum
  misc_feature (1)..(376): tr|S3L298|S3L298_TREMA Queuine tRNA-ribosyltransferase OS=Treponema maltophilum ATCC 51939 OX=1125699 GN=tgt P E=3 SV=1
MKEIFTCTHNDEHSRARCGFLELPHGTVQTPVFMPVGTNASVKGVTKEDLEEIGFEIILANTYHLYLRPGADILEQAGGLHGFSGWEKNFLTDSGGFQVFSLAPFRKITAEGVRFQSHIDGSKHFLTPEIVVDIQARFASDIQMQLDVCTGYGISEKKALEALRITEDWAKRAFKQSERWRDTGYKGSLFPIVQGNFFKDLRAQSAEFVASLNSAGIAIGGLSVGEPFDVYEEFLSYTASLLPREKPRYVMGIGTPEYILAAVANGIDMFDCVLPTRNGRNGSFFTKDGLIAIKKAQYAADFSPIDPECTCKICKNYSRAYLHHLYKNGEIASSMFGSYHNLAFLYNMMVEVRAAINENRFADYRRTFLQRYGGNR

SEQ ID NO: 61900 - protein, 377 aa, Treponema medium
  misc_feature (1)..(377): tr|S3K6D7|S3K6D7_TREMD Queuine tRNA-ribosyltransferase OS=Treponema medium ATCC 700293 OX=1125700 GN=tgt PE=3 SV=1
MRERKNIYTLLHQDAGSSARTGVIRLPHGTVQTPAFMPVGTAATVKGITKDDLHEIGFEIILANTYHLFLRPGMDVIKQAGGLHGFSGWNKNFLTDSGGFQVFSLSQLRKIKEEGVTFQSHIDGSRQFLSPEIAVQVQAAFNSDIQMQLDICSPYGISKKETEKALTLTTAWMHRAVREWDQTEGYEGSLFPIIQGGFFEDLRIRSIESIMECDPHGIAIGGLSVGEPEDVYKEFLAFTAAHVPKQKPLYVMGIGTPDYILEAVKNGVDIFDCVLPSRNARNGNLFTRIGPISIKKKEYEYDFGPIDPSCSCKVCRNYSRAYLRHLFRCKEILYSMLATYHNLAFLHRMVAEIRESITEDRFSEYYRRFLKDYYGRA

SEQ ID NO: 61901 - protein, 376 aa, Treponema pedis
  misc_feature (1)..(376): tr|S5ZUR0|S5ZUR0_9SPIO Queuine tRNA-ribosyltransferase OS=Treponema pedis str. T A4 OX=1291379 GN=tgt PE=3 SV= 1
MKEKKEIFTTLHKDAGSRARTGILELPHGKVLTPAFMPVGTAASVKAMTKDDLNEIGFQIILANTYHLFLRPGIEVIKSAGGLHGFSGWQKNFLTDSGGFQVFSLSGLRKITEEGVKFQSHIDGSSRFLSPEIAVELQTGFNSDIQMQLDICSAYGITKAETLADLKITMNWLDRAFNAWNNTSETYDGALFPIVQGGFFEDLRLQSLEAVLKHEPRGIAIGGLSIGEPKEKYLEFLEFTAKQIPEKKPVYVMGIGTPDYILEAVKNGVDIFDCVLPSRNARNGSLFTHNGAISIKRKEYEFDFGPIDKKCNCKVCREYSRSYLHHLFRTKEILYSMLATYHNLFFLHNMVCDIRKAIETDSFDEYYHNFLKNYKI

SEQ ID NO: 61902 - protein, 376 aa, Treponema phagedenis
  misc_feature (1)..(376): tr|A0A5C0RL07|A0A5C0RL07_TREPH Queuine tRNA-ribosyltran sferase OS=Treponema phagedenis OX=162 GN=tgt PE=3 SV=1
MKIRKIFTECHKDAHTAARTGVIALPHGDLRTPAFMPVGTAGTVKGMTKDDLEEIGFEIILANTYHLFLRPGVEVIKAAGGLHGFTQWKRNFLTDSGGFQVFSLANLRRLSDEGVSFQSHLDGSSFFLSPELVVQLQAGFNSDIQMQLDICSNYGISKEQTEKELGLTSAWVKRAFSEWLKTPAEYQGSLFPIIQGGFYKDLRLRSIETVCELNPNGLAIGGLSVGEPTELYAEMLAFTAEHLPKNKPVYIMGIGTPHYILEAVKNGIDLFDCVLPSRNARNGSLFTRKGPISIKKKEFEYDFNPIDSQCNCKVCRTYSRAYLRHLFRSKEILYSMLGTYHNLAFLYTMVQEIRQAIEEDRFAEYYKNFLAEYTGG

SEQ ID NO: 61903 - protein, 376 aa, Treponema phagedenis
  misc_feature (1)..(376): tr|E7NWI7|E7NWI7_TREPH Queuine tRNA-ribosyltransferase OS=Treponema phagedenis F0421 OX=754027 GN=tgt PE=3 SV= 1
MKIRKIFTECHKDAHTVARTGVIALPHGDLRTPAFMPVGTAGTVKGMTKDDLEEIGFEIILANTYHLFLRPGVEVIKAAGGLHGFTQWKRNFLTDSGGFQVFSLANLRRLSDEGVSFQSHLDGSSFFLSPELVVQLQAGFNSDIQMQLDICSNYGISKEQTEKDLGLTSAWVKRAFSEWLKTPDEYQGSLFPIIQGGFYKDLRLRSIETVCELNPNGLAIGGLSVGEPTELYAEMLAFTAEHLPKNKPVYIMGIGTPHYILEAVKNGIDLFDCVLPSRNARNGSLFTRKGPISIKKKEFEYDFNPIDSQCNCKVCRTYSRAYLRHLFRSKEILYSMLGTYHNLAFLYTMVQEIRQAIEEDRFAEYYKNFLAEYTGG

SEQ ID NO: 61904 - protein, 377 aa, Treponema porcinum
  misc_feature (1)..(377): tr|A0A1T4LBN3|A0A1T4LBN3_9SPIO Queuine tRNA-ribosyltran sferase OS=Treponema porcinum OX=261392 GN=tgt PE=3 SV= 1
MNIFSPGHTCKNSKARCGVMHLPHGDVRTPVFMPVGTNGAVKAVSKDDIEEMGFEIILANTYHLFLRPGADLVQEAGGLHGFTKYNGNFLTDSGGFQVFSLSKLRKITPEGARFQSHIDGSYHLFTPENVVQTQVKFNSDIQMQLDVCSGFGVDRKEAVSALEITTDWAKRAIKEWQKEREAGYKGYLFPIVQGNFFEDLRRQSAEFVAGLDSAGIAIGGLSVGEPADEFVHFMNYTNQFLPEEKIKYVMGIGTPEYILEAVAAGIDMFDCVLPTRNARNGSYFTHDGMLSIKQERFTHDFSPLDRECNCKVCRTYSRAYLRHLFKEQEILSSMLASYHNLYFLNNMMKEIRAAIENDTFETYKKSFLERFRAGNIQ

SEQ ID NO: 61905 - protein, 380 aa, Treponema primitia
  misc_feature (1)..(380): tr|F5YMV3|F5YMV3_TREPZ Queuine tRNA-ribosyltransferase OS=Treponema primitia (strain ATCC BAA-887 / DSM 12427 / ZAS-2) OX=545694 GN=tgt PE=3 SV=1
MEPFFTIHHSDTSCSARTGILALPHGPVSTPVFMPVGTNGTVKAITVDDLSAIGFEIILSNTYHLYLRPGLEVISAAKGLHPFMNWQRNILTDSGGFQVFSLAPFRKIRDQGVEFRSHLDGSTHLLSPEGVVEIQTLLGSDIQMQLDVCTKWGVSYKEAENALGITADWLKRAKQTWVEKADNGYEGKLFAIVQGNFFKELRERSAALAAEADTPGIAIGGLSVGEEGDVFQEYLAYTAALLPREKPRYVMGIGTPQYILEAIEQGIDMFDCVLPTRTGRTGRVFTRRGDISIKRADREFDFSPLDPQCTCKVCREYSRAYMRHLFKTQEILCSMLASYHNLYFLHSLVTDARRAIEENRFLQFKEDFLKQYTELPGMGE

SEQ ID NO: 61906 - protein, 379 aa, Treponema putidum
  misc_feature (1)..(379): tr|A0A562SC64|A0A562SC64_9SPIO Queuine tRNA-ribosyltran sferase OS=Treponema putidum OX=221027 GN=tgt PE=3 SV=1
MKEKKEIFTLLHQDAASPARTGVLDLPHGKVLTPAFMPVGTAATVKAMTKDDLNEIGFEIILANTYHLFLRPGIEVIKAAGGLHGFSGWKKNFLTDSGGFQVFSLSQLRKITEEGVKFQSHIDGSRQFLSPEIAVELQTGFNSDIQMQLDICSSFGISKTQTLADLKITMNWLDRAFAAWHNTPDEYDGALFPIVQGGFFEDLRLQSLEAILKHEPRGIAIGGLSIGEPKDLYQEYLSFTAKHIPKNKPLYVMGIGTPDYILEAVKNGVDIFDCVLPSRNARNGNLFTHEGAISIKRKEYEFDFNPIDSQCKCKVCRQYTRAYLRHLFRTKEILYSMLATYHNLAFLYSMVQDIREAIQNDSFNDYYKNFLKKYENRLE

SEQ ID NO: 61907 - protein, 378 aa, Treponema saccharophilum
  misc_feature (1)..(378): tr|H7EIF5|H7EIF5_9SPIO Queuine tRNA-ribosyltransferase OS=Treponema saccharophilum DSM 2985 OX=907348 GN=tgt P E=3 SV=1
MENIFDINHESADGMARRGTLHLPHGDVRTPVFMPVGTNATVKALTKDDLEEIGFEIILANTYHLYLRPGSDIIEQAGGLHGFSQWKRNFLTDSGGFQVWSLSKLRKITMKGAEFQSNIDGSRHLFTPEKVVDVQTQFNSDIQMVLDVCTGWGIGKDEALRALDVTENWAARAKEEWLKKRDEGYKGILLPIVQGNFFEDLRIRSAEFVTKLDLPAIAIGGLSVGEPPEIFASMLDFTVRHLPKEKAKYVMGIGTPDYILDAVHSGIDMFDCVLPTRNARNGSYFTHDGPLSIKQKRFERDFSPIDKECGCKVCRTYSRAYLRHLFKEQEILSCTLASYHNLYFLHNMVAEIRAAIDGDRFEQYRSDFLRRYHAGNII

SEQ ID NO: 61908 - protein, 377 aa, Treponema socranskii
  misc_feature (1)..(377): tr|U1FJQ8|U1FJQ8_TRESO Queuine tRNA-ribosyltransferase OS=Treponema socranskii subsp. socranskii VPI DR56BR111 6 = ATCC 35536 OX=1125725 GN=tgt PE=3 SV=1
MNIFEVHHTSSDGSARTGLLTLPHGTVRTPVFMPVGTNATVKAVSKESLEEIGFEIILANTYHLFLRPGSDLIKEAGGLHGFSKWQKNFLTDSGGFQVFSLAKLRKIGAEGVAFQSHIDGSRHFFTPENVVETQAKFNSDIQMQLDVCTGWNEGRKEAERALAITTDWAKRALSEWKRETERGYRGFLFPIVQGNFFEDLRKESALFVSSLDTAGIAIGGLSVGEPAEEFARFLQYTVQYLPEAKPKYVMGIGTPEYILEAVASGIDMFDCVLPTRNARNGSYFTHDGMLSIKQERFAHDFSPIDAECTCKVCRTYSRAYLRHLFKEQEILSAMLSSYHNLYFLHAMMGEIRNAIEENRFLEYKRDFLARFGTGTIR

SEQ ID NO: 61909 - protein, 377 aa, Treponema socranskii
  misc_feature (1)..(377): tr|S3JLM3|S3JLM3_TRESO Queuine tRNA-ribosyltransferase OS=Treponema socranskii subsp. paredis ATCC 35535 OX=11 25701 GN=tgt PE=3 SV=1
MNIFEVRRTSSDGSARTGLLTLPHGTVRTPVFMPVGTNATVKAVSKESLEEIGFEIILANTYHLFLRPGPDLIKEAGGLHGFSKWQKNFLTDSGGFQVFSLAKLRKIGAEGVAFQSHIDGSRHFFTPENVVETQAKFNSDIQMQLDVCTGWNEGRKEAERALTITTDWAKRALSAWKRETERGYRGFLFPIVQGNFFEDLRKESALFVSSLDTAGIAIGGLSVGEPAEDFVRFLRYTVQYLPESKPKYVMGIGTPEYILEAVASGIDMFDCVLPTRNARNGSYFTHDGMLSIKQERFARDFSPIDAECTCKVCRTYSRAYLRHLFKEQEILSAMLSSYHNLYFLHAMMGEIRNAIEENRFLEYKRDFLARFGAGTIR

SEQ ID NO: 61910 - protein, 378 aa, Treponema sp.
  misc_feature (1)..(378): tr|A0A3D0LAN5|A0A3D0LAN5_9SPIO Queuine tRNA-ribosyltran sferase OS=Treponema sp. OX=166 GN=tgt PE=3 SV=1
MIQNFFEIHHSDSSSRARTAVMHLPHGDVETPVFMPVGTKGTVKAVSKDDLEEIGFEIILANTYHMYLRPGADIVKEAGGLHEFTQWKRNFLTDSGGFQVFSLSSLRKIETGGVTFRSDIDGSKHFFTPENVVQTQAKLNSDIQMQLDVCTGYGVTRKEAEKALKITSSWAERSIKEWKVQTEEGYKGILFPIVQGNFYEDLRKESAEFVSSLDTPGFAIGGLSVGEPSDVYVKMLSHTVQFLPRTKPCYVMGIGTPEYILEAVENGVDMFDCVQPTRVARHGLYFTRHGMLSIKQKRFERDFSPVENTCGCKVCRTYSRAYLRHIFREQEILSSMLASYHNLYFLHQMIKEVRESINEDKFPIYKEEFLKQFQSKDV

SEQ ID NO: 61911 - protein, 378 aa, Treponema sp.
  misc_feature (1)..(378): tr|A0A352BAU9|A0A352BAU9_9SPIO Queuine tRNA-ribosyltran sferase OS=Treponema sp. OX=166 GN=tgt PE=3 SV=1
MIQNFFEIHHSDSSSRARTAVMHLPHGDVETPVFMPVGTKGTVKAVSKDDLEEIGFEIILANTYHMYLRPGADIVKEAGGLHEFTQWKRNFLTDSGGFQVFSLSSLRKIETGGVTFRSDIDGSKHFFTPENVVQTQAKLNSDIQMQLDVCTGYGVTRKEAEKALKITSSWAERAIKEWKVQMEEGYKGILFPIVQGNFYEDLRKESAEFVSSLDTPGFAIGGLSVGEPSDVYVKMLSHTVQFLPRTKPCYVMGIGTPEYILEAVENGVDMFDCVQPTRVARHGLYFTRHGMLSIKQKRFERDFSPVENTCGCKVCRTYSRAYLRHIFREQEILSSMLASYHNLYFLHQMIKEVRESINEDKFPIYKEEFLKQFQSKDV

SEQ ID NO: 61912 - protein, 378 aa, Treponema succinifaciens
  misc_feature (1)..(378): tr|F2NTG3|F2NTG3_TRES6 Queuine tRNA-ribosyltransferase OS=Treponema succinifaciens (strain ATCC 33096 / DSM 24 89 / 6091) OX=869209 GN=tgt PE=3 SV=1
MIKNFFEIQHENKNSCARTGVVHLAHGNVQTPVFMPVGTKGTVKALTKDDLEEIGFEIILANTYHLYLRPGADIVSEAGGLHGFTKWNRNFLTDSGGFQVWSLSNLRKIENEGVAFRSTIDGSKHFFTPENVVQTQVKLNSDIQMQLDVCSGYGVERREAERAFRLSSDWAVRAINEWKLHSENGYKGILFPIVQGNFFDDLRKESAEFVDSLGTPGLAIGGLSVGEPADVFVEKLKYTVQFLSKNKPRYVMGIGTPEYILDAVSNGIDMFDCVQPTRIARHGLYFHHKGMVSIKQKRFERDFSALDSECNCKVCKTYSRAYLRHIFREQEILSSMLASYHNLYFLHNMILEIRSAIENDKFEEYKKNFLDNFHSNEL

SEQ ID NO: 61913 - protein, 377 aa, Treponema vincentii
  misc_feature (1)..(377): tr|S3L8V9|S3L8V9_9SPIO Queuine tRNA-ribosyltransferase OS=Treponema vincentii F0403 OX=1125702 GN=tgt PE=3 SV= 1
MRERKNIYTLLHQDTGSAARAGVISLPHGTVQTPAFMPVGTAATVKGMTKDDLHEIGFEIILANTYHLFLRPGMDVIKQAGGLHGFSGWNKNFLTDSGGSQVFSLSQLRKIKEEGVTFQSHIDGSRQFLSPEIAVQVQAAFNSDIQMQLDICSPYGISKKETEKALTLTTAWMQRAVREWDRTEGYEGSLFPIIQGGFFEDLRLRSIESIMECDPHGIAIGGLSVGEPEEVYKEFLAFTAAHVPKHKPLYVMGIGTPDYILEAVKNGVDIFDCVLPSRNARNGNLFTRTGSISIKKKEYEYDFGPIDSSCSCKVCRNYSRAYLRHLFRCKEILYSMLATYHNLAFLHRMVAEIRESITEDRFSEYYRSFLKDYYGRI

SEQ ID NO: 61914 - protein, 355 aa, Treponema vincentii
  misc_feature (1)..(355): tr|C8PND3|C8PND3_9SPIO Queuine tRNA-ribosyltransferase OS=Treponema vincentii ATCC 35580 OX=596324 GN=tgt PE=3 SV=1
MISLPHGTVQTPAFMPVGTAATVKGMTKDDLHEIGFEIILANTYHLFLRPGMDVIKQAGGLHGFSGWDKNFLTDSGGFQVFSLSQLRKIKEEGVTFQSHIDGSRQFLSPEIAVQVQAGFNSDIQMQLDICSPYGIPKKETEKALTLTTAWMHRAVREWDQTEGYEGSLFPIIQGGFFEDLRIRSIESIMECDPHGIAIGGLSVGEPEEVYKEFLAFTAAHVPKHKPLYVMGIGTPDYILEAVKNGVDIFDCVLPSRNARNGNLFTRTGPISIKKKEYEYDFGPIDPSCSCKVCRNYSRAYLRHLFRCKEILYSMLATYHNLAFLHRMVAEIRESITEDRFSEYYRRFLKDYYGRI

SEQ ID NO: 61915 - protein, 392 aa, Trichococcus collinsii
  misc_feature (1)..(392): tr|A0A143YBM4|A0A143YBM4_9LACT Queuine tRNA-ribosyltran sferase OS=Trichococcus collinsii OX=157076 GN=tgt PE=3 SV=1
MPDIYKKEVNTLTEPAIRYRLIKKEKHTGARLGEIITPHGTFQTPMFMPVGTLATVKTMSPEELKAMGSQIILSNTYHLWLRPGSDLVEEAGGLHKFMNWDRGILTDSGGFQVFSLSQNRQITEAGVHFRNHLNGSKMFLSPEKAIHIENQLGADIIMSFDECPPYSESYDYIKASVERTTRWAERGLEAHKKPNQQGLFGIIQGAGYKDLRLQSAKELISLDFPGYSIGGLSVGETKEEMNGVLDYLTPVMPEDKPRYLMGVGAPDSLIDGVIRGIDMFDCVLPTRIARNGTCMTSSGRLVIKNAKYERDFRPLDEKCDCYTCKNYTRAYIRHLIKADETFGLRLTSYHNLHFLINLMKNVRQAIMDDNLLEFREAFVEEYGFNVENPKKF

SEQ ID NO: 61916 - protein, 392 aa, Trichococcus flocculiformis
  misc_feature (1)..(392): tr|A0A143YCY5|A0A143YCY5_9LACT Queuine tRNA-ribosyltran sferase OS=Trichococcus flocculiformis OX=82803 GN=tgt PE=3 SV=1
MPDIYKKEVNTLTEPAIRYRLIKKEKHTGARLGEIITPHGTFQTPMFMPVGTLATVKTMSPEELKTMGSQIILSNTYHLWLRPGSDLVEEAGGLHKFMNWDRGILTDSGGFQVFSLSQNRQITEAGVHFRNHLNGSKMFLSPEKAIHIENQLGADIIMSFDECPPYSESYDYIKASVERTTRWAERGLEAHKKPDQQGLFGIIQGAGYKDLRLQSARELISLDFPGYSIGGLSVGETKEEMNGVLDYLTPVMPENKPRYLMGVGAPDSLIDGVIRGIDMFDCVLPTRIARNGTCMTSSGRLVIKNAKYERDFRPLDEKCDCYTCKNYTRAYIRHLIKADETFGLRLTSYHNLHFLINLMKNVRQAIMDDNLLEFREAFVEEYGFNVENPKKF

SEQ ID NO: 61917 - protein, 396 aa, Trichococcus ilyis
  misc_feature (1)..(396): tr|A0A143Z2P2|A0A143Z2P2_9LACT Queuine tRNA-ribosyltran sferase OS=Trichococcus ilyis OX=640938 GN=tgt PE=3 SV= 1
MVYWLPDIYKKEVNALTEPAIRYRLIKKEKHTGARLGEIITPHGTFQTPMFMPVGTLATVKTMSPEELKAMGSQIILSNTYHLWLRPGSNLVEEAGGLHKFMNWDRGILTDSGGFQVFSLSENRQITEAGVHFRNHLNGSKMFLSPEKAIHIENQLGADIIMSFDECPPYSESYDYIKASVERTTRWAERGLEAHKKPDQQGLFGIIQGAGYKDLRLQSAKELISLDFPGYSIGGLSVGETKEEMNGVLDYLTPVMPENKPRYLMGVGAPDSLIDGVIRGIDMFDCVLPTRIARNGTCMTSSGRLVIKNAKYERDFRPLDEKCDCYTCKNYTRAYIRHLFKADETFGLRLTTYHNLHFLINLMNGVRQAIMDDNLLEFREAFMEEYGFNVENPKKF

SEQ ID NO: 61918 - protein, 401 aa, Trichococcus palustris
  misc_feature (1)..(401): tr|A0A143Y6L2|A0A143Y6L2_9LACT Queuine tRNA-ribosyltran sferase OS=Trichococcus palustris OX=140314 GN=tgt PE=3 SV=1
MNTIAVVYWLPDIIRKEVNTLTEPAIQYRLIKKEKHTGARLGEIITPHGTFQTPMFMPVGTLATVKTMSPEELDEMGAQIILSNTYHLWLRPGSDLVEEAGGLHKFMNWDKGILTDSGGFQVFSLSENRKITEEGVHFRNHLNGSKMFLSPEKAIHIENQLGADIIMSFDECPPYSESYDYIKASVERTTRWAERGLKAHKKPNEQGLFGIIQGAGYKDLRLQSAKELISLDFPGYSIGGLSVGETKEEMNGVLDYLTPVMPENKPRYLMGVGAPDSLIDGVIRGIDMFDCVLPTRIARNGTCMTSGGRLVIKNAKYERDFRPLDEKCDCYTCRNYTRAYIRHLFKADETFGLRLTTYHNLHFLINLMKNVRQAIMDDNLLEFREAFVEEYGFNKENAPKF

SEQ ID NO: 61919 - protein, 392 aa, Trichococcus pasteurii
  misc_feature (1)..(392): tr|A0A1W1ICM8|A0A1W1ICM8_9LACT Queuine tRNA-ribosyltran sferase OS=Trichococcus pasteurii OX=43064 GN=tgt PE=3 SV=1
MPDIYKKEVNTLTEPAIRYRLIKKEKHTGARLGEIITPHGTFQTPMFMPVGTLATVKTMSPEELKAMGSQIILSNTYHLWLRPGSDLVEEAGGLHKFMNWDRGILTDSGGFQVFSLSENRQITEAGVHFRNHLNGSKMFLSPEKAIHIENQLGADIIMSFDECPPYSESYDYIKASVERTTRWAERGLEAHKKPDQQGLFGIIQGAGYKDLRLQSAKELISLDFPGYSIGGLSVGETKEEMNGVLDYLAPVMPENKPRYLMGVGAPDSLIDGVIRGIDMFDCVLPTRIARNGTCMTSSGRLVIKNAKYERDFRPLDEKCECYTCKNYTRAYIRHLFKADETFGLRLTTYHNLHFLINLMNNVRQAIMDDNLLEFREAFVEEYGFNVENPKKF

SEQ ID NO: 61920 - protein, 392 aa, Trichococcus patagoniensis
  misc_feature (1)..(392): tr|A0A2T5I7Z8|A0A2T5I7Z8_9LACT Queuine tRNA-ribosyltran sferase OS=Trichococcus patagoniensis OX=382641 GN=tgt PE=3 SV=1
MPDIYKKEVNTLTEPAIRYRLIKKEKHTGARLGEIITPHGTFQTPMFMPVGTLATVKTMSPEELKTMGSQIILSNTYHLWLRPGSDLVEEAGGLHKFMNWDRGILTDSGGFQVFSLSQNRQITEAGVHFRNHLNGSKMFLSPEKAIHIENQLGADIIMSFDECPPYSESYDYIKASVERTTRWAERGLEAHKKPNQQGLFGIIQGAGYKDLRLQSAKELISLDFPGYSIGGLSVGETKEEMNGVLDYLTPVMPEDKPRYLMGVGAPDSLIDGVIRGIDMFDCVLPTRIARNGTCMTSSGRLVIKNAKYERDFRPLDEKCDCYTCKNYTRAYIRHLIKADETFGLRLTSYHNLHFLINLMNNVRQAIMDDNLLEFREAFVEEYGFNVENPKKF

SEQ ID NO: 61921 - protein, 381 aa, Trichococcus sp.; identical to SEQ ID NO: 60674
  misc_feature (1)..(381): tr|A0A5C5E8X8|A0A5C5E8X8_9LACT Queuine tRNA-ribosyltran sferase OS=Trichococcus sp. SKBG OX=2585775 GN=tgt PE=3 SV=1

SEQ ID NO: 61922 - protein, 392 aa, Trichococcus sp.; identical to SEQ ID NO: 61916
  misc_feature (1)..(392): tr|A0A143YM86|A0A143YM86_9LACT Queuine tRNA-ribosyltran sferase OS=Trichococcus sp. ES5 OX=872292 GN=tgt PE=3 S V=1

SEQ ID NO: 61923 - protein, 367 aa, Trichodesmium erythraeum
  misc_feature (1)..(367): tr|Q112A6|Q112A6_TRIEI Queuine tRNA-ribosyltransferase OS=Trichodesmium erythraeum (strain IMS101) OX=203124 G N=tgt PE=3 SV=1
MSQNFSFNSQARCSYTKARAGIFITPHGSINTPRFMPVGTLANVKTLTPAQLEAAGAQMILANTYHLHLQPGESIVAGAGGLHKFMAWNRPILTDSGGFQVFSLGDIRTISEAGVKFRSPHDGSMIDLTPERSIQIQNELGGDVIMAFDECPPYPASWEEVELATNRTYRWLQRCIEAHQRQDQALFGIVQGGVYPELRSIAARQLVDLDLPGYAIGGVSVGEPGELIDHIVKVTTPFLPEDKPRYLMGVGTYREMVRAIAEGIDLFDCVIPTRLGRHGAALVRGERWNLKNARFKEDFRPLDEFCPCYCCQNFSRAYLSHLVRAKEALGYTLLSLHNVTELISFTQRIRDAILKDRFITEFGSWLR

SEQ ID NO: 61924 - protein, 339 aa, Trichormus variabilis
  misc_feature (1)..(339): tr|A0A1Z4KF59|A0A1Z4KF59_ANAVA Queuine tRNA-ribosyltran sferase OS=Trichormus variabilis NIES-23 OX=1973479 GN= tgt PE=3 SV=1
MPVGTLANVKTVTPAQLKETGAQMVLSNTYHLHLQPGEAIVAGGGGLHKFMGWNGPMLTDSGGFQVFSLSEMRKITEEGVTFRSPRDGQIIKLTPERSIEIQNILGADVIMAFDECPPYPANRQEVEAATERTYRWLERCITAHQRQDQALFGIVQGGVYLDLRAKAANTLTELDLPGYAIGGVSVGEPPEMMAQIVQATAPLLPAHKPRYLMGVGTYREMVIAIASGIDLFDCVIPTRWARHGTAMVKGERWNLKNAKFREDFAPIDETCPCYACQNFSRAYISHLVRSQEILAYTLLSIHNITELIRFTQKIREAILSDRFLEEFGHWLNSAETDNR

SEQ ID NO: 61925 - protein, 375 aa, Trichormus variabilis
  misc_feature (1)..(375): tr|A0A3S1ALJ0|A0A3S1ALJ0_ANAVA Queuine tRNA-ribosyltran sferase OS=Trichormus variabilis SAG 1403-4b OX=447716 GN=tgt PE=3 SV=1
MTNFSFECLATCSHTKARAGVFYTPHGEVETPRFMPVGTLANVKTITPAQLKDTGAQMVLSNTYHLHLQPGEAIVAGGGGLHKFMGWNGPMLTDSGGFQVFSLSEMRKITEEGVNFRSPHDGQMIKLTPERSIEIQNILGADVIMAFDECPPYPATRQEVEAATDRTYRWLERCIAAHKRSDQALFPIVQGGVYLDLRVQAAEALAKLDMPGYAIGGVSVGEPTELMAQIVQTTAPLLPIDKPRYLMGVGTYREMAIAIASGVDLFDCVIPTRWARHGTAIVSGERWNLKNAKFREDFTPLDETCPCYACQNFSRAYISHLVRSQEILAYTLLSIHNITELIRFTQKIRASILSDRFLDDFGHWLKTPEVGETEA

SEQ ID NO: 61926 - protein, 394 aa, Trinickia caryophylli
  misc_feature (1)..(394): tr|A0A1X7CC80|A0A1X7CC80_TRICW Queuine tRNA-ribosyltran sferase OS=Trinickia caryophylli OX=28094 GN=tgt PE=3 S V=1
MTEGHRHHPNAAASTVAGGLRFELIATDGQARRGRLTLNHGVVETPIFMPVGTYGTVKAIQPRELEEIQARIILGNTFHLWLRPGLETIAAHGGLHDFMGWRRPILTDSGGFQVFSLGDLRKITEDGVTFASPINGDKLFLSPEVSMQIQKVLNSDIVMQFDECTPYATDGVPTSHADAAGSMRMSLRWALRSIDEFSRLANPNALFGIVQGGMYEDLREESLAGLAEIGFHGLAVGGLSVGEPKEDMLRILDFIGPRLPADKPHYLMGVGTPEDLVAGVAAGIDMFDCVMPTRNARNGWLFTRFGDVKIRNAVHRNSLRPLDESCGCYTCRHFTRGYLHHLHRVGEILGAQLNTIHNLHYYLELMSEIRTAIETGTFDAFRKRFAEERARGVE

SEQ ID NO: 61927 - protein, 394 aa, Trinickia soli
  misc_feature (1)..(394): tr|A0A2N7W8F1|A0A2N7W8F1_9BURK Queuine tRNA-ribosyltran sferase OS=Trinickia soli OX=380675 GN=tgt PE=3 SV=1
MTEGHAHEPATAAAAGLNGLKFELLKTDGRARRGRLTLNHGVVETPIFMPVGTYGTVKAIQPRELEEIRAQIILGNTFHLWLRPGLETVAAHGGLHGFMGWRRPILTDSGGFQVFSLGDLRKITEDGVTFASPVNGDKLFLSPEVSMQIQKVLNSDIVMQFDECTPYATDGVPTSHDDAAASMRMSMRWAKRSIDEFNRLGNPNALFGIVQGGMFEDLRDESLAGLSELDFHGLAVGGLSVGEPKEDMLRVLEHIGPKLPAHKPHYLMGVGTPEDLVAGVAAGIDMFDCVMPTRNARNGWLFTRFGDIKIRNATHKNSLRPLDETCGCYTCRHFTRGYLHHLHRVGEILGAQLNTIHNLHYYLELMGEIREAIETGAFEAFRQRFRDERARGVE

SEQ ID NO: 61928 - protein, 395 aa, Trinickia sp.
  misc_feature (1)..(395): tr|A0A4U1IBV6|A0A4U1IBV6_9BURK Queuine tRNA-ribosyltran sferase OS=Trinickia sp. 7GSK02 OX=2571161 GN=tgt PE=3 SV=1
MTEGHTRASTPQTHEAPANGLKFDLLTTDGQARRGRLTLNHGVIETPIFMPVGTYGTVKAIQPRELEEIRAQIILGNTFHLWLRPGLDTIAAHGGLHGFMGWKRPILTDSGGFQVFSLGDLRKITEDGVTFASPINGDKLFLSPEVSMQIQKVLNSDIVMQFDECTPYAVNGVPTTRDEAAASMRMSMRWAKRSITEFDRLGNPNALFGIVQGGMFEDLRDESLAGLSEIGFHGLAVGGLSVGEPKEDMMRILNHIGPKLPAGKPHYLMGVGTPEDLVAGVAAGIDMFDCVMPTRNARNGWLFTRFGDIKIRNATHKNSLRPLDETCGCYTCRNFSRGYLHHLHRVGEILGAQLNTIHNLHYYLELMGEMRTAIETHTFDAFRKRFAEDRATGVD

SEQ ID NO: 61929 - protein, 395 aa, Trinickia symbiotica
  misc_feature (1)..(395): tr|A0A2N7WZ28|A0A2N7WZ28_9BURK Queuine tRNA-ribosyltran sferase OS=Trinickia symbiotica OX=863227 GN=tgt PE=3 S V=1
MTDGHPNHHDPIASPAAAGGLQFELLATDGQARRGRLTLNHGVVETPIFMPVGTYGTVKAIQPRELEEIQARIILGNTFHLWLRPGLDTVAAHGGLHGFMGWRRPILTDSGGFQVFSLGDLRKITEEGVAFASPVNGDKLFLSPEISMRIQRTLNSDIVMQFDECTPYATDGVPTSHTEAAESMRMSLRWAKRSIDEFERLANPNALFGIVQGGMYEDLRDESLAGLSEIGFHGIAVGGLSVGEPKEEMLRVLAHVGPRLPADKPHYLMGVGTPEDLVAGVAAGIDMFDCVMPTRNARNGWLFTRFGDIKIRNAQHRNTLRPLDECCGCYTCRNFTRGYLHHLHRVGEILGAQLNTIHNLHYYLELMGEMRAAIETQTFDAFRKRFAEERARGTE

SEQ ID NO: 61930 - protein, 376 aa, Tritonibacter horizontis
  misc_feature (1)..(376): tr|A0A132BV37|A0A132BV37_9RHOB Queuine tRNA-ribosyltran sferase OS=Tritonibacter horizontis OX=1768241 GN=tgt P E=3 SV=1
MAELFNFEMSAQDGKARTGVIHTPRGDIRTPAFMPVGTAATVKAMMPESVRATGADILLGNTYHLMLRPTAERIDRLGGLHKFMNWDRPILTDSGGFQVMSLAGLRKLTEQGVTFKSHIDGSKHELTPERSMEIQRLLGSDIVMCFDECPALPADRDRIAESMRLSMRWAERSRDAFGDRPGHALFGIQQGGLEKDFREESAAALTKVGFDGYAVGGLAVGEGQEAMFSCLDYAPDMLPMDKPRYLMGVGKPDDIVGAVARGIDMMDCVLPSRSGRTGQAFTRHGVVNIKNARHQDDPRPLDEGCSCPACRQYSRAYLHHVFRSNEMISGMLLTWHNLHYFQDIMAGMRESIAAGTFAAWQADFHETRARGDIEPL

SEQ ID NO: 61931 - protein, 404 aa, Tropheryma whipplei
  misc_feature (1)..(404): tr|Q83GU0|Q83GU0_TROWT Queuine tRNA-ribosyltransferase OS=Tropheryma whipplei (strain Twist) OX=203267 GN=tgt PE=3 SV=1
MLDLPVWGNYITGWSIGRWSMFSVLKQTEYGRTGIISTCNGQIHTPAFIPVATKASIKGVLPEQMKQLGAQGLLANAYHLYLRPGPDTIAAAGGLSRFMSWNGPTFTDSGGFQVMSLGRGGKKVISMEVPDNTWESNIRKTSLIRIDDQGVWFRSHIDGSQHRFTPEESIRVQNKIGADIIFAFDQLTTLDDSRAVQEYALERTRLWAERCLNQHSKEDQALFAVIQGANYRDLREKACRDLGQMGFDGFGIGGALEKSRIREIITWCTRKLPEEKPRHLLGISEPNDLMNAIEAGIDTFDCVSPTRVARNTAFYTPSGRKNLRRKMYRNDFSPLVEGCACYACSNFTRAYIHHLFRAKEMCAATLTSIHNEYFIVSMVDGARKAIDEGYFREYKGKILREYYK

SEQ ID NO: 61932 - protein, 375 aa, Tropicibacter naphthalenivorans
  misc_feature (1)..(375): tr|A0A0P1GF11|A0A0P1GF11_9RHOB Queuine tRNA-ribosyltran sferase OS=Tropicibacter naphthalenivorans OX=441103 GN =tgt PE=3 SV=1
MALTSFDLKARDGRARTGVITTPRGEIRTPAFMPVGTAATVKGMLPESVRATGADILLGNTYHLMLRPGAERVARLGGLHKFMNWDRPILTDSGGFQVMSLSELRKLTEKGVTFRSHVDGSKHELTPERSMEIQKLLGSDIVMAFDECPALPADRKRLTDSMRLSMRWAQRSRDAFGDRPGHMLFGIQQGGLEEDLRAESAEALKNIGFDGYAIGGLAVGEGQEAMFGCLDFAPGQLPEDKPRYLMGVGKPEDIVGAVKRGIDMMDCVLPSRSGRTGQAWTPRGQVNLKNARHADDPRPLDENCTCPACTSYSRAYLHHVYRSGEMIAGMLLTWHNLHYYQQLMQGMRDAIEAGTFVAFEADFQATRALGDIERL

SEQ ID NO: 61933 - protein, 375 aa, Tropicibacter phthalicicus
  misc_feature (1)..(375): tr|A0A238JCS8|A0A238JCS8_9RHOB Queuine tRNA-ribosyltran sferase OS=Tropicibacter phthalicicus OX=1037362 GN=tgt PE=3 SV=1
MAQTSFTLHAQDGQARTGVISTPRGEIRTPAFMPVGTAATVKGMMPESVRETGADILLGNTYHLMLRPGAERIDRLGGLHKFMNWERPILTDSGGFQVMSLSDLRKLTEEGVTFKSHIDGSKHHLTPERSMEIQKLLGSDIVMAFDECPALPADRKRIADSMRLSMRWAQRSRDSFGDRPGHMLFGIMQGGLEQDLREESATALIDIGFDGYAVGGLAVGEGQEAMFGCLDYAPGFLPEDKPRYLMGVGKPDDIVGAVKRGIDMMDCVLPSRSGRTGQAWTRRGQINIKNARHAEDPRPLDENCTCPACRNYSRAYLHHVFKSNEMIAGMLLTWHNLHYFQQIMQEMRDAIAAGTFDAWEAEFHAQRAQGDIEPL

SEQ ID NO: 61934 - protein, 376 aa, Tropicimonas isoalkanivorans
  misc_feature (1)..(376): tr|A0A1I1G471|A0A1I1G471_9RHOB Queuine tRNA-ribosyltran sferase OS=Tropicimonas isoalkanivorans OX=441112 GN=tg t PE=3 SV=1
MTPRFSFSLHMTDGKARSGIISTPRGEIRTPAFMPVGTAATVKAMMPESVRATGADVLLGNTYHLMLRPTAERIDRLGGLHKFMNWERPILTDSGGFQVMSLAELRKLTEEGVSFRSHIDGSKHMLTPERSMEIQRLLGSDIVMCFDECPALPASHERIAESMRLSMRWAARSRDAFGDRPGHALFGIQQGGDEEDLRGESAEALRAIGFDGYAVGGLAVGEGQEVMFQVLDYAPDMLPADKPRYLMGVGKPDDIVGAVKRGIDMMDCVLPSRSGRTGQAFTRRGVVNIKNARHQEDPRPLDEGCSCPACRNYSRAYLHHVFRAQEIISSMLLTWHNLHYYQELMQGMREAIAEGRFAAWESTFHAERARGDIDPL

SEQ ID NO: 61935 - protein, 376 aa, Tropicimonas sediminicola
  misc_feature (1)..(376): tr|A0A239DDZ6|A0A239DDZ6_9RHOB Queuine tRNA-ribosyltran sferase OS=Tropicimonas sediminicola OX=1031541 GN=tgt PE=3 SV=1
MTERFSFSLHATDGRARTGTISTPRGEIRTPAFMPVGTAATVKAMLPESVRATGADVLLGNTYHLMLRPTAERIARLGGLHAFMNWERPILTDSGGFQVMSLAELRKLTEEGVTFRSHIDGSRHMLTPERSMEIQQLLGSDIVMCFDECPALPAEHDRIAESMRLSMRWAQRSRDAFGDRPGHALFGIQQGGDKEDLRGESAEALRAIGFDGYAVGGLAVGEGQEVMFRVLDYAPDMLPEDKPRYLMGVGKPDDIVGAVKRGIDMMDCVLPSRSGRTGQAFTRRGVVNIKNARHQEDPRPLDEHCSCPACRSYSRAYLHHVFRSQEIISSMLLTWHNLHYFQELMQGMRDAIAAGRFADWETDFHAQRAEGDIEAL

SEQ ID NO: 61936 - protein, 376 aa, Tropicimonas sp.
  misc_feature (1)..(376): tr|A0A4Q3Z225|A0A4Q3Z225_9RHOB Queuine tRNA-ribosyltran sferase OS=Tropicimonas sp. IMCC6043 OX=2510645 GN=tgt PE=3 SV=1
MNETVTFELIATDGKARRGTLRTPRGEIRTPAFMPVGTAATVKAMLPESVRETGADVLLGNTYHLMLRPTAERIARLGGLHRFMNWERPILTDSGGFQVMSLAELRKLTEDGVTFRSHVDGSSHRLTPERSMEIQRLLGSDIVMCFDECTPFPAEEAVARDSMRLSMRWAQRSRDAFGDRPGHALFGIQQGSTFLDQRAESAEALTSIGFDGYAIGGLAVGEGQATMFEVLDHAPAMLPEDRPRYLMGVGKPDDIVGAVARGVDMMDCVLPSRSGRTGQAFTPRGVVNIKNARHQDDPRPLDETCGCPACRSYSRAYLHHVFRAREIISSMLLTWHNLHYYQVLMQDMRAAIEAGRFAAWQSEFHSNRALGDIEPL

SEQ ID NO: 61937 - protein, 416 aa, Truepera radiovictrix
  misc_feature (1)..(416): tr|D7CQA0|D7CQA0_TRURR Queuine tRNA-ribosyltransferase OS=Truepera radiovictrix (strain DSM 17093 / CIP 108686 / LMG 22925 / RQ-24) OX=649638 GN=tgt PE=3 SV=1
MTYPDFSFTITQERGAARLGRLVTPHGTIDTPAFVAVGTQAAVKTLTPEEVLATGAQVIFTNTYHLYLRPGHDLVAAFGGVHRFMGWGAPVMTDSGGFQVFSLGAGLEHGVGKVANIFPGEAGGVLAGAPVRTARPLMKVSEDGVRFKSHIDGTLHTFTPETSIAVQRALGADIILAFDECTSPLHDEAYTARSAERTHRWAERSLRFFQDHPAVHPYPQALYGIVQGGAFERVRKASARTVAGMDFHGLAIGGNLGKTKAQMRQVLEWTTPELPREKPRHLLGIGEVEDIFGAVERGCDTFDCVSPTRNARNGGVLARFDGEQPLPRFRLNIRNARYARDPRPLEEGCDCYTCTRFSRAYVRHLFKADEQLGQRLATLHNLRFMARLMAQIRESLAAGTFDALKRSWLEPVGLGV

SEQ ID NO: 61938 - protein, 413 aa, Trueperaceae bacterium
  misc_feature (1)..(413): tr|A0A2E2UM63|A0A2E2UM63_9DEIN Queuine tRNA-ribosyltran sferase OS=Trueperaceae bacterium OX=2026798 GN=tgt PE= 3 SV=1
MDRNPLVFEIDAEHGMARSGYLRTSHGVIETPAFVAVGTQGTVKSLAPETVIATGTQVLFANTYHLYLRPGQRVIADHGGLHRFMNWQGPLMTDSGGFQVFSLGAGIEHGIGKIASIFPGEEDTQTNEEGDSLKDRSMVSIEEEGVRFISHIDGSEHLFTPEGSIIVQRDLGADIILAFDECTSPLHEKDYTRASAERTHRWADRCLEAFEATIPRHGYPQALFGVVQGGAYRDTREYSAKIIGKKGFDGIAIGGNLGRTRQDMYRILEWTIPYLPADLPRHLLGIGDVSSIFEAVERGVDTFDCVSPTRNARNGGVLVRFDKGVKLRNFRLNLRNARFANDLAPLEQGCSCYTCQHFTRAYIRHLFRAKEQLAHQLASIHNLNFMARLMSEIRSSLKEGRFGVLKEEWLTFE

SEQ ID NO: 61939 - protein, 409 aa, Trueperella bernardiae
  misc_feature (1)..(409): tr|A0A0W1KL67|A0A0W1KL67_9ACTO Queuine tRNA-ribosyltran sferase OS=Trueperella bernardiae OX=59561 GN=tgt PE=3 SV=1
MFTLESRLDGTLARTGTIHTPHGDIHTPAFIPVGTKATVKSTLPESVKDLGAQAVLSNAYHLYLQPGSDVVDDAGGLGAFMNWPGPTYTDSGGFQVMSLGSGFKKVLSDEFSGKTVADDAVAPGKERLANVDDDGVWFRSHLNGDRHRFTPEISMRIQHELGADIIFAFDELTTLMNSRPYQEEALERTRLWAQRCLAEHKRLTEEREGKPYQQLFGVIQGAQYEDLRRKAARDLGSMEVDGQRFDGFGIGGALEKENLSTITAWVSEELPEDRARHMLGISEPDDFFACVESGADTFDCVNPSRVARNAAIYSPTGRFNITRAEFKRDFTPLVEGCTCYTCRNYTRAYIHHLFKAKEMLSATLCTIHNEHFTVNLVDQIRASIAAGTYWEYKEETLGRFYGSAGPMAK

SEQ ID NO: 61940 - protein, 405 aa, Trueperella bialowiezensis
  misc_feature (1)..(405): tr|A0A448PEC6|A0A448PEC6_9ACTO Queuine tRNA-ribosyltran sferase OS=Trueperella bialowiezensis OX=312285 GN=tgt PE=3 SV=1
MTFTLGTRLDGQLGRTGTIHTPHGDIHTPAFIPVGTKATVKGVTPEQVGEVGAQAVLANAYHLYLQPGSDVVDAAGGLGAFMNWPGPTYTDSGGFQVMSLGSGFKKVLSEEFSGKRVADDAVAAGKERLANVDDDGVWFRSHLNGDLHRFTPEVSMRIQHELGADIIFAFDELTTLMNSRAYQEEALERTRLWAERCLVAHKQLTEERVDKPYQQLFGVIQGAQYEDLRRKAARDLGAMEVDGQRFDGFGIGGALEKENLATIVGWVCEELPEGRARHMLGISEPDDFFACIENGADTFDCVNPSRVARNAAIYSPDGRFNVTRAEFKRDFSPLVEGCECYTCTHYTKAYMHHLFKAKEILSATLATIHNEYFTVKLVDGIRAAIEDGTYWEFKAEVLGRFYAGK

SEQ ID NO: 61941 - protein, 402 aa, Trueperella pyogenes
  misc_feature (1)..(402): tr|A0A3Q9GIK3|A0A3Q9GIK3_9ACTO Queuine tRNA-ribosyltran sferase OS=Trueperella pyogenes OX=1661 GN=tgt PE=3 SV= 1
MFSLEHRLEGTLARTGTIHTPHGDIRTPAFIPVGTKATVKATLPESVKDVGAQAVLSNAYHLYLQPGSDVVDEAGGLGAFMNWDGPTFTDSGGFQVMSLGSGFKKVLSDEFSGKAMADDAVAPGRERLANVDDDGVWFRSHLNGSKHRFTPEVSMRIQHELGADIIFAFDELTTLMNSRSYQEKALERTRLWAERCLVAHKQLTEEREGKPYQQLFGVIQGAQYEDLRRKAARDLGSMEVEGQRFDGFGIGGALEKKNLSTITAWVSEELPEDKARHMLGISEPDDFFACIESGADTFDCVNPSRVARNAAIYSPTGRFNVTRAEFKRDFSPLVEGCGCYTCRHYTKAYIHHLFKAKEMLSSTLCTIHNEHFTVNLVDQIRASIADGTYWEFKKEMLRRFYG

SEQ ID NO: 61942 - protein, 402 aa, Trueperella pyogenes
  misc_feature (1)..(402): tr|A0A2S0RPU5|A0A2S0RPU5_9ACTO Queuine tRNA-ribosyltran sferase OS=Trueperella pyogenes OX=1661 GN=tgt PE=3 SV= 1
MFSLEHRLEGTLARTGTIHTPHGDIRTPAFIPVGTKATVKATLPESVKDVGAQAVLSNAYHLYLQPGSDVVDEAGGLGAFMNWDGPTFTDSGGFQVMSLGSGFKKVLSDEFSGKAMADDAVAPGRERLANVDDDGVWFRSHLNGSKHRFTPEISMRIQHELGADIIFAFDELTTLMNSRSYQEKALERTRLWAERCLVTHKQLTEEREGKPYQQLFGVIQGAQYEDLRRKAARDLGSMEVDGHRFDGFGIGGALEKENLSRITAWVSEELPEDRARHMLGISEPDDFFACIESGADTFDCVNPSRVARNAAIYSPMGRFNVTRAEFKRDFSPLVEGCECYTCRHYTKAYIHHLFKAKEMLSSTLCTIHNEHFTVNLVDQIRASIADGTYWEFKKEMLGRFYG

SEQ ID NO: 61943 - protein, 1383 aa, Tsukamurella paurometabola
  misc_feature (1)..(1383): tr|A0A3P8K0X0|A0A3P8K0X0_TSUPA Queuine tRNA-ribosyltran sferase OS=Tsukamurella paurometabola OX=2061 GN=tgt_1 PE=3 SV=1
MALFLYRLGRFAYLNRFKVIVAWLLIFAGMLTGGAALKGATVDNFSLPGLPSAKATDIVSENFGDSGGDPFTTASATIVFHAKDGKLTDPAAAAGIDRTIADIKNLTKDQDGQKVSVVQDPELLHNPTGKLDPNALTPEQRSKLEAATAQAKDIASTKTQAQKDADAAATSSVSPDGKTAKITVNFIGKVTDLPDTLSEDITKAREAGEAASNGTLQVEADGSAARGAEDMGMTSEIIGMIVAAIVLIITFASLVAWGLPLLNAIIAVPVAIGGVMIASHFIELGTFPTVLTSMIGLAVTIDYALFIVSRYRHELRRLGATTKEQRAEAAGIAVGTAGTAVIFAGLTVIIALAALAFIGMDFLGQMGVAAAWGVFIAVIVALTLLPALLGLFGSKVFAGRVKGLHPQDTDQGEGRVANGLRWANLVKKVPVVTLVAGVAILGILAIPMKDMKTALPGSGMSEKSTSERQAYDLIADAWGKGANGTLLVAVDGAGAQPNQRLGAYKQIVDQLNSNPAIAPLIANAQLAQLAADNKAATIMVTPKSGPNDDDTKTLVTKLRNMVNGDAGTKARLGVDLGVAGNTAIEMDISEKLGDALWIYLGIVIGLAFLLLLLAFRSILVPLTAVLGFLLSVVATFGVTSAIFTDGALGLIDNTQPLVSFLPIFLIGIVFGLAMDYQVFLVSRMREEFVHTGDATKSVVTGVQYGARVVTAAAIIMISVFASFILNEQVFIKEIGFGLAAAVLLDAFVVRMVIIPSVMTLLGKWAWWLPKWLDKILPNVDIEGEALVAQLGRGDANADTAGFPAPITAEIPVPTEPLVAAGPTDVHARGAARVEPATVNGHVNGVDRPTTAPTAPVPLVPLGKDDEHVTAQAPVYADTEQVAAAAETPATTAPDTGEYPVARPGTPHPDQTVTGPIRARDRTRDEIAQLREQNRAIAAELSALRSDYRSMASRTRLQSEHISDPTRFEIEGRLEGPDGPLGRAGRLLTPHGEMLTPAFIPVGTKATVKTVLPEAVSELGAQAVLANAYHLYLQPGPEIVEQAGGLGAFMNWDGPTFTDSGGFQVMSLGSGFKKVIDMTGGGEELQGDDAIAEGKDRLSRVDDDGVTFLSHLDGTEHRFTPERSMQIQHQLGADVIFAFDELTTLHNTRAYQVESLERTRLWARRCLSEHNWLTAQRHDAISLWGVVQGAQYEDLRRKAARDLRALSEEDRLAGGLGFGGYGIGGALEKANLSTIVRWVNQELEEDKPKHLLGISEPDDIFAAVEQGIDTFDCVSPSRVARNGAIYSLDGRYNVTNSRFKTDFRPLDPETENYTSQYTRAYIHHLFKAKESLAATLCTIHNEQFIVSLVAKIRQSMLDGTYWEFKEEFLGRYYKGTQQHLATSD

SEQ ID NO: 61944 - protein, 1062 aa, Tsukamurella paurometabola
  misc_feature (1)..(1062): tr|D5USC3|D5USC3_TSUPD tRNA-guanine transglycosylase, v arious specificities OS=Tsukamurella paurometabola (str ain ATCC 8368 / DSM 20162 / JCM 10117 / NBRC 16120 / NC TC 13040) OX=521096 GN=Tpau_0550 PE=3 SV=1
MTATTLENQSPEQAAGVPSGPLTHKQILYILAGLMTGMFLAALDQTIVSTAIRTIADDLSGYQLQVWVTTAYLITSTIVTPLYGKLSDIYGRKPFFMFAITVFVLGSLLCSFSTSMYELAAFRAVQGLGAGGLMSLALTIVGDIVPPRERARYQGYFLAVFGTSSVLGPVLGGVFSGADSILGITGWRWVFLVNVPIGVIALLVVYRVLQLPHTRREGVRIDWVGAFMLAVGIVPLLIVAEQGREWGWGSTKSITCYAVGAGGVLAFIIIEKMMGEDAIIPLRIFRNRIFAQGVLISVVVGAAMFGGISLLPQYFQVVRGASPTVAGFMMLPMVLGLMMGSILAGQMISRTGRYRIYPIIGAVLLTVGMWALHYVTADVRLAAVMAGAALIGFGLGNLMQPLTLAMQNILPPQDMGVSTAAATFFRQIGGTLGVAVFLSVLFSEMPKNMQSRLTDAAADPDYTAALQRAAAGHDGQAAQEFANKLAARDSSAVSGIMSDTSALQKLPSTLVHPFKAGFADSMDTVFLAVTVLSAIGLLLVLFWKSVPLRTAPAMETIEEEVVGAVLAGGPVAEPEPAAAADTAPVSPAPVGAHPPGTTGVGTASRAVARQTRAPGPRTVEPVPPDDDRTAPVRVDPALAEIAELRSQNAELAAELAELRTGYRAIAGHTRLRAVGASDPTGFRIEVQGPGAARTGTLSTPHGEIATPAYLPVAARGAVAGITPEMLAALGVQAVTVDLHELYLQPGTAMIEGAGGIGRAMAWAGPVLGDTGITAVAAAKKTRVTDEGIAFRSRLDGGAHRWDPEEAVRVAHRIGVDIAFAMADPVAATAPRAQLEAGVNRSQQWAARALVEHSWQTADRGDRQSLWAVVTGGADAGLRRAAARGLRRLSEQDVQSGGLGFGGYRIDGVRSAAAEALQLRAATEELDRERPRHLATVATPADLFAAIEAGIDLFDGTAAAEAGREGRVFTRDGVLDLTDPQLRADFRPIDPGADRRGPANPADEFTRAYVNHLFAANEGLAVTLCTLHNEHFFATLAADARRALTDGRYPAFTESFLRRFAKV

SEQ ID NO: 61945 - protein, 1398 aa, Tsukamurella pulmonis
  misc_feature (1)..(1398): tr|A0A1H1B2L5|A0A1H1B2L5_9ACTN Queuine tRNA-ribosyltran sferase OS=Tsukamurella pulmonis OX=47312 GN=tgt PE=3 S V=1
MALFLYRLGRFAYLNRFKVIAVWLLIFVGVLGAGVALSKPTVDNFSLPGLPSEKATNIVSENFGDSGGDPFTTASATIVFHAKDGKLTDPAAAAGIDRTIADIKNLTKKVTENGVERDEPLVKDRELLHNPTGKLDPNALTPDQRAQLEAITAQGKDIASTKSPQQKDADAAATSSVSPDGKTAKITVNFVDKVTDLPKSLSEDITKAREAGESASNGTLQIEADGSAARGEPDLGATSEIIGMIVAAIVLIITFASLVAWGLPLINAIIAVPVAIGGVMLATHFIELGTFPTVLTSMIGLAVTIDYALFIVSRYRHELRRLGATTKEQRAEAAGIAVGTAGTAVIFAGLTVIIALAALAFIGMDFLGQMGVAAAWGVFIAVIVALTLLPALLGLFGSKVFAGRVKGLHPPDTDEGEGRVANGLRWAHLIKKVPVVTLIAGVAVLGILAIPIKDMKTALPGSGMSEKSTSERQAYDLIADAWGKGANGTLLVALDGADAQPNQRLAAYAQIVDKLNTSPELSPLVANAQIAQLAPDNKAATVIVTPKSGPNDDDTQSLVTKIRNMANGDAGTESRLGVDLGVAGSTAIEMDVSEKLGFKISAGGVLPLYLAIVVGLAFVLLLVAFRSIMVPITAALGFLLSVLATFGVTSAIFTDGALGLIDNTQPLVAFLPIFMIGIVFGLAMDYQVFLVSRMREEFVHTGDATQSVVTGVQYGARVVTAAAIIMISVFASFILNEQVFIKEIGFGLAVAVLFDAFIVRLVIIPSVMTLLGKWAWWLPKWLDKILPNVDIEGEALVAQLGRGATADTAAIPAQTTAEIPVPTEQLAPVGATDEYARGAARVESAGVNGHSNGVARPSVAPTAPVPLVPLGKDEPATEPVPAATTDENPVVEVNAPAAELPESVVQDTREYPVARPGVPVPDHTTTGPIRERSRGDRTSDEIAQLREQNKAIAAELSALRSDYRSMTSRTRLQSEHISDPTRFDIDGRLEGPDGPLGRAGRLLTPHGEILTPAFIPVGTKATVKTVMPEAVSDLGAQAVLANAYHLYLQPGPEIVEQAGGLGAFMNWDGPTFTDSGGFQVMSLGSGFKKVIDMGGGEELQGDDAIAEGKDRLSRVDDDGVTFRSHLDGTEHRFTPEVSMQIQHQLGADIIFAFDELTTLHNTRAYQVESLERTRLWARRCLSEHNWLTAQRHDAISLWGVVQGAQYEDLRRKAAKDLRALSEEDRLAGGLGFGGYGIGGALEKANLATIVRWVNQELEEDKPKHLLGISEPDDIFAAIEQGIDTFDCVSPSRVARNGAIYSLDGRYNVTNSRFKTDFRPLDPETENFTSQYTRAYIHHLFKAKESLAATLATIHNEQFIVSLVAKIRASMLDGTYWDFKEEFLGRYYKGTQQHLAKSD

SEQ ID NO: 61946 - protein, 433 aa, Tsukamurella sp.
  misc_feature (1)..(433): tr|A0A5C5RYL4|A0A5C5RYL4_9ACTN Queuine tRNA-ribosyltran sferase OS=Tsukamurella sp. HKU72 OX=2592068 GN=tgt PE= 3 SV=1
MASRTRLQSEHISDPTRFEIEGRLDGPDGPLGRAGRLLTPHGEMLTPAFIPVGTKATVKTVLPEAVSDLGAQAVLANAYHLYLQPGPEIVEQAGGLAAFMNWDGPTFTDSGGFQVMSLGSGFKKVIDMTGGEELQGDDAIAEGKDRLSRVDDDGVTFRSHLDGTEHRFTPEVSMQIQHQLGADVIFAFDELTTLHNSRAYQVESLERTRLWARRCLSEHNWLTAQRHDAISLWGVVQGAQYEDLRRKAARDLRALSEEDRLSGGLGFGGYGIGGALEKANLSTIVRWVNQELEEDKPKHLLGISEPDDIFAAVEQGIDTFDCVSPSRVARNGAIYSLDGRYNVTNSRFKTDFRPLDPETENFTSQYTRAYIHHLFKAKESLAATLCTIHNEQFVVSLVAKIRQSMLDGTYWDFKEEFLGRYYKGTQQHLAKSD

SEQ ID NO: 61947 - protein, 433 aa, Tsukamurella sp.
  misc_feature (1)..(433): tr|A0A5C5RQS9|A0A5C5RQS9_9ACTN Queuine tRNA-ribosyltran sferase OS=Tsukamurella sp. HKU70 OX=2591848 GN=tgt PE= 3 SV=1
MASRTRLQSDHISDPTRFEIDGRLEGPDGPLGRAGRLLTPHGEILTPAFIPVGTKATVKTVMPEAVSDLGAQAVLANAYHLYLQPGPEIVEQAGGLGAFMNWDGPTFTDSGGFQVMSLGSGFKKVIDMNGGEELRGDDAIADGKDRLSRVDDDGVTFRSHLDGTEHRFTPEVSMQIQHQLGADIIFAFDELTTLHNTRAYQVESLERTRLWARRCLSEHNWLTAQRHDAISLWGVVQGAQYEDLRRKAARDLRALSEEDRLSGGLGFGGYGIGGALEKANLSTIVRWVNQELEEGKPKHLLGISEPDDIFAAVEQGIDTFDCVSPSRVARNGAIYSLDGRYNVTNSRFKTDFRPLDPETDNYTSQYTRAYIHHLFKAKESLAATLCTIHNEQFIVSLVAKIRQSMIDGTYWDFKEEFLGRYYKGTQQHLAKSD

SEQ ID NO: 61948 - protein, 1390 aa, Tsukamurella tyrosinosolvens
  misc_feature (1)..(1390): tr|A0A1H5C6U4|A0A1H5C6U4_TSUTY Queuine tRNA-ribosyltran sferase OS=Tsukamurella tyrosinosolvens OX=57704 GN=tgt PE=3 SV=1
MALFLYRLGRFAYLNRFKVIVAWLLIFAGMLTGGALLKGATVDNFSLPGLPSAKATDIVSENFGDSGGDPFTTASATIVFHTKDGKLTDPAAAAGIDRTIADLKNLTKDQDGRQVSVVQDPELLHNPTGKLDTDALTPEQRSKLEAVAAQGKDIASTKTQAQKDADAAATSSVSPDGKTAKITVDFVGKVTELPDTLSEDIKKAREAGEAASNGTLQVEADGSAARGAEDMGMTSEIIGMIVAAIVLIITFASLVAWGLPLLNAIIAVPVAIGGVMIASHFIELGTFPTVLTSMIGLAVTIDYALFIVSRYRHELRRLGATTKEQRAEAAGIAVGTAGTAVIFAGLTVIIALAALAFIGMDFLGQMGVAAAWGVFIAVIVALTLLPALLGLFGSKVFAGRVKGLHPQDTDQGEGRVANGLRWANLVKKVPVVTLVAGVAILGILAIPMKDMKTALPGSGMSEKSTSERQAYDLISDAWGKGANGTLLVAVDGAGAQPNQRLGAYKQIVDQLNTNPNIAPLIANAQLAQLAQDNKAATIMVTPKSGPNDDDTKTLVTKLRTMTNGDAGTKARLGVDLGVAGSTAIEMDISEKLGDALWIYLGIVVGLAFLLLLVAFRSILVPLTAVLGFLLSVVATFGVTSAIFTDGALGLIDNTQPLVSFLPIFLIGIVFGLAMDYQVFLVSRMREEFVHTGDATQSVVTGVQYGARVVTAAAIIMISVFASFILNEQVFIKEIGFGLAAAVLLDAFVVRMVLIPSVMMLLGKWAWWLPKWLDKILPNVDIEGEALVAQLGRGDANADTAAIPAPITAEIPVPTEQLVAAGATDVHARGKARVEHAGVNGHTNGTTNGAAHGAELPTAAPTVPVPLPLGKDDEHVTEQAPVYADTEQVATAEADAAEAGAPDTAEYPVARPGVPRPDQTATGPIRPRDRTRDEIAQLREQNKAIAAELSALRSDYRSMASRTRLQSEHISDPTRFEIEGRLEGPDGPLGRAGRLLTPHGEMLTPAFIPVGTKATVKTVLPEAVSELGAQAVLANAYHLYLQPGPEIVEQAGGLGAFMNWDGPTFTDSGGFQVMSLGSGFKKVIDMTGGEELQGDDAIAEGKDRLSRVDDDGVTFLSHLDGTEHRFTPERSMQIQHQLGADVIFAFDELTTLHNTRAYQVESLERTRLWARRCLSEHNWLTAQRHDAISLWGVVQGAQYEDLRRKAARDLRALSEEDRFSGGLGFGGYGIGGALEKANLSTIVRWVNQELEEDKPKHLLGISEPDDIFAAVEQGIDTFDCVSPSRVARNGAIYSLDGRYNVTNSRFKTDFRPLDPDTQNYTSQYTRAYIHHLFKAKEGLAATLCTIHNEQFVVSLVAKIRQSMIDGTYWDFKEEFLGRYYKGTQQHLAKSD

SEQ ID NO: 61949 - protein, 373 aa, Tumebacillus algifaecis
  misc_feature (1)..(373): tr|A0A223CZW6|A0A223CZW6_9BACL Queuine tRNA-ribosyltran sferase OS=Tumebacillus algifaecis OX=1214604 GN=tgt PE =3 SV=1
MTAIRFELLKTEKHTGARRGRLHTPHGVIETPIFMPVGTLATVKTLSPEELKEIGAQIILSNTYHLWLRPGHDIVKEAGGLHKFMNWDRPILTDSGGFQVFSLSDLRKITEEGVQFRNHLSGEKLFLSPEKAIEIENDLGADIIMAFDECPPYPADRQYLKDSLERTTRWAKRCIAAHQRPDEQALFGIIQGGMDKELRRQSAEELLELDFPGYAVGGLSVGEPKEIMNEVLEFTTPLMPKNKPRYLMGVGSPDDLFEGVIRGIDMFDCVLPTRIARNGTCMTSVGKVVVRNATYARDFGPLDPNCDCYTCKNYSRAYIRHLIKCDEVFGIRLTSIHNVHFLVTMMENIRKAIDEDRLLEYKHAFYESYGYNM

SEQ ID NO: 61950 - protein, 373 aa, Tumebacillus avium
  misc_feature (1)..(373): tr|A0A1Y0IW51|A0A1Y0IW51_9BACL Queuine tRNA-ribosyltran sferase OS=Tumebacillus avium OX=1903704 GN=tgt PE=3 SV =1
MAAIRYELLKTEKHTGARRGRLHTPHGVIETPIFMPVGTLATVKTLSPEELKDIGAQIILSNTYHLWLRPGHDIVKEAGGLHKFMNWDRPILTDSGGFQVFSLSDLRKITEEGVQFRNHISGEKLFLTPEKAIEIENDLGADIIMAFDECPPYPADRQYLKDSLERTTRWAKRCIAAHQRPDEQALFGIIQGGMDKELRRQSAEELLELDFPGYAVGGLSVGEPKEIMNEVLEFTTPLMPKDKPRYLMGVGSPDDLFEGVIRGIDMFDCVLPTRIARNGSCMTSVGKVVVRNANYARDFGPLDPNCDCYTCKNYSRAYIRHLIKCDETFGIRLTSIHNVHFLVTMMDNIRKAIDEDRLLEYKHAFYESYGYNM

SEQ ID NO: 61951 - protein, 372 aa, Tumebacillus flagellatus
  misc_feature (1)..(372): tr|A0A074M8D6|A0A074M8D6_9BACL Queuine tRNA-ribosyltran sferase OS=Tumebacillus flagellatus OX=1157490 GN=tgt P E=3 SV=1
MAVRYELLKTEKHTGARRGRLHTPHGVIETPIFMPVGTLATVKTLSPEELKDNGAQIILSNTYHLWLRPGHEIVKEAGGLHKFMNWDRPILTDSGGFQVFSLSDLRKITEEGVQFRNHLSGEKLFLSPEKAIEIENALGADIIMAFDECPPFPADRQYLKNSLERTTRWAKRCKEAHARPHDQALFGIIQGGMDKELRKQSAEELIELDFPGYAVGGLSVGEPKDIMNEVLEFTTPLMPKDKPRYLMGVGSPDDLFEGVERGIDMFDCVLPTRIARNGTCMTSVGKVVIRNATYQRDFGPLDPNCDCYTCKNYSRAYIRHLIKCDEVFGIRLTTIHNVHFLIKLMDDIRKAIEEDRFVELKKSFYESYGYTL

SEQ ID NO: 61952 - protein, 372 aa, Tumebacillus permanentifrigoris
  misc_feature (1)..(372): tr|A0A316D618|A0A316D618_9BACL Queuine tRNA-ribosyltran sferase OS=Tumebacillus permanentifrigoris OX=378543 GN =tgt PE=3 SV=1
MAVRYELIKTDKHTGARRGRLHTPHGTIETPVFMPVGTLATVKTMSPEELKDTGAQIILSNTYHLWLRPGHDIVQEAGGLHKFMNWDRPILTDSGGFQVFSLSDLRKITEEGVTFRNHLSGEKLFLSPEKAIEIENALGADIIMAFDECPPFPADRQYLKESLERTTRWAKRCKAAHAREHDQALFGIIQGGMDKELRRQSAEELLELDFPGYAVGGLSVGEPKDIMNEVLDFTVPLMPTNKPRYLMGVGSPDDLFEGVIRGIDMFDCVLPTRIARNGTCMTSVGKVVVRNATYARDFGPLDPNCDCYTCKNYSRAYIRHLIKCDETFGIRLTSIHNVHFLIKMMGDIREAIEEDRLLELKKSFYESYGYTL

SEQ ID NO: 61953 - protein, 373 aa, Tumebacillus sp.
  misc_feature (1)..(373): tr|A0A4R2QYW6|A0A4R2QYW6_9BACL Queuine tRNA-ribosyltran sferase OS=Tumebacillus sp. BK434 OX=2512169 GN=tgt PE= 3 SV=1
MAAIRFELLKTEKHTGARRGRLHTPHGVIETPIFMPVGTLATVKTLSPEELKQIGAQIILSNTYHLWLRPGHDIVKEAGGLHKFMNWDRPILTDSGGFQVFSLSDLRKITEEGVQFRNHLSGEKLFLSPEKAIEIENDLGADIIMAFDECPPYPADRQYLKDSLERTTRWAKRCIAAHKRPDEQALFGIIQGGMDKELRRQSAEELLELDFPGYAVGGLSVGEPKEIMNEVLEFTTPLMPKNKPRYLMGVGSPDDLFEGVIRGIDMFDCVLPTRIARNGTCMTSVGKVVVRNANYARDYGPLDPNCDCYTCKNYSRAYIRHLIKCDETFGIRLTSIHNVHFLVTMMDNIRKAIDEDRLLEYKHAFYESYGYNM

SEQ ID NO: 61954 - protein, 378 aa, Turicibacter sanguinis
  misc_feature (1)..(378): tr|D4W4J3|D4W4J3_9FIRM Queuine tRNA-ribosyltransferase OS=Turicibacter sanguinis PC909 OX=702450 GN=tgt PE=3 S V=1
MAIKYELIHECKQSGARYGKLHTPHGSFETPVFMPVGTLATVKTLSPEELEKMGAKIILANTYHLWLQPGEKIVEEAGGLHKFENWGGAILTDSGGFQVFSLSKLRQISEEGVTFRDHRNGAPLFMSPEISIGVQNSLGADIIMSFDECPPYPATYDYMKDSVERTIRWAERGKNAHKNPDTQALFGIVQGGEFPELRKYCAEKLVEMDFPGYSVGGVSVGEPKDVARKMISYTTPYLPKDKPRYLMGVGSPDDLIDGAILGIDMFDCVLPTRIARHGTAMTSVGRVVIKNKTYERDFTPLDPNCDCYACKNYTKAYIRHLIKANESFGQRLVSYHNLHFLINLMEQIREAIKNDRLLDFKEEFFEQYGLNKPGSRGF

SEQ ID NO: 61955 - protein, 378 aa, Turicibacter sanguinis; identical to SEQ ID NO: 61954
  misc_feature (1)..(378): tr|A0A173QV48|A0A173QV48_9FIRM Queuine tRNA-ribosyltran sferase OS=Turicibacter sanguinis OX=154288 GN=tgt PE=3 SV=1

SEQ ID NO: 61956 - protein, 378 aa, Turicibacter sp.
  misc_feature (1)..(378): tr|A0A0X8G2I2|A0A0X8G2I2_9FIRM Queuine tRNA-ribosyltran sferase OS=Turicibacter sp. H121 OX=1712675 GN=tgt PE=3 SV=1
MAIKYELIHECKQSGARYGKLHTPHGTFETPVFMPVGTLATVKTLSPEELDQMGAKIILANTYHLWLQPGEKIVEEAGGLHKFENWGGAILTDSGGFQVFSLSKLREITEEGVTFRDHRNGAPLFMSPEISIGVQNSLGADIIMSFDECPPYPATFEYMKNSVDRTIRWAERGKKAHKNPETQALFGIVQGGEFPELRKYCAEKLVEMDFPGYSIGGVSVGEPKDVARKMIEYTVPYLPKDKPRYLMGVGSPDDLIDGAIRGIDMFDCVLPTRIARHGTAMTSVGRVVIKNKVYERDFTPLDPNCDCYTCKNYTRSYIRHLIKANESFGQRLVSYHNLHFLINLMEQIREAIRNDRLLDFREEFFEQYGINLPGSRGF

SEQ ID NO: 61957 - protein, 377 aa, Turicimonas muris
  misc_feature (1)..(377): tr|A0A227KR34|A0A227KR34_9BURK Queuine tRNA-ribosyltran sferase OS=Turicimonas muris OX=1796652 GN=tgt PE=3 SV= 1
MSLTFHLHKTHGKARRGEMHLNHGVVQTPVFMPVGTYGTVKAMSPLELNEIGSQIILGNTFHLWLRPGLEVIEQHGGLHKFMGWEKPILTDSGGFQVFSLGKLRKITEEGVKFASPINGERLFLTPEVSMEIQKVLNSDIAMIFDECTPYEIDGRPATEKEAADSMRLSLRWAERSKNAFVKLQNPNALFGIVQGGMFEKLRDESLEGLMKIGFDGYAIGGLSVGEPKEDMMRILDHMSERMPADKPHYLMGVGTPEDLVEGVKRGIDMFDCVMPTRNARNGWLFTRYGDIKLRNARYKNDLRPLDETCDCYCCRNFSRAYLHHLQKVNEILGARLNTIHNLHFYLNLMQEIRDALDNDTFDEWCEKFAEDRKRGIE

SEQ ID NO: 61958 - protein, 368 aa, Turneriella parva
  misc_feature (1)..(368): tr|I4B6F2|I4B6F2_TURPD Queuine tRNA-ribosyltransferase OS=Turneriella parva (strain ATCC BAA-1111 / DSM 21527 / NCTC 11395 / H) OX=869212 GN=tgt PE=3 SV=1
MKFETLATDGAARAGTLQLRDAKILTPIFMPVGTQATVKAISQDDLEEIGYRLILGNTYHLYLRPGAETLRQAGGIHKFMSWPHAVLTDSGGYQAFSLSKNVKLKDHGVIFRSHLDGSEHIFSPESTISIERDIGADIIMPIDDCAPYPADDKRLKESLARTHRWLAECKKYWLREPRHQHLFGIAQGGVNPLLRADSAKACADLDLPGYAIGGLSVGEPLEYYVPSLAAAIEHLPKEKPRYVMGVGTIPELLNGVALGVDMFDCVLPTRNARNGQVFTSVGKVNLRNLKHAQSDSPIDPECSCKVCKKYSLGYIRHLHKQNEILGLMLSTYHNLYFMHGFMRQMRHAIQAQNFEQFRTHWLRLFAPV

SEQ ID NO: 61959 - protein, 373 aa, Tychonema bourrellyi
  misc_feature (1)..(373): tr|A0A2G4F124|A0A2G4F124_9CYAN Queuine tRNA-ribosyltran sferase OS=Tychonema bourrellyi FEM_GT703 OX=2040638 GN =tgt PE=3 SV=1
MSEKFSFQCQANCSHTKARAGVFTTPHGVLETPKFMPVGTLANVKTLTPAHLKDAGSQMVLANTYHLHLQPGEHIVAGAGGLHKFMAWPGPILTDSGGFQVFSLSQMRTISEEGVTFRSPRDGRMINLTPERSIQIQNELGADVIMAFDECPPYPATRQEVESATDRTYRWLKRCIQAHSRPDQALFGIVQGGVYPDLRSRAANQLIDLDLPGYAIGGVSVGESGDLIAEIVKVTAPLLPPNKPRYLMGIGTYREMAVAVASGVDMFDCVIPTRLARHGTAFVAGGRLSLKNARFREDFAPLDESCPCYTCQNFSRAYLAHLARANEVLGYTLLAIHNVTELIRFTQRMREAIFADRFTEEFGHWLTPAVDRA

SEQ ID NO: 61960 - protein, 377 aa, Tyzzerella nexilis
  misc_feature (1)..(377): tr|B6FR80|B6FR80_9FIRM Queuine tRNA-ribosyltransferase OS=Tyzzerella nexilis DSM 1787 OX=500632 GN=tgt PE=3 SV =1
MYKLLKRDGLAKRGEFHTVHGVIQTPVFMNVGTAAAIKGAVSTEDLQGIKTQVELSNTYHLHVRPGDQVVKKLGGLHKFMVWDKPILTDSGGFQVFSLAGLRKIKEEGVYFNSHIDGKKIFMGPEESMQIQSNLASTIAMAFDECPSSVATREYIQNSVERTTRWLARCKAEMARLNTLPDTINQHQMLFGINQGGIYEDIRIEHAKEIAKMDLDGYAVGGLAVGESHEEMYRILEAVVPYLPIEKPTYLMGVGTPANILEAVDRGVDFFDCVYPSRNGRHGHVYTNQGKLNLFNAKYELDDAPIEEGCQCPACRTYSRAYIRHLLKAKEMLGMRLCVLHNLYFYNNMMEEIRAAIEAGRYKEYKREKLAGMGIQEV

SEQ ID NO: 61961 - protein, 377 aa, Tyzzerella nexilis; identical to SEQ ID NO: 61960
  misc_feature (1)..(377): tr|A0A413J2R3|A0A413J2R3_9FIRM Queuine tRNA-ribosyltran sferase OS=Tyzzerella nexilis OX=29361 GN=tgt PE=3 SV=1

SEQ ID NO: 61962 - protein, 377 aa, Tyzzerella sp.
  misc_feature (1)..(377): tr|A0A1Y4UQC2|A0A1Y4UQC2_9FIRM Queuine tRNA-ribosyltran sferase OS=Tyzzerella sp. An114 OX=1965545 GN=tgt PE=3 SV=1
MYKLLKTCGRAKRGEFHTPHGVIQTPVFMNVGTLAAIKGALSTEDLEKIKCQVELSNTYHLHLRPGDEVVKKLGGLHKFMVWDKPILTDSGGFQVFSLTSLRKITEEGVYFNSHIDGRKIFMGPEESMRIQSNLASTIAMAFDECIGIPAERNYVEQSVARTTRWLARSKAEIDRLNNLDDTINKKQMLFGINQGATYADIRIEHAKVISDMDLDGYAIGGLAVGETHEEMYRILEEVVPYLPQNKPTYLMGVGTPENILEAVERGVDFFDCVLPARNGRHANVYTNKGKLNLMNAKYELDDTPIDETCTCPTCQRYTKAYIRHLFKAKEMLAMRLCVMHNLHFFNTMMEEIRDAIENGTFAEYKKAKLEGFKENGK

SEQ ID NO: 61963 - protein, 377 aa, Tyzzerella sp.
  misc_feature (1)..(377): tr|A0A352UQY7|A0A352UQY7_9FIRM Queuine tRNA-ribosyltran sferase OS=Tyzzerella sp. OX=2053632 GN=tgt PE=3 SV=1
MYKVLKKCGRAKRAEFHTPHGVIQTPVFMNVGTAGAIKGAVSTEDLEQLKCQVELSNTYHLHLRPGDKLIKEMGGLHKFMVWDKPILTDSGGFQVFSLGLLRKIKEEGVYFSSHIDGRKIFMGPEESMQIQSNLGSTIAMAFDECIGLPAERPYVEASVARTTRWLERCKKEMHRLNQLEDTVNPKQMLFGINQGATFEDIRIEHAKRISEMNLDGYAIGGLAVGESHAEMYRILDEVVPYLPEEKPTYLMGVGTPENILEAVERGVDFFDCVLPARNGRHAHVYTNKGKLNLLNAKYEKDDSPIDDTCGCPACRRYSRAYIRHLFKAKEMLAMRLCVMHNLYFFNSMMEEIRQAIEEDRFHAYKAAKLDGFRENGK

SEQ ID NO: 61964 - protein, 369 aa, Uliginosibacterium sp.
  misc_feature (1)..(369): tr|A0A2N4XRG0|A0A2N4XRG0_9RHOO Queuine tRNA-ribosyltran sferase OS=Uliginosibacterium sp. TH139 OX=2067453 GN=t gt PE=3 SV=1
MHFQLLSTSGQARRGRLQLAHGIVETPVFMPVGTYGTVKAMSPHELLEIGAQICLGNTFHLWLRPGMEVFKQFGGLHGFMGWDKPILTDSGGFQVFSLGALRKITEEGVKFSSPINGDKLFLTPEISMQIQHGLNSDIVMIFDECTPYPASVDEAAKSMRMSARWARRSRDEHDKLGNRNALFGIVQGGMYEDLRDESLAGLQQIGFDGYAIGGLSVGEPKEDFYRVLAHTGPRLPADKPHYLMGVGTPEDLVYGVSQGIDMFDCVMPTRNARNGWLFTRWGDLKIRNAKHKQDTRPIDESCECYTCRHFSRAYLHHLDRAQEMLGPRLMTIHNLHYYQHLMREIRAAIEADDYAGFQLRFAAERQRGA

SEQ ID NO: 61965 - protein, 376 aa, Ulvibacter antarcticus
  misc_feature (1)..(376): tr|A0A3L9Y6B7|A0A3L9Y6B7_9FLAO Queuine tRNA-ribosyltran sferase OS=Ulvibacter antarcticus OX=442714 GN=tgt PE=3 SV=1
MKFKLEAKDANSQARAGEITLDHGIIETPIFMPVGTVGTVKGVHQKELKDEINPDIILGNTYHLYLRPQTPILEKAGGIHKFMNWDRNILTDSGGYQVYSLSANRKIKEEGVKFKSHIDGSYHFFTPENVMEIQRKIGADIIMAFDECTPYPCDYNYAKRSMHMTHRWLDRCITHLDKTPLHYDYNQTFFPIVQGSTYKDLRKQSAEYIASVGAAGNAIGGLSVGEPAEEMYEMTAVVTEILPEDKPRYLMGVGTPINILENIALGIDMFDCVMPTRNGRNGMLFTAHGTINIKNKKWEADFSAIDEMDITWVDTAYSKAYVRHLFTVNEMLGRQIATIHNLGFYLWLVREARKHILAGDFNAWKNIMVKQMDKRL

SEQ ID NO: 61966 - protein, 376 aa, Ulvibacter litoralis
  misc_feature (1)..(376): tr|A0A1G7JDC9|A0A1G7JDC9_9FLAO Queuine tRNA-ribosyltran sferase OS=Ulvibacter litoralis OX=227084 GN=tgt PE=3 S V=1
MQFKLEAKDVNSKARAGTMTLDHGTVETPIFMPVGTMGTVKGVHQKELTDEINPDIILGNTYHLYLRPKTQILEKAGGLHKFMNWDRPILTDSGGYQVYSLSSNRKIKEEGVKFKSHIDGSFHVFTPENVMEIQRTIGADIIMAFDECTPYPCDYNYARRSMHMTHRWLDRCINHLDKTPLKYDYNQTFFPIVQGSTYKDLRKQSAEYIASVGAEGNAIGGLSVGEPAEEMYAMTEVVTEILPEDKPRYLMGVGTPINILENIALGIDMFDCVMPTRNGRNGMLFTAHGTMNMKNKKWEDDFSPIDEMGITWVDTAYSKAYLRHLFASNEMLARQIGTIHNLGFYMWLVREARKHILAGDFTSWKNTMVKQMDNRL

SEQ ID NO: 61967 - protein, 376 aa, Ulvibacter sp.
  misc_feature (1)..(376): tr|A0A167ERZ2|A0A167ERZ2_9FLAO Queuine tRNA-ribosyltran sferase OS=Ulvibacter sp. LPB0005 OX=1763537 GN=tgt PE= 3 SV=1
MQFKLEATDAASRARAATITLDHGTIETPIFMPVGTVATVKGVHQKELSEEINPDIILGNTYHLYLRPQTPILEKAGGIHKFMNWDRNILTDSGGYQVYSLSANRKIKEEGVKFKSHIDGSYHFFTPENVMEIQRTIGADIIMAFDECTPYPCDYNYAKRSMHMTHRWLDRCINHLEKTPLKYDYNQTFFPIVQGSTYKDLRKQSAEYIASVGAEGNAIGGLSVGEPAEEMYEMTDVVTSILPKDKPRYLMGVGTPINILENIALGIDMFDCVMPTRNGRNGMLFTAHGSINIKNKKWEDDFSPIDEMGITWVDTAYSKAYVRHLFTVNEMLGRQIGTIHNLGFYLWLVREARKHILAGDFTTWKNKMVKQMDKRL

SEQ ID NO: 61968 - protein, 376 aa, Ulvibacter sp.
  misc_feature (1)..(376): tr|A0A2N0EPE8|A0A2N0EPE8_9FLAO Queuine tRNA-ribosyltran sferase OS=Ulvibacter sp. MAR_2010_11 OX=1250229 GN=tgt PE=3 SV=1
MQFTLEATDTGSQARAGTMILDHGTVETPIFMPVGTVGTVKGVHQRELETEIKPDIILGNTYHLFLRPQIDILEKAGGLHKFMNWKHPILTDSGGYQVYSLSANRKIKEEGVKFKSHIDGSYHVFTPENVMEIQRSIGADIIMAFDECTPYPCEYNYAKRSMHMTHRWLDRCIAHLEKTPYKYDFSQTFFPIVQGSTYKELRKQSAEYIASVGAEGNAIGGLSVGEPAEEMYEMTSVVTEILPKDKPRYLMGVGTPINILENIALGIDMFDCVMPTRNGRNGMLFTAHGTINIKNKKWEADFSALDEMNITWVDTAYSKAYVRHLFTVNEMLGRQIATIHNLGFYMWLVREARKHILAGDFATWKTTMVKQMDKRL

SEQ ID NO: 61969 - protein, 382 aa, Umboniibacter marinipuniceus
  misc_feature (1)..(382): tr|A0A3M0A5P6|A0A3M0A5P6_9GAMM Queuine tRNA-ribosyltran sferase OS=Umboniibacter marinipuniceus OX=569599 GN=tg t PE=3 SV=1
MRKECFMSFELDKTSGRARRGRLKFPRGTVETPIFMPVGTYGTVKGMTPEDLLKIGSQIILGNTFHLWLRPGTEVIKAHGDLHDFAGWDKPILTDSGGFQVFSLGKLRKITEAGVSFQSPINGDKVFLDPEKSMQIQRDLGSDVVMCFDECTPYPATHREAKDSMEMSLRWAQRSKDAHGDNPSALFGIIQGGMYQDLREESVKGLLDIGFDGYAIGGLSVGEPKEDMFRVLDVTEPLMNEDQPRYLMGVGKPGDLVEGVRRGVDMFDCVMPTRNARNGHLFIHEGVVKIRNAKHKLDTSPLDPHCDCYTCQNFSRAYLHHLHRCNEMLGAQLNTIHNLRFYVRLMERIREALDEDRFDQFVVDFYAAQGLDVPELVPPSES

SEQ ID NO: 61970 - protein, 375 aa, Alphaproteobacteria bacterium
  misc_feature (1)..(375): tr|A0A212JUK1|A0A212JUK1_9PROT Queuine tRNA-ribosyltran sferase OS=uncultured Alphaproteobacteria bacterium OX= 91750 GN=tgt PE=3 SV=1
MTEFGFTLLAADGMGRRGRLETAHGSIETPAFMPVGTAATVKAMMPESVAATGAEILLGNTYHLMLRPGAERVGALGGLHRFMGWDKPILTDSGGFQVMSLAKLRKMDEDGVTFRSHVDGSAHRLTPERSMEIQHLLDSDVTMAFDECTPFPAEHDVAAASMRLSMRWAARSKAAFVPREGYGLFGIVQGSVYSDLRAESAARLAEIGFDGYAIGGLAVGEGQAAMFETLDFTTPLLPKTKPRYLMGVGKPMDIVGAVLRGVDMFDCVMPTRSGRTAQAFTHRGTLNLRNARHADDPRPLDECCDCPACSRFSRAYLHHLIRCEEIQGAMLLTWHNLRFYQMLMARLRAAIEAGSLAQTAAAIEAELSRGDVEPI

SEQ ID NO: 61971 - protein, 376 aa, Anaerotruncus sp.
  misc_feature (1)..(376): tr|A0A1C6GN73|A0A1C6GN73_9FIRM Queuine tRNA-ribosyltran sferase OS=uncultured Anaerotruncus sp. OX=905011 GN=tg t PE=3 SV=1
MYTLKKQVGHARRGEFKTVHGTVQTPAFMNVGTVAAIKGGLSSYDLKDIRTQVELCNTYHLHLRPGDKLIHELGGLHKFMGWDRPILTDSGGFQVFSLAKLRKIKEEGVHFSSHIDGRKIFMGPEESMQIQSNLASTIAMAFDECIQLPAEYDYVKQSCDRTYRWLVRCKAEMDRLNQLPDRNNPHQMLFGINQGGTYEDIRIENARLNAQLDLDGHAIGGLAVGEPKEEMYHIISVVDEYLPRDKPRYLMGVGTPGNIIEGVSRGIDLFDCVMPSRNARHGHLFTWEGIRNLNNAKYEKDLLPIDPQCDCPVCSRHSRAYIRHLLRAGETLGQRLTVMHNLYFYNRLLERIREALENDTFEQFRAQYVDVLDTRI

SEQ ID NO: 61972 - protein, 402 aa, Avibacterium sp.
  misc_feature (1)..(402): tr|A0A486XDW4|A0A486XDW4_9PAST Queuine tRNA-ribosyltran sferase OS=uncultured Avibacterium sp. OX=1936169 GN=tg t PE=3 SV=1
MTMKFKLHKTDGTARRGTMTFQRPQGEFEVQTPAFMPVGTYGTVKGMTPEEVRATGAEILLGNTFHLWLRPGQEIMRKHGDLHDFMNWHRPILTDSGGFQVFSLGKLRKITEEGVKFQNPINGERIFLSPEKSMEIQYDLGSDIVMIFDECTPYPATFDYAKKSMEMSLRWAKRSRNRFDELGNQNALFGIVQGGVYEELRKISVEGLVEIGFDGYAVGGLAVGEPKEDMHRILEYVCPQLPADKPRYLMGVGKPEDLVEGVRRGIDMFDCVMPTRNARNGHLFVTDGIVKIRNAKYRDDTSPLDPECDCYTCKNYTKAYLYHLDKCGEILGARLNTIHNLRYYQRLMAQIREAIENDTFEQFVQDFYARIGKPVPPLQSEVQQSAQTANAQSSSPQGEQNA

SEQ ID NO: 61973 - protein, 396 aa, Unknown
  misc_feature (1)..(396): tr|L7VT23|L7VT23_9BACT Queuine tRNA-ribosyltransferase OS=uncultured bacterium A1Q1_fos_1266 OX=1256546 GN=tgt PE=3 SV=1
MLKFELLQTDAPNSHARRGRMTLNHGVVETPVFMPVGTYGTVKGVTPQSLEDMGAQIILGNTFHLWMRPGLDVVKQFGGLHKFELWQKPMLTDSGGFQVWSLGEMRKISEEGVKFSSPVNGDKLFLTPEVSMQIQTILNSDIAMQFDECTPYISVEPKTKGQLTTLTEARSSMELSLRWAKRCKAEFARLENPNALFGIVQGGMHTALRDASLEGLEELDFPGIAVGGLSVGEPKEEMLRVLKHIGPKLPAHKPHYLMGVGTPEDLIAGVENGIDMFDCVMPTRNARNGTLFTRFGDLKIRNARHKADEQPLDATCTCYACAGTSGIPYAQGGRTGFSRAYLHHLDRCGEMLGPMLASIHNLHYYLNMMREVRAALDAGQFSAFVQQFHNDRARGV

SEQ ID NO: 61974 - protein, 391 aa, Unknown
  misc_feature (1)..(391): tr|K2EKU6|K2EKU6_9BACT Queuine tRNA-ribosyltransferase OS=uncultured bacterium OX=77133 GN=tgt PE=3 SV=1
MFELITKFDDRRVGNLHTQNGVIHTPFFMPIATKGAVKNISPEDLRDLGAEIVLGNTYHLWLRPGDELIAKAGGLHRFMNWDGPILTDSGGYQVFSLGARAKEKYGSSGVKLSEKGVKFIDPLNGNRHFMTPEKSIDIQLNLGSDMIMVLDECPPYPCSHEKARKSMELTLRWAKRCFEHFHERMKSFEGSEKGRPLLFCIVQGSVYEDLRKECAKRLIEIGISAKGGPDSGWDGYAIGGVAVGEPRKHLYEILQWVTPLLPEDKPRYLMGLGKPEELVRAVQAGMDMFDCVIPTREGRHGRLFRWKDGVNFQISNYKKDESFYETINISNEKFKEDFTSIDPQCDCYTCRNFTKAYLNHLLRTNEPFFLKLATVHNLNFYLRLMNLLKNS

SEQ ID NO: 61975 - protein, 376 aa, Bacteroides sp.
  misc_feature (1)..(376): tr|A0A1C6KRQ9|A0A1C6KRQ9_9BACE Queuine tRNA-ribosyltran sferase OS=uncultured Bacteroides sp. OX=162156 GN=tgt PE=3 SV=1
MTFDLQYTDSKSNARAGLITTDHGQIETPIFMPVGTVGTVKGVHVTELKEDIKAQIILGNTYHLYLRPGLDVLEKAGGLHKFNGFDRPMLTDSGGFQVFSLSGIRKLREEGAEFRSHIDGSKHIFTPEKVMDIERTIGADIMMAFDECPPGDSDYAYAKKSLGLTHRWLDRCIQRFNETEPKYGYQQSLFPIVQGCVYPDLRKQSAEFIASKGADGNAIGGLAVGEPVDKMYEMIELVNDILPKDKPRYLMGVGTPVNILEGIERGVDMFDCVMPTRNGRNGMLFTKDGIINMRNKKWETDFSPIEADGASAVDTLYSKAYLRHLFHAQELLAMQIASIHNLAFYLWLVGEARKHIIAGDFSTWKPMMVKRVSTRL

SEQ ID NO: 61976 - protein, 376 aa, Bacteroides sp.
  misc_feature (1)..(376): tr|A0A1C5QQS0|A0A1C5QQS0_9BACE Queuine tRNA-ribosyltran sferase OS=uncultured Bacteroides sp. OX=162156 GN=tgt PE=3 SV=1
MKFELQYTDPKSNARAGLITTDHGQIETPIFMPVGTLGTVKGVHLHELKNDIKAQIILGNTYHLYLRPGLDIIEGAGGLHKFNGFDRPMLTDSGGFQVFSLSDIRKLREEGVEFRSHIDGSKHLFTPERVMDIERTIGADIIMAFDECAPGTSDYDYAKKSMELTHRWLDRCCARFNETEPKYGYSQSLFPIVQGCVYPDLRRRSAEYIASKNADGNAIGGLAVGEPTEKMYEMIEVVNEILPTDKPRYLMGVGTPVNILEGIERGVDMFDCVMPTRNGRNGMLFTKDGIMNMRNKKWENDYSPIEADGASYVDTMYSRAYLRHLFHAQELLALQIASIHNLAFYLWLVGEARKHIIAGDFSTWKPMMVKRLSTRL

SEQ ID NO: 61977 - protein, 374 aa, Unknown
  misc_feature (1)..(374): tr|E0XSS9|E0XSS9_9PROT Queuine tRNA-ribosyltransferase OS=uncultured beta proteobacterium HF0130_04F21 OX=7108 19 GN=tgt PE=3 SV=1
MKFSIIAKDQNARTGLMRLSNGEVETPIFMPVGTYGAVKGMTSQILQKLGVQILLGNTFHLWLRPGLDIVENFGGLNKFMNWSKPILTDSGGFQVWSLGNLRKITEEGVYFKSPVNGDKLFLSPEKSMEIQKTLNSDIAMVFDECTDWPVSKKQADLSMKLSSRWAKRCRDSFNGNNNLFGIVQGGMFEDLRFESLSNLIGLNFDGYAIGGLSVGEPKKDMFRILEKIMPAMPSDKPRYLMGVGKPEDLVEAVINGVDMFDCVLPTRNARNGLLYTQFGDLKIRNSRYSSDKSPIDKSCKCPVCNPGDNLDQPYYSRAYLHHLQKINEMLGSILTTSHNLWFYLNLLKQIREAIKAGTLKNWRQNFYDKRSIGV

SEQ ID NO: 61978 - protein, 385 aa, Blautia sp.
  misc_feature (1)..(385): tr|A0A1C6KU00|A0A1C6KU00_9FIRM Queuine tRNA-ribosyltran sferase OS=uncultured Blautia sp. OX=765821 GN=tgt PE=3 SV=1
MAKYTLMKTEGRAKRAQFETVHGTIQTPVFMNVGTVGAIKGAVSTMDLKDIGTQVELSNTYHLHVRTGDKLIKEFGGLHKFMVWDRPILTDSGGFQVFSLAGLRKIKEEGVYFQSHIDGHKIFMGPEESMQIQSNLGSTIAMAFDECPSSVASREYVQASVDRTTRWLERCKAEMARLNGLPDTVNKEQLLFGINQGAIYADIRIAHADTISKLDLDGYAVGGLAVGETHEQMYHILDEVVPHLPQNKPTYLMGVGTPANILEGVARGIDFFDCVYPSRNGRHGHVYTNRGKLNLFNAKYELDPSPIEEGCQCPACQHYSRAYIRHLLKAKEMLGMRLCVLHNLYFYNHLMEEIRDALDQGNFAEYKEMRLAGFEEGKINSRYSK

SEQ ID NO: 61979 - protein, 383 aa, Blautia sp.; identical to SEQ ID NO: 52649
  misc_feature (1)..(383): tr|A0A1C5R8X2|A0A1C5R8X2_9FIRM Queuine tRNA-ribosyltran sferase OS=uncultured Blautia sp. OX=765821 GN=tgt PE=3 SV=1

SEQ ID NO: 61980 - protein, 380 aa, Butyricicoccus sp.
  misc_feature (1)..(380): tr|A0A1C5Y8Q8|A0A1C5Y8Q8_9CLOT Queuine tRNA-ribosyltran sferase OS=uncultured Butyricicoccus sp. OX=1193532 GN= tgt PE=3 SV=1
MKIGTFNLLKTEGYARRGEFCTAHGVVQTPVFQNVGTAGAIKGAVDAFDLKALGCQIELSNTYHLHVRPGDQIVRQMGGLHRFMRWDGPMLTDSGGFQVFSLATLRKIKEEGVTFHSHVDGRRIFMGPEESMRIQSNLGSDIAMAFDECIENPAPREYVKDSIDRTTRWLRRCKAELTRLNSLPDTVNPQQMLFGINQGGTYDDLRIEHMQAIAELDLPGYAIGGLAVGESTEVMYHILDVVLPHAPENKPRYLMGVGTPSNIIEGVARGVDFFDCVMPTRNARHGHLFTHNGILNIMNAKYQTDDRPIEEGCGCPTCQRFSRAYLRHLLKSGEMLSQRLLVMHNLWFYNHLMQEIRDALEQGTFAAFRAEYSEKMSKRI

SEQ ID NO: 61981 - protein, 372 aa, Atribacteria sp.
  misc_feature (1)..(372): tr|G3BMR6|G3BMR6_9BACT Queuine tRNA-ribosyltransferase OS=uncultured Candidatus Atribacteria bacterium OX=2638 65 GN=tgt PE=3 SV=1
MSFKFKIIKEINKANNKARVGIMETAHGVVETPVFMPVGTQATIKGILPKEIKELGFSIILCNAYHLFLRPGHALISKSGGLHKFMGWDKVILSDSGGFQVFSLGKINKINDDGVVFQSYINGTRHFINTEKAMEIQMALGSDIAMVFDQCVPFPSNRYETQLAANRTYQWAKECRKYHNRKDQTLFGIIQGGLFPDIRRENTFKLRDLDFPGYALGGLSVGEPKPLMYEMIETVIPLLPTEKPRYLMGVGAPESILEGVIRGIDMFDCVLPTRNGRNGCLFTHNGKISITNAQYKDDLEPLDQFCHCYTCQNFSRAYLRHLYKAQEMLAPILGTIHNLYFMSQLMKNIRKAILENRLESFKREFYNNYLSQ

SEQ ID NO: 61982 - protein, 377 aa, Atribacteria sp.
  misc_feature (1)..(377): tr|G3BMH1|G3BMH1_9BACT Queuine tRNA-ribosyltransferase OS=uncultured Candidatus Atribacteria bacterium OX=2638 65 GN=tgt PE=3 SV=1
MSIEFKIIKEINTYNQNKARAGILKTEHSVIETPVFMPVGTQATIKGILPKEIDNLGFSIILCNAYHLFLRPGHQLIYKCGGLHHFMGWDKSILTDSGGFQVFSLGKINKINDEGVTFQSYIDGSRHFINPQKAMEIQMALGSDIAMVFDQCVPYPSTKYETQIAADRTYKWAKECQKYHNRESQSLFGIIQGGLFPDIRKENSRKLVDLEFPGYALGGLSVGEPKPLMYEILETIVPLLPEEKPRYLMGVGAPESIIEGVSRGIDMFDCVLPTRNGRNGCLFTHHGKISITNVKYKEDFTPLDRNCHCYTCQNFTRAYLRHLYMAKEMLAPILGTIHNLYFMNQLMKGIREAILENSLESFQKNFYENYLVQEEEL

SEQ ID NO: 61983 - protein, 375 aa, Citrobacter sp.
  misc_feature (1)..(375): tr|A0A212IEW2|A0A212IEW2_9ENTR Queuine tRNA-ribosyltran sferase OS=uncultured Citrobacter sp. OX=200446 GN=tgt PE=3 SV=1
MKFELDTTDGRARRGRLVFDRGVVETPAFMPVGTYGTVKGMTPEEVEATGAQIILGNTFHLWLRPGQEIMKLHGDLHDFMQWKGPILTDSGGFQVFSLGDIRKITEQGVHFRNPINGDPIFLDPEKSMEIQYDLGSDIVMIFDECTPYPADWDYAKRSMEMSLRWAKRSRDRFDSLGNKNALFGIIQGSVYEDLRDISVKGLVDIGFDGYAVGGLAVGEPKEDMHRILEHVCPQIPADKPRYLMGVGKPEDLVEGVRRGIDMFDCVMPTRNARNGHLFVTDGVVKIRNAKHKSDTSPLDVECDCYTCRNYSRAYLHHLDRCNEILGARLNTIHNLRYYQRLMAGLRKAIEEGKLESFVTDFYQRQGRPVPPLNVD

SEQ ID NO: 61984 - protein, 444 aa, Citrobacter sp.
  misc_feature (1)..(444): tr|A0A212ID80|A0A212ID80_9ENTR Queuine tRNA-ribosyltran sferase OS=uncultured Citrobacter sp. OX=200446 GN=tgt PE=3 SV=1
MKFELDTTDGRARRGRLVFDRGVVETPAFMPVGTYGTVKGMTPEEVEATGAQIILGNTFHLWLRPGQEIMKLHGDLHDFMQWKGPILTDSGGFQVFSLGDIRKITEQGVHFRNPINGDPIFLDPEKSMEIQYDLGSDIVMIFDECTPYPADWDYAKRSMEMSLRWAKRSRDRFDSLGNKNALFGIIQGSVYEDLRDISVKGLVDIGFDGYAVGGLAVGEPKEDMHRILEHVCPQIPADKPRYLMGVGKPEDLVEGVRRGIDMFDCVMPTRNARNGHLFVTDGVVKIRNAKHKSDTSPLDVECDCYTCRNYSRAYLHHLDRCNEILGARLNTIHNLRYYQRLMAGLRKAIEEGKLESFVTDFYQRQGNFYFMILRPQQKRTKEHKNLMNSIAKGDEVLTNGGLVGRVTKVAESGYIAIALNDTTEVVIKRDFVAAVLPKGTMKAL

SEQ ID NO: 61985 - protein, 377 aa, Clostridiales bacterium
  misc_feature (1)..(377): tr|A0A212JW65|A0A212JW65_9FIRM Queuine tRNA-ribosyltran sferase OS=uncultured Clostridiales bacterium OX=172733 GN=tgt PE=3 SV=1
MFKVIKTEGHARRGVFSCAHGGEVQTPVFMNVGTQGAIKGGVSAHDLKDIGCQIELSNTYHLHLRPGDDVVRQMGGLHKFMDWDGPILTDSGGFQVFSLSGLRKITEEGVTFASHIDGHRVFMGPEESMRIQSNLGSDIAMAFDECVENPSTHDYVKPSCERTLRWLTRCVAEHKRLNVLADTVNPGQMLFGINQGGIYPDLRVWHMKEIARLDCDGFAIGGLAVGESAETMYEIIEAVEPHMPADKPRYLMGVGTPSNIIESVYRGVDFFDCVMPARNARHGKLYTWEGALNIKNEKYRTDPLPIDPACNCPACRSFSRAYLRHLFAAGEMLAMRLAVMHNLYFYNELMGRIRAALEEGSFEEFRARYSSVLEKKI

SEQ ID NO: 61986 - protein, 385 aa, Clostridium sp.; identical to SEQ ID NO: 61978
  misc_feature (1)..(385): tr|A0A1C6LC65|A0A1C6LC65_9CLOT Queuine tRNA-ribosyltran sferase OS=uncultured Clostridium sp. OX=59620 GN=tgt_2 PE=3 SV=1

SEQ ID NO: 61987 - protein, 379 aa, Clostridium sp.; identical to SEQ ID NO: 53977
  misc_feature (1)..(379): tr|A0A1C6GIH5|A0A1C6GIH5_9CLOT Queuine tRNA-ribosyltran sferase OS=uncultured Clostridium sp. OX=59620 GN=tgt P E=3 SV=1

SEQ ID NO: 61988 - protein, 379 aa, Collinsella sp.
  misc_feature (1)..(379): tr|A0A1C5S303|A0A1C5S303_9ACTN Queuine tRNA-ribosyltran sferase OS=uncultured Collinsella sp. OX=165190 GN=tgt PE=3 SV=1
MDQSLFTYDIIAEDSKTHARAGVLHTPHGDIETPIFMPVGTRATVKGVPWETVKDLGAQIVLSNTYHLAMRPGADLIDEMGGLHSFMNWHGPILTDSGGFQIFSHSDAVKLSDKGVRFIATDYDGSHVFWSPEDNMAIAQKLGSDICMQLDQCIGYPAERRDVQRAMDLSSRWAERCYKAHTRPDQALFGIVQGGMHLDLRIKSLERLEEMGNFPGYGIGGYSVGEDHETMFESLEPLAAEYMPKGKPRYLMGVGNPTTLVRGVACGIDMFDCVLPTRTGRMGTAFSSEGRLNFRNARFAHDGGPVDPQCTCPVCIGGYTRAHIRHMVTVKEMLGGILLSMHNIYYLLDLMRRARQAIIDGTYSEFVNDWMASPAAKDY

SEQ ID NO: 61989 - protein, 377 aa, Coprococcus sp.
  misc_feature (1)..(377): tr|A0A1C5NQ37|A0A1C5NQ37_9FIRM Queuine tRNA-ribosyltran sferase OS=uncultured Coprococcus sp. OX=458253 GN=tgt PE=3 SV=1
MYKIICKDGRAKRATFTTVHGTVETPVFMNVGTAAAIKGAVATTDLKEIGCQIELSNTYHLHVRPGDEVVKKMGGLHKFMYWDRPILTDSGGFQVFSLAGLRKIKEEGVTFNSHVDGRKIFMGPEESMQIQSNLASTIAMAFDECAPAKAERSYVENSVARTYRWLERCKAEMTRLNSLPDTINKEQMLFGINQGAVYEDIRIDHAKRIAELDLPGYAIGGLAVGETAEEMYHILDVTVPYLPENKPVYLMGVGTPINILEAVDRGVDFFDCVYPSRNGRHAHVYTKHGKLNLKNAKYETDDRPIEEGCGCPACQHYSRGYIRHLLKANEMLGMRFCVLHNLYFYNNMMKEIRQAIEEGSYASYKKSMIESLTSNEV

SEQ ID NO: 61990 - protein, 377 aa, Coprococcus sp.
  misc_feature (1)..(377): tr|A0A1C5RP15|A0A1C5RP15_9FIRM Queuine tRNA-ribosyltran sferase OS=uncultured Coprococcus sp. OX=458253 GN=tgt PE=3 SV=1
MYELIKRDGRAKRGRFHTVHGVIETPVFMNVGTIAAIKGAVSTADLEEIGTQVELSNTYHLHVRPGDQVVKKLGGLHKFMAWDKPILTDSGGFQVFSLAGLRKIKEEGVYFNSHIDGRKIFMGPEESMQIQSNLASTIAMAFDECPSSVAERKYMQASVERTTRWLARCKEEMARLNSLDDTINKHQMLFGINQGGVYEDIRIEHAQQIAEMDLDGYAVGGLAVGETHEEMYRILDAVVPCLPVARPTYLMGVGTPANILEAVDRGVDFFDCVYPSRNGRHGHVYTKHGKLNLFNAKFELDERPIEEGCQCPACRRYSRAYIRHLLKAKEMLGMRLCVLHNLYYYNHLMEDIREAIEEGRYARFKKETLAKMEEKED

SEQ ID NO: 61991 - protein, 391 aa, Unknown
  misc_feature (1)..(391): tr|A0A212K0I3|A0A212K0I3_9DELT Queuine tRNA-ribosyltran sferase OS=uncultured delta proteobacterium OX=34034 GN =tgt PE=3 SV=1
MPIQTSSTPPAPTPGSFSVTATDGAARAGLLQTGHGLIPTPIFMPVGTVGSVKALAPDDLYALDARIILGNTYHLYLRPGDDLVARRGGLHAFAAWDRPILTDSGGFQAFSLSDLRKISEEGVLFRSHLDGSKHLFTPEKVVAIQRNLGSDIMMVLDECVPYGTDRAYTATSIKLTTRWALRSREAFPAALTRSGEAYNLLFAITQGGFFPDLRTASVEELAPHDFDGFAIGGLSVGESKGEMYDLLAHTAPLLPVAKPRYLMGVGTPLDIMTGVAAGVDMFDCVLPTRNARNGTLYTSMGKVNIKRKEFAEDDSPLDPACSCYTCRTFSKAYLRHLYTAKELLSFRLNSLHNLTYYLNLVTRAREAIINGAFAALYAEIRELYKEELPAV

SEQ ID NO: 61992 - protein, 377 aa, Desulfobacteraceae bacterium
  misc_feature (1)..(377): tr|A0A484HIN8|A0A484HIN8_9DELT Queuine tRNA-ribosyltran sferase OS=uncultured Desulfobacteraceae bacterium OX=2 18296 GN=tgt PE=3 SV=1
MSVGPFSFKIIAESRDSRARAGAVFTPRGVVKTPAFMPVGTLASVKALSPEDIVETGADIILGNAYHLYLKPGLEIIDLFSGLHDFMGWRRPILTDSGGFQIFSLAKLARITENGATFQSHIDGSAHTLTPEGVIDIQRVLGSDIMMCLDQCVKYPAEKKEAEDALDLTERWAKRCLERWKETREKRGGELFGIVQGGMFPDLRKRAAESMAEMGFAGHALGGLSVGEPADLMLETADLSLPLLPRRKPKYIMGVGTPENLVELTALGADMFDCVMPARNARNGKLFTRRGSMNIKNARYAHDTGPVDPDCGCRTCRQFSRAYLRHLFMSRELLAYRLNTIHNLRYYLDLMKEMRAAIIRDEFEKFRKKFYEDRADG

SEQ ID NO: 61993 - protein, 372 aa, Desulfobacterium sp.
  misc_feature (1)..(372): tr|E1YAT5|E1YAT5_9DELT Queuine tRNA-ribosyltransferase OS=uncultured Desulfobacterium sp. OX=201089 GN=tgt PE= 3 SV=1
MRFNLVAVDSCGARKGEFQTAHGIVHTPAFMPVGTAGFVRSITPRDVAETNSEVVLANTYHLSIGERLATVKRLGGLHRFMGWDKTILTDSGGFQVFSLPGKEISDDGVSFSYEENGERIFFSPERSMEIQRDLGADIVMAFDECVEHTASREYIEKSVDRTTEWAKRCRKVELKEYQFMFGIVQGGIYPDLRQKSAVGITSIPFDGFAIGGVSVGEGFELMKKVVEVTAPFLPEQKPRYLMGVGLPEDLLAAVKGGMDMFDCVIPTRYARQGTLFTRMGKIRILDKTYRKDKFPLDTKCNCYTCRTYPRMVLRYLLFSRDPLAETLLTIHNLTFYQDLMKDIREAIEQNCYDEFYEEWLAVYKKKSAKNNT

SEQ ID NO: 61994 - protein, 268 aa, Desulfobacterium sp.
  misc_feature (1)..(268): tr|E1YFT1|E1YFT1_9DELT Queuine tRNA-ribosyltransferase OS=uncultured Desulfobacterium sp. OX=201089 GN=N47_J04 060 PE=3 SV=1
MTNEGYSFQSHIDGSSHVLTPEKAVQVQMLLNSDIMMCLDQCIEYPAEKKEAQDALELTTQWAKRCKKTWEETGESRNALFGIVQGGMFKDLREKSAKEIVETGFSGYAIGGLSVGEPADIMLEIADYTLEKLPAGKPKYMMGVGTPENLVDLVALGADMFDCVMPTRNARNGQMFTNKGTINICNSRYKYDTAPVEEGCLCYTCSNFSRAYLRHLYMSKEILAYRLNTIHNIYYYTKLMKDMRKAILNDEFEEFKTDFYNKRIKGEG

SEQ ID NO: 61995 - protein, 370 aa, Desulfofustis sp.
  misc_feature (1)..(370): tr|V4IS27|V4IS27_9DELT Queuine tRNA-ribosyltransferase OS=uncultured Desulfofustis sp. PB-SRB1 OX=1385624 GN=t gt PE=3 SV=1
MSTSFAISKRSTECFARRGLLNTAHGDINTPVFMPVGTQATVKAVRVDDLKDAGASIILGNTYHLYVRPGHELIRELGGLHRFMNWDRPILTDSGGYQIFSLSERTTISEEGAKFRSHVDGAALFLGPEEAVTVQEALGSDVIMCLDTCIGFPATRDEVEAATALTTRWAARCKTARTRAENLLFGIVQGGMFGDLRAQSAESLVEIGFDGYAIGGLSVGEPTELMYEMTEASVAHLPTTHPVYLMGVGTPADLIEGIWRGVDMFDCVMPTRNARNGTLFTSFGKVVIKNARYRDDPRPIDEACDCPVCRHYSRAYLRHLFSCRELLGYQLCTIHNLHYYLNLMAGARRAIEEDRYGAFRRDFYSGMAPQ

SEQ ID NO: 61996 - protein, 379 aa, Desulfovibrio sp.
  misc_feature (1)..(379): tr|A0A212L353|A0A212L353_9DELT Queuine tRNA-ribosyltran sferase OS=uncultured Desulfovibrio sp. OX=167968 GN=tg t PE=3 SV=1
MSDSIFTIEHRDGAARAGLLRTAHGVIPTPIFMPVGTVGSVKAIAPDDLAAIGAPVILGNTYHLYLRPGDDLVARRGGLHEFASWPGAILTDSGGFQVFSLSSLRKIREEGVEFRSHLDGSRHLFTPEKVLQIQRNLNSDIMMVLDECVPFGADYDYTEKSLALTTRWAKRARAAYPAGTAHNLLFGITQGGFHKDLRKRSVEELCGIDFDGFAIGGLSVGEPKAQMYDLLYHTAPLLPESKPRYLMGVGTPLDIANGINAGVDMFDCVLPTRNARNGTLYTSQGKINIRRKQFAEDDGPLDPNCNCYTCRTFSRAYLRHLYASQELLSFRLNSLHNLTYFLDLARNARQAIVQGRYTDFLAGIEALYPDEAARAAEGA

SEQ ID NO: 61997 - protein, 395 aa, Desulfovibrio sp.
  misc_feature (1)..(395): tr|A0A212K2V5|A0A212K2V5_9DELT Queuine tRNA-ribosyltran sferase OS=uncultured Desulfovibrio sp. OX=167968 GN=tg t PE=3 SV=1
MLPLLRRAALAATLRGMSQSVFTIEHTDGAARAGVLRTAHGTIPTPIFMPVGTVGSVKALAPDDLAAIGAPIILGNTYHLYLRPGDELVHRRGGLHKFASWPGSILTDSGGFQVFSLSSLRKIREEGVEFRSHLDGSKHLFTPEKVLEIQRNLNSDIMMVLDECVPFGADYAYTEKSLALTTRWAKRAMDAYPPGSAHNLMFGITQGGFYKDLRERSVNELCAMDFDGFAIGGLSVGEPKDKMYDLLYHTAPLLPGEKPRYLMGVGTPLDIATGIHAGVDMFDCVLPTRNARNGTLYTSLGKINIKRREFAEDDGPLDPNCRCYACRNFSRAYLRHLYASQELLSFRLNSLHNLTYFLDLARNARQAIVEGRYMDFLAKITALYPDEAARAAAGS

SEQ ID NO: 61998 - protein, 376 aa, Dorea sp.
  misc_feature (1)..(376): tr|A0A1C5M159|A0A1C5M159_9FIRM Queuine tRNA-ribosyltran sferase OS=uncultured Dorea sp. OX=286138 GN=tgt PE=3 S V=1
MYELLKTDGLAKRGRLHTVHGVIETPVFMNVGTIAAIKGAVSTTDLQEIGTQVELSNTYHLHVRPGDEVVKKLGGLHKFMVWDKPILTDSGGFQVFSLAGLRRIKEEGVYFNSHIDGRKIFMGPEQSMQIQSNLASTIAMAFDECPSSVADRDYMENSVNRTTRWLKRCKAEMDRLNSLPDTINKHQMLFGINQGGVYEDIRVRHAQEISELDLDGYAVGGLAVGESHEEMYRILDAVVPHLPQNKPTYLMGVGTPANILEAVERGVDFFDCVYPSRNGRHGHVYTNHGKMNLFNAKYELDTRPIEEGCNCPVCRTYSRAYVRHLLKAKEMLGMRFCVLHNLYFYNKMMEEIREAIEAGRYKEYKEEKLRRMAEGE

SEQ ID NO: 61999 - protein, 376 aa, Dysgonomonas sp.
  misc_feature (1)..(376): tr|A0A212K2F8|A0A212K2F8_9BACT Queuine tRNA-ribosyltran sferase OS=uncultured Dysgonomonas sp. OX=206096 GN=tgt PE=3 SV=1
MDFKLQYTDGQTKARAGLITTDHGQIETPIFMPVGTQGAVKAVHMTELKNDIEAQIILGNTYHLYLRPGLEILKQAGGLHKFNSWDKPILTDSGGFQVFSLAENRKLTEEGAIFRSHIDGSKHFFTPESVMDIQRVIGADIIMAFDECTPGDADYAYAKKSLDLTERWLDRCFTQFNGTECEYGYKQALFPIVQGCVYPDLRRRAAENVASKGADGNAIGGLAVGEPTEKMYEMIEVVNEILPADKPRYLMGVGTPANILEAIERGVDMFDCIMPTRNGRNGQLFTRNGIMNMRNKKWADDFSPIEENGASFVDTLYTKAYLRHLFITNEILGLQIASIHNLAFYLQLVKEAREHIIAGDFSGWKKEMVENVSRRI

SEQ ID NO: 62000 - protein, 376 aa, Dysgonomonas sp.
  misc_feature (1)..(376): tr|A0A212J1H8|A0A212J1H8_9BACT Queuine tRNA-ribosyltran sferase OS=uncultured Dysgonomonas sp. OX=206096 GN=tgt PE=3 SV=1
MDFELQYTDDQSSARTGLITTDHGQIETPIFMPVGTQGAVKAVHMTELENDIQAQIILGNTYHLYLRPGLDILQQAGGLHKFNSWNKPILTDSGGFQVFSLAHNRKLTEEGAIFRSHIDGSKHVFTPEYVMDIERTIGADIMMAFDECTPGDADYTYAKKSLDLTERWLDRCIKRFNETECEYGYKQALFPIVQGCVYPDLRRRAAENVASKGADGNAIGGLAVGEPTEKMYEMIEVVNEILPKDKPRYLMGVGTPANILEAIERGVDMFDCIMPTRNGRNGQLFTRNGIMNMRNQKWAKDFSAIEENGASFVDTLYTKAYLRHLFITNEILALQIASIHNLAFYLWLVKEARQHIIAGDFLSWKRMMIENVSRRL

SEQ ID NO: 62001 - protein, 380 aa, Eubacterium sp.
  misc_feature (1)..(380): tr|A0A1C5VNA6|A0A1C5VNA6_9FIRM Queuine tRNA-ribosyltran sferase OS=uncultured Eubacterium sp. OX=165185 GN=tgt PE=3 SV=1
MYKLLTKDGMAKRGEFETVHGTIQTPVFMNVGTVGAIKGAVSTDDLRTIGTQVELSNTYHLHVRTGDKLIKQFGGLHKFMGWDKPILTDSGGFQVFSLSGLRKIKEEGVYFQSHIDGHHIFMGPEESMQIQSNLGSTIAMAFDECPSSRADRTYIQNSVDRTTRWLERCKKKMQELNSLPDTVNPHQMLFGINQGGVFADIRIEHAKRISELDLDGYAVGGLAVGETHDEMYYILDEVVPYLPENKPTYLMGVGTPANIIEAVDRGIDFFDCVYPSRNGRHGHVYTHHVKLNLFNKKFELDPRPIEEGCQCPACRTYSRAYIRHLLKAKEMLGMRLCVLHNLYFYNHLMEEIRGAIDEHRYKEFKKTTLEGFLTPEEEYR

SEQ ID NO: 62002 - protein, 382 aa, Eubacterium sp.
  misc_feature (1)..(382): tr|A0A1C6IPS6|A0A1C6IPS6_9FIRM Queuine tRNA-ribosyltran sferase OS=uncultured Eubacterium sp. OX=165185 GN=tgt PE=3 SV=1
MSKNYKLINMDGKAKRGEFTTVHGVIQTPVFMNVGTAAAIKGAVSTMDLQQIKTQVELSNTYHLHVRPGDDVVKKMGGLHKFMVWDKPILTDSGGFQVFSLAGLRKIKEEGVYFNSHVDGRKIFMGPEQSMQIQSNLASTIAMAFDECAPSTADEKYIRNSVERTTRWLKRCKEEMKRLNSLDDTINKHQMLFGINQGGVFENIRKEHADIISELDLDGYAVGGLAVGETHEEMYRILDEVVPHLPTDKPTYLMGVGTPANILEAVDRGIDFFDCVYPSRNGRHGHVYTNRGKINLFNAKYELDSKPIEEGCDCPACRTYSRAYIRHLLKAKEMLGMRLCVLHNLYFYNTMMEEIRDAIENNRYKEYKKQKLEGFLENDNNK

SEQ ID NO: 62003 - protein, 381 aa, Faecalibacterium sp.
  misc_feature (1)..(381): tr|A0A1C5LZB4|A0A1C5LZB4_9FIRM Queuine tRNA-ribosyltran sferase OS=uncultured Faecalibacterium sp. OX=259315 GN =tgt PE=3 SV=1
MPSLTTYKLLKQEHDARRGEFKTVHGTVQTPAFQNVATAGAIKGGLSAQDLKDIGAQVMLCNTYHLHLRPGDKLVADMGGLHKFTRWNGPILTDSGGFQVFSLAKLRKITEEGVTFASHLDGHRIFMGPEESMQIQANLGSTIAMAFDECVENPAQHDYSKASCERTTRWLKRCKIEMARLKHEGISVNPDQLLFGINQGCTFADLRVEHMKQIADLDLDGYAIGGLAVGEPTEVMYEMISQVEPHMPKDKIRYLMGVGTPGNIIEAVARGVDLFDCVMPSRNARHGHLNTWDGIINIKNAKYERDERPIDPACGCPVCRSYSRAYIRHLFKAEEILGMRLAVMHNLWFYNHLMERIRDELDAGTFTAFHDKYVKLLDTRI

SEQ ID NO: 62004 - protein, 381 aa, Faecalibacterium sp.
  misc_feature (1)..(381): tr|A0A1C5MPK4|A0A1C5MPK4_9FIRM Queuine tRNA-ribosyltran sferase OS=uncultured Faecalibacterium sp. OX=259315 GN =tgt PE=3 SV=1
MPSLTTFKLLKQEHNARRGEFKTVHGTVQTPAFQNVATAGAIKGGLSAQDLQQIGTQVMLCNTYHLHLRPGDQLVADMGGLHKFTRWNGPILTDSGGFQVFSLSKLRKITEEGVTFASHLDGHRIFMGPEESMQIQANLGSTIAMAFDECVENPAQHAYSKASCERTTRWLKRCKAEMARLKQEGKATNPDQLLFGINQGCTFADLRVEHMKQIAELELDGYAIGGLAVGEPAEVMYEMISEVEPYMPKDKIRYLMGVGTPGNMIEAVSRGVDLFDCVMPSRNARHGHLNTWGGIINIKNAKYERDERPIDPTCGCPACRNYSRAYIRHLFKAEELLGMRLAVMHNLWFYNHLMERIRDELDAGTFTAFHDRYVKLLDTRI

SEQ ID NO: 62005 - protein, 384 aa, Flavobacteriaceae bacterium
  misc_feature (1)..(384): tr|Q2YZE6|Q2YZE6_9FLAO Queuine tRNA-ribosyltransferase OS=uncultured Flavobacteriaceae bacterium OX=165436 GN= tgt PE=3 SV=1
MPTDDIMNMQFELKGKDPQSKARAGVITTAHGVIETPIFMPVGTVASVKGVHQRELKNDINPDIILGNTYHLYLRPQTDILEKAGGLHKFMNWDRNILTDSGGYQVYSLSANRKIKEEGVKFKSHIDGSYHIFTPENVMEIQRSIGADIIMAFDECTPYPCEYNYAKRSMHMTHRWLDRCINHLEKTPLKYNYNQAFFPIVQGSTYKDLRMQSAEYIANAGAVGNAIGGLSVGEPAEEMYAMTEIVCNILPEDKPRYLMGVGTPINILENIALGIDMFDCVMPTRNARNGMLFTAHGTMNIKNLKWKDDFSPVDEMGITYVDTDYTKAYLRHLFSVNELLGMQIATIHNLGFYLWLVREARKHILAGDFKIWKNQMVNQMNKRL

SEQ ID NO: 62006 - protein, 354 aa, Flavobacteriia bacterium
  misc_feature (1)..(354): tr|F4MLV6|F4MLV6_9BACT Queuine tRNA-ribosyltransferase OS=uncultured Flavobacteriia bacterium OX=212695 GN=tgt PE=3 SV=1
MVKYKTPIFMPVGTAGAVKSIYTEDLTIDTHAQIILSNTYHLYLRPGTDIIEKAGGIHKFITWNKPMLTDSGGFQVHSLQHIRKITEEGVQFQSHIDGSRHMFTPESVMDIQRKIGADIVMAFDECTNYPCEKTYAREAMLRTHRWLDRCIEYWDSSEGIYDYRQALFPIVQGSTYSDLRKQSAEYVASKEAFGNAIGGLSVGEPAEEMYAMTEKVCSILPTDRPRYLMGVGTPVNILENIALGVDMFDCVMPTRNARNGQIFTSEGIINIKNAKWADDLSPIDSNGDSCVDNRFSKAYLRHLFVSNEALGKQIASLHNLRFYLWLVEEARKHIIHGDFISWKNSMIPKLQSRL

SEQ ID NO: 62007 - protein, 376 aa, Flavobacteriia bacterium
  misc_feature (1)..(376): tr|H6RHN6|H6RHN6_9BACT Queuine tRNA-ribosyltransferase OS=uncultured Flavobacteriia bacterium OX=212695 GN=tgt PE=3 SV=1
MKFNLSHRDPQSKARAATLETDHGIIETPIFMPVGTVASVKGVHQRELKEEIKPDIILGNTYHLYLRPKTDILMKAGGLHKFMGWDKNILTDSGGYQVYSLSSNRKIKEEGVKFKSHIDGSYHFFTPENVMEIQRNIGADIIMAFDECTPYPCDYSYAKRSMHMTHRWLDRCMTHLEKTPYTYDYEQTFFPIVQGSTYKDLRRQSAEFIASVGAQGNAIGGLSVGEPADEMYAMTEVVCEVLPEDKPRYLMGVGTPINILENIALGIDMFDCVMPTRNARNGMLFTAHGTINIKNKKWEADFSAVDEMGHTFVDTEYSKAYLRHLFAANEYLGKQIATIHNLGFYMWLVRTAREKIIAGEFAAWKAMMVVQMDKRL

SEQ ID NO: 62008 - protein, 381 aa, Flavonifractor sp.
  misc_feature (1)..(381): tr|A0A1C5Y7F7|A0A1C5Y7F7_9FIRM Queuine tRNA-ribosyltran sferase OS=uncultured Flavonifractor sp. OX=1193534 GN= tgt PE=3 SV=1
MFQLLKTEVKARRGVFTCPHGTVQTPVFMNVGTCGAIKGAVSAHDLKEIGCQIELSNTYHLHLRPGDDVVRQMGGLHKFMDWDGPMLTDSGGFQVFSLSGLRKITEEGVTFASHIDGKRIFMGPEESMRIQSNLGSDIAMAFDECVENPAPYDYVKASCERTARWLDRCAVEHRKLNEAPGCVNPGQMLFGINQGGTYADLRKWHMDEIAKLDCDGYAIGGLAVGEPTQTMYDIIEAVEPHMPKEKPRYLMGVGTPSNIIEGVARGVDFFDCVMPARNARHGKLYTWEGTINIKNEKYKLDSRPIDPTCNCPVCRSFSRAYLRHLLTAGEMLAMRLAVLHNLHFYNELMLRIREALDQGRFEAFRQKFSGKLDRPAADPGI

SEQ ID NO: 62009 - protein, 379 aa, Flavonifractor sp.
  misc_feature (1)..(379): tr|A0A1C6DR81|A0A1C6DR81_9FIRM Queuine tRNA-ribosyltran sferase OS=uncultured Flavonifractor sp. OX=1193534 GN= tgt PE=3 SV=1
MFEVVKTEGRARRGVFTCAHGTVQTPVFMNVGTQGAIKGAVSAHDLKEIGCQVELSNTYHLHLRPGDGVVKEMGGLHKFMDWSGPILTDSGGFQVFSLSGLRKITEEGVTFASHIDGRRVFMGPEESMRIQSNLGSDIAMAFDECVANPSTREYVKPSCERTLRWLARCKEEHDRLNSLSDTVNPHQMLFGINQGGIYPDLRVWHMKETAKIDCDGYAIGGLAVGEPTQTMYDIIDAVEPHMPKDKPRYLMGVGTPSNIIEAVARGVDFFDCVMPARNARHGKLYTWEGTLNIKNEKYKTDPTPIDPTCTCPACSSFSRAYLRHLFAAGEMLAMRLAVLHNLHFYNELMVRIRAALDEGTFEEFRRTYSGKLDAPIGNS

SEQ ID NO: 62010 - protein, 367 aa, Gammaproteobacteria bacterium
  misc_feature (1)..(367): tr|A0A5E5PPE2|A0A5E5PPE2_9GAMM Queuine tRNA-ribosyltran sferase OS=uncultured Gammaproteobacteria bacterium OX= 86473 GN=tgt PE=3 SV=1
MKFKLKNTNDKARRGTMIFARGTVETPAFMPVGTYGTVKAMTPEEVEGIGAQIILGNTFHLSITPGTDVIKAHGDLHDFMHWQGPILTDSGGFQVFSLGDMRKISEAGVDFRSPKDGAKIFMGPEESIKIQSDLGSDIVMIFDECTPYPADKVTAEQSMQLSLRWAQRSKDAHQALGNENALFGIVQGGMYEDLRQQSAKKLIEIDFDGYAIGGLSVGEPKEEMIKVLDFLPEQLPDDKPRYLMGVGTPSDLVEAVERGIDMFDCVMPTRNARNGYLFTSSGIVKIRNAQYKLDTKPLDKRCGCYTCQNYSRSYLHHLQRKNEILGARLNTIHNLYYYQDLMKGMREAIEKGVFAEFKQLFYKMQNE

SEQ ID NO: 62011 - protein, 367 aa, Gammaproteobacteria bacterium
  misc_feature (1)..(367): tr|A0A5E5QFK7|A0A5E5QFK7_9GAMM Queuine tRNA-ribosyltran sferase OS=uncultured Gammaproteobacteria bacterium OX= 86473 GN=tgt PE=3 SV=1
MKFKLKNTNNKARRGTMIFARGMVETPAFMPVGTYGTVKAMTPEEVKGIGAQIILGNTFHLSITPGTEVIKAHGDLHDFMHWQGPILTDSGGFQVFSLGDMRKISEAGVDFRSPKDGAKIFMGPEESIKIQSDLGADIVMIFDECTPYPADKVTAEQSMQLSLRWAQRSKDTHQALGNENALFGIVQGGMYEDLRQQSAKKLIEIEFDGYAIGGLSVGEPKEAMIKVLDFLPEQLPKDKPRYLMGVGTPSDLVEAVERGIDMFDCVMPTRNARNGYLFTSSGIVKIRNAQYKLDTKPLDERCACYTCQHYSRSYLHHLQRKNEILGARLNTIHNLYYYQDLMAGMREAIEQGVFAEFKQWFYKMQNA

SEQ ID NO: 62012 - protein, 379 aa, Lachnospira sp.
  misc_feature (1)..(379): tr|A0A1C6EYY1|A0A1C6EYY1_9FIRM Queuine tRNA-ribosyltran sferase OS=uncultured Lachnospira sp. OX=446043 GN=tgt PE=3 SV=1
MEYEILKTEGRAKRARVSTVHGEIQTPVFMNVGTVAAIKGAVSTMDLKEIHTQVELSNTYHLHVRTGDKLIKQFGGLHKFMNWDRPILTDSGGFQVFSLAGMRKIKEEGVYFQSHIDGHRIFMGPEESMQIQSNLGSTIAMAFDECPSSVADRSYIKNSVERTTRWLARCKTEMARLNSLEDTINPHQLLFGINQGGVYEDIRIEHAKRISEMDLDGYAVGGLAVGESHEEMYRILDAVVPYLPKNKPTYLMGVGTPANILEGVDRGIDFFDCVYPSRNGRHGHVYTKHGKLNLFNARYELDSRPIEEGCQCPACRAYSRAYIRHLLKAKEMLGMRLCVLHNLYFYNNLMTEIRESIDNGCFAEYKKNMLESMAAGPQD

SEQ ID NO: 62013 - protein, 341 aa, Unknown
  misc_feature (1)..(341): tr|Q6SI06|Q6SI06_9BACT Queuine tRNA-ribosyltransferase OS=uncultured marine bacterium 106 OX=257383 GN=tgt PE= 3 SV=1
MPVGTLGTVKALTPEEVRELGAEIILGNTYHLHLRPGDELVRKLGGLHHFMNWDGPILTDSGGFQIFSLAKLLKLDQSGVVIRSHIDGSKITLTPEISIAIQQNLGSTIMMCLDQCLELPATRQEIERSIALTTKWAQRSKDASSQGSGVSGEQALFGIVQGGGELNLREQSLEQMVNIGFDGYAIGGLSVGETKEEMYSVVHHIAAKMPAQKPRYLMGVGDPEDLLEGIEAGIDMFDCVMPTRNARNGSLFTSHGKISIKKNQYKEDPAPLDPDCACSTCKNYSRAYLRHLFKTNEILGMRLNTYHNLFFYIYLIKQARNAIKEKRFPNFKKTFLQKYRS

SEQ ID NO: 62014 - protein, 372 aa, Unknown
  misc_feature (1)..(372): tr|A4GHV1|A4GHV1_9BACT Queuine tRNA-ribosyltransferase OS=uncultured marine bacterium EB0_39H12 OX=415437 GN=t gt PE=3 SV=1
MYSLLKKEGSARRGEVKTLHGTFQTPAFMPVGTYGAVKSLTPENLNQINAEIILSNTYHLMERPGVEIIKSHGGLHEFMGWDKPILTDSGGYQVFSLAKKRKISEEGVEFVSPLNGNKIFLDPETCMELQTGYGVDIAMVLDECTPYPVEKPIAENSMNLSLRWAQRSREAFKSDKSSLFGIIQGGIYEDLREQSLESLKTMGFEGYAIGGLSVGEPKEHLRNIVSHVAPLMPEDKPRYLMGVGTPLDIVKAVESGVDMFDCVIPTRHARNGYLYTSEGVVKIRNSVHKDSLESLDRNCNCYTCKNFSRSYLHHLDKTKEMLGSTLQTIHNLSFYLNLMRNLRVSIERGTLHPFIEEFEQTWNKFESPNINN

SEQ ID NO: 62015 - protein, 368 aa, Megasphaera sp.
  misc_feature (1)..(368): tr|A0A1C5L810|A0A1C5L810_9FIRM Queuine tRNA-ribosyltran sferase OS=uncultured Megasphaera sp. OX=165188 GN=tgt PE=3 SV=1
MVITYELQAECDGARAGILRTPHGTFKTPMFMPVGTQATVKTLSPEELYDMGAQVILSNTYHLFLRPGEDLVKEAGGLHKFMNWKQAILTDSGGFQVFSLGQMRKITEEGVTFRSHLDGSKKFLSPEVSMDVQMALNSDIAMAFDECIPYPSDYDYTLHSTERTSRWAKRCLDHHHSDTQGLFGIVQGGMYADLRRKSCEELVDMNFDGYGIGGLSVGESKDIMYDILDHTTPYLPQTKARYLMGVGTPDCLVEGVARGVDMFDCVFPTRVARNGMAMTHTGRLTVRNAKYARDFSPIEEGCGCYTCRNYTRAYIRHLFKAEELLAYRLVSIHNLYSLLQFMRDMRQSILDGTFRQFRQEFWKRYQDA

SEQ ID NO: 62016 - protein, 410 aa, Mycobacterium sp.
  misc_feature (1)..(410): tr|A0A1Y5PAZ2|A0A1Y5PAZ2_9MYCO Queuine tRNA-ribosyltran sferase OS=uncultured Mycobacterium sp. OX=171292 GN=tg t PE=3 SV=1
MPFFTVGAELPGRRGRAGVIHTPHGDIHTPAFIAVGTKATVKAVLPETMRDLGAQAVLANAYHLYLQPGPDIVDEAGGLGAFMNWPGPTFTDSGGFQVLSLGAGFRKVLSMDANRVQADDVIAEGKQRLAHVDDDGVTFTSHLDGSTHRFTPEVSMQIQHTIGADIIFAFDELTTLVNTRGYQEESVDRTQAWAVRCLTEHRRLTAERPERPSQALFGVVQGAQYEDLRRQASRDLASIVDAEGRGFDGYGIGGALEKQNLATIVGWCTDELPDDKPRHLLGISEPDDLFAAVAAGADTFDCVSPSRVARNAAVYSPTGRFNITGARYRRDFTPIDAECDCYTCGHYTRAYLHHLFKAKEILSATLCTIHNERFVIRLVDQIRAAIVTGEFDELRDHVLGQYYGHSTRAQ

SEQ ID NO: 62017 - protein, 364 aa, Unknown
  misc_feature (1)..(364): tr|E7C7P3|E7C7P3_9BACT Queuine tRNA-ribosyltransferase OS=uncultured nuHF1 cluster bacterium HF0770_35I22 OX=7 23586 GN=tgt PE=3 SV=1
MGQARTGVLSTAHGVINTPTFMAVGTAATVKAMTPEAVSETGTQVILGNTYHLMLRPGADRIENFGGLHRFMNWGGPILTDSGGFQTMSLSNLRELDESGVKFRSHIDGSYHELTPEGAINMQKKFGSDISMVLDECTPFPETENGSKKSMLRSMRWAERSKSAFEPREGHGLFGIVHGGMHPQIRVESVEILKNIGFDGYAIGGLSVGEKQETMFNILDYTASILPPDKPRYLMGVGKPSDLVGAVIRGVDMFDCVLPTRSGRTNQAFTHMGELNMRNAKHRDSKSPIDPKCHCYTCDNYTRGYLHHLVMSKEILGLSLLTWHNLQYYQDLMKGLRQAITSGLLSNFATQFYEDQEIGDTVSN

SEQ ID NO: 62018 - protein, 377 aa, Oscillibacter sp.
  misc_feature (1)..(377): tr|A0A1C5NW07|A0A1C5NW07_9FIRM Queuine tRNA-ribosyltran sferase OS=uncultured Oscillibacter sp. OX=876091 GN=tg t PE=3 SV=1
MFKVLKTEGRARRGEFSCAHGGVVQTPVFMNVGTQGAIKGGVSAHDLKEVGCQIELSNTYHLHLRPGDHIVRQMGGLHKFMDWDGPILTDSGGFQVFSLASLRKIREEGVTFASHIDGHRIFMGPEESMQIQSNLGSDIAMAFDECVENPATYEYAKASCERTARWLERCKAEHDRLNALPDTVNPGQMLFGINQGATFADLRVWHMDQIAKIDCDGYAIGGLAVGEPAEVMYEIIDAVEPHMPKDKPRYLMGVGTPSNIIEGVARGVDFFDCVMPSRNGRHGKLFTWEGTVNILNEKYATDPRPISESCGCPACRRFSRAYIRHLFKADEVLALRLAVLHNLYFYNELAARIRRALDEGTFADFRARYSGNLEKRA

SEQ ID NO: 62019 - protein, 377 aa, Oscillibacter sp.; identical to SEQ ID NO: 54838
  misc_feature (1)..(377): tr|A0A1C6I9P6|A0A1C6I9P6_9FIRM Queuine tRNA-ribosyltran sferase OS=uncultured Oscillibacter sp. OX=876091 GN=tg t PE=3 SV=1

SEQ ID NO: 62020 - protein, 288 aa, Unknown
  misc_feature (1)..(288): tr|H5SDM1|H5SDM1_9BACT Queuine tRNA-ribosyltransferase (Fragment) OS=uncultured planctomycete OX=120965 GN=HGM M_F14B06C01 PE=3 SV=1
MSTAGEEIFSVVRTDSQTLARCGILRTAHGIVHTPAFMPVGTQASIKGLLPHLVEGTGTEIILSNTYHLLLRPKPETVAALGGLHRFMGWHKPILTDSGGFQVFSLAQLTRIEERGAVFRSHLDGSLVELTPERAIEVQEMLGSDIAMVLDHVVALPNERSLIEDAMERSLRWAERCQKAHKRKDQWLFGIVQGGLEPDLRLRCVKELIQIGFDGYAIGGLSVGEPPAEMYRILDVVAPSLPAERPRYLMGVGRPIDLLEAIARGVDMFDCVMPTRNGRNAMAFTEAG

SEQ ID NO: 62021 - protein, 413 aa, Pleomorphomonas sp.
  misc_feature (1)..(413): tr|A0A212L914|A0A212L914_9RHIZ Queuine tRNA-ribosyltran sferase OS=uncultured Pleomorphomonas sp. OX=442121 GN= tgt PE=3 SV=1
MGTKRCPLPLVGESWREGWETRRIRKRRPESKAQPMTQPFSFRLLATDGRARRGEILTPHGVVRTPAFMPVGTLGTVKAMFMDDVKATGADVILGNTYHLMLRPGAERVAALGGLHKFSTWDKTILTDSGGFQVMSLAKLRRMDEQGVTFQSHIDGSRHELTPERSIEIQGLLGSDIQMQLDECVRLPAEPKEVERGMRLSLRWAERSRRQFEAMGGPQKGQGLYGIVQGGDVSSLREISARELSAMPFEGYSVGGLAVGEPQAVMLEMIDVVDPILPQGKPRYLMGVGTPDDIIESVARGIDQFDCVMPTRAGRHGLAYTRFGKLNFKNARHMDDPRPIDPTSDCPAARDYSRAYIHHLVRTGESLGAMLLTWVNVAYYQSLMAGIRDSIEAGRFEAFKAETKAAWARGENG

SEQ ID NO: 62022 - protein, 376 aa, Polaribacter sp.
  misc_feature (1)..(376): tr|F4MLD6|F4MLD6_9FLAO Queuine tRNA-ribosyltransferase OS=uncultured Polaribacter sp. OX=174711 GN=tgt PE=3 SV =1
MKFDLKITDPKSKARAGKITTDHGTIETPIFMPVGTVGTVKGVHQTELKDQINPDIILANTYHLFLRPGMDILEKAGGIHKFMNWDRNILTDSGGYQVYSLSGRRKINEEGVKFKSHIDGSMHFFTPENVMETQRTIGADIIMAFDECTPYPCDYNYAKRSMHMTHRWLDRCMNHLEKLPFKYGFEQTFFPIVQGSTYKDLRKQSAEYIANAGAQGNAIGGLSVGEPAEELYGMTEIVCEILPEDKPRYLMGVGTPINILENIALGVDMFDCVMPTRNARNGMLFTAHGSINIKNKKWEDDFSPIDDMGITWVDTMYSKAYLRHLFAAKEMLGKQIASIHNLGFYVWLTREARKHIIAGDFREWKDKMVKQMDKRL

SEQ ID NO: 62023 - protein, 372 aa, Prochlorococcus marinus
  misc_feature (1)..(372): tr|Q1PJ67|Q1PJ67_PROMR Queuine tRNA-ribosyltransferase OS=uncultured Prochlorococcus marinus clone HOT0M-8G12 OX=379396 GN=tgt PE=3 SV=1
MFEFEITSNCSNTFARTGIFHTPNGKVNTPRFMPVGTLATVKGISSKQLTSTGSEMILSNTFHLHLQPGEKLVKESGGIHKFMNWHKPILTDSGGYQVFSLAKLNNISDKGVEFKNPRDGSHVFLSPKKVMQIQMDLGSDVAMAFDHCPPHTANENEIEESLQRTHSWLQKCVDTHQKSNQALFGIVQGGKYPRLREFSAKFTSSFDLPGIAVGGVSVGEGLEEIHSVINYVPRFLPINKPRYLMGIGSLKEISLAVANGFDIFDCVLPTRLGRHGTAFFNDERLNLRNARFKNDFFPIDKNCKCETCKSYSRAYLHHLIRNDEILGLTLISLHNIAHLIRFTNAISTAIKDNCFTIDFAPWKTSSIAHHTW

SEQ ID NO: 62024 - protein, 376 aa, Roseburia sp.
  misc_feature (1)..(376): tr|A0A1C6E9B5|A0A1C6E9B5_9FIRM Queuine tRNA-ribosyltran sferase OS=uncultured Roseburia sp. OX=512314 GN=tgt PE =3 SV=1
MYRIIKKDGLAKRGELQTVHGTVQTPLFMNVGTAAAIKGAVATTDLLKIKTQIELSNTYHLHVRPGDKLIKELGGLHKFMVWDKPILTDSGGFQVFSLAGLRKIKEEGVYFNSHVDGRKIFMGPEESMQIQSNLASTIAMAFDECPSAVADRGYVQNSVDRTFRWLGRCKDEMQRLNGLEDTINKHQMLFGINQGAIYDDIRVDHAKRISELDLDGYALGGLAVGESHEEMYHILDVTVPHLPVDKPTYLMGVGTPANILEAVDRGVDFFDCVYPSRNGRHGHVYTNYGKLNLFNQKYEKDMRPIEEGCQCPACRTYSRAYIRHLLKAKEMLGMRLCVLHNLYFYNTMMEEIREAIEQERYRTYKEEKLYRMSQGK

SEQ ID NO: 62025 - protein, 383 aa, Roseburia sp.
  misc_feature (1)..(383): tr|A0A1C5PMD1|A0A1C5PMD1_9FIRM Queuine tRNA-ribosyltran sferase OS=uncultured Roseburia sp. OX=512314 GN=tgt PE =3 SV=1
MYELLKQDGRAKRGIFHTVHGDIQTPVFMNVGTVAAIKGAVSTEDLEQIKTQVELSNTYHLHVRPGDKLIKELGGLHKFMVWDKPILTDSGGFQVFSLAGLRKIKEEGVYFHSHIDGAKIFMGPEESMQIQSNLASTIAMAFDECAPALADRGYVEASVARTTRWLARCKAEMTRLNGLEDTINKNQMLFGINQGAIYPDIRVDHAKRISELDLDGYAVGGLAVGETHEEMYDILDQTVPYLPLEKPTYLMGVGTPANILEAVDRGVDFFDCVYPTRNGRHGHLYTNQGKINLFNKKYEKDMRPIEEGCQCPTCRRYSRAYVRHLLKAKEMLGMRLCVLHNLYFYNTMMEEIRDAIDAGSYKSYKEEKLYGMNQINREKEAQI

SEQ ID NO: 62026 - protein, 376 aa, Ruminococcus sp.; identical to SEQ ID NO: 60473
  misc_feature (1)..(376): tr|A0A1C6BB29|A0A1C6BB29_9FIRM Queuine tRNA-ribosyltran sferase OS=uncultured Ruminococcus sp. OX=165186 GN=tgt _2 PE=3 SV=1

SEQ ID NO: 62027 - protein, 376 aa, Ruminococcus sp.
  misc_feature (1)..(376): tr|A0A1C6G551|A0A1C6G551_9FIRM Queuine tRNA-ribosyltran sferase OS=uncultured Ruminococcus sp. OX=165186 GN=tgt PE=3 SV=1
MYKLIKRDGNAKRGEFHTVHGVIQTPVFMNVGTAAAIKGAVSTEDLQQIGTQVELSNTYHLHVRPGDQVVKKMGGLHKFMVWDKPILTDSGGFQVFSLAGLRKIKEEGVYFNSHVDGRKIFMGPEQSMQIQSNLASTIAMAFDECPSSVAEREYVQRSVERTTRWLHRCKEEMARLNSLPDTINQHQMLFGINQGAIYEDIRIEHAQQIRELDLDGYAVGGLAVGESHEEMYRILDAVVPELPVDKPTYLMGVGTPANILEAVDRGVDFFDCVYPSRNGRHGHVYTNHGKLNLFNAKYELDPKPIEEGCQCPACRHYSRAYIRHLLKAKEMLGMRLCVLHNLYFYNHLMEEIRDAIEAGNYKAFKKEKLSGFENNA

SEQ ID NO: 62028 - protein, 376 aa, Sphingobacterium sp.
  misc_feature (1)..(376): tr|E0Y0S9|E0Y0S9_9SPHI Queuine tRNA-ribosyltransferase OS=uncultured Sphingobacterium sp. EB080_L08E11 OX=7109 92 GN=tgt PE=3 SV=1
MKFTLEHNDPKSAARAGTIATDHGTIQTPIFMPVGTAGTVKGVHTKDLREDTKAQIILGNTYHLFLRPGTEILKAAGGLHKFNGWDRPILTDSGGYQVYSLANQRKITEEGATFASHIDGTKHLFTPERVMDIQREIGADIIMAFDECPPYPSTYEYAKQSMHMTHRWLDRCFNRINETDPLYGYEQTLFPIIQGSTYEDLRNESAEYIASKNAEGNAIGGLSVGEPAEEMYKHAAGACAILPKDKPRYLMGVGTPANILENISLGIDMFDCVMPTRNGRNGQIFTSEGILNLRNKKWENVHEPLDPNGTSFVDSQYTKAYVRHLIHSKESLGAQIASLHNIRFYLWLVEQAREHIIAGDFASWKNQILPKLEQRL

SEQ ID NO: 62029 - protein, 374 aa, Sphingopyxis sp.
  misc_feature (1)..(374): tr|A0A1Y5PNL5|A0A1Y5PNL5_9SPHN Queuine tRNA-ribosyltran sferase OS=uncultured Sphingopyxis sp. OX=310581 GN=tgt PE=3 SV=1
MADRFAFQISATDGAARTGVIAMQRGAIRTPAFMPVGTAATVKAMRPAEVRATGADIILGNTYHLMLRPTAERMARLGGLHKFMSWDRPILTDSGGYQVMSLSALTKQSEEGVAFKSHLDGSRHMLTPERSMEIQRLLGSDIVMAFDECPPSGVDAKRAAASMERSMRWAARSRAGFDAGGEHASRSALFGIQQGSLDEKLRARSAAALTDIGFDGYAIGGLAVGEGQEAMFGVLDYAPGQLPADKPRYLMGVGKPDDLVGAVARGVDMFDCVLPTRSGRNGQAFTRDGPINIRNAKFAEDQAPLDADCHCPVCTTWSRAYLHHLVRSGEMLGAMLMTQHNLHHYQDLMQDMRDAIAAGTFAAFQRDFDARYRR

SEQ ID NO: 62030 - protein, 380 aa, Unknown
  misc_feature (1)..(380): tr|A0A3P3XTI4|A0A3P3XTI4_9SPIR Queuine tRNA-ribosyltran sferase OS=uncultured spirochete OX=156406 GN=tgt PE=3 SV=1
MSEPIFHEIHRDNSCRARTGILSLPHGDVQTPAFMPVGTNATVKAVEPKDIAEMGFSIILANTYHLFLRPGPEIIAKAGGLHGFSGWKGNFLTDSGGFQVFSLSQFRKILVEGVHFKSHIDGSSHVLTPEKVVDVQVAFNSDIQMALDICAPWGETEKKAYHAAMLTYDWAKRAKSQWLAQRDHGYQGYLFGIVQGNFYRELRKTSAEQIGSLDFPGIAIGGLSIGEPKDAYIEYLEYTATLLPSEKPHYLMGIGTPDYIIEAVRNGIDIFDCVYPTRTARNGLLFTSKGQITIKKAMYREDYLPIDPECTCHVCRTYSRAYLHHLFRNNEILYSMLASQHNLHFMAQFVSDIRHAIEEDKFELFAGNFLHVYEKMSSQD

SEQ ID NO: 62031 - protein, 380 aa, Unknown
  misc_feature (1)..(380): tr|A0A3P3XF55|A0A3P3XF55_9SPIR Queuine tRNA-ribosyltran sferase OS=uncultured spirochete OX=156406 GN=tgt PE=3 SV=1
MANSIFIEKHRDPSCRARTGTLFLPHGEVETPTFMPVGTNATVKAVEPADLDAMGFNIILANTYHLFLRPGPDIIAKAGGLHGFSGWKKNFLTDSGGFQVFSLSQFRKILQEGVHFKSHIDGSSHVLTPEKVVDVQVAFNSDIQMALDICAPWGETEKKAFRAAMLTYDWAKRAKSQWIMHRENGYQGNLFGIVQGNFYEELRKLSAEQISELDLPGIAIGGLSIGEPKEAYIEYLELTSALLPLDKPHYLMGIGTPDYIIEAVRNGIDIFDCVYPTRTARNGLLFTSKGQITIKKAIFKEDFSPIDPECSCHVCKTYSRAYLHHLFRNNEILYSMLASQHNLHFTADFVGKIRRAIEQDRFEAFARAFMSGYSEAAAAE

SEQ ID NO: 62032 - protein, 369 aa, Sporomusa sp.
  misc_feature (1)..(369): tr|A0A212LS19|A0A212LS19_9FIRM Queuine tRNA-ribosyltran sferase OS=uncultured Sporomusa sp. OX=307249 GN=tgt PE =3 SV=1
MAITYELIKRCSKTGARAGRIHTPHGVFDTPIFMPVGTQATVKAMSPDELKAMGAGIILSNTYHLYLRPGHDLVAEAGGLHKFMQWDRAILTDSGGFQVFSLGPLRKITEDGVTFRSHIDGSKHFLSPEKATEVQMALGADIIMAFDECVPYPAEHEYARQSTERTTRWAERCRKAHTRKDQALFGIVQGGMYKDLRTMSARDLVSLDFPGYAIGGLSVGEPKPLMYEMLEHTVPLLPQNKPRYLMGVGTPDCLLEGVMYGIDMFDCVFPTRVARNGTVMTNRGRLVVKNAEFARDFRPIDPDCNCYTCRNFSRAYIRHLLKTEEIFGLRLTTTHNLHFLVNFMKEMRQSILDERFLEFREEFWAYYHK

SEQ ID NO: 62033 - protein, 376 aa, Stenotrophomonas sp.
  misc_feature (1)..(376): tr|A0A1Y5Q7K9|A0A1Y5Q7K9_9GAMM Queuine tRNA-ribosyltran sferase OS=uncultured Stenotrophomonas sp. OX=165438 GN =tgt PE=3 SV=1
MSRLQFTLQTTDGNARRGQLSFPRGTVQTPAFMPVGTYGSVKGVLPEQVRALGAEIILGNTFHLYLRPGLDVIADHGGLHGFCRWNGPILTDSGGFQVFSLAHRRKITEQGVTFASPTDGARVFLGPEESMKIQKVLDSDVVMIFDECTPYPATEPVARKSMELSLRWAQRSRDAHDALGNDAALFGIVQGGVHIDLRSRSAEGLQQIGFDGYAIGGLAVGEPEHERNAMLEHMHPILPADRPRYLMGVGRPEDLVEGVARGVDMFDCVMPTRNARNGHYFTSFGTVRIRNARYERDMDTIEPGCGCHACNSGYTRSYLRHLDRCNEMLAPMLGTLHNLYYYEKLMADMRAAIEAGTFLAFRESFYAARGTVAPAL

SEQ ID NO: 62034 - protein, 162 aa, Unknown
  misc_feature (1)..(162): tr|A0A482ZTL3|A0A482ZTL3_9GAMM tRNA-guanine transglycos ylase OS=uncultured SUP05 cluster bacterium OX=655186 G N=SPONL_694 PE=4 SV=1
MSETKVDDMLIEMIEPKIKEIEQRFSDGEGLTQDDINTLLLKSQYNHINHLDDKLNEVTASVIGLEGKFNILEGGFNTLEGKFELLKTDIESKFDILEGKFELLKTDLESKFELLKTDLEGKFDLLKTDIEVTIQKALNKNMLVLVAAMGFFLTLSKLIDKF

SEQ ID NO: 62035 - protein, 365 aa, Unknown
  misc_feature (1)..(365): tr|D1KB21|D1KB21_9GAMM Queuine tRNA-ribosyltransferase OS=uncultured SUP05 cluster bacterium OX=655186 GN=tgt PE=3 SV=1
MKFNLINTDNKARRGTLIFDRGEVETPAFMPVGTYGTVKAMTPEEVSETGAQIILGNTFHLDITPGTDVIEAHGDLHDFMHWQGPILTDSGGFQVFSLGDMRKISEQGVDFQSPKNGDKIFMGPEESMQIQKKLGSDIVMIFDECTPYPADKVTASQSMQLSLRWAKRSKDEHNRLNNNNALFGIVQGGMHEDLRIESIEALVNIGFDGFAIGGLSVGEPKEEMMKVLDYLPEKMPKDKPRYLMGVGTPSDLVEAVERGIDMFDCVMPTRNARNGYLFTSVGIVKIRNAQYRFDISALDEHCECYTCKNYTKSYLHHLQRKNEILGARLNTIHNLHYYQYLMNQMRVAIEKNTFSEFKKDFYEQQ

SEQ ID NO: 62036 - protein, 366 aa, Thiohalocapsa sp.
  misc_feature (1)..(366): tr|V4JA47|V4JA47_9GAMM Queuine tRNA-ribosyltransferase OS=uncultured Thiohalocapsa sp. PB-PSB1 OX=1385625 GN=t gt PE=3 SV=1
MRFELLATDGAARRARLHFERGIVDTPAFMPVGTYGTVKAMTPEETATTGAQIILGNTFHLMARPGTAVIAAHGDLHDFMRWDGPILTDSGGFQVFSLGDLRKITEPGVHFRSPVDGRPLFMGPEESMTVQRELGSDIVMIFDDCTPYPASWEQAHASMRRSLRWAARCKTAHGDNPSALFGINQGGMYPDLRAESLAGLLEIGFDGYAIGGLSVGEPEAERLEVLDFLADRLPSAFPHYLMGVGTPEDLIAGVQRGIDLFDCVMPTRNARNGHLFTHTGTVRIRNAEHKTSTDSLDPHCNCYTCRNYSRAYLHHLDKCNEILGARLNTIHNLTYYQTLMSGMRDAIAAGALHQFVADFFARRIVS

SEQ ID NO: 62037 - protein, 377 aa, Undibacterium parvum
  misc_feature (1)..(377): tr|A0A3Q9BRL4|A0A3Q9BRL4_9BURK Queuine tRNA-ribosyltran sferase OS=Undibacterium parvum OX=401471 GN=tgt PE=3 S V=1
MLEFTLIKKDKTSAARRGRVRVNHGVIETPIFMPVGTYGSVKAMSPLELKEIDAHIILGNTFHLWLRPGMNVINKFGGLHDFMGWDKPILTDSGGFQVFSLGAMRKITEEGVKFSSPINGERLFLSPEISMQIQRSLNSDIVMQFDECTPYEIDGRAATTEEAGKSMRMSLRWAQRSIDEFNRGENPNALFGIVQGGMFENLRDESLAGLNEMNFHGIAIGGLSVGEPKEDMMRVLQHIGPKLPENKPHYLMGVGTPEDLVAGVTNGIDMFDCVMPTRNARNGWIFTRYGDVKIKNARYKEEKEPLDATCECYTCKNFSRAYLHHLHRTGEILGARLNTIHNLHYYLDLMKKIRQSLDDERFPEFVAEFRADRARGV

SEQ ID NO: 62038 - protein, 377 aa, Undibacterium pigrum
  misc_feature (1)..(377): tr|A0A318JAM1|A0A318JAM1_9BURK Queuine tRNA-ribosyltran sferase OS=Undibacterium pigrum OX=401470 GN=tgt PE=3 S V=1
MLEFTLIKKDKTTAARRGRVKVNHGEIETPIFMPVGTYGSVKAMSPLELKEIDAHIILGNTFHLWLRPGTDVLNKFGGLHGFMGWDKPILTDSGGFQVFSLGAMRKITEEGVKFSSPISGERLFLSPEISMQIQRALNSDIVMQFDECTPYEIDGRPATTEEAGKSMRMSLRWAKRSIDEFNQGENPNALFGIVQGGMFEHLRDESLAGLNELNFHGIAIGGLSVGEPKEDMMRVLAHVGPKLPENKPHYLMGVGTPEDLVAGVANGIDMFDCVMPTRNARNGWIFTRFGDIKIKNARYKEDKEPLDATCECYACKNFSRAYLHHLHRTGEILGARLNTIHNLHYYLDLMKNIRKALDDERFPEFVQQFHADRARGV

SEQ ID NO: 62039 - protein, 377 aa, Undibacterium sp.
  misc_feature (1)..(377): tr|A0A3S0H1Z5|A0A3S0H1Z5_9BURK Queuine tRNA-ribosyltran sferase OS=Undibacterium sp. S11R28 OX=2495591 GN=tgt P E=3 SV=1
MLEFTLIKKDKTSAARRGRVRVNHGVIETPIFMPVGTYGSVKAMSPLELKEIDAHIILGNTFHLWLRPGMNVINKFGGLHDFMGWDKPILTDSGGFQVFSLGAMRKITEEGVKFSSPINGERLFLSPEISMQIQRSLNSDIVMQFDECTPYEIDGRAATNEEAGKSMRMSLRWAQRSIDEFNRGENPNALFGIVQGGMFEHLRDESLAGLNELNFHGIAIGGLSVGEPKEDMMRVLAHIGPKLPENKPHYLMGVGTPEDLIAGVTNGIDMFDCVMPTRNARNGWIFTRYGDVKIKNARYKEDKEPLDATCACYTCKNFSRAYLHHLHRTGEILGARLNTIHNLHYYLDLMKQVRQSLDDERFPEFVAEFRSDRARGV

SEQ ID NO: 62040 - protein, 376 aa, Unknown
  misc_feature (1)..(376): tr|A6ERS0|A6ERS0_9BACT Queuine tRNA-ribosyltransferase OS=unidentified eubacterium SCB49 OX=50743 GN=tgt PE=3 SV=1
MDFKIEGTDINSQARAGTMTLDHGPVETPIFMPVGTVGTVKGVHQSELANEINPDIILGNTYHLYLRPSIDILEKAGGLHKFINWDRNILTDSGGYQVYSLSQNNKIKEEGVKFKSHIDGSYHLFTPENVMEIQRSIGADIIMAFDECTPYPCDYNYAKRSMHMTHRWLERCLTHLDKVPFKYDYSQTFFPIVQGSTYKDLRKQSAEYIAGVGAEGNAIGGLSVGEPAEEMYEMTEVVTAILPKDKPRYLMGVGTPINLLENIALGIDMFDCVMPTRNGRNGMLFTAHGTINIKNKKWEADFSAIDDMAITWVDTAYSKAYVRHLFTVNEMLGRQIATIHNLGFYLWLVREARKHIIAGDFTKWKNMMVKQMDKRL

SEQ ID NO: 62041 - protein, 381 aa, Ureibacillus terrenus
  misc_feature (1)..(381): tr|A0A540V044|A0A540V044_9BACL Queuine tRNA-ribosyltran sferase OS=Ureibacillus terrenus OX=118246 GN=tgt PE=3 SV=1
MTQPAIRYELIKTCKQSGARLGIVHTPHGSFETPAFMPVGTQATVKTMSPEELKEIGAGIILSNTYHLWLRPGNDIVKEAGGLHKFMNWDRPILTDSGGFQVFSLSDLRKIKEEGVYFRNHLNGDKLFLSPEKSIQIQNDLGADIIMAFDECPPYPATYEYMLESVDRTTRWAKRCKEAHQRPEEQGLFGIVQGGEFEDLRKRSAEALVDLDLPGYAVGGLSVGEPKEVMYRVLEFTTPLLPVNKPRYLMGVGSPDALIEGAIRGIDMFDCVLPTRIARNGTLMTSQGRLVIKNAQYARDFGPLDPNCDCYACKNYSRAYVRHLIRSGEIFGLRLTTYHNLYFLLRLMEKVRQAIREDRLLDFRNEFFEQYGFNKPNAKNF

SEQ ID NO: 62042 - protein, 381 aa, Ureibacillus thermophilus
  misc_feature (1)..(381): tr|A0A4P6UVY3|A0A4P6UVY3_9BACL Queuine tRNA-ribosyltran sferase OS=Ureibacillus thermophilus OX=367743 GN=tgt P E=3 SV=1
MTQPAIRYEHIKTCKQSGARLGIVHTPHGSFETPAFMPVGTQATVKTMSPEELKEIGAGIILSNTYHLWLRPGNDIVKEAGGLHKFMSWDRPILTDSGGFQVFSLSDLRKIEEEGVYFRNHLNGDKLFLSPEKSIEIQNDLGADIIMAFDECPPYPATYEYMLRSVDRTTRWAKRCKEAHKRPEEQGLFGIVQGGEFEDLRKRSAEALVELDFPGYAVGGLSVGEPKEVMYRVLEFTTPLLPKDKPRYLMGVGSPDALIEGAIRGIDMFDCVLPTRIARNGTLMTSQGRLVIKNAQYARDFGPLDPNCDCYACRNYSRAYVRHLIRTGEIFGMRLTTYHNLYFLLRLMEKVRQAIREDRLLDFRDEFFEQYGFNKPDAKNF

SEQ ID NO: 62043 - protein, 371 aa, Uruburuella suis
  misc_feature (1)..(371): tr|A0A4V6NQ21|A0A4V6NQ21_9NEIS Queuine tRNA-ribosyltran sferase OS=Uruburuella suis OX=252130 GN=tgt PE=3 SV=1
MLKFTLHKKDGHARRGTLELNHGKIETPVFMPVGTYGSVKAMTPQNLHDINAQIILGNTYHLWLRPGLEVISQFGGLHDFIGWDKPILTDSGGFQVFSLSDMRKLTEEGCTFKSPINGDKLFLSPEISMQIQTVLNSDIAMQLDECTPGEAAHEQARKSLQMSLRWAERSKAEFERLNNPNALFGIVQGAMYEDLREESLKGLEQFDFPGLAIGGLSVGEPKPEMYRMLRTVGPMLPEHKPHYLMGVGTPEDLVYGVAHGVDMFDCVMPTRNARNGWLFTRFGDLKIKNAKHKLDTRPIDESCSCYACQNFSRAYLHHLHRAGEILGAQLNTIHNLHYYQVIMAEMREAIEQGQFENWRAQFHEQRARGTD

SEQ ID NO: 62044 - protein, 381 aa, Vagococcus acidifermentans
  misc_feature (1)..(381): tr|A0A430B398|A0A430B398_9ENTE Queuine tRNA-ribosyltran sferase OS=Vagococcus acidifermentans OX=564710 GN=tgt PE=3 SV=1
MTEPAIRYRLIKKEKHTGARLGEIITPHGTFPTPMFMPVGTLATVKTMSPEELKEMGAGIILSNTYHLWLRPGEDIVQEAGGLHKFMNWNQGILTDSGGFQVWSLSDMRNISEEGVRFKNHLNGSEMFLSPEKAIHIQNALGSDIMMSFDECAPFYESHDYVKKSIERTSRWAERGLKAHQRPEDQGLFGIIQGAGYKDLRKQSAQELVAMDFPGYSIGGLSVGETKEEMNEVLEYVTPFIPDHKPRYLMGVGTADSLIDGAIRGVDMFDCVLPTRIARNGTCMTSKGRLVVKNAQYARDFRPLDEKCDCYTCRNYTRAYIRHLIKADETFGLRLTSYHNLYFLLDVMRQVRQAIMDDNLLEFREAFFEEYGFNKKNAKNF

SEQ ID NO: 62045 - protein, 381 aa, Vagococcus carniphilus
  misc_feature (1)..(381): tr|A0A430B3N3|A0A430B3N3_9ENTE Queuine tRNA-ribosyltran sferase OS=Vagococcus carniphilus OX=218144 GN=tgt PE=3 SV=1
MSEPAIKYRLIKKEKHTGARLGEIITPHGTFPTPMFMPVGTLATVKTMAPEELKDMGAGIILSNTYHLWLRPGEDIVEEAGGLHKFMNWDQGILTDSGGFQVWSLSDMRKIEEEGVHFRNHLNGSKMFLSPEKAIQIQNKLGPDIMMSFDECPPFEQSHDYVKKSIERTSRWAERGLNAHQNADRQGLFGIIQGAGFKDLREQSAKDLVSLDFPGYSIGGLSVGEPKSEMNRVLEFTTPLIPENKPRYLMGVGTADSLIDGVIRGVDMFDCVLPTRIARNGTCMTSQGRLVVKNAQYAKDFRPIDEKCDCYTCRHYSRAYIRHLIKCDETFGIRLTSYHNLYFLLNVMKQVRQAIMDDNLLEFRQTFFEEYGFNEENPKNF

SEQ ID NO: 62046 - protein, 381 aa, Vagococcus elongatus
  misc_feature (1)..(381): tr|A0A430B131|A0A430B131_9ENTE Queuine tRNA-ribosyltran sferase OS=Vagococcus elongatus OX=180344 GN=tgt PE=3 S V=1
MTEPAIRYRLIKKEKHTGARLGEIITPHGTFPTPMFMPVGTLATVKTMAPEELKEMGAGIILSNTYHLWLRPGEDIVAEAGGLHQFMNWDQGILTDSGGFQVWSLADMRNIEEKGVHFKNHLNGSKMFLSPEKAIQIQNQLGADIIMSFDECAPFYESHDYVKKSIERTTRWAERGLKAHANPEKQGLFGIIQGAGYKDLRLQSARDLISLDFPGYSIGGLSVGETKAEMNEALEWLNPVIPENKPRYLMGVGTADSLIDGAIRGVDMFDCVLPTRIARNGTCMTSQGRLVVKNAQYARDFRPLDEKCDCYTCRNYTRAYVRHLIKCDETFGLRLTSYHNLYFLLNVMKQVRQAILDDNLLEFREAFFEEYGFNQENPKNF

SEQ ID NO: 62047 - protein, 381 aa, Vagococcus entomophilus
  misc_feature (1)..(381): tr|A0A430AGM7|A0A430AGM7_9ENTE Queuine tRNA-ribosyltran sferase OS=Vagococcus entomophilus OX=1160095 GN=tgt PE =3 SV=1
MTEPAIRYRLIKKEKHTGARLGEIITPHGTFPTPMFMPVGTLATVKTMAPEELKEMGAGIILSNTYHLWLRPGEDLVSEAGGLHKFMNWDQGILTDSGGFQVWSLSDIRDIKEEGVHFRNHLNGSKMFLSPEKAIDIQNKLGSDIMMSFDECAPFYESHDYVKKSIERTSRWAERGLKAHANPDSQGLFGIIQGAGFKDLREQSAKDLVSMDFPGYSIGGLSVGETKEEMNEMLEYTTPFIPENKPRYLMGVGTPDSLIDGVIRGIDMFDCVLPTRIARNGTCMTSQGRLVVKNAQYARDFRPIDEKCDCYTCRNYSRAYIRHLIKCDETFGIRLTSYHNLYFLLNVMKQVRQAIMDDNLLEFREAFFEEYGFNQKNAKKF

SEQ ID NO: 62048 - protein, 381 aa, Vagococcus fessus
  misc_feature (1)..(381): tr|A0A430A903|A0A430A903_9ENTE Queuine tRNA-ribosyltran sferase OS=Vagococcus fessus OX=120370 GN=tgt PE=3 SV=1
MTEPAIRYRLIKTEKHTGARLGEIITPHGTFPTPMFMPVGTLATVKTMAPEELKEMGAGIILANTYHLWLRPGEDLVEKAGGLHKFMNWDQGILTDSGGFQVWSLSEMRNITEEGVSFKNHLNGSKMFLSPEKAIGIQNKLGPDIMMSFDECAPFYESHDYVKKSIERTSRWAERGLEAHANPDRQGLFGIIQGAGFKDLREQSAKDLISMDFPGYSIGGLSVGETKEEMNRVLDYMNPIIPQDKPRYLMGVGTADSLIDGVINGVDMFDCVLPTRIARNGTCMTSQGRLVIKNAKYAEDFRPIDEKCDCYACRNYTRAYIRHLIKCNETFGIRLTSYHNLYFLQTVMKDIRQAIMDDNLLEYREAFFEEYGFNKENAKNF

SEQ ID NO: 62049 - protein, 381 aa, Vagococcus fluvialis
  misc_feature (1)..(381): tr|A0A369B2T9|A0A369B2T9_9ENTE Queuine tRNA-ribosyltran sferase OS=Vagococcus fluvialis OX=2738 GN=tgt PE=3 SV= 1
MSEPAIKYRLIKKEKHTGARLGEIITPHGTFPTPMFMPVGTLATVKTMAPEELKEMGAGIILSNTYHLWLRPGEDIVEEAGGLHKFMNWDQGILTDSGGFQVWSLSDMRRIEEEGVHFRNHLNGSKMFLSPEKAIQIQNKLGPDIMMSFDECPPFEQSHDYVKKSIERTSRWAERGLEAHANKDRQGLFGIIQGAGYKDLREQSARDLVSLDFPGYSIGGLSVGETKQEMNKVLEYTTPLIPENKPRYLMGVGTADSLIDGVIRGVDMFDCVLPTRIARNGTCMTSQGRLVVKNAKYARDYRPIDEKCNCYTCRNYSRAYIRHLIKCDETFGIRLTSHHNLHFLLNVMKQVRQAIMDDNLLEFRQAFFEEYGFNEENAKNF

SEQ ID NO: 62050 - protein, 381 aa, Vagococcus fluvialis
  misc_feature (1)..(381): tr|A0A1X6WMQ2|A0A1X6WMQ2_9ENTE Queuine tRNA-ribosyltran sferase OS=Vagococcus fluvialis bH819 OX=1255619 GN=tgt PE=3 SV=1
MSEPAIKYRLIKKEKHTGARLGEIITPHGTFPTPMFMPVGTLGTVKTMAPEELKDMGAGIILSNTYHLWLRPGEDLVEEAGGLHKFMNWDQGILTDSGGFQVWSLSDMRRIEEEGVHFRNHLNGSKMFLSPEKAIQIQNKLGPDIMMSFDECPPFEQSHDYVKKSIERTSRWAERGLNAHANADRQGLFGIIQGAGFQDLREQSARDLVSLDFPGYSIGGLSVGESKQEMNKVLEYTTPLIPENKPRYLMGVGTADSLIDGVIRGVDMFDCVLPTRIARNGTCMTSKGRLVVKNAKFARDFRPLDEKCDCYTCRNYSRAYIRHLIKCDETFGIRLTSYHNLYFLLNVMKQVRQAIMDDNLLEFRQAFFEEYGFNEENPKNF

SEQ ID NO: 62051 - protein, 381 aa, Vagococcus humatus
  misc_feature (1)..(381): tr|A0A429Z6H4|A0A429Z6H4_9ENTE Queuine tRNA-ribosyltran sferase OS=Vagococcus humatus OX=1889241 GN=tgt PE=3 SV =1
MTEPAIRYRLIKKEKHTGARLGEIITPHGTFPTPMFMPVGTLATVKTMAPEELKEMGAGIILSNTYHLWLRPGEDIVEQAGGLHQFMNWDQGILTDSGGFQVWSLADMRNIEEEGVHFKNHLNGSPMFLSPEKAIQIQNKLGSDIMMSFDECPPFYESHDYVKRSIERTTRWAERGLKAHAHPDRQGLFGIVQGAGFKDLRKQSAEELMSLDFPGYSIGGLSVGETKGEMNDILHFLNPILPENKPRYLMGVGTADSLIDGVINGVDMFDCVLPTRIARNGTCMTSQGRLVVKNAKYAEDFRPLDEKCDCYTCRNYTRAYIRHLIKCNETFGFRLTSYHNLYFLLNVMKQVRQAIMDDNLLEFREAFFEEYGFNKENAKNF

SEQ ID NO: 62052 - protein, 381 aa, Vagococcus lutrae
  misc_feature (1)..(381): tr|V6Q310|V6Q310_9ENTE Queuine tRNA-ribosyltransferase OS=Vagococcus lutrae LBD1 OX=1408226 GN=tgt PE=3 SV=1
MTESPIRYRLIKTEKHTGARLGEIITPHGTFPTPMFMPVGTLATVKTMAPEELKEMGAGIILSNTYHLWLRPGEDIVEEAGGLHQFMNWDQGILTDSGGFQVWSLADMRNITEEGVHFKNHLNGSKMFLSPEKAIQIQNKLGPDIMMSFDECPPFYESHDYVKKSIERTTRWAERGLKAHANPDRQGLFGIVQGAGYKDLRIQSAKDLVSLDFPGYSIGGLSVGESKEEMNEALEWLNPILPSNKPRYLMGVGTPDSLIDGVIRGVDMFDCVLPTRIARNGTCMTSQGRLVVKNAKYERDFRPIDEKCDCYTCRNYTRAYVRHLIKANETFGLRLTSYHNLYFLLNVMKQVRQAIMDDNLLEFREAFFEEYGFNEKNAKNF

SEQ ID NO: 62053 - protein, 381 aa, Vagococcus lutrae; identical to SEQ ID NO: 62052
  misc_feature (1)..(381): tr|A0A429ZD99|A0A429ZD99_9ENTE Queuine tRNA-ribosyltran sferase OS=Vagococcus lutrae OX=81947 GN=tgt PE=3 SV=1

SEQ ID NO: 62054 - protein, 381 aa, Vagococcus martis
  misc_feature (1)..(381): tr|A0A1V4DHS7|A0A1V4DHS7_9ENTE Queuine tRNA-ribosyltran sferase OS=Vagococcus martis OX=1768210 GN=tgt PE=3 SV= 1
MTEPAIKYRLIKKEKHTGARLGEIITPHGTFPTPMFMPVGTLATVKTMAPEELKEMGAGIILSNTYHLWLRPGEDIVAGAGGLHKFMNWDQGILTDSGGFQVWSLSDMRQIEESGVHFRNHLNGSKMFLSPEKAIQIQNKLGPDIMMSFDECPPFQESHDYVKKSIERTSRWAERGLKAHQNPDRQGLFGIIQGAGYKDLREQSARELVGLDFPGYSIGGLSVGEPKEEMNKVLEYTTPLIPENKPRYLMGVGTPDSLIDGVIRGVDMFDCVLPTRIARNGTCMTSQGRLVVKNAKYAEDYRPIDEKCDCYTCRHYTRAYIRHLIKCDETFGIRLTSYHNLYFLLNTMKQVRQAIMDDNLLEFRQAFFEEYGFNKENAKNF

SEQ ID NO: 62055 - protein, 381 aa, Vagococcus penaei
  misc_feature (1)..(381): tr|A0A1Q2D6P2|A0A1Q2D6P2_9ENTE Queuine tRNA-ribosyltran sferase OS=Vagococcus penaei OX=633807 GN=tgt PE=3 SV=1
MTEPAIKYRLIKKEKHTGARLGEIITPHGTFPTPMFMPVGTLATVKTMAPEELKDMGAGIILSNTYHLWLRPGEDIVEEAGGLHRFMNWDQGILTDSGGFQVWSLSDMRRIEEEGVHFRNHLNGSKMFLSPEKAIQIQNKLGPDIMMSFDECPPFYESHDYVKKSIDRTSRWAERGLKAHANADRQGLFGIIQGAGYKDLRQQSARDLVAMDFPGYSIGGLSVGETKHEMNTILEYTTPLIPEHKPRYLMGVGTADSLIDGVIRGVDMFDCVLPTRIARNGTCMTSKGRLVVKNAQYARDFRPLDEKCDCYTCRNYTRAYIRHLIKCDETFGMRLTSYHNLYFLLNVMKQVRQAIMDDNLLEFREAFFEEYGFNEENAKKF

SEQ ID NO: 62056 - protein, 381 aa, Vagococcus salmoninarum
  misc_feature (1)..(381): tr|A0A429ZGD2|A0A429ZGD2_9ENTE Queuine tRNA-ribosyltran sferase OS=Vagococcus salmoninarum OX=2739 GN=tgt PE=3 SV=1
MTEPAIRYRLIKKEKHTGARLGEIITPHGTFPTPMFMPVGTLATVKTMAPEELKEMGAGIILSNTYHLWLRPGEDLVEKAGGLHKFMNWDQGILTDSGGFQVWSLADMRNISEEGVNFKNHINGSKMFLSPEKAIQIQNKLGPDIMMSFDECAPFYESHDYVKRSIERTTRWAERGLNAHANPDRQGLFGIIQGAGFKDLREQSAKDLISLDFPGYSIGGLSVGETKAEMNEVLQYLNPLIPENKPRYLMGVGTADSLIDGAINGVDMFDCVLPTRIARNGTCMTSKGRLVIKNAQYAEDFRPIDEKCQCYTCKNYTRAYIRHLIKCNETFGIRLTSYHNLYFLLNVMKQVRQSIMDDNLLEFRQAFFEEYGFNDKNAKNF

SEQ ID NO: 62057 - protein, 381 aa, Vagococcus sp.
  misc_feature (1)..(381): tr|A0A4D7CZH1|A0A4D7CZH1_9ENTE Queuine tRNA-ribosyltran sferase OS=Vagococcus sp. MN-17 OX=2571750 GN=tgt PE=3 SV=1
MTEPAIRYRLIKKEKHTGARLGEIITPHGTFPTPMFMPVGTLATVKTMAPEELKDMGAGIILSNTYHLWLRPGEDIVEEAGGLHKFMNWDQGILTDSGGFQVWSLSDMRKIEEEGVHFRNHLNGSKMFLSPEKAIQIQNKLGPDIMMSFDECPPFEESHDYVKKSIERTTRWAERGLKAHANPDRQGLFGIVQGAGYKDLRLQSAKDLMSLDFPGYSIGGLSVGETKDEMNNILDVLNPVLPENKPRYLMGVGTADSLIDGVIRGVDMFDCVLPTRIARNGTCMTSKGRLVVKNAQYARDFRPIDEKCGCYTCRNYSRAYVRHLIKSDETFGLRLTSYHNLYFLLDVMKQVRQAIMDDNLLEFRQAFFEEYGFNKENAKKF

SEQ ID NO: 62058 - protein, 381 aa, Vagococcus sp.
  misc_feature (1)..(381): tr|A0A429ZAA7|A0A429ZAA7_9ENTE Queuine tRNA-ribosyltran sferase OS=Vagococcus sp. SS1994 OX=1977868 GN=tgt PE=3 SV=1
MTEPAIKYRLIKKEKHTGARLGEIITPHGTFPTPMFMPVGTLATVKTMAPEELKEMGAGIILSNTYHLWLRPGEDIVEGAGGLHKFMNWDQGILTDSGGFQVWSLSDMRQIEESGVHFRNHLNGSKMFLSPEKAIQIQNKLGPDIMMSFDECPPFQESHDYVKKSIERTSRWAERGLKAHQNPDRQGLFGIIQGAGYKDLREQSARELVGLDFPGYSIGGLSVGEPKEEMNRVLEYTTPLIPENKPRYLMGVGTPDSLIDGVIRGVDMFDCVLPTRIARNGTCMTSQGRLVVKNAKYAEDYRPIDEKCDCYTCRNYTRAYIRHLIKCDETFGIRLTSYHNLYFLLNTMKQVRQAIMDDNLLEFRQAFFEEYGFNKENAKNF

SEQ ID NO: 62059 - protein, 381 aa, Vagococcus teuberi
  misc_feature (1)..(381): tr|A0A1J0A7N8|A0A1J0A7N8_9ENTE Queuine tRNA-ribosyltran sferase OS=Vagococcus teuberi OX=519472 GN=tgt PE=3 SV= 1
MTEPAIKYRLIKKEKHTGARLGEIITPHGTFPTPMFMPVGTLATVKTMAPEELKEMGAGIILSNTYHLWLRPGENIVEGAGGLHKFMNWDQGILTDSGGFQVWSLSDMRQIEESGVHFRNHLNGSKMFLSPEKAIQIQNKLGPDIMMSFDECPPFQESHDYVKKSIERTSRWAERGLKAHQNPDRQGLFGIIQGAGYKDLREQSARELVGLDFPGYSIGGLSVGEPKEEMNRVLEYTTPLIPENKPRYLMGVGTPDSLIDGVIRGVDMFDCVLPTRIARNGTCMTSQGRLVVKNAKYAEDYRPIDEKCDCYTCRNYTRAYIRHLIKCDETFGIRLTSYHNLYFLLNTMKQVRQAIMDDNLLEFRQAFFEEYGFNKENAKNF

SEQ ID NO: 62060 - protein, 373 aa, Vampirococcus sp.
  misc_feature (1)..(373): tr|A0A410P2Y6|A0A410P2Y6_9BACT Queuine tRNA-ribosyltran sferase OS=Vampirococcus sp. LiM OX=1930593 GN=tgt PE=3 SV=1
MPMNFSVIHTDKETQARAGILQMERGSLETPVFMPVGTQATVKSLSPRELEEAGAQIMLNNAYHLYLRPGTEIIREAGGLHKFMNWPKLILTDSGGYQVFSLSLLRKIKDEGVEFQSHLDGSRHFLTPESVIGIQNDLGSDIMMPLDECVHYPASFDLAQKAVDRTTLWAGRSKKEWAKTQRGVLFGIVQGSTYPELRKKSAEELKSIGFQGYAIGGISVGEPQDLMYNMISFAARELPAEAPRYVMGVGLPEDILEAVSLGADMFDCVVPTRYGRNGSAFTSCGKITVRNGAYSRDRTPLDPRCDCYCCRNFTRSYLRHLFNTGEILGLRLVSYHNVYFFLDLMKKVRASLHEGRFASFKREFLSRYRQKEG

SEQ ID NO: 62061 - protein, 412 aa, Varibaculum cambriense
  misc_feature (1)..(412): tr|W1TVC3|W1TVC3_9ACTO Queuine tRNA-ribosyltransferase OS=Varibaculum cambriense DORA_20 OX=1403948 GN=tgt PE= 3 SV=1
MTFTKVAELPGRRGRAGIIHTPHGDIPTPAFIPVGTKATVKTVLPETMKELGAAAILANAYHLYLQPGPEVIDQAGGLARFMNWGGPTFTDSGGFQVLSLGSGYKKVLSGEFTGSGRADHMVAAKKERHAHVDEEGVTFRSHLDGSRHRFTPEVSMQIQHQLGADIMMAFDELTTLLNSREYQVESLERTRRWAERCLAEHERLTVERADKPYQMLYGVIQGAQYEDLRRKAARDLSAMEVAGRSFDGFGIGGALEKENLATIVDWVCEELPEEKPRHLLGLSEPDDIFAGVEAGADTFDCVNPSRIGRNGGLYGRYGRFNLTRSEFKRDFQAPVAGCNCYTCQNYSIAYLHHLFKAKEMLGFTLATIHNEYFTVQLVRGIRQSIIEGEYPAYKQRVLGDFYGGQPLRSHWG

SEQ ID NO: 62062 - protein, 417 aa, Varibaculum cambriense
  misc_feature (1)..(417): tr|A0A134BJ97|A0A134BJ97_9ACTO Queuine tRNA-ribosyltran sferase OS=Varibaculum cambriense OX=184870 GN=tgt PE=3 SV=1
MRGTDLTFTKVAGLPGRRGRAGIIHTPHGDIPTPAFIPVGTKATVKTVLPETMKQLGAAAILSNAYHLYLQPGPEVIDQAGGLARFMNWNGPTFTDSGGFQVLSLGSGYKKVLSGEFTGSGRADHTVAEKKERHAHVDDEGVTFRSHLDGSRHRFTPEVSMQIQHQLGADIMMAFDELTTLLNSREYQVEPLERTRRWAERCLAEHQRLTLERADKPYQMLYGVIQGAQYEDLRRKAARDLSAMEVAGRSFDGFGIGGAFEKENLATIVDWVCEELPEDKPRHLLGLSEPDDIFAGVEAGADTFDCVNPSRIGRNGGLYGRYGRFNLTRSEFKRDFAAPVAGCDCYTCQNYSIAYLHHLFKAKEMLGFTLATIHNEYFTVQLVRGIRKAIIEGDYPEYKQRVLGDFYGGEPLRSHWG

SEQ ID NO: 62063 - protein, 374 aa, Variibacter gotjawalensis
  misc_feature (1)..(374): tr|A0A0S3PXK9|A0A0S3PXK9_9BRAD Queuine tRNA-ribosyltran sferase OS=Variibacter gotjawalensis OX=1333996 GN=tgt PE=3 SV=1
MKIYKLNATDGAARTGEVATPHGIIRTPAFMPVGTQATVKGMHPEAVRETGADVVLGNTYHLMLRPGAERVAALGGLHKFMNWPHVILTDSGGFQVMSLSAMRKIDENAVTFRSHIDGSTHVLTPERAIEIQTLLGSDIVMQLDECVRLPAERAEVEKAMRLSLRWAERCQRAFAPVRDGRSLFAIVQGGDDVALREESARELNAMDFPGYAIGGLAVGEPQEVMLRMLEVVAPLLPADKPRYLMGVGTPDDLLKAVARGIDMFDCVMPTRNGRHGLAFSRFGPINLKNARHADDPRPFDEESPCAAARTYSRAYLHHLTKTNEMLGAILLTTINIAYYQELMAGARAAIAAKAFASFADGVAAGWAAGDLPTR

SEQ ID NO: 62064 - protein, 390 aa, Variovorax boronicumulans
  misc_feature (1)..(390): tr|A0A286NS84|A0A286NS84_9BURK Queuine tRNA-ribosyltran sferase OS=Variovorax boronicumulans OX=436515 GN=tgt P E=3 SV=1
MLNFELLKTDPDSHARRATLTLNHGKVQTPIFMPVGTYGTVKGVMPRSLEEMGAQIILGNTFHLWMRPGLDVMASFGGLHQFEKWDKPILTDSGGFQVWSLGAMRKISEEGVKFASPVNGDKLFLTPEVSMQIQTILNSDIVMQFDECTPYDTKGHITTEAEARVSMELSLRWAKRCQAEFTRLSNPNALFGIVQGGMFENLREESLAALVDMDFPGYAIGGVSVGEPKEEMLHIMGHTPHRLPANKPRYLMGVGTPEDLVQGVADGVDMFDCVMPTRNARNGTMFTRFGDLKMRNARHKSDPQPVDPSCTCHACAGTSGVSWNDGGREGFSRAYLHHLDRCGEMLGPMLCTIHNLHYYLNLMTEIRAALDAGTFTAFRAQFKADRARGV

SEQ ID NO: 62065 - protein, 391 aa, Variovorax boronicumulans
  misc_feature (1)..(391): tr|A0A1E7TXZ0|A0A1E7TXZ0_9BURK Queuine tRNA-ribosyltran sferase OS=Variovorax boronicumulans OX=436515 GN=tgt P E=3 SV=1
MENGLHFKILRTEGHARRGVLTLNHGVVQTPIFMPVGTYGTVKGVMPRSLEEMGAQIILGNTFHLWMRPGLDVMASFGGLHQFEKWDKPILTDSGGFQVWSLGAMRKISEEGVKFASPVNGDKLFLTPEVSMQIQTILNSDIVMQFDECTPYDTKGHITTEAEARVSMELSLRWAKRCQSEFARLENPNALFGIVQGGMFENLREESLAALVDMDFPGYAIGGVSVGEPKEEMLHIMGHTPHRLPANKPRYLMGVGTPEDLVQGVADGVDMFDCVMPTRNARNGTMFTRFGDLKMRNARHKSDPQPVDPSCTCHACAGTSGVSWNDGGREGFSRAYLHHLDRCGEMLGPMLCTIHNLHYYLNLMTEIRAALDAGTFTAFRAQFKADRARGV

SEQ ID NO: 62066 - protein, 390 aa, Variovorax guangxiensis
  misc_feature (1)..(390): tr|A0A502DV60|A0A502DV60_9BURK Queuine tRNA-ribosyltran sferase OS=Variovorax guangxiensis OX=1775474 GN=tgt PE =3 SV=1
MLNFDLLTTDPDSHARRGTLTLNHGPVQTPIFMPVGTYGTVKGVMPRSLEEMGAQIILGNTFHLWMRPGLDVMASFGGLHGFERWNKPILTDSGGFQVWSLGAMRKISEEGVKFASPVNGDKLFLTPEVSMQIQTVLNSDIVMQFDECTPYDTHGHITTEAEARTSMELSLRWAARCKTEFKKLENPNALFGIVQGGMFENLREESLAALVEMDFPGYAIGGVSVGEPKAEMLHIMGHTPHRLPVHKPRYLMGVGTPEDLVQGVADGVDMFDCVMPTRNARNGTMFTRFGDLKMRNARHKIDPQPVDPSCTCHACAGTSGVSWNDGGREGFSRAYLHHLDRCGEMLGPMLCTIHNLHYYLNLMREIREALDAGAFTAFRAKFKSERARGV

SEQ ID NO: 62067 - protein, 390 aa, Variovorax guangxiensis
  misc_feature (1)..(390): tr|A0A3S0X857|A0A3S0X857_9BURK Queuine tRNA-ribosyltran sferase OS=Variovorax guangxiensis OX=1775474 GN=tgt PE =3 SV=1
MLNFELLKTDPDSHARRATLTLNHGKVQTPIFMPVGTYGTVKGVMPRSLEEMGAQIILGNTFHLWMRPGLDVMASFGGLHQFEKWDKPILTDSGGFQVWSLGAMRKISEEGVKFASPVNGDKLFLTPEVSMQIQTILNSDIVMQFDECTPYDTKGHITTEAEARISMELSLRWAKRCQAEFTRLQNPNALFGIVQGGMYENLREESLAALVDMDFPGYAIGGVSVGEPKEEMLHIMGHTPHRLPANKPRYLMGVGTPEDLVQGVADGVDMFDCVMPTRNARNGTLFTRFGDLKMRNARHKSDPQPIDPSCTCHACAGTSGVSWNDGGREGFSRAYLHHLDRCGEMLGPMLTTIHNLHYYLNLMSEIRDSLDAGTFTEFRVRFKSDRARGV

SEQ ID NO: 62068 - protein, 390 aa, Variovorax paradoxus
  misc_feature (1)..(390): tr|E6UWL2|E6UWL2_VARPE Queuine tRNA-ribosyltransferase OS=Variovorax paradoxus (strain EPS) OX=595537 GN=tgt P E=3 SV=1
MLNFELLKTDPDSHARRATLTLNHGKVQTPIFMPVGTYGTVKGVMPRSLEEMGAQIILGNTFHLWMRPGLDVMQSFGGLHQFEKWNKPILTDSGGFQVWSLGAMRKISEEGVKFASPVNGDKLFLTPEVSMQIQTTLNSDIVMQFDECTPYDTKGHITTEAEARTSMELSLRWAKRCQSEFARLENPNALFGIVQGGMFENLREESLAALVDMDFPGYAIGGVSVGEPKEEMLHIMGHTPHRLPANKPRYLMGVGTPEDLVQGVADGVDMFDCVMPTRNARNGTMFTRFGDLKMRNARHKSDPQPVDPSCTCHACAGTSGVSWNDGGREGFSRAYLHHLDRCGEMLGPMLCTIHNLHYYLNLMTEIRAALDAGTFTEFRARFKAERARGV

SEQ ID NO: 62069 - protein, 390 aa, Variovorax paradoxus
  misc_feature (1)..(390): tr|A0A0P8ZW79|A0A0P8ZW79_VARPD Queuine tRNA-ribosyltran sferase OS=Variovorax paradoxus OX=34073 GN=tgt PE=3 SV =1
MLNFELLKTDPDSHARRATLTLNHGVVQTPIFMPVGTYGTVKGVMPRSLEEMGAQIILGNTFHLWMRPGLDVMQSFGGLHQFEKWNKPILTDSGGFQVWSLGAMRKISEEGVKFASPVNGDKLFLTPEVSMQIQTILNSDIVMQFDECTPYDTKGHITTEAEARISMELSLRWARRCQAEFERLQNPNALFGIVQGGMYENLREESLAALVDMDFPGYAIGGVSVGEPKEEMLHIMGHTPHRLPANKPRYLMGVGTPEDLVQGVADGVDMFDCVMPTRNARNGTLFTRFGDLKMRNARHKSDPQPIDPSCTCHACAGTSGVSWNDGGREGFSRAYLHHLDRCGEMLGPMLTTIHNLHYYLNLMREIREALDAGTFTEFRARFKSERARGV

SEQ ID NO: 62070 - protein, 390 aa, Variovorax sp.
  misc_feature (1)..(390): tr|A0A1G8QSP5|A0A1G8QSP5_9BURK Queuine tRNA-ribosyltran sferase OS=Variovorax sp. OV700 OX=1882826 GN=tgt PE=3 SV=1
MLNFELLKTDAASHARRGTLTLNHGKVQTPIFMPVGTYGTVKGVMPRSLEEMGAQIILGNTFHLWMRPGLDVMASFGGLHQFEKWNKPILTDSGGFQVWSLGAMRKISEEGVKFASPVNGDKLFLTPEVSMQIQTILNSDIVMQFDECTPYDTKGHITTEAEARTSMELSLRWARRCQHEFARLENPNALFGIVQGGMFENLREESLAALVEMDFPGYAIGGVSVGEPKEEMLHIMGHTPHRLPAHKPRYLMGVGTPEDLVQGVADGVDMFDCVMPTRNARNGTLFTRFGDLKMRNARHKNDPQPIDPSCTCHACAGTSGVAWNDGGREGFSRAYLHHLDRCAEMLGPMLTTIHNLHYYLNLMREIREALEADGFTAFRARFKADRARGV

SEQ ID NO: 62071 - protein, 390 aa, Variovorax sp.
  misc_feature (1)..(390): tr|A0A244EIZ8|A0A244EIZ8_9BURK Queuine tRNA-ribosyltran sferase OS=Variovorax sp. JS1663 OX=1851577 GN=tgt PE=3 SV=1
MLNFELLATDPDSHARRGTLTLNHGVVQTPIFMPVGTYGTVKGVMPRNLEEMGAQIILGNTFHLWMRPGLDVMASFGGLHQFEKWDKPILTDSGGFQVWSLGAMRKISEEGVKFASPVNGDKLFLTPEVSMQIQTILNSDIVMQFDECTPYDTNGHVTTEAEARSSMELSLRWAKRCQAEFARLANPNALFGIVQGGMYENLREESLAQLVELDFPGYAIGGVSVGEPKEEMLRIMAHTPHRLPAHKPRYLMGVGTPEDLVEGVAQGVDMFDCVMPTRNARNGTLFTRFGDLKMRNARHKNDPQPIDPSCTCHACAGASGVPWNEGGREGFSRAYLHHLDRCGEMLGPMLTTIHNLHYYLNLMREIRAALDADRYSAFRAQFKADRARGV

SEQ ID NO: 62072 - protein, 375 aa, Varunaivibrio sulfuroxidans
  misc_feature (1)..(375): tr|A0A4R3J8H4|A0A4R3J8H4_9PROT Queuine tRNA-ribosyltran sferase OS=Varunaivibrio sulfuroxidans OX=1773489 GN=tg t PE=3 SV=1
MTDFSFELLGADGGARRGRVTCAHGVIQTPAFMPVGTAATVKAMLPENVAATGAEIILGNTYHLMLRPGAERIARLGGLHAFMNWPGPILTDSGGYQVMSLSELRKLDENGVTFRSHIDGSYHTLTPERSMEIQHQLGSDITMCFDECPPYPSEKADVARATQLSMRWAARSRAAFVNRPGYGLFGINQGGVHEDLREQSAQALKEIGFDGYAIGGLAVGEGRALMFSTLDFTTLMLPTDKPRYLMGVGKPEDLVGAVARGVDMFDCVLPTRSGRTAQAFTRRGPVNLKNARHGDDPRPLDDHCSCPTCRNYSRAYLNHVVKAGEIIAAMLLTWHNLQYYQDLMADIRRAIESGTFAAFEADFQSQYGQGDIAPL

SEQ ID NO: 62073 - protein, 371 aa, Veillonella atypica
  misc_feature (1)..(371): tr|A0A3A6W2S0|A0A3A6W2S0_9FIRM Queuine tRNA-ribosyltran sferase OS=Veillonella atypica OX=39777 GN=tgt PE=3 SV= 1
MPSITYELQKTCPHTGARAGLLHTPHGTYETPMFMPVGTQATVKTMTPEELKAIGSQVILSNTYHLFLRPGPELVEEAGGLHKFMNWDQAILTDSGGFQVFSLGDMRKITEEGVTFRSHIDGSKQFLSPEVATKVQEQLGSDIAMAFDECIPYPAEHDYAKRSTARTTRWAHRCQEARHAHDRQGMFGIVQGGMYKDLRKQSAAELVAMDFEGYSIGGLSVGEPHDLMNEILEYTTPLLPTNKARYLMGVGTADCLVEGVARGIDMFDCVYPTRVARNGMAMTWHGRLNIRNAQYAHDWGPLEEGCQCYTCKNYSRAYLRHLYKAEEILALRLVTYHNLYFLLEFMRQMRKAILEDRFPQFRMQFWDNFNK

SEQ ID NO: 62074 - protein, 371 aa, Veillonella atypica; identical to SEQ ID NO: 62073
  misc_feature (1)..(371): tr|E1LE33|E1LE33_9FIRM Queuine tRNA-ribosyltransferase OS=Veillonella atypica ACS-134-V-Col7a OX=866778 GN=tgt PE=3 SV=1

SEQ ID NO: 62075 - protein, 369 aa, Veillonella criceti
  misc_feature (1)..(369): tr|A0A380NL10|A0A380NL10_9FIRM Queuine tRNA-ribosyltran sferase OS=Veillonella criceti OX=103891 GN=tgt PE=3 SV =1
MVITYELQKECPHTGARAGLLHTPHGTFKTPMFMPVGTQATVKTMSPEELKEMGAQIILSNTYHLFLRPGPELVEEAGGLHRFMNWGGGILTDSGGFQVFSLGDLRKITEEGVAFRSHIDGSKKFLSPEIATRVQEQLGADIAMAFDECIPYPADYAYADRSTARTTRWAERCRKAHTSPTQGMFGIVQGGMYKDLRTRSAKELVAMDFDGYSIGGLSVGEPHDIMYDILEHTTPLLPTNKARYLMGVGTPDCLVEGVARGVDMFDCVFPTRVARNGMAMTHNGRVTIKNATYAHDWGPIEEGCQCYACRNYSRAYIRHLYKAEEILAFRLVSYHNLYFLLHFMRQMRAAILEDRFPAFRDEFWAAYKK

SEQ ID NO: 62076 - protein, 371 aa, Veillonella denticariosi
  misc_feature (1)..(371): tr|A0A2S7ZBK6|A0A2S7ZBK6_9FIRM Queuine tRNA-ribosyltran sferase OS=Veillonella denticariosi JCM 15641 OX=129859 4 GN=tgt PE=3 SV=1
MASITYELQKTCPHTGARAGLLHTPHGTFQTPMFMPVGTQATVKTMTPEELKDMGSQVILSNTYHLFLRPGSELIEEAGGLHTFMNWDQAILTDSGGFQVFSLGDMRKITEEGVTFRSHIDGSKQFLSPEVATKVQEQLGSDIAMAFDECIPYPADHDYAKRSTARTTRWAHRCQEARHAHDRQGMFGIVQGGMYKDLRKQSAAELVAMDFEGYSIGGLSVGEPHDLMNEILEYTTPLLPTDKARYLMGVGTADCLVEGVARGVDMFDCVYPTRVARNGMAMTWKGRLNIRNAAYSRDWGPLEEGCQCYTCQNYSRAYIRHLYKAEEILALRLVTYHNLYFLLEFMRQMRQAILEDRFPQFRMQFWDSFKK

SEQ ID NO: 62077 - protein, 290 aa, Veillonella dispar
  misc_feature (1)..(290): tr|W1V533|W1V533_9FIRM Queuine tRNA-ribosyltransferase (Fragment) OS=Veillonella dispar DORA_11 OX=1403949 GN= Q619_VDC00514G0001 PE=3 SV=1
MPSITYELQKTCPHTGARVGLLHTPHGTFQTPMFMPVGTQATVKTMTPEELKTMGSQVILSNTYHLFLRPGPELVEEAGGLHKFMNWDQAILTDSGGFQVFSLGDMRKITEDGVTFRSHIDGSKQFLSPEVATKVQEQLGSDIAMAFDECIPYPADHDYAKRSTARTTRWAHRCQEARKAHDRQGMFGIVQGGMYKDLRKQSAEELVAMDFEGYSIGGLSVGEPHDLMNEILEYTTPLLPTNKARYLMGVGTADCLVEGVARGVDMFDCVYPTRVARNGMAMTWNGRLNI

SEQ ID NO: 62078 - protein, 371 aa, Veillonella dispar
  misc_feature (1)..(371): tr|C4FRS1|C4FRS1_9FIRM Queuine tRNA-ribosyltransferase OS=Veillonella dispar ATCC 17748 OX=546273 GN=tgt PE=3 SV=1
MPSITYELQKTCPHTGARAGLLHTPHGTFQTPMFMPVGTQATVKTMTPEELKAMGSQVILSNTYHLFLRPGPELVEEAGGLHKFMNWDQAILTDSGGFQVFSLGDMRKITEEGVTFRSHIDGSKQFLSPEVATKVQEQLGSDIAMAFDECIPYPADHDYAKRSTARTTRWAHRCQEARKAHDCQGMFGIVQGGMYKDLRKQSAEELVAMDFEGYSIGGLSVGEPHDLMNEILEFTTPLLPTNKARYLMGVGTADCLVEGVARGIDMFDCVYPTRVARNGMAMTWNGRLNIRNAQFAHDWGPLEEGCQCYTCKNYSRAYIRHLYKAEEILALRLVTYHNLYFLLEFMRQMRQAILEDRFPQFRMQFWDSFKK

SEQ ID NO: 62079 - protein, 370 aa, Veillonella montpellierensis
  misc_feature (1)..(370): tr|A0A096CSD2|A0A096CSD2_9FIRM Queuine tRNA-ribosyltran sferase OS=Veillonella montpellierensis DNF00314 OX=140 1067 GN=tgt PE=3 SV=1
MVITYELQKECPHTGARAGLLHTPHGTFQTPMFMPVGTQATVKTMTPEELKEMGAQLILSNTYHLFLRPGADLIAEAGGLHQFMNWNQAILTDSGGFQVFSLGDMRKITEKGVTFRSHIDGSTQFLSPEVATQVQMKLNSDIAMAFDECIPYPADYDYTKASTERTTRWAERCRKIHDSKIQGMFGIVQGGMYKKLRTQSAKELVDLDFDGYSIGGLSVGEPHDMMNDILEHTTPLLPSHKARYLMGVGTPDCLVEGVARGVDMFDCVYPTRVARNGMAMTWQGRLTLRNATFAHDWNPIEDGCQCYTCKNYSRAYIRHLYKAEEILAFRLVTYHNLYFLLEFMRRMRTAILEDRFPAFREEFWANYHKK

SEQ ID NO: 62080 - protein, 371 aa, Veillonella parvula
  misc_feature (1)..(371): tr|A0A418PG68|A0A418PG68_9FIRM Queuine tRNA-ribosyltran sferase OS=Veillonella parvula OX=29466 GN=tgt PE=3 SV= 1
MPSIIYELQKTCPHTGARAGLLHTPHGTFQTPMFMPVGTQATVKTMTPEELKAMGSQVILSNTYHLFLRPGPELVEEAGGLHKFMNWDQAILTDSGGFQVFSLGDMRKITEDGVTFRSHIDGSKQFLSPEVATKVQEQLGSDIAMAFDECIPYPADHDYAKRSTARTTRWAHRCQAARRAHDRQGMFGIVQGGMYKDLRKQSAEELVAMDFEGYSIGGLSVGEPHDLMNEILEYTTPLLPTNKARYLMGVGTADCLVEGVARGVDMFDCVYPTRVARNGMAMTWNGRLNIRNAQFAHDWGPLEEGCQCYTCKNYSRAYIRHLYKAEEILALRLVTYHNLYFLLEFMRQMRQAILEDRFPQFRMQFWDSFKK

SEQ ID NO: 62081 - protein, 371 aa, Veillonella parvula
  misc_feature (1)..(371): tr|D1BLM1|D1BLM1_VEIPT Queuine tRNA-ribosyltransferase OS=Veillonella parvula (strain ATCC 10790 / DSM 2008 / JCM 12972 / Te3) OX=479436 GN=tgt PE=3 SV=1
MPSITYELQKTCPHTGARAGLLHTPHGTFQTPMFMPVGTQATVKTMTPEELKAMGSQVILSNTYHLFLRPGPELIEEAGGLHKFMNWDQAILTDSGGFQVFSLGDMRKITEDGVTFRSHIDGSKQFLSPEVATKVQEQLGSDIAMAFDECIPYPADHDYAKRSTARTTRWAHRCQESRKAHDRQGMFGIVQGGMYKDLRKQSAEELVAMDFEGYSIGGLSVGEPHDLMNEILEYTTPLLPTNKARYLMGVGTADCLVEGVARGVDMFDCVYPTRVARNGMAMTWNGRLNIRNAQFAHDWGPLEEGCQCYTCKNYSRAYIRHLYKAEEILALRLVTYHNLYFLLEFMRQMRQAILEDRFPQFRMQFWDSFKK

SEQ ID NO: 62082 - protein, 371 aa, Veillonella rodentium
  misc_feature (1)..(371): tr|A0A239YNL9|A0A239YNL9_9FIRM Queuine tRNA-ribosyltran sferase OS=Veillonella rodentium OX=248315 GN=tgt PE=3 SV=1
MASITFELQKTCPHTGARAGLLHTPHGTFQTPMFMPVGTQATVKTMTPEELKDMGSQVILSNTYHLFLRPGAELIEEAGGLHTFMNWDQAILTDSGGFQVFSLGDMRKITEEGVTFRSHIDGSKQFLSPEVATKVQEQLGSDIAMAFDECIPYPADHDYAKRSTARTTRWAHRCQEARHAHDRQGMFGIVQGGMYKALRKQSAEELVAMDFEGYSIGGLSVGEPHDLMNEILEYTTPLLPTDKARYLMGVGTADCLVEGVARGVDMFDCVYPTRVARNGMAMTWKGRLNIRNAVYSRDWGPLEEGCQCYTCQNYSRAYIRHLYKAEEILALRLVTYHNLYFLLEFMRQMRQAILEDRFPQFRMQFWDSFKK

SEQ ID NO: 62083 - protein, 371 aa, Veillonella rogosae
  misc_feature (1)..(371): tr|A0A2S7Z0J3|A0A2S7Z0J3_9FIRM Queuine tRNA-ribosyltran sferase OS=Veillonella rogosae JCM 15642 OX=1298595 GN= tgt PE=3 SV=1
MASITYELQKTCPHTGARAGLLHTPHGTFQTPMFMPVGTQATVKTMTPEELKAMGSQVILSNTYHLFLRPGPELVEEAGGLHKFMNWDQAILTDSGGFQVFSLGDMRKITEDGVTFRSHIDGSKQFLSPEVATKVQEQLGSDIAMAFDECIPYPADHDYAKRSTARTTRWAHRCQEARKAHDRQGMFGIVQGGMYKDLRKQSAEELVAMDFEGYSIGGLSVGEPHDLMNEILEYTTPLLPTNKARYLMGVGTADCLVEGVARGIDMFDCVYPTRVARNGMAMTWKGRLNIRNAQFAHDWGPLEEGCQCYTCKNYSRAYIRHLYKAEEILALRLVTYHNLYFLLEFMRQMRQAILEDRFPQFRMQFWDSFKK

SEQ ID NO: 62084 - protein, 369 aa, Veillonella seminalis
  misc_feature (1)..(369): tr|K9DKU9|K9DKU9_9FIRM Queuine tRNA-ribosyltransferase OS=Veillonella seminalis ACS-216-V-Col6b OX=883156 GN=t gt PE=3 SV=1
MVITYELQKECPHTGARAGLLHTPHGTFKTPMFMPVGTQATVKTMSPEELKEMGAQIILSNTYHLFLRPGPELVEEAGGLHRFMNWDGGILTDSGGFQVFSLGDLRKITEEGVAFRSHIDGSKKFLSPEIATKVQEQLGADIAMAFDECIPYPADYAYADRSTARTTRWAERCCKAHTSPTQGMFGIVQGGMYKDLRTRSAKELVAMDFDGYSIGGLSVGEPHDLMYDILEHTTPLLPTNKARYLMGVGTPDCLVEGVARGVDMFDCVFPTRVARNGMAMTHNGRVVIKNATYAHDWGPLEDGCECYTCRNYSRAYIRHLYKAEEILAFRLVSYHNLYFLLNFMRQMRAAILEDRFPAFRDEFWAGYKK

SEQ ID NO: 62085 - protein, 371 aa, Veillonella sp.
  misc_feature (1)..(371): tr|A0A2S7ZDZ8|A0A2S7ZDZ8_9FIRM Queuine tRNA-ribosyltran sferase OS=Veillonella sp. T34266-5 OX=2027457 GN=tgt P E=3 SV=1
MPSITYELQKTCPHTGARAGLLHTPHGTYETPMFMPVGTQATVKTMTPEELKAIGSQVILSNTYHLFLRPGPELVEEAGGLHKFMNWDQAILTDSGGFQVFSLGDMRKITEEGVTFRSHIDGSKQFLSPEVATKVQEQLGSDIAMAFDECIPYPAEHDYAKCSTARTTRWAHRCQEARHAHDRQGMFGIVQGGMYKDLRKQSAAELVAMDFEGYSIGGLSVGEPHDLMNEILEYTTTLLPTNKARYLMGVGTADCLVEGVARGIDMFDCVYPTRVARNGMAMTWHGRLNIRNAQYAHDWGPLEEGCQCYTCKNYSRAYLRHLYKAEEILALRLVTYHNLYFLLEFMRQMRKAILEDRFPQFRMQFWDNFNK

SEQ ID NO: 62086 - protein, 369 aa, Veillonella sp.
  misc_feature (1)..(369): tr|F9N535|F9N535_9FIRM Queuine tRNA-ribosyltransferase OS=Veillonella sp. oral taxon 780 str. F0422 OX=944564 GN=tgt PE=3 SV=1
MAIRYELQKQCPHTGARAGLLHTPHGTYETPMFMPVGTQATVKTLAPEELKAMGSQVILSNTYHLFLRPGADLVEEAGGLHKFMNWDQAILTDSGGFQVFSLGKLRKITEEGVNFRSHLDGSKKFLSPEVATKVQEQLGSDIMMAFDECIPYPADHRYADASTARTTRWAERCQEARRSKNQGMFGIVQGGMYKDLRERSAKELVDMDFEGYSIGGLSVGEPHDLMYEVLEYTTPLLPTNKARYLMGVGTADCLVEGVARGVDMFDCVYPTRVARNGMAMTWKGRLNLRNASFMRDWGPIEEGCGCYACQNYSRAYIRHLYKAEEILAFRLVSYHNLYFLLEFMRQMRKAILEDRFVAFREEFWQYFTK

SEQ ID NO: 62087 - protein, 371 aa, Veillonella tobetsuensis
  misc_feature (1)..(371): tr|A0A480BAX6|A0A480BAX6_9FIRM Queuine tRNA-ribosyltran sferase OS=Veillonella tobetsuensis OX=1110546 GN=tgt P E=3 SV=1
MPSITYELQKTCPHTGARAGLLHTPHGTYETPMFMPVGTQATVKTMTPEELKVIGSQVILSNTYHLFLRPGPELVEEAGGLHKFMNWDQAILTDSGGFQVFSLGDMRKITEEGVTFRSHIDGSKQFLSPEVATKVQEQLGSDIAMAFDECIPYPADHDYAKRSTARTTRWAHRCQEARRAHDRQGMFGIVQGGMYKDLRKQSAEELVAMDFEGYSIGGLSVGEPHDLMNEILEYTTPLLPTNKARYLMGVGTADCLVEGVARGIDMFDCVYPTRVARNGMAMTWHGRLNIRNAQFAHDWGPLEEGCQCYTCKNFSRAYVRHLYKAEEILALRLVTYHNLYFLLEFMRQMRKAILEDRFPQFRMQFWDNFNK

SEQ ID NO: 62088 - protein, 371 aa, Veillonella tobetsuensis
  misc_feature (1)..(371): tr|A0A2S7ZRT8|A0A2S7ZRT8_9FIRM Queuine tRNA-ribosyltran sferase OS=Veillonella tobetsuensis OX=1110546 GN=tgt P E=3 SV=1
MPSITYELQKTCPHTGARAGLLHTPHGTYETPMFMPVGTQATVKTMTPEELKVIGSQVILSNTYHLFLRPGPELVEEAGGLHKFMNWDQAILTDSGGFQVFSLGDMRKITEEGVTFRSHIDGSKQFLSPEVATKVQEQLGSDIAMAFDECIPYPADHDYAKRSTARTTRWAHRCQEARHAHDRQGMFGIVQGGMYKDLRKQSVAELVAMDFEGYSIGGLSVGEPHDLMNEILEYTTPLLPTNKARYLMGVGTADCLVEGVARGIDMFDCVYPTRVARNGMAMTWHGRLNIRNAQFAHDWGPLEEGCQCYTCKNFSRAYVRHLYKAEEILALRLVTYHNLYFLLEFMRQMRKAILEDRFPQFRMQFWDNFNK

SEQ ID NO: 62089 - protein, 389 aa, Veillonellaceae bacterium
  misc_feature (1)..(389): tr|A0A134CMV0|A0A134CMV0_9FIRM Queuine tRNA-ribosyltran sferase OS=Veillonellaceae bacterium DNF00626 OX=158875 4 GN=tgt PE=3 SV=1
MIGYMCIIFMRVIFLIGDIIMVIRYELIKEDKHTGARAGLLHTPHGTFKTPMFMPVGTQATVKTLTPNELYEMGAQIVLSNTYHLFLRPGTDLIRDAGELHRFMRWDKGILTDSGGFQVFSLGAMRKITEEGVYFRSFLDGSKQFLSPEVSIHAQENLGSDIAMAFDECIPYPADYEYAKHSTERTSRWAERCINAHTRTDRGMFGIVQGGMYKDLRKQSALDISSLPFDGLAIGGLSVGEPHDLMYDILEYTTEWLPQDKARYLMGVGTPDCLVEGVARGVDMFDCVFPTRVARNGMAMVHSGRMNMKNKKYERDFAPLEEGCGCYTCQTFTRAYIRHLYKSEELLAFRLVTIHNLYFLLQFMRDMREAILSDSFSDFRENFMAGYVK

SEQ ID NO: 62090 - protein, 368 aa, Veillonellaceae bacterium; identical to SEQ ID NO: 57424
  misc_feature (1)..(368): tr|A0A134CDE5|A0A134CDE5_9FIRM Queuine tRNA-ribosyltran sferase OS=Veillonellaceae bacterium KA00182 OX=1588748 GN=tgt PE=3 SV=1

SEQ ID NO: 62091 - protein, 370 aa, Ventosimonas gracilis
  misc_feature (1)..(370): tr|A0A139SUX4|A0A139SUX4_9GAMM Queuine tRNA-ribosyltran sferase OS=Ventosimonas gracilis OX=1680762 GN=tgt PE=3 SV=1
MRFERLASDGKARHGRLHFPRGVVETPAFMPVGTYGTVKGMLPRDIEAIGAQIVLGNTFHLWLRPGTEVIEKLGDLHDFMQWQRPILTDSGGFQVFSLGKLRKIREEGVHFASPVDGRKVFMGPEESIAVQRSLGSDIVMIFDECTPYPADFASAQRSMELSLRWAARSKAAHSGSSAALFGIIQGGMYQDLRLRSLEGLAQIGFDGLAIGGLSVGEPKDEMRRVLDFLPEAMPPELPRYLMGVGTPEDLVEGVRRGVDMFDCVMPTRNARNGYLFTESGILKIRNAKNRHDDSAVDPGCDCYCCLHFSRAYLHHLDKCGEMLAPMLMTIHNLRYYQRLMAGLRDAIEQGKLADFSHAFYAKRGQSCPSV

SEQ ID NO: 62092 - protein, 390 aa, Verminephrobacter eiseniae
  misc_feature (1)..(390): sp|A1WFH2|TGT_VEREI Queuine tRNA-ribosyltransferase OS= Verminephrobacter eiseniae (strain EF01-2) OX=391735 GN =tgt PE=3 SV=1
MLQFDLLTTDPASHARRGRLTLRHGQVQTPIFMPVGTHGSVKGVLPRSLHEMGAQIILGNTFHLWLRPGLAVLQGFGGLHGFEKWNKPILTDSGGFQVWSLGALRTITEEGVHFASPVNGDKLFLSPEVSMQIQTTLDSDIVMQLDECTPYETRGQRTTERAACQSMQMSLRWAKRSQDEFQRLNNPNALFGIVQGGMYENLRAESLAALAAMDLPGYAIGGVSVGEPKDEMLRIMAHTPHRLPAHKPRYLMGVGTPEDLVEGVAQGVDMFDCVMPTRNARNGTLFTRFGDLKIRNARHKTDPQPLDGSCTCYTCAGPSGVAWDQGGRDGFSRAYLHHLERCGEMLGPMLSTVHNLHYYLNLMREIRQALDAGEFTQLRARLKADRARGV

SEQ ID NO: 62093 - protein, 390 aa, Verminephrobacter sp.
  misc_feature (1)..(390): tr|A0A4Q2LZB8|A0A4Q2LZB8_9BURK Queuine tRNA-ribosyltran sferase OS=Verminephrobacter sp. Larva24 OX=2509434 GN= tgt PE=3 SV=1
MLQFDLLTTDPASHARRGRLTLRHGQVQTPIFMPVGTHGSVKGVLPRSLHEMGAQIILGNTFHLWLRPGLAVLQGFGGLHGFEKWNKPILTDSGGFQVWSLGALRTITEEGVHFASPVNGDKLFLSPEVSMQIQTTLDSDIVMQLDECTPYETRGQRTTERAACQSMQMSLRWAKRSQDEFQRLNNPNALFGIVQGGMYENLRAESLAALAAMDLPGYAIGGVSVGEPKDEMLRIMAHTPHRLPAHKPRYLMGVGTPEDLLEGVAQGVDMFDCVMPTRNARNGTLFTRFGDLKIRNARHKTDPQPLDGSCTCYTCAGPSGVAWDQGGRDGFSRAYLHHLERCGEMLGPMLSTVHNLHYYLNLMREIRQALDAGEFTQLRARLKADRARGV

SEQ ID NO: 62094 - protein, 405 aa, Verrucomicrobia bacterium
  misc_feature (1)..(405): tr|A0A1Q6V4A1|A0A1Q6V4A1_9BACT Queuine tRNA-ribosyltran sferase OS=Verrucomicrobia bacterium 13_2_20CM_55_10 OX =1805420 GN=tgt PE=3 SV=1
MFELFTQDRQSKARRGRVGTLHGVVETPAFMPVGTQGTVKAVTPRELHELKAQIVLGNTYHLFVRPGLDVIKHFGGLHKFMNWDGPILTDSGGYQIFSLAKLRKITEDGVEFQNHLDGARAFISPEIAMEIQVALGSDIAMALDECVPYPCQYDYAAQSAEMTTRWARRCKEALQGRREENVQRSKPNAQHPRAEPIQSAIRNPQSAIERQLLFGIVQGATFDDLRKASAQAIVELDFDGYAIGGVSVGEPEDEMMRAVESAEPFLPHDKPRYAMGLGTPPQLLEMIARGMDMFDCVLPTRLARNGTAFTATGTINLKNAEVARDKRPIEENCTCPACREFSRGYIRHLIKAEEILGLRLITLHNLHFYLYLMNRARTEIERQSFDKFRRASVAEYKTRDATTAA

SEQ ID NO: 62095 - protein, 401 aa, Verrucomicrobia bacterium
  misc_feature (1)..(401): tr|A0A2V6EZA3|A0A2V6EZA3_9BACT Queuine tRNA-ribosyltran sferase OS=Verrucomicrobia bacterium OX=2026799 GN=tgt PE=3 SV=1
MFELLAQDRQSRARHGRLTTAHGAIKTPAFVPVGTQGSVKAVSPRELRELNAPIVLGNTYHLFVRPGIEVIKHFGGLHKFMTWDRPILTDSGGYQIFSLAKLRKISENGVHFQNHVDGSPAFISPESAMEIQAALGSDIAMVLDECPPWPCEYDYAAKSAEMTTRWAKRCKEWTKENAQLPTSNAEPPTSNIEDRTTDIGQSAIDRQLVFGIVQGATFGELREQSAQAIVDLDFDGYAIGGVSVGEPEEEMFRAVESSEPFLPNEKPRYAMGLGTPPQLLEMISRGMDMFDCVLPTRLARNGTAFTATGTLNLKNAEYAKDRRPIEEDCVCSSCREFSRGYVRHLIKAEEILGLRLITLHNLHFYLDLMRQARDKIDKGTFDEFRREFVSNYETRDVDIAV

SEQ ID NO: 62096 - protein, 385 aa, Verrucomicrobia subdivision
  misc_feature (1)..(385): tr|A0A0R2RJ17|A0A0R2RJ17_9BACT Queuine tRNA-ribosyltran sferase OS=Verrucomicrobia subdivision 6 bacterium BACL 9 MAG-120507-bin52 OX=1655590 GN=tgt PE=3 SV=1
MKSAGEVFRLEKSDGAARAGVVQTAHGDFQTPVFMPVGTQASVKGVSPDELTEMGAKIILGNTYHLVVRPGLEVMGQMGGLHKFMRWDGPILTDSGGFQVFSLAKIREVKEEGVWFSSHVDGKKLFLGPKEAVRAQVALGSDIMMAFDECPPWPCSREVLEKSLERTLRWAKICREEQGVSGTKNLLFGIVQGGDQADLRQKSCEGLLHIGFDGYAVGGVSVGEPEREMMRAIDASMPFLPMDRPRYVMGLGHPDQMVRMIGKGVDMFDCVLPTRVARNGTACTVTGPTSVRKANWTRDEGPIVKDCGCYTCLRFSRAYIQHLIKAEELLGLRLISLHNLYFNLETLRQARRAILEDRWQSWSRDFLERYQRGGSSKEEEDSHDV

SEQ ID NO: 62097 - protein, 387 aa, Verrucomicrobia subdivision
  misc_feature (1)..(387): tr|A0A520RTH9|A0A520RTH9_9BACT Queuine tRNA-ribosyltran sferase OS=Verrucomicrobia subdivision 3 bacterium OX=2 052186 GN=tgt PE=3 SV=1
MFELLKTDAGSKARRGRLTTAHGVIETPVFMPVGTQASVKALDPRELHEMGTQIVLGNTYHLAIRPGMDIMNEAGGLHRFMNWDLPILTDSGGFQVFSLAKIRKIRQDGVEFRSHLDGSPLFLGPKEAMKIQRELGSDIAMAFDQCPNHDAPVSEMKETVDRTLRWARLCLEQPRAEGQLIFGIGQGGSNAELREYCAKALCKMDFDGFAIGGVSVGEPEPEMMKAVEYTEPFLPADKARYAMGLGTPAQLVELVARGVDMFDCVLPTRVARNGTAFTKKGTISIKAGYNKRDWNPIEEDCECYACRHFTKAYLRHLLNVDEILGLRMLSVHNSHMFLDLMRNIRLHLDNGTFSEYRREFIAGYTPTLKVLEQRARHAESQQESSSK

SEQ ID NO: 62098 - protein, 375 aa, Verrucomicrobiaceae bacterium
  misc_feature (1)..(375): tr|A0A1Z9FMG0|A0A1Z9FMG0_9BACT Queuine tRNA-ribosyltran sferase OS=Verrucomicrobiaceae bacterium TMED137 OX=198 6879 GN=tgt PE=3 SV=1
MFELLQTDPDCKARRGRLTTPHGVIETPIFMPVGTQGSVKTLHPEDLHLMEAQIILGNTYHLWLRPGTNVISKLGGLHSFTTWDGPILTDSGGFQVWSLSKIRKISEEGVNFQSHLDGTRMMLSPEKSMEIQATFGSDIAMLFDECPPYPCERKYAEESTALTTRWGKRCKEWVETNRPTSGNGRQLHFGIVQGSVYRDLREESARALVDLDLDGYAIGGVSVGEPEEEMFAAIQNTEPFLPGNKPRYAMGLGTPTQLLEMISQGVDMFDCVHPTRCARHGQAFTPDGPVHIKNKCFEFDSAPLTAEAHPHVARFSRAFLRHSFRAGEIIAQRVLSFHNLHFYLQLMENSRQAIAEGRFREFQREFVERYTAGAK

SEQ ID NO: 62099 - protein, 379 aa, Verrucomicrobiaceae bacterium
  misc_feature (1)..(379): tr|A0A1Z8ZPY6|A0A1Z8ZPY6_9BACT Queuine tRNA-ribosyltran sferase OS=Verrucomicrobiaceae bacterium TMED86 OX=1986 881 GN=tgt PE=3 SV=1
MFELLSTDPDCKARRGRLTTPHGVIETPIFMPVGTQGSVKTLHPEDLQAMDAQIILGNTYHLWLRPGTEVIAKLGGLHGFTTWDGPILTDSGGFQVWSLSKIRKITEAGVEFRSHLDGSKMMLSPEKSMEIQATFGSDIAMLFDECPPYPCERKYAEESTDLTTRWAKRCKAWVEEQRPTSGEGRQLHFGIVQGSVYPDLREKSARALVDLDFDGYAIGGVSVGEPEEEMFAAIQNAEPFLPQDKPRYAMGLGTPTQLLEMIGQGVDMFDCVHPTRCARHGQAFTPDGPIHIKNKEFEFDVSPLSEDAHPHVARFSKAFLRHSFRAGEIIAQRVLSFHNLHFYLKLMENTRSAIEEGCFREFQSDFVSRYTAKKSKPNH

SEQ ID NO: 62100 - protein, 377 aa, Verrucomicrobiae bacterium
  misc_feature (1)..(377): tr|A0A2A2Q2R1|A0A2A2Q2R1_9BACT Queuine tRNA-ribosyltran sferase OS=Verrucomicrobiae bacterium Tous-C2TDCM OX=19 82329 GN=tgt PE=3 SV=1
MFTLLHTDSRTAARRGRMTLAHGEVETPCFMPVGTRGTVKSVHPAELSDPALDCRILLGNTYHLFLRPGTEVLDHFGGLHEFMCWQRPILTDSGGYQVFSLSKLRKLTEEGVRFQSHLDGSPVHLTPESVLEIQRSIGSDICMILDECPPFPCEREYAEKSLALTQRWAVRAREWVAKHQPKGQRHFGIVQGSCFPDLRERAARDLVDLDFDGYAIGGLSVGEPIPEMLKAVDIAAPILPAHKPRYAMGLGQPDQLLELISRGIDMFDCVLPTRVARNGTAYTADGTINLKNARWEKSRDPLGPTGSTHPLCEGFTLGYLRHLIKNDELLGLRLLSLHNLAFYLDLMKQAQRAIEGGSFADFKETFIRRYRAGRSEA

SEQ ID NO: 62101 - protein, 371 aa, Verrucomicrobiae bacterium
  misc_feature (1)..(371): tr|A0A2A2YE44|A0A2A2YE44_9BACT Queuine tRNA-ribosyltran sferase OS=Verrucomicrobiae bacterium AMD-G2 OX=1982328 GN=tgt PE=3 SV=1
MLKTDTESKARLGRLDLPHGTVETPIFMPVGTQGAVKTLHPDDLDALGAQIILGNTYHLWLRPGHELIKEFGGLHEFTSWEKPILTDSGGFQVWSLAKLRKITEEGVRFQNHLDGSEMMLTPELSMEIQAAIGSDIAMLFDECPPYPCDEKYAANSLALTTRWAHRCKDWVTTHEPRSGEGRQQHFGIVQGSIYAEMREQSARELAAMDFDGYAIGGVSVGEPEEEMFRAIDNAVPFLPDHKPRYAMGLGTPPQILEMIGRGVDMFDCVMPTRIARHGTAFTLDGPIQIKNLAFAKDPRPLCETAHPHVARFSRAYIRHLFRAGEILSLRLLSFHNLHFYLRLVSDARAAIAEGTFLSFKNSFNKRYLKLL

SEQ ID NO: 62102 - protein, 387 aa, Verrucomicrobiales bacterium
  misc_feature (1)..(387): tr|A0A353DXU2|A0A353DXU2_9BACT Queuine tRNA-ribosyltran sferase OS=Verrucomicrobiales bacterium OX=2026801 GN=t gt PE=3 SV=1
MFTLLKKDPSSRARRGRLATAHGVIETPVFMPVGTQASVKALDPRELLEMGSQIVLGNTYHLALRPGMDIMQEAGGLHRFMNWDLPILTDSGGFQVFSLAKIRQVSQEGVAFKSHLDGSTLFLGPKEAMAIQRQLGSDIAMAFDQCPAHDAPEGEMKEAVDRTLRWAAACLEQPRAVGQQVFGIVQGGSHPEIRESCAQALCKMDFDGYAIGGVSVGEPEPEMMKAVEFTEPLLPENKARYAMGLGTPAQLVELVARGVDMFDCVLPTRVARNGTAFTKEGTISIKAGYNKRDWRPIEEDCNCYACQHFTRAYLRHLLNVNEILGLRMLSVHNSHMYLALMRDIRRHLDEGTFEAFRASFAATYRPTQKILDQRAAHALREQESPSN

SEQ ID NO: 62103 - protein, 387 aa, Verrucomicrobiales bacterium; identical to SEQ ID NO: 62097
  misc_feature (1)..(387): tr|A0A350I3Y7|A0A350I3Y7_9BACT Queuine tRNA-ribosyltran sferase OS=Verrucomicrobiales bacterium OX=2026801 GN=t gt PE=3 SV=1

SEQ ID NO: 62104 - protein, 396 aa, Verrucomicrobium sp.
  misc_feature (1)..(396): tr|A0A1H2DUX7|A0A1H2DUX7_9BACT Queuine tRNA-ribosyltran sferase OS=Verrucomicrobium sp. GAS474 OX=1882831 GN=tg t PE=3 SV=1
MSFQLTHTDPSSRARAGVLTTEHGTIETPVFMPVGTQGSVKAVFGRDLREMKTQILLGNTYHLFIRPGIDDMRTYGGLHKFMNWDGPILTDSGGFQVFSLAPLRKLVEDGVHFRSHISGEPLFLGTKESIGMQVAIGSDIMMVLDECPPWPCEPEPARAAVERTVRWAADCKRIAAELAASEVNRPTKNQLLFGIVQGGSHADLRKECAQRLVEIGFDGYAIGGVSVGEPEPEMMASIEMAEPYLPADKPRYAMGLGQPWQLVELVARGVDMFDCVLPTRMARHGTVYSRDGHFHLKTSPYRLDERPLDPECGCYACKNYTRAYIRHLLKTEEIVGLMLVSLHNSHFYLDFMREVRAAIIAGTFADYRRAFRERYRIPGKNLGEHRSDLKRKNDNE

SEQ ID NO: 62105 - protein, 388 aa, Verticiella sediminum
  misc_feature (1)..(388): tr|A0A556AQA0|A0A556AQA0_9BURK Queuine tRNA-ribosyltran sferase OS=Verticiella sediminum OX=1247510 GN=tgt PE=3 SV=1
MTHTTPLASSSRPGLTFELLATDGKARRGRLLLNHGEVHTPMFMPVGTYGSVKAMDPVELRQIGSQVILGNTFHLWLRPGTEIMQAHGGLHGFMQWPGPILTDSGGFQVFSLQGMRKITEEGVRFASPIDGARLFLTPEESMRIQRALDSDIAMVFDECTPYKIGERPATQEEAARSMRMSLRWAQRSRDSFEALENPNALFGIVQGGMFEGLRDESLAGLVDIGFHGYAIGGLSVGEPKEDMLRILAHVAPRLPVDAPRYLMGVGTPEDLVEGVANGVDMFDCVMPTRNARNGWLFTRYGDIKIRNARYRDDTAPLDESCACPTCTRFTRAYLHHLQRANEILGARLNTLHNLYFYLQIMREMREAIAAGTFESWRARFAADRARGV

SEQ ID NO: 62106 - protein, 370 aa, Vesicomyosocius okutanii
  misc_feature (1)..(370): sp|A5CW46|TGT_VESOH Queuine tRNA-ribosyltransferase OS= Vesicomyosocius okutanii subsp. Calyptogena okutanii (s train HA) OX=412965 GN=tgt PE=3 SV=1
MKFELKNTNYLARRGKIIFDRGEVETPSFMPVGTYGSVKAMTPEELSSFGTQMILGNSFHLAITPGIDVVQAHGNLHDFMHWKGPILTDSGGFQVFSLGETRKISEKGVDFRSPKDGAKIFMGPEESIQIQKKLGSDIVMIFDECTPYPADKKTVYKSMQLSLRWAQRSKNEHDRLNNKNALFGIVQGGMHEDLRIQSAATLVEIGFNGFAIGGLSVGESKEEMIKVLDYLPSQLPSDKLRYLMGVGTPKDLVEAVERGIDMFDCVMPTRNARNGYLFTSIGIVKIRNARYRLDTSVLDECCHCYTCQNYSKSYLHHLQRKNEILGARLNTIHNLYYYQYLMLQMRRAIESNKFSKFKKEFYQQQGHDTL

SEQ ID NO: 62107 - protein, 381 aa, Vespertiliibacter pulmonis
  misc_feature (1)..(381): tr|A0A3N4VWH9|A0A3N4VWH9_9PAST Queuine tRNA-ribosyltran sferase OS=Vespertiliibacter pulmonis OX=1443036 GN=tgt PE=3 SV=1
MKYELKKTDGNARRGRLTFSRPKGEYHVETPAFMPVGTYGTVKGMTPEEVAATGAQILLGNTFHLWLRPGQEIMKMHGDLHDFMQWHGPILTDSGGFQVFSLGKLRKIKEEGVTFQNPISGEKIFLSPEKSMEIQYDLGSDIVMIFDECTPYPATFDYAKQSMEMSLRWAKRSRDRFDELENPNALFGIIQGGVYEELRKVSVEKLVEIGFDGYAVGGLAVGEPKEDMHRILEYVCPQIPADKPRYLMGVGKPEDLVEGVRRGIDMFDCVMPTRNARNGHLFVSNGIVKIRNAKYRNDISPLDPECDCYTCKNYTKAYLYHLDKCGEILGARLNTIHNLRYYQRLMAQIRQAIDDDRFDEFVVEFYQKIGKEVPPLQLSSE

SEQ ID NO: 62108 - protein, 377 aa, Vibrio aerogenes
  misc_feature (1)..(377): tr|A0A1M5YYD4|A0A1M5YYD4_9VIBR Queuine tRNA-ribosyltran sferase OS=Vibrio aerogenes CECT 7868 OX=1216006 GN=tgt PE=3 SV=1
MKLKFELKKKNGNARRGQIQFERGTVQTPVFMPVGTYGTVKGMTPEEVKETGAEILLGNTFHLWLRPGQEIMKMHGDLHDFMNWQGPILTDSGGFQVFSLGDIRKITEEGVHFRNPVNGEKIFMDAEKSMEIQRDLGSDIVMIFDECTPYPASHDEAKSSMEMSLRWAKRSRDHFDQLENPNSLFGIVQGSVYEDLRDISAKGLTDIGFDGYAVGGLAVGEPKEDMHRILEHTCPLLPEDKPRYLMGVGKPEDLVEGVRRGIDMFDCVMPTRNARNGHLFVTGGVVKIRNAKHKTDTTPLDPECDCYTCKNYSKSYLHHLDRCNEILGARLNTIHNLRYYQRLMASIRQAIEADRFEEFVTEFYARRDRDVPPVGQV

SEQ ID NO: 62109 - protein, 377 aa, Vibrio agarivorans
  misc_feature (1)..(377): tr|A0A2K1CK00|A0A2K1CK00_9VIBR Queuine tRNA-ribosyltran sferase OS=Vibrio agarivorans OX=153622 GN=tgt PE=3 SV= 1
MKLKFDLKKKDGVARRGQLTFERGTVQTPAFMPVGTYGTVKGMTPEEVKGTGAEILLGNTFHLWLRPGQEVMKMHGDLHDFMNWQGPILTDSGGFQVFSLGSMRTITEKGVHFRNPVNGDKIFMDAEKSMEIQKDLGSDIVMIFDECTPYPATHDEAKKSMEMSLRWAQRSRDHFDKLENPNNLFGIVQGGVYEDLRDVSVKGLTEIGFDGYAVGGLAVGEPKEDMHRVLEHTCPQLPEDKPRYLMGVGKPEDLVEGVRRGIDMFDCVMPTRNARNGHLFVTGGVIKIRNAKHKTDTTPLDPHCDCYTCQNYSKAYLHHLERCNEILGARLNTIHNLRYYQRLMESIRNAIDEDRFDEFVAEFYARRDREVPPLSKA

SEQ ID NO: 62110 - protein, 377 aa, Vibrio alfacsensis
  misc_feature (1)..(377): tr|A0A347USI7|A0A347USI7_9VIBR Queuine tRNA-ribosyltran sferase OS=Vibrio alfacsensis OX=1074311 GN=tgt PE=3 SV =1
MKLKFDLKKKNGNARRGQLTFERGTVQTPAFMPVGTYGTVKGMTPEEVKGTGAEILLGNTFHLWLRPGQEVMKMHGDLHDFMNWHGPILTDSGGFQVFSLGKMRTITEQGVHFRNPVNGDKIFMDAEKSMEIQKDLGSDIVMIFDECTPYPATHDEAKKSMEMSLRWAQRSRDHFDKLENPNNLFGIVQGGVYEDLRDVSVKGLTEIGFDGYAVGGLAVGEPKEDMHRILEHTCPQLPEDKPRYLMGVGKPEDLVEGVRRGIDMFDCVMPTRNARNGHLFVTGGVIKIRNAKHKTDTTPLDPHCDCYTCQNYSKSYLHHLERCNEILGARLNTIHNLRYYQRLMESIRKAIDEDRFDEFVQEFYARRDREVPPLGEA

SEQ ID NO: 62111 - protein, 378 aa, Vibrio alginolyticus
  misc_feature (1)..(378): tr|D0WU67|D0WU67_VIBAL Queuine tRNA-ribosyltransferase OS=Vibrio alginolyticus 40B OX=674977 GN=tgt PE=3 SV=1
MKLKFDLKKKNGNARRGQLTFERGTVQTPAFMPVGTYGTVKGMTPEEVKGTGAEILLGNTFHLWLRPGQEVMKMHGDLHDFMNWHGPILTDSGGFQVFSLGKMRTITEEGVHFRNPVNGDKIFMDAEKSMEIQKDLGSDIVMIFDECTPYPATHDEAKKSMEMSLRWAQRSRDHFEKLENPNNLFGIVQGGVYEDLRDVSVKGLTEIGFDGYAVGGLAVGEPKEDMHRILEHTCPQLPEDKPRYLMGVGKPEDLVEGVRRGIDMFDCVMPTRNARNGHLFVTGGVIKIRNAKHKTDTTPLDPHCDCYTCQNYSKSYLHHLERCNEILGARLNTIHNLRYYQRLMESIRKAIDEDRFDEFVTEFYERRGREVPPLAKEQ

SEQ ID NO: 62112 - protein, 378 aa, Vibrio alginolyticus; identical to SEQ ID NO: 62111
  misc_feature (1)..(378): tr|A0A0H0YFJ4|A0A0H0YFJ4_VIBAL Queuine tRNA-ribosyltran sferase OS=Vibrio alginolyticus OX=663 GN=tgt PE=3 SV=1

SEQ ID NO: 62113 - protein, 383 aa, Vibrio algivorus
  misc_feature (1)..(383): tr|A0A557P6H7|A0A557P6H7_9VIBR Queuine tRNA-ribosyltran sferase OS=Vibrio algivorus OX=1667024 GN=tgt PE=3 SV=1
MKYELIKKDGVARRGRLTFKRGSVETPAFMPVGTYGTVKGMTPEEVKDTGAEILLGNTFHLWLRPGQEVMKLHGDLHDFMNWQGPILTDSGGFQVFSLGKMRKITEEGVHFRNPVNGDRIFMDAEKSMEIQKDLGSDIVMIFDECTPYPATHEEARKSMEMSLRWAQRSRDHFDKLENPNALFGIVQGGVYGDLRDVSVKGLTEIGFDGYAVGGLAVGEPKEDMHHMLEHTCPQLPEDKPRYLMGVGKPEDLVEGVRRGIDMFDCVMPTRNARNGHLFVTGGVVKIRNASHKTDTSPLDPHCDCYTCKNYSKSYLHHLDRCNEILGARLNTIHNLRYYQRLMASIRLAIDEDRFEEFVQEFYARRDREVPPLQKELRMSDSSQ

SEQ ID NO: 62114 - protein, 376 aa, Vibrio anguillarum
  misc_feature (1)..(376): tr|A0A1Y0P179|A0A1Y0P179_VIBAN Queuine tRNA-ribosyltran sferase OS=Vibrio anguillarum OX=55601 GN=tgt PE=3 SV=1
MKLTYELKKKNGNARRGQLTFERGTVQTPAFMPVGTYGTVKGMTPEEVKETGAEILLGNTFHLWLRPGQEVMKMHGDLHDFMNWQGPILTDSGGFQVFSLGDIRKITEEGVHFRNPVNGDKIFMDAEKSMEIQKDLGSDIVMIFDECTPYPATHDEAKKSMEMSLRWAQRSRDHFDKLENTNSLFGIVQGSVYEDLRDVSVKGLTEIGFDGYAVGGLAVGEPKEDMHRVLEHTCPQLPEDKPRYLMGVGKPEDLVEGVRRGIDMFDCVMPTRNARNGHLFVTGGVIKIRNAVHKTDTTALDPHCDCYTCKNYSKSYLHHLDRCNEILGARLNTIHNLRYYQRLMASIRLAIEEDRFDAFVEEFYARRNREVPPMGQ

SEQ ID NO: 62115 - protein, 394 aa, Vibrio anguillarum
  misc_feature (1)..(394): tr|F7YNK9|F7YNK9_VIBA7 Queuine tRNA-ribosyltransferase OS=Vibrio anguillarum (strain ATCC 68554 / 775) OX=8821 02 GN=tgt PE=3 SV=1
MLAPNHDTSDCFSDIGGFVKLTYELKKKNGNARRGQLTFERGTVQTPAFMPVGTYGTVKGMTPEEVKETGAEILLGNTFHLWLRPGQEVMKMHGDLHDFMNWQGPILTDSGGFQVFSLGDIRKITEEGVHFRNPVNGDKIFMDAEKSMEIQKDLGSDIVMIFDECTPYPATHDEAKKSMEMSLRWAQRSRDHFDKLENTNSLFGIVQGSVYEDLRDVSVKGLTEIGFDGYAVGGLAVGEPKEDMHRVLEHTCPQLPEDKPRYLMGVGKPEDLVEGVRRGIDMFDCVMPTRNARNGHLFVTGGVIKIRNAVHKTDTTALDPHCDCYTCKNYSKSYLHHLDRCNEILGARLNTIHNLRYYQRLMASIRLAIEEDRFDAFVEEFYARRNREVPPMGQ

SEQ ID NO: 62116 - protein, 382 aa, Vibrio antiquarius
  misc_feature (1)..(382): tr|A7K196|A7K196_VIBAE Queuine tRNA-ribosyltransferase OS=Vibrio antiquarius (strain Ex25) OX=150340 GN=tgt PE =3 SV=1
MKLKFDLKKKNGNARRGQLTFERGTVQTPAFMPVGTYGTVKGMTPEEVKGTGAEILLGNTFHLWLRPGQEVMKMHGDLHDFMNWHGPILTDSGGFQVFSLGKMRTITEEGVHFRNPVNGDKIFMDAEKSMEIQKDLGSDIVMIFDECTPYPATHDEAKKSMEMSLRWAQRSRDHFEKLENPNNLFGIVQGGVYEDLRDVSVKGLTEIGFDGYAVGGLAVGEPKEDMHRILEHTCPQLPEDKPRYLMGVGKPEDLVEGVRRGIDMFDCVMPTRNARNGHLFVTGGVIKIRNAKHKTDTTPLDPHCDCYTCQNYSKSYLHHLERCNEILGARLNTIHNLRYYQRLMESIRKAIDEDRFDEFVTEFYERRGREVPPLAKEQSLTD

SEQ ID NO: 62117 - protein, 378 aa, Vibrio atlanticus
  misc_feature (1)..(378): tr|A0A558GP63|A0A558GP63_9VIBR Queuine tRNA-ribosyltran sferase OS=Vibrio atlanticus OX=693153 GN=tgt PE=3 SV=1
MKLKYELKKTNSGARRGQLQFERGSVETPAFMPVGTYGTVKGMTPEEVKDTGAEILLGNTFHLWLRPGQEIMKLHGDLHDFMNWKGPILTDSGGFQVFSLGATRKITEEGVHFRNPVNGDKIFMDAEKSMEIQKDLGSDIVMIFDECTPYPATHKEAKDSMEMSLRWAQRSRNHFDKQENPNSLFGIVQGGVYEDLRDVSVKGLTEIGFDGYAVGGLAVGEPKEDMHRILEHTCPQLPEDKPRYLMGVGKPEDLVEGVRRGIDMFDCVMPTRNARNGHLFVTEGVIKIRNAKHKTDTTPLDSDCDCYTCKNYSKSYLHHLDRCNEILGARLNTIHNLRFYQRIMSDIRQSIDEDRFEEFVAEFYARMGREVPPLGKES

SEQ ID NO: 62118 - protein, 378 aa, Vibrio atlanticus
  misc_feature (1)..(378): tr|A0A1C3IKH1|A0A1C3IKH1_9VIBR Queuine tRNA-ribosyltran sferase OS=Vibrio atlanticus OX=693153 GN=tgt PE=3 SV=1
MKLKYELKKTNSGARRGQLQFERGTVETPAFMPVGTYGTVKGMTPEEVKDTGAEILLGNTFHLWLRPGQEIMKLHGDLHDFMNWKGPILTDSGGFQVFSLGATRKITEEGVHFRNPVNGDKIFMDAEKSMEIQKDLGSDIVMIFDECTPYPATHKEAKDSMEMSLRWAQRSRNHFDKQENPNSLFGIVQGGVYEDLRDVSVKGLTEIGFDGYAVGGLAVGEPKEDMHRILEHTCPQLPEDKPRYLMGVGKPEDLVEGVRRGIDMFDCVMPTRNARNGHLFVTEGVIKIRNAKHKTDTTPLDSECDCYTCKNYSKSYLHHLDRCNEILGARLNTIHNLRFYQRVMSDIRQSIDEDRFEEFVAEFYARMGREVPPLGKES

SEQ ID NO: 62119 - protein, 377 aa, Vibrio azureus
  misc_feature (1)..(377): tr|U3AT90|U3AT90_9VIBR Queuine tRNA-ribosyltransferase OS=Vibrio azureus NBRC 104587 OX=1219077 GN=tgt PE=3 SV =1
MKLKFDLKKKDGVARRGQLTFERGTVQTPAFMPVGTYGTVKGMTPEEVKGTGAEILLGNTFHLWLRPGQEVMKLHGDLHDFMNWQGPILTDSGGFQVFSLGKMRTITEKGVHFRNPVNGDKIFMDAEKSMEIQKDLGSDIVMIFDECTPYPATHDEAKKSMEMSLRWAQRSRDHFDKLENPNNLFGIVQGGVYEDLRDVSVKGLTEIGFDGYAVGGLAVGEPKEDMHRVLEHTCPQLPEDKPRYLMGVGKPEDLVEGVRRGIDMFDCVMPTRNARNGHLFVTGGVIKIRNAKHKTDTTPLDPHCDCYTCQNYSKAYLHHLERCNEILGARLNTIHNLRYYQRLMESIRNAIDEDRFDEFVAEFYARRDREVPPLSKA

SEQ ID NO: 62120 - protein, 377 aa, Vibrio barjaei
  misc_feature (1)..(377): tr|A0A1J4QV78|A0A1J4QV78_9VIBR Queuine tRNA-ribosyltran sferase OS=Vibrio barjaei OX=1676683 GN=tgt PE=3 SV=1
MKLQYELKKKNGHARRGQLTFERGTVQTPAFMPVGTYGTVKGMTPEEVKGTGAEILLGNTFHLWLRPGQEIMKMHGDLHDFMNWHGPILTDSGGFQVFSLGDIRKITEEGVHFRNPVNGDKIFMDAEKSMEIQKDLGSDVVMIFDECTPYPATHAEAKKSMEMSLRWAQRSRDHFDKLENPNSLFGIVQGSVYEDLRDVSVEGLTNIGFDGYAVGGLAVGEPKEDMHRVLEHTTPKLPEDKPRYLMGVGKPEDLVEGVRRGIDMFDCVMPTRNARNGHLFVTGGIVKIRNATNKTDTGPLDEHCDCYTCKNYSKAYLHHLDRCNEILGARLNTIHNLRYYQRLMESIRTAIDEDRFDEFVEEFYARRNREVPPLDMK

SEQ ID NO: 62121 - protein, 378 aa, Vibrio bivalvicida
  misc_feature (1)..(378): tr|A0A177XVH1|A0A177XVH1_9VIBR Queuine tRNA-ribosyltran sferase OS=Vibrio bivalvicida OX=1276888 GN=tgt PE=3 SV =1
MKLKFDLKKKDGVARRGQLTFERGTVQTPAFMPVGTYGTVKGMTPEEVKGTGAEILLGNTFHLWLRPGQEVMKMHGDLHDFMNWHGPILTDSGGFQVFSLGKMRTITEQGVHFRNPVNGDKIFMDAEKSMEIQKDLGSDIVMIFDECTPYPATHDEAKKSMEMSLRWAQRSRDHFDKLENPNNLFGIVQGGVYEDLRDVSVKGLTEIGFDGYAVGGLAVGEPKEDMHRILEHTCPQLPEDKPRYLMGVGKPEDLVEGVRRGIDMFDCVMPTRNARNGHLFVTGGVIKIRNAKHKTDTTPLDPYCDCYTCQNYSKSYLHHLERCNEILGARLNTIHNLRYYQRLMESIRKAIDEDRFDEFVTEFYERRGREVPPLAKEQ

SEQ ID NO: 62122 - protein, 378 aa, Vibrio brasiliensis
  misc_feature (1)..(378): tr|E8LPX3|E8LPX3_9VIBR Queuine tRNA-ribosyltransferase OS=Vibrio brasiliensis LMG 20546 OX=945543 GN=tgt PE=3 SV=1
MKLKFDLKKKDGVARRGQLTFERGTVQTPAFMPVGTYGTVKGMTPEEVKGTGAEILLGNTFHLWLRPGQEVMKMHGDLHDFMNWQGPILTDSGGFQVFSLGKMRTITEQGVHFRNPVNGDKIFMDAEKSMEIQKDLGSDIVMIFDECTPYPATHDEAKKSMEMSLRWAQRSRDHFDKLENPNNLFGIVQGGVYEDLRDVSVKGLTEIGFDGYAVGGLAVGEPKEDMHRILEHTCPQLPEDKPRYLMGVGKPEDLVEGVRRGIDMFDCVMPTRNARNGHLFVTGGVIKIRNAKHKTDTTALDPHCDCYTCQNYSKSYLHHLERCNEILGARLNTIHNLRYYQRLMESIRNAIDEDRFDEFVKEFYERRGREVPPLAKEQ

SEQ ID NO: 62123 - protein, 378 aa, Vibrio breoganii
  misc_feature (1)..(378): tr|A0A193K9Q3|A0A193K9Q3_9VIBR Queuine tRNA-ribosyltran sferase OS=Vibrio breoganii OX=553239 GN=tgt PE=3 SV=1
MKFELKKNDGTARRGQLQFERGSVQTPAFMPVGTYGTVKGMTPEEVKGTGAEILLGNTFHLWLRPGQEVMKLHGDLHDFMNWQGPILTDSGGFQVFSLGDIRKITEKGVHFRNPVNGDKIFMDAEKSMEIQKDLGSDVVMIFDECTPYPATHNEAKKSMEMSLRWAQRSRDHFDKLENPNSLFGIVQGGVYEDLRDVSVEGLTKIGFDGYAVGGLAVGEPKEDMHRILEHTCPQLPEDKPRYLMGVGKPEDLVEGVRRGIDMFDCVMPTRNARNGHLFVTGGVIKIRNAKHKTDTTPLDPECDCYTCQNYSKSYLHHLDRCNEILGSRLNTIHNLRYYQRLMESIRTAIDEDRFESFVEEFYARRDRDVPPMLKADAE

SEQ ID NO: 62124 - protein, 378 aa, Vibrio breoganii
  misc_feature (1)..(378): tr|A0A2N7HEV8|A0A2N7HEV8_9VIBR Queuine tRNA-ribosyltran sferase OS=Vibrio breoganii OX=553239 GN=tgt PE=3 SV=1
MKFELKKNDGTARRGQLQFERGSVQTPAFMPVGTYGTVKGMTPEEVKGTGAEILLGNTFHLWLRPGQEVMKLHGDLHDFMNWQGPILTDSGGFQVFSLGDIRKITEKGVHFRNPVNGDKIFMDAEKSMEIQKDLGSDVVMIFDECTPYPATHNEAKKSMEMSLRWAQRSRDHFDKLENPNSLFGIVQGGVYEDLRDVSVEGLTKIGFDGYAVGGLAVGEPKEDMHRILEHTCPQLPEDKPRYLMGVGKPEDLVEGVRRGIDMFDCVMPTRNARNGHLFVTGGVIKIRNAKHKTDTTPLDPECDCYTCQNYSKSYLHHLDRCNEILGSRLNTIHNLRYYQRLMESIRIAIDEDRFESFVEEFYARRERDVPPMLKADAE

SEQ ID NO: 62125 - protein, 378 aa, Vibrio campbellii
  misc_feature (1)..(378): sp|A7MT83|TGT_VIBCB Queuine tRNA-ribosyltransferase OS= Vibrio campbellii (strain ATCC BAA-1116 / BB120) OX=338 187 GN=tgt PE=3 SV=1
MKLSFDLKKKNGNARRGQLTFERGTVQTPAFMPVGTYGTVKGMTPEEVKGTGAEILLGNTFHLWLRPGQEVMKMHGDLHDFMNWHGPILTDSGGFQVFSLGKMRKITEKGVHFRSPVNGDKIFMDAEKSMEIQKDLGSDIVMIFDECTPYPATHNEAKKSMEMSLRWAQRSRDHFDKLENPNNLFGIVQGGVYEDLRDVSIKGLTEIGFDGYAVGGLAVGEPKEDMHRILEHTCPQLPEDKPRYLMGVGKPEDLVEGVRRGIDMFDCVMPTRNARNGHLFVTGGVIKIRNAKHKTDTTPLDPHCDCYTCQHYSKSYLHHLERCNEILGARLNTIHNLRYYQRLMESIRKAIDEDRFDEFVTEFYERRGREVPPLAKEQ

SEQ ID NO: 62126 - protein, 378 aa, Vibrio campbellii; identical to SEQ ID NO: 62125
  misc_feature (1)..(378): tr|A0A0A3ERM0|A0A0A3ERM0_9VIBR Queuine tRNA-ribosyltran sferase OS=Vibrio campbellii OX=680 GN=tgt PE=3 SV=1

SEQ ID NO: 62127 - protein, 379 aa, Vibrio caribbeanicus
  misc_feature (1)..(379): tr|E3BMU0|E3BMU0_9VIBR Queuine tRNA-ribosyltransferase OS=Vibrio caribbeanicus ATCC BAA-2122 OX=796620 GN=tgt PE=3 SV=1
MKLKFELKKKDGVARRGQLTFERGTVQTPAFMPVGTYGTVKGMTPEEVKDTGAEILLGNTFHLWLRPGQEVMKMHGDLHDFMNWHGPILTDSGGFQVFSLGDIRKITEQGVHFRNPVNGEKIFMDAEKSMEIQNDLGSDIVMIFDECTPYPATHAEAKKSMEMSLRWAQRSRDHFDKLENPNNLFGIVQGGVYEDLRDVSVRGLTEIGFDGYAVGGLAVGEPKEDMHRVLEHTCPQLPEDKPRYLMGVGKPEDLVEGVRRGVDMFDCVMPTRNARNGHLFVTGGVVKIRNAKHKTDTSPLDPHCDCYTCKNYSKSYLHHLDRCNEILGARLNTIHNLRYYQRLMESIRSAIDEDRFDEFVQEFYARRDREVPPLAKTSA

SEQ ID NO: 62128 - protein, 378 aa, Vibrio caribbeanicus
  misc_feature (1)..(378): tr|A0A0A6QLN3|A0A0A6QLN3_9VIBR Queuine tRNA-ribosyltran sferase OS=Vibrio caribbeanicus OX=701175 GN=tgt PE=3 S V=1
MKLKFDLKKKDGVARRGQLTFERGTVQTPAFMPVGTYGTVKGMTPEEVKGTGAEILLGNTFHLWLRPGQEIMKMHGDLHDFMNWHGPILTDSGGFQVFSLGKMRTITEEGVHFRNPVNGDKIFMDAEKSMEIQKDLGSDIVMIFDECTPYPATHDEAKKSMEMSLRWAQRSRDHFDKLENPNNLFGIVQGGVYEDLRDVSVKGLTEIGFDGYAVGGLAVGEPKEDMHRILEHTCPQLPEDKPRYLMGVGKPEDLVEGVRRGIDMFDCVMPTRNARNGHLFVTGGVIKIRNAKHKTDTSPLDPHCDCYTCQNYSKSYLHHLERCNEILGARLNTIHNLRYYQRLMESIRTAIDEDRFDEFVKEFYERRGREVPPLSKEQ

SEQ ID NO: 62129 - protein, 381 aa, Vibrio casei
  misc_feature (1)..(381): tr|A0A368LLE3|A0A368LLE3_9VIBR Queuine tRNA-ribosyltran sferase OS=Vibrio casei OX=673372 GN=tgt PE=3 SV=1
MEYELIKKDGVARRGRLTFKRGSVETPAFMPVGTYGTVKGMTPEEVKDTGAEILLGNTFHLWLRPGQEIMKLHGDLHDFMNWQGPILTDSGGFQVFSLGKMRKITEEGVHFRNPVNGDRIFMDAEKSMEIQKDLGSDIVMIFDECTPYPATHDEAKKSMEMSLRWAQRSRDHFDKLENPNSLFGIVQGGVYGDLRDVSVKGLTEIGFDGYAVGGLAVGEPKEDMHNMLEHTCPQLPEDKPRYLMGVGKPEDLVEGVRRGIDMFDCVMPTRNARNGHLFVTGGIVKIRNASHKTDTSSLDPHCDCYTCKNYSKSYLHHLDRCNEILGARLNTIHNLRYYQRLMASIRLAIDEDRFEEFVQEFYARRDREVPPLQKEIRSSAQ

SEQ ID NO: 62130 - protein, 378 aa, Vibrio celticus
  misc_feature (1)..(378): tr|A0A1C3JL60|A0A1C3JL60_9VIBR Queuine tRNA-ribosyltran sferase OS=Vibrio celticus OX=446372 GN=tgt PE=3 SV=1
MKLKYELKKTNSGARRGQLQFERGTVETPAFMPVGTYGTVKGMTPEEVKDTGAEILLGNTFHLWLRPGQEIMKMHGDLHDFMNWHGPILTDSGGFQVFSLGAMRKITEEGVHFRNPVNGDKIFMDAEKSMEIQKDLGSDIVMIFDECTPYPATHKEAKDSMEMSLRWAERSRNHFDKLENPNSLFGIVQGGVYEDLRDVSVKGLTEIGFDGYAVGGLAVGEPKEDMHRILEHTCPQLPEDKPRYLMGVGKPEDLVEGVRRGIDMFDCVMPTRNARNGHLFVTEGVIKIRNAKHKTDTTPLDSECDCYTCKNYSKSYLHHLDRCNEILGARLNTIHNLRFYQRVMSDIRQSIDEDRFEEFVAEFYARMGREVPPLGKES

SEQ ID NO: 62131 - protein, 378 aa, Vibrio chagasii
  misc_feature (1)..(378): tr|A0A2S7VBQ6|A0A2S7VBQ6_9VIBR Queuine tRNA-ribosyltran sferase OS=Vibrio chagasii OX=170679 GN=tgt PE=3 SV=1
MKLKYELKKTNAGARRGQLQFERGTVETPAFMPVGTYGTVKGMTPEEVKDTGAEILLGNTFHLWLRPGQEIMKMHGDLHDFMNWQGPILTDSGGFQVFSLGAMRKITEEGVHFRNPVNGDKIFMDAEKSMEIQKDLGSDIVMIFDECTPYPATHKEAKDSMEMSLRWAERSRNHFDKLENPNSLFGIVQGGVYEDLRDVSVKGLTEIGFDGYAVGGLAVGEPKEDMHRILEHTCPQLPEDKPRYLMGVGKPEDLVEGVRRGIDMFDCVMPTRNARNGHLFVTEGVIKIRNAKHKTDTTPLDSECDCYTCKNYSKSYLHHLDRCNEILGARLNTIHNLRFYQRVMSDIRQSIDEDRFEEFVAEFYARMGREVPPLGKES

SEQ ID NO: 62132 - protein, 379 aa, Vibrio cholerae
  misc_feature (1)..(379): sp|Q9KTY9|TGT_VIBCH Queuine tRNA-ribosyltransferase OS= Vibrio cholerae serotype O1 (strain ATCC 39315 / El Tor Inaba N16961) OX=243277 GN=tgt PE=3 SV=1
MKLKFELKKKNGNARRGQLIFERGTVQTPAFMPVGTYGTVKGMTPEEVKETGAQILLGNTFHLWLRPGQEVMKMHGDLHDFMNWQGPILTDSGGFQVFSLGDIRKITEEGVHFRNPVNGDKIFMDAEKSMEIQKDLGSDIVMIFDECTPYPATHDEAKKSMEMSLRWAKRSRDHFDKLENPNNLFGIVQGGVYEDLRDVSVKGLTEIGFDGYAVGGLAVGEPKEDMHRVLEHTCPQLPEDKPRYLMGVGKPEDLVEGVRRGIDMFDCVMPTRNARNGHLFVTGGVIKIRNAAHKTDTTPLDPHCDCYTCKNYSKSYLHHLDRCNEILGARLNTIHNLRYYQRLMESIRKAIDEDRFDQFVAEFYARRNREVPPLQKDKA

SEQ ID NO: 62133 - protein, 379 aa, Vibrio cholerae; identical to SEQ ID NO: 62132
  misc_feature (1)..(379): sp|C3LSZ4|TGT_VIBCM Queuine tRNA-ribosyltransferase OS= Vibrio cholerae serotype O1 (strain M66-2) OX=579112 GN =tgt PE=3 SV=1

SEQ ID NO: 62134 - protein, 378 aa, Vibrio cidicii
  misc_feature (1)..(378): tr|A0A151KY47|A0A151KY47_9VIBR Queuine tRNA-ribosyltran sferase OS=Vibrio cidicii OX=1763883 GN=tgt PE=3 SV=1
MKLKFDLKKKNGNARRGQLTFERGTVQTPAFMPVGTYGTVKGMTPEEVKDTGAEILLGNTFHLWLRPGQEVMKMHGDLHDFMNWQGPILTDSGGFQVFSLGDIRKITEEGVHFRNPVNGDKIFMDAEKSMEIQKDLGSDIVMIFDECTPYPATHAEAKKSMEMSLRWAQRSRDHFDKLENPNNLFGIVQGGVYEDLRDVSVKGLTEIGFDGYAVGGLAVGEPKEDMHRVLEHTCPQLPEDKPRYLMGVGKPEDLVEGVRRGIDMFDCVMPTRNARNGHLFVTGGVIKIRNAIHKTDTSALDPHCDCYTCKNYSKSYLHHLDRCNEILGARLNTIHNLRYYQRLMESIRKAIDEDRFEQFVEEFYARRNREVPPLGKQA

SEQ ID NO: 62135 - protein, 379 aa, Vibrio cincinnatiensis
  misc_feature (1)..(379): tr|A0A1T4N9G4|A0A1T4N9G4_VIBCI Queuine tRNA-ribosyltran sferase OS=Vibrio cincinnatiensis DSM 19608 OX=1123491 GN=tgt PE=3 SV=1
MKLTFELKKKNGNARRGQLTFERGTVQTPAFMPVGTYGTVKGMTPEEVAETGAEILLGNTFHLWLRPGQEVMKMHGDLHDFMNWKGPILTDSGGFQVFSLGDIRKITEEGVHFRNPVNGSKIFMDAEKSMEIQKDLGSDIVMIFDECTPYPATHDEAKKSMEMSLRWAQRSRDHFDKLENPNSLFGIVQGGVYEDLRDVSVKGLTEIGFDGYAVGGLAVGEPKQDMHRILEHTCPQLPEDKPRYLMGVGKPEDLVEGVRRGIDMFDCVMPTRNARNGHLFVTGGVIKIRNAVHKTDTTPLDPHCDCYTCKNYSKSYLHHLDRCNEILGARLNTIHNLRYYQRLMASIRTAIDEDRFEQFVVDFYARREREVPPLQTEQA

SEQ ID NO: 62136 - protein, 378 aa, Vibrio comitans
  misc_feature (1)..(378): tr|A0A4Y3IL78|A0A4Y3IL78_9VIBR Queuine tRNA-ribosyltran sferase OS=Vibrio comitans NBRC 102076 OX=1219078 GN=tg t PE=3 SV=1
MKFELKKTDGVARRGQLQFERGSVQTPAFMPVGTYGTVKGMTPEEVKGTGAEILLGNTFHLWLRPGQEVMKLHGDLHDFMNWQGPILTDSGGFQVFSLGDIRKITEKGVHFRNPVNGDKIFMDAEKSMEIQKDLGSDVVMIFDECTPYPATHNEAKKSMEMSLRWAQRSRDHFDKLENPNSLFGIVQGGVYEDLRDVSVEGLTKIGFDGYAVGGLAVGEPKEDMHRILEHTCPQLPVDKPRYLMGVGKPEDLVEGVRRGIDMFDCVMPTRNARNGHLFVTGGVIKIRNAKHKTDTTPLDPECDCYTCQNYSKSYLHHLDRCNEILGSRLNTIHNLRYYQRLMESIRKAIDEDRFESFVEEFYARRDREVPPMLKADAE

SEQ ID NO: 62137 - protein, 378 aa, Vibrio coralliilyticus
  misc_feature (1)..(378): tr|A0A0A0SUM7|A0A0A0SUM7_9VIBR Queuine tRNA-ribosyltran sferase OS=Vibrio coralliilyticus OX=190893 GN=tgt PE=3 SV=1
MKLKFDLKKKDGVARRGQLTFERGTVQTPAFMPVGTYGTVKGMTPEEVKGTGAEILLGNTFHLWLRPGQEIMKMHGDLHDFMNWHGPILTDSGGFQVFSLGDIRKITEEGVHFRNPVNGDKIFMDAEKSMEIQKDLGSDIVMIFDECTPYPATHAEAKKSMEMSLRWAQRSRDHFDKLENQNNLFGIVQGGVYEDLRDVSVKGLTEIGFDGYAVGGLAVGEPKEDMHRILEHTCPQLPEDKPRYLMGVGKPEDLVEGVRRGIDMFDCVMPTRNARNGHLFVTGGVIKIRNAKHKTDTTPLDPECDCYTCQNYSKSYLHHLDRCNEILGARLNTIHNLRYYQRVMESIRKAIDEDRFDEFVKEFYERRGREVPPLAKEQ

SEQ ID NO: 62138 - protein, 378 aa, Vibrio crassostreae; identical to SEQ ID NO: 62130
  misc_feature (1)..(378): tr|A0A1B1BXS2|A0A1B1BXS2_9VIBR Queuine tRNA-ribosyltran sferase OS=Vibrio crassostreae 9CS106 OX=1191300 GN=tgt PE=3 SV=1

SEQ ID NO: 62139 - protein, 378 aa, Vibrio crassostreae; identical to SEQ ID NO: 62130
  misc_feature (1)..(378): tr|A0A0T7D0S4|A0A0T7D0S4_9VIBR Queuine tRNA-ribosyltran sferase OS=Vibrio crassostreae OX=246167 GN=tgt PE=3 SV =1

SEQ ID NO: 62140 - protein, 382 aa, Vibrio diabolicus; identical to SEQ ID NO: 62116
  misc_feature (1)..(382): tr|A0A0T7EVC9|A0A0T7EVC9_9VIBR Queuine tRNA-ribosyltran sferase OS=Vibrio diabolicus OX=50719 GN=tgt PE=3 SV=1

SEQ ID NO: 62141 - protein, 379 aa, Vibrio diazotrophicus
  misc_feature (1)..(379): tr|A0A2J8I5Y5|A0A2J8I5Y5_VIBDI Queuine tRNA-ribosyltran sferase OS=Vibrio diazotrophicus OX=685 GN=tgt PE=3 SV= 1
MKLQFNLKKKNGNARRGQLTFERGTVQTPAFMPVGTYGTVKGMTPEEVADTGAQILLGNTFHLWLRPGQEVMKMHGDLHDFMNWQGPILTDSGGFQVFSLGDIRKITEEGVHFRNPVNGDKIFMDAEKSMEIQKDLGSDIVMIFDECTPYPATHDEAKNSMEMSLRWAQRSRDHFDKLENPNSLFGIVQGSVYEDLRDVSVKGLTEIGFDGYAVGGLAVGEPKEDMHRMLEHTCPQLPEDKPRYLMGVGKPEDLVEGVRRGIDMFDCVMPTRNARNGHLFVTGGVIKIRNAVHKTDTSPLDPHCDCYTCKNYSKSYLHHLDRCNEILGARLNTIHNLRYYQRLMESIRTAIDEDRFDQFVEEFYARRNREVPPLQKEKA

SEQ ID NO: 62142 - protein, 379 aa, Vibrio diazotrophicus
  misc_feature (1)..(379): tr|A0A2J8HBK4|A0A2J8HBK4_VIBDI Queuine tRNA-ribosyltran sferase OS=Vibrio diazotrophicus OX=685 GN=tgt PE=3 SV= 1
MKLQFNLKKKNGNARRGQLTFERGTVQTPAFMPVGTYGTVKGMTPEEVADTGAQILLGNTFHLWLRPGQEVMKMHGDLHDFMNWQGPILTDSGGFQVFSLGDIRKITEEGVHFRNPVNGDKIFMDAEKSMEIQKDLGSDIVMIFDECTPYPATHDEAKKSMEMSLRWAQRSRDHFDKLENPNSLFGIVQGSVYEDLRDVSVKGLTEIGFDGYAVGGLAVGEPKEDMHRMLEHTCPQLPEDKPRYLMGVGKPEDLVEGVRRGIDMFDCVMPTRNARNGHLFVTGGVIKIRNAVHKTDTSPLDPHCDCYTCKNYSKSYLHHLDRCNEILGARLNTIHNLRYYQRLMESIRTAIDEDRFDQFVEEFYARRNREVPPLQKEKA

SEQ ID NO: 62143 - protein, 378 aa, Vibrio europaeus
  misc_feature (1)..(378): tr|A0A178JDW1|A0A178JDW1_9VIBR Queuine tRNA-ribosyltran sferase OS=Vibrio europaeus OX=300876 GN=tgt PE=3 SV=1
MKLKFDLKKKDGVARRGQLTFERGTVQTPAFMPVGTYGTVKGMTPEEVKGTGAEILLGNTFHLWLRPGQEVMKMHGDLHDFMNWHGPILTDSGGFQVFSLGKMRTITEQGVHFRNPVNGDKIFMDAEKSMEIQKDLGSDIVMIFDECTPYPATHDEAKKSMEMSLRWAQRSRDHFDKLENPNNLFGIVQGGVYEDLRDVSVKGLTEIGFDGYAVGGLAVGEPKEDMHRVLEHTCPQLPEDKPRYLMGVGKPEDLVEGVRRGIDMFDCVMPTRNARNGHLFVTGGVIKIRNAKHKTDTTPLDPHCDCYTCQNYSKSYLHHLERCNEILGARLNTIHNLRYYQRLMESIRKAIDEDRFDEFVTEFYERRGREVPPLAKQQ

SEQ ID NO: 62144 - protein, 377 aa, Vibrio ezurae
  misc_feature (1)..(377): tr|U3B5M4|U3B5M4_9VIBR Queuine tRNA-ribosyltransferase OS=Vibrio ezurae NBRC 102218 OX=1219080 GN=tgt PE=3 SV= 1
MKFQLKKTDGKARRGQLEFERGSVQTPAFMPVGTYGTVKGMTPEEVKGTGAEILLGNTFHLWLRPGQEVMKLHGDLHDFMNWQGPILTDSGGFQVFSLGDLRKITEKGVHFRNPVNGDKIFMDAEKSMEIQKDLGSDIVMIFDECTPYPATHSEAKKSMEMSLRWAQRSRDHFNKLENPNALFGIVQGGVYEDLRDVSVEGLTKIDFDGYAVGGLAVGEPKEDMHRILEHTCPQLPTDKPRYLMGVGKPEDLVEGVRRGIDMFDCVMPTRNARNGHLFVTGGVIKIRNAKHKIDTTPLDPECDCYTCRNYSKSYLHHLDRCNEILGARLNTIHNLRYYQRLMESIRKAIDEDRFDAFVEEFYARRDRDVPPMLKADA

SEQ ID NO: 62145 - protein, 379 aa, Vibrio fluvialis
  misc_feature (1)..(379): tr|A0A0X8LNH3|A0A0X8LNH3_VIBFL Queuine tRNA-ribosyltran sferase OS=Vibrio fluvialis OX=676 GN=tgt PE=3 SV=1
MKLKFELKKKDGTARRGQLTFERGTVQTPAFMPVGTYGTVKGMTPEEVAATGAQILLGNTFHLWLRPGQEVMKMHGDLHDFMNWQGPILTDSGGFQVFSLGDIRKITEEGVHFRNPVNGDKIFMDAEKSMEIQKDLGSDIVMIFDECTPYPATHDEAKKSMEMSLRWARRSRDHFDKLENPNNLFGIVQGGVYEDLRDVSVKGLTEIGFDGYAVGGLAVGEPKEDMHRVLEHTCPQLPEDKPRYLMGVGKPEDLVEGVRRGIDMFDCVMPTRNARNGHLFVTGGVIKIRNATHKTDTSPLDPHCDCYTCKNYSKSYLHHLDRCNEILGARLNTIHNLRYYQRLMESIRRAIDEDRFDQFVTEFYARRDREVPPLQKEKA

SEQ ID NO: 62146 - protein, 378 aa, Vibrio fluvialis
  misc_feature (1)..(378): tr|A0A1L9L6A7|A0A1L9L6A7_VIBFL Queuine tRNA-ribosyltran sferase OS=Vibrio fluvialis OX=676 GN=tgt PE=3 SV=1
MKLKFDLKKKNGNARRGQLTFERGTVQTPAFMPVGTYGTVKGMTPEEVKETGAEILLGNTFHLWLRPGQEVMKMHGDLHDFMNWQGPILTDSGGFQVFSLGDIRKITEEGVHFRNPVNGDKIFMDAEKSMEIQKDLGSDIVMIFDECTPYPATHAEAKKSMEMSLRWAQRSRDHFDKLENPNNLFGIVQGGVYEDLRDVSVKGLTEIGFDGYAVGGLAVGEPKEDMHRVLEHTCPQLPEDKPRYLMGVGKPEDLVEGVRRGIDMFDCVMPTRNARNGHLFVTGGVIKIRNATHKTDTTPLDPHCDCYTCKNYSKSYLHHLDRCNEILGARLNTIHNLRYYQRLMESIRKAIDEDRFEQFVEEFYARRNREVPPLGKQA

SEQ ID NO: 62147 - protein, 378 aa, Vibrio fortis
  misc_feature (1)..(378): tr|A0A066UW24|A0A066UW24_9VIBR Queuine tRNA-ribosyltran sferase OS=Vibrio fortis OX=212667 GN=tgt PE=3 SV=1
MKLKYELKKTNAGARRGQLQFERGTVETPAFMPVGTYGTVKGMTPEEVKDTGAEILLGNTFHLWLRPGQEIMKMHGDLHDFMNWQGPILTDSGGFQVFSLGAMRKITEEGVHFRNPVNGDKIFMDAEKSMEIQKDLGSDIVMIFDECTPYPATHKEAKDSMEMSLRWAERSRNHFDKLENPNSLFGIVQGGVYEDLRDVSVKGLTEIGFDGYAVGGLAVGEPKEDMHRILEHTCPQLPEDKPRYLMGVGKPEDLVEGVRRGIDMFDCVMPTRNARNGHLFVTEGVIKIRNAKHKTDTTPLDSECDCYTCKNYSKSYLHHLDRCNEILGARLNTIHNLRFYQRVMSDIRKAIDEDRFEEFVEEFYARMGREVPPLGKES

SEQ ID NO: 62148 - protein, 379 aa, Vibrio furnissii
  misc_feature (1)..(379): tr|F0LVX1|F0LVX1_VIBFN Queuine tRNA-ribosyltransferase OS=Vibrio furnissii (strain DSM 14383 / NCTC 11218 / VL 6966) OX=903510 GN=tgt PE=3 SV=1
MKLKFELKKKNGTARRGQLTFERGTVQTPAFMPVGTYGTVKGMTPEEVAATGAQILLGNTFHLWLRPGQEVMKMHGDLHDFMNWQGPILTDSGGFQVFSLGDIRKITEEGVHFRNPVNGDKIFMDAEKSMEIQKDLGSDIVMIFDECTPYPATHDEAKKSMEMSLRWARRSRDHFDKLENPNNLFGIVQGGVYEDLRDVSVKGLTEIGFDGYAVGGLAVGEPKEDMHRVLEHTCPQLPEDKPRYLMGVGKPEDLVEGVRRGIDMFDCVMPTRNARNGHLFVTGGVIKIRNATHKTDTSPLDPQCDCYTCKNYSKSYLHHLDRCNEILGARLNTIHNLRYYQRLMESIRRAIDEDRFDEFVTEFYARRDRDVPPLQKEKA

SEQ ID NO: 62149 - protein, 379 aa, Vibrio furnissii
  misc_feature (1)..(379): tr|A0A0Q2R264|A0A0Q2R264_VIBFU Queuine tRNA-ribosyltran sferase OS=Vibrio furnissii OX=29494 GN=tgt PE=3 SV=1
MKLKFELKKKNGTARRGQLTFERGTVQTPAFMPVGTYGTVKGMTPEEVAATGAQILLGNTFHLWLRPGQEVMKMHGDLHDFMNWQGPILTDSGGFQVFSLGDIRKITEEGVHFRNPVNGDKIFMDAEKSMEIQKDLGSDIVMIFDECTPYPATHDEAKKSMEMSLRWARRSRDHFDKLENPNNLFGIVQGGVYEDLRDVSVKGLTEIGFDGYAVGGLAVGEPKEDMHRILEHTCPQLPEDKPRYLMGVGKPEDLVEGVRRGIDMFDCVMPTRNARNGHLFVTGGVIKIRNATHKTDTSPLDPQCDCYTCKNYSKSYLHHLDRCNEILGARLNTIHNLRYYQRLMESIRRAIDEDRFDEFVTEFYARRDRDVPPLQKEKA

SEQ ID NO: 62150 - protein, 378 aa, Vibrio galatheae
  misc_feature (1)..(378): tr|A0A0F4NPK5|A0A0F4NPK5_9VIBR Queuine tRNA-ribosyltran sferase OS=Vibrio galatheae OX=579748 GN=tgt PE=3 SV=1
MKLKFDLKKKDGVARRGQLTFERGTVQTPAFMPVGTYGTVKGMTPEEVKGTGAEILLGNTFHLWLRPGQEIMKMHGDLHDFMNWHGPILTDSGGFQVFSLGKMRTITEQGVHFRNPVNGDKIFMDAEKSMEIQKDLGSDIVMIFDECTPYPATHDEAKKSMEMSLRWAQRSRDHFDKLENPNNLFGIVQGGVYEDLRDVSVKGLTEIGFDGYAVGGLAVGEPKEDMHRILEHTCPQLPEDKPRYLMGVGKPEDLVEGVRRGIDMFDCVMPTRNARNGHLFVTGGVIKIRNAKHKTDTTPLDPHCDCYTCQNYSKSYLHHLERCNEILGARLNTIHNLRYYQRLMESIRNAIDEDRFDEFVQEFYERRGREVPPLAKEQ

SEQ ID NO: 62151 - protein, 377 aa, Vibrio gazogenes
  misc_feature (1)..(377): tr|A0A1Z2SGX7|A0A1Z2SGX7_VIBGA Queuine tRNA-ribosyltran sferase OS=Vibrio gazogenes OX=687 GN=tgt PE=3 SV=1
MKLKFELKKKQGNARRGQITFERGTVQTPAFMPVGTYGTVKGMTPEEVKDTGAEILLGNTFHLWLRPGQEVMKMHGDLHDFMNWQGPILTDSGGFQVFSLGDIRKITEEGVHFRNPVNGEKIFMDAEKSMEIQNDLGSDIVMIFDECTPYPATHAEAKQSMEMSLRWAKRSRNHFDHLENPNSLFGIVQGGVYEDLRDVSVAGLTALDFDGYAVGGLAVGEPKEDMHRILEHTCPQLPEDKPRYLMGVGKPEDLVEGVRRGIDMFDCVMPTRNARNGHLFVTGGVIKIRNAKHKTDTTPLDPHCDCYTCKHYSKSYLHHLDRCNEILGARLNTIHNLRYYQRLMESIRQAIEADRFDAFVEEFYARRERAVPPLAKA

SEQ ID NO: 62152 - protein, 377 aa, Vibrio gazogenes
  misc_feature (1)..(377): tr|A0A1M5G7C9|A0A1M5G7C9_VIBGA Queuine tRNA-ribosyltran sferase OS=Vibrio gazogenes DSM 21264 = NBRC 103151 OX= 1123492 GN=tgt PE=3 SV=1
MKLKFELKKKQGNARRGQITFERGTVQTPAFMPVGTYGTVKGMTPEEVKDTGAEILLGNTFHLWLRPGQEVMKMHGDLHDFMNWQGPILTDSGGFQVFSLGDIRKITEEGVHFRNPVNGEKIFMDAEKSMEIQNDLGSDIVMIFDECTPYPATHDEAKRSMEMSLRWAKRSRNHFDHLENPNSLFGIVQGGVYEDLRDVSVAGLTELDFDGYAVGGLAVGEPKEDMHRILEHTCPQLPEDKPRYLMGVGKPEDLVEGVRRGIDMFDCVMPTRNARNGHLFVTGGVIKIRNAKHKTDTTPLDPHCDCYTCKHYSKSYLHHLDRCNEILGARLNTIHNLRYYQRLMESIRQAIEADRFDAFVEEFYARRERAVPPLAKA

SEQ ID NO: 62153 - protein, 376 aa, Vibrio genomosp.
  misc_feature (1)..(376): tr|A0A1E5CY77|A0A1E5CY77_9VIBR Queuine tRNA-ribosyltran sferase OS=Vibrio genomosp. F6 str. FF-238 OX=1191298 G N=tgt PE=3 SV=1
MRLKYELKKTNGNARRGQLQFERGTVETPAFMPVGTYGTVKGMTPEEVKGTGAEILLGNTFHLWLRPGQEIMKLHGDLHDFMNWKGPILTDSGGFQVFSLGKTRKITEEGVHFRSPVNGDKIFMDAEKSMQIQYDLGSDIVMIFDECTPFPATHDEARISMERSIRWADRSRNEFDRQDNSNSLFGIVQGGVYEDLRDVSVEALTKIGFDGYAVGGLAVGEPKEDMHRILEHTCPQLPEDKPRYLMGVGKPEDLVEGVRRGIDMFDCVMPTRNARNGHLFVTGGVIKIRNAKHKTDTTPLDPQCDCYTCSNYSKSYLHHLDRCNEILGARLNTIHNLRYYQRLMQSIRNAIDEDRFDAFVEEFYARRDREVPPMNK

SEQ ID NO: 62154 - protein, 376 aa, Vibrio genomosp.
  misc_feature (1)..(376): tr|A0A4U1YJ91|A0A4U1YJ91_9VIBR Queuine tRNA-ribosyltran sferase OS=Vibrio genomosp. F6 OX=723172 GN=tgt PE=3 SV =1
MRLKYELKKTNGNARRGQLQFERGTVETPAFMPVGTYGTVKGMTPEEVKDTGAEILLGNTFHLWLRPGQEIMKLHGDLHDFMNWKGPILTDSGGFQVFSLGKTRKITEEGVHFRSPVNGDKIFMDAEKSMQIQYDLGSDIVMIFDECTPFPATHDEARISMERSIRWADRSRNEFDRQDNTNSLFGIVQGGVYEDLRDVSVEALTKIGFDGYAVGGLAVGEPKEDMHRILEHTCPQLPEDKPRYLMGVGKPEDLVEGVRRGIDMFDCVMPTRNARNGHLFVTGGVIKIRNAKHKTDTTPLDPQCDCYTCSNYSKSYLHHLDRCNEILGARLNTIHNLRYYQRLMQSIRNAIDEDRFDAFVEEFYARRDREVPPMNK

SEQ ID NO: 62155 - protein, 378 aa, Vibrio halioticoli
  misc_feature (1)..(378): tr|V5F4G0|V5F4G0_9VIBR Queuine tRNA-ribosyltransferase OS=Vibrio halioticoli NBRC 102217 OX=1219072 GN=tgt PE= 3 SV=1
MKFQLKKTDGKARRGQLEFERGSVQTPAFMPVGTYGTVKGMTPEEVKGTGAEILLGNTFHLWLRPGQEVMKLHGDLHDFMNWQGPILTDSGGFQVFSLGDLRKITEKGVHFRNPVNGDKIFMDAEKSMEIQKDLGSDIVMIFDECTPYPATHSEAKKSMEMSLRWAQRSRDHFNKLENPNALFGIVQGGVYEDLRDVSVEGLTKIDFDGYAVGGLAVGEPKEDMHRILEHTCPQLPTDKPRYLMGVGKPEDLVEGVRRGIDMFDCVMPTRNARNGHLFVTGGVIKIRNAKHKIDTTPLDPECDCYTCRNYSKSYLHHLDRCNEILGARLNTIHNLRYYQRLMESIRKAIDEDRFDAFVEEFYARRDRDVPPMLKADAQ

SEQ ID NO: 62156 - protein, 377 aa, Vibrio hangzhouensis
  misc_feature (1)..(377): tr|A0A1H6AJK7|A0A1H6AJK7_9VIBR Queuine tRNA-ribosyltran sferase OS=Vibrio hangzhouensis OX=462991 GN=tgt PE=3 S V=1
MKLQYELKKKNGHARRGQLTFERGTVQTPAFMPVGTYGTVKGMTPEEVKGTGAEILLGNTFHLWLRPGQEIMKMHGDLHDFMNWHGPILTDSGGFQVFSLGDIRKITEEGVHFRNPVNGDKIFMDAEKSMEIQKDLGSDVVMIFDECTPYPATHAEAKKSMEMSLRWAKRSRDHFDKLENPNSLFGIVQGSVYEDLRDVSVEGLTEIGFDGYAVGGLAVGEPKEDMHRVLEHTTPKLPEDKPRYLMGVGKPEDLVEGVRRGIDMFDCVMPTRNARNGHLFVTGGVIKIRNAKNKTDTGPLDEHCDCYTCKNYSKAYLHHLDRCNEILGARLNTIHNLRHYQLLMESIRTAIDEDRFDEFVEEFYARRNREVPPLNMK

SEQ ID NO: 62157 - protein, 378 aa, Vibrio harveyi
  misc_feature (1)..(378): tr|K5SW64|K5SW64_VIBHA Queuine tRNA-ribosyltransferase OS=Vibrio harveyi OX=669 GN=tgt PE=3 SV=1
MKLKFDLKKKNGNARRGQLTFERGTVQTPAFMPVGTYGTVKGMTPEEVKGTGAEILLGNTFHLWLRPGQEVMKMHGDLHDFMNWHGPILTDSGGFQVFSLGKMRKITEKGVHFRSPVNGDKIFMDAEKSMEIQKDLGSDIVMIFDECTPYPATHNEAKKSMEMSLRWAQRSRDHFNKLENPNNLFGIVQGGVYEDLRDVSIKGLTEIGFDGYAVGGLAVGEPKEDMHRILEHTCPQLPEDKPRYLMGVGKPEDLVEGVRRGIDMFDCVMPTRNARNGHLFVTGGVIKIRNAKHKTDTTPLDPHCDCYTCQHYSKSYLHHLERCNEILGARLNTIHNLRYYQRLMESIRKAIDEDRFDEFVTEFYERRGREVPPLAKEQ

SEQ ID NO: 62158 - protein, 378 aa, Vibrio harveyi
  misc_feature (1)..(378): tr|A0A380QGS7|A0A380QGS7_VIBHA Queuine tRNA-ribosyltran sferase OS=Vibrio harveyi OX=669 GN=tgt PE=3 SV=1
MKLKFDLKKKNGNARRGQLTFERGTVQTPAFMPVGTYGTVKGMTPEEVKGTGAEILLGNTFHLWLRPGQEVMKMHGDLHDFMNWHGPILTDSGGFQVFSLGKMRKITEKGVHFRSPVNGDKIFMDAEKSMEIQKDLGSDIVMIFDECTPYPATHNEAKKSMEMSLRWAQRSRDHFDKLENPNNLFGIVQGGVYEDLRDVSIKGLTEIGFDGYAVGGLAVGEPKEDMHRILEHTCPQLPEDKPRYLMGVGKPEDLVEGVRRGIDMFDCVMPTRNARNGHLFVTGGVIKIRNAKHKTDTTPLDPHCDCYTCQHYSKSYLHHLERCNEILGARLNTIHNLRYYQRLMESIRKAIDEDRFDEFVTEFYERRGREVPPLAKEQ

SEQ ID NO: 62159 - protein, 378 aa, Vibrio hepatarius
  misc_feature (1)..(378): tr|A0A0M0HYP7|A0A0M0HYP7_9VIBR Queuine tRNA-ribosyltran sferase OS=Vibrio hepatarius OX=171383 GN=tgt PE=3 SV=1
MKLKFELKKKDGVARRGQLTFERGTVQTPAFMPVGTYGTVKGMTPEEVKGTGAEILLGNTFHLWLRPGQEVMKMHGDLHDFMNWQGPILTDSGGFQVFSLGKMRTITEQGVHFRNPVNGDKIFMDAEKSMEIQKDLGSDIVMIFDECTPYPATHDEAKKSMEMSLRWAQRSRDHFDKLENPNNLFGIVQGGVYEDLRDVSVKGLTEIGFDGYAVGGLAVGEPKEDMHRILEHTCPQLPEDKPRYLMGVGKPEDLVEGVRRGIDMFDCVMPTRNARNGHLFVTGGVIKIRNAKHKTDTTPLDPHCDCYTCQNYSKSYLHHLERCNEILGARLNTIHNLRYYQRLMESIRKAIDEDRFDQFVEEFYARRDREVPPLAKEQ

SEQ ID NO: 62160 - protein, 395 aa, Vibrio ichthyoenteri
  misc_feature (1)..(395): tr|F9RW72|F9RW72_9VIBR Queuine tRNA-ribosyltransferase OS=Vibrio ichthyoenteri ATCC 700023 OX=870968 GN=tgt PE =3 SV=1
MGITPNILSDCFSDIGGFVKLKFDLKKKDGVARRGQLTFERGTVQTPAFMPVGTYGTVKGMTPEEVKETGAEILLGNTFHLWLRPGQEVMKMHGDLHDFMNWQGPILTDSGGFQVFSLGKMRKITEEGVHFRSPVNGDKIFMDAEKSMEIQKDLGSDIVMIFDECTPYPATHDEAKKSMEMSLRWAQRSRDHFDKLENPNSLFGIVQGGVYEDLRDVSVKGLTEIGYDGYAVGGLAVGEPKEDMHRILEHTCPQLPEDKPRYLMGVGKPEDLVEGVRRGIDMFDCVMPTRNARNGHLFVTGGVIKIRNATHKTDTTPLDPQCDCYTCKNYSKVYLHHLDRCNEILGARLNTIHNLRYYQRLMESIRTAIDEDRFDQFVEEFYARRNREVPPIGKQ

SEQ ID NO: 62161 - protein, 378 aa, Vibrio inusitatus
  misc_feature (1)..(378): tr|A0A4Y3HUI0|A0A4Y3HUI0_9VIBR Queuine tRNA-ribosyltran sferase OS=Vibrio inusitatus NBRC 102082 OX=1219070 GN= tgt PE=3 SV=1
MKFELKKNDGTARRGQLQFERGSVQTPAFMPVGTYGTVKGMTPEEVKGTGAEILLGNTFHLWLRPGQEVMKLHGDLHDFMNWQGPILTDSGGFQVFSLGDIRKITEKGVHFRNPVNGDKIFMDAEKSMEIQKDLGSDVVMIFDECTPYPATHNEAKKSMEMSLRWAQRSRDHFDKLENPNSLFGIVQGGVYEDLRDVSVEGLTKIGFDGYAVGGLAVGEPKEDMHRILEHTCPQLPEDKPRYLMGVGKPEDLVEGVRRGIDMFDCVMPTRNARNGHLFVTGGVIKIRNAKHKTDTTALDPECDCYTCQNYSKSYLHHLDRCNEILGSRLNTIHNLRYYQRLMESIRTAIDEDRFESFVEEFYARRDRDVPPMLKADAE

SEQ ID NO: 62162 - protein, 155 aa, Vibrio ishigakensis
  misc_feature (1)..(155): tr|A0A0B8NU00|A0A0B8NU00_9VIBR tRNA-guanine transglycos ylase OS=Vibrio ishigakensis OX=1481914 GN=JCM19231_261 PE=4 SV=1
MHRVLEHTCPQLPIDKPRYLMGVGKPEDLVEGVRRGIDMFDCVMPTRNARNGHLFVTGGVIKIRNAKHKTDTSPLDPECDCYTCRNYSKSYLHHLDRCNEILGARLNTIHNLRYYQRLMESIRKAIDEDRFDTFVEEFYARRNREVPPLMKGDAQ

SEQ ID NO: 62163 - protein, 156 aa, Vibrio ishigakensis
  misc_feature (1)..(156): tr|A0A0B8NSZ0|A0A0B8NSZ0_9VIBR tRNA-guanine transglycos ylase OS=Vibrio ishigakensis OX=1481914 GN=JCM19231_260 PE=4 SV=1
MKGTGAEILLGNTFHLWLRPGQEVMKMHGDLHDFMNWQGPILTDSGGFQVFSLGDIRKITEEGVHFRNPVNGDKIFMDAEKSMEIQYDLGSDVVMIFDECTPYPATHDEAKKSMEMSLRWAQRSRDHFNKLENPNALFGIVQGGVYEDLRDVSVKA

SEQ ID NO: 62164 - protein, 377 aa, Vibrio jasicida
  misc_feature (1)..(377): tr|A0A2S7VNU9|A0A2S7VNU9_9VIBR Queuine tRNA-ribosyltran sferase OS=Vibrio jasicida OX=766224 GN=tgt PE=3 SV=1
MKLSFDLKKKNGNARRGQLTFERGTVQTPAFMPVGTYGTVKGMTPEEVKGTGAEILLGNTFHLWLRPGQEVMKMHGDLHDFMNWHGPILTDSGGFQVFSLGKMRKITEKGVHFRSPVNGDKIFMDAEKSMEIQKDLGSDIVMIFDECTPYPATHNEAKKSMEMSLRWAQRSRDHFDKLENPNNLFGIVQGGVYEDLRDVSVKGLTEIGFDGYAVGGLAVGEPKEDMHRILEHTCPQLPEDKPRYLMGVGKPEDLVEGVRRGIDMFDCVMPTRNARNGHLFVTGGVIKIRNAKHKTDTTPLDPHCDCYTCQNYSKSYLHHLERCNEILGARLNTIHNLRYYQRLMESIRTAIDEDRFDEFVQEFYARRDREVPPLSKA

SEQ ID NO: 62165 - protein, 378 aa, Vibrio kanaloae; identical to SEQ ID NO: 62130
  misc_feature (1)..(378): tr|A0A1E5DNF4|A0A1E5DNF4_9VIBR Queuine tRNA-ribosyltran sferase OS=Vibrio kanaloae 5S-149 OX=1191299 GN=tgt PE= 3 SV=1

SEQ ID NO: 62166 - protein, 378 aa, Vibrio kanaloae; identical to SEQ ID NO: 62130
  misc_feature (1)..(378): tr|A0A4U1ZUW6|A0A4U1ZUW6_9VIBR Queuine tRNA-ribosyltran sferase OS=Vibrio kanaloae OX=170673 GN=tgt PE=3 SV=1

SEQ ID NO: 62167 - protein, 378 aa, Vibrio lentus
  misc_feature (1)..(378): tr|A0A0L1L713|A0A0L1L713_9VIBR Queuine tRNA-ribosyltran sferase OS=Vibrio lentus OX=136468 GN=tgt PE=3 SV=1
MKLKYELKKTNSGARRGQLQFERGTVETPAFMPVGTYGTVKGMTPEEVKDTGAEILLGNTFHLWLRPGQEIMKLHGDLHDFMNWKGPILTDSGGFQVFSLGATRKITEEGVHFRNPVNGDKIFMDAEKSMEIQKDLGSDIVMIFDECTPYPATHKEAKDSMEMSLRWAQRSRDHFDKQENPNSLFGIVQGGVYEDLRDVSVKGLTEIGFDGYAVGGLAVGEPKEDMHRILEHTCPQLPEDKPRYLMGVGKPEDLVEGVRRGIDMFDCVMPTRNARNGHLFVTEGVIKIRNAKHKMDTTPLDSECDCYTCKNYSKSYLHHLDRCNEILGARLNTIHNLRFYQRVMSDIRQSIDEDRFEEFVAEFYARMGREVPPLGKES

SEQ ID NO: 62168 - protein, 378 aa, Vibrio lentus; identical to SEQ ID NO: 62117
  misc_feature (1)..(378): tr|A0A1B9Q107|A0A1B9Q107_9VIBR Queuine tRNA-ribosyltran sferase OS=Vibrio lentus OX=136468 GN=tgt PE=3 SV=1

SEQ ID NO: 62169 - protein, 377 aa, Vibrio mangrovi
  misc_feature (1)..(377): tr|A0A1Y6IQV5|A0A1Y6IQV5_9VIBR Queuine tRNA-ribosyltran sferase OS=Vibrio mangrovi OX=474394 GN=tgt PE=3 SV=1
MKLKFELKKKHGNARRGQITFERGTVQTPVFMPVGTYGTVKGMTPEEVKDTGAEILLGNTFHLWLRPGQEIMKMHGDLHDFMNWQGPILTDSGGFQVFSLGDIRKITEEGVHFRNPVNGEKIFMDAEKSMEIQRDLGSDIVMIFDECTPYPATHTEAKQSMEMSLRWAKRSREHFDQLENPNSLFGIVQGGVYEDLRDVSVKGLTEIGFDGYAVGGLAVGEPKEDMHRILEHTCPQLPEDKPRYLMGVGKPEDLVEGVRRGIDMFDCVMPTRNARNGHLFVTGGVVKIRNAKHKTDTTPLDPHCDCYTCKHYSKSYLHHLDRCNEILGARLNTIHNLRYYQRLMASIRQAIEEDRFDAFVEEFYARRERDVPPLAKV

SEQ ID NO: 62170 - protein, 258 aa, Vibrio maritimus
  misc_feature (1)..(258): tr|A0A090TYX5|A0A090TYX5_9VIBR Queuine tRNA-ribosyltran sferase OS=Vibrio maritimus OX=990268 GN=JCM19240_1494 PE=3 SV=1
MDAEKSMEIQKDLGSDVVMIFDECTPYPATHAEAKKSMEMSLRWAQRSRDHFDKLENENSLFGIVQGSVYEDLRDVSVKGLTDIGFDGYAVGGLAVGEPKEEMHRVLEFTTPKLPEDKPRYLMGVGKPEDLVEGVRRGIDMFDCVMPTRNARNGHLFVTGGVIKIRNATNKTDTGPLDENCDCYTCKNYSKAYLHHLDRCNEILGARLNTIHNLRHYQMLMESIRKAIDEDRFEQFVEEFYARRNREVPPLDMKVDAQ

SEQ ID NO: 62171 - protein, 381 aa, Vibrio maritimus
  misc_feature (1)..(381): tr|A0A090S1J3|A0A090S1J3_9VIBR Queuine tRNA-ribosyltran sferase OS=Vibrio maritimus OX=990268 GN=tgt PE=3 SV=1
MKLQYELKKKDGHARRGQLTFERGTVQTPAFMPVGTYGTVKGMTPEEVKGTGAEILLGNTFHLWLRPGQEIMKMHGDLHDFMNWHGPILTDSGGFQVFSLGDIRKITEEGVHFRNPVNGDRIFMDAEKSMEIQKDLGSDVVMIFDECTPYPATHAEAKKSMEMSLRWAQRSRDHFDKLDNENSLFGIVQGSVYEDLREVSVKGLTDIGFDGYAVGGLAVGEPKEEMHRVLEFTTPKLPEDKPRYLMGVGKPEDLVEGVRRGIDMFDCVMPTRNARNGHLFVTGGVIKIRNATNKTDTGPLDENCDCYTCQNYSKAYLHHLDRCNEILGARLNTIHNLRHYQMLMESIRKAIDEDRFEQFVEEFYARRNREVPPLDMKVDAQ

SEQ ID NO: 62172 - protein, 386 aa, Vibrio mediterranei
  misc_feature (1)..(386): tr|A0A2C9P856|A0A2C9P856_9VIBR Queuine tRNA-ribosyltran sferase OS=Vibrio mediterranei OX=689 GN=tgt PE=3 SV=1
MCLWQCGGFVKLQYELKKKNGHARRGQLTFERGTVQTPAFMPVGTYGTVKGMTPEEVKGTGAEILLGNTFHLWLRPGQEIMKMHGDLHDFMNWHGPILTDSGGFQVFSLGDIRKITEEGVHFRNPVNGDKIFMDAEKSMEIQKDLGSDVVMIFDECTPYPATHAEAKKSMEMSLRWAQRSRDHFDKLENPNSLFGIVQGSVYEDLRDVSVEGLTNIGFDGYAVGGLAVGEPKEDMHRVLEHTTPKLPEDKPRYLMGVGKPEDLVEGVRRGIDMFDCVMPTRNARNGHLFVTGGIVKIRNATNKTDTGPLDEHCDCYTCKNYSKAYLHHLDRCNEILGARLNTIHNLRYYQRLMESIRTAIDEDRFDEFVEEFYARRNREVPPLDMK

SEQ ID NO: 62173 - protein, 379 aa, Vibrio metoecus
  misc_feature (1)..(379): tr|A0A271VRJ5|A0A271VRJ5_9VIBR Queuine tRNA-ribosyltran sferase OS=Vibrio metoecus OX=1481663 GN=tgt PE=3 SV=1
MKLTFELKKKNGNARRGQLTFERGTVQTPAFMPVGTYGTVKGMTPEEVKETGAQILLGNTFHLWLRPGQEVMKMHGDLHDFMNWQGPILTDSGGFQVFSLGDIRKITEEGVHFRNPVNGDKIFMDAEKSMEIQKDLGSDIVMIFDECTPYPATHDEAKKSMEMSLRWAKRSREHFDKLENPNNLFGIVQGGVYEDLRDVSVKGLTEIGFDGYAVGGLAVGEPKEDMHRVLEHTCPQLPEDKPRYLMGVGKPEDLVEGVRRGIDMFDCVMPTRNARNGHLFVTGGVIKIRNAAHKTDTTPLDPHCDCYTCKNYSKSYLHHLDRCNEILGARLNTIHNLRYYQRLMESIRKAIDEDRFDQFVAEFYARRNREVPPLQKDKA

SEQ ID NO: 62174 - protein, 379 aa, Vibrio metoecus
  misc_feature (1)..(379): tr|A0A0Q0MUQ0|A0A0Q0MUQ0_9VIBR Queuine tRNA-ribosyltran sferase OS=Vibrio metoecus OX=1481663 GN=tgt PE=3 SV=1
MKLTFELKKKNGNARRGQLTFERGTVQTPAFMPVGTYGTVKGMTPEEVKETGAQILLGNTFHLWLRPGQEVMKMHGDLHDFMNWQGPILTDSGGFQVFSLGDIRKITEEGVHFRNPVNGDKIFMDAEKSMEIQKDLGSDIVMIFDECTPYPATHDEAKKSMEMSLRWAKRSRDHFDKLENPNNLFGIVQGGVYEDLRDVSVKGLTEIGFDGYAVGGLAVGEPKEDMHRVLEHTCPQLPEDKPRYLMGVGKPEDLVEGVRRGIDMFDCVMPTRNARNGHLFVTGGVIKIRNAVHKTDTTPLDPHCDCYTCKNYSKSYLHHLDRCNEILGARLNTIHNLRYYQRLMESIRKAIDEDRFDQFVAEFYARRNREVPPLQKDKA

SEQ ID NO: 62175 - protein, 379 aa, Vibrio metschnikovii
  misc_feature (1)..(379): tr|C9P6D6|C9P6D6_VIBME Queuine tRNA-ribosyltransferase OS=Vibrio metschnikovii CIP 69.14 OX=675813 GN=tgt PE=3 SV=1
MKLTFELKKKNGNARRGQLTFERGTVQTPAFMPVGTYGTVKGMTPEEVKETGAEILLGNTFHLWLRPGQEVMKMHGDLHDFMNWQGPILTDSGGFQVFSLGEIRKITEEGVHFRNPVNGDKIFMDAEKSMEIQKDLGSDIVMIFDECTPYPATHDEAKKSMQMSLRWAQRSRDHFDKLNNTNSLFGIVQGGVYEDLRDESVKGLTQIGFDGYAVGGLAVGEPKPDMHRILEHTCPQLPEDKPRYLMGVGKPEDLVEGVRRGVDMFDCVMPTRNARNGHLFVTGGVIKIRNAVHKTDTTPLDPHCDCYTCKNYSKSYLHHLDRCNEILGARLNTIHNLRYYQRLMESIRKAIDEDRFDQFVEAFYARRQREVPPLQIEQA

SEQ ID NO: 62176 - protein, 379 aa, Vibrio metschnikovii; identical to SEQ ID NO: 62175
  misc_feature (1)..(379): tr|A0A380NVV2|A0A380NVV2_VIBME Queuine tRNA-ribosyltran sferase OS=Vibrio metschnikovii OX=28172 GN=tgt PE=3 SV =1

SEQ ID NO: 62177 - protein, 395 aa, Vibrio mimicus
  misc_feature (1)..(395): tr|D2YHR4|D2YHR4_VIBMI Queuine tRNA-ribosyltransferase OS=Vibrio mimicus VM603 OX=671074 GN=tgt PE=3 SV=1
MIGNKPSDCFSDIGGFVKLKFELKKKNGNARRGQLTFERGTVQTPAFMPVGTYGTVKGMTPEEVKETGAQILLGNTFHLWLRPGQEVMKMHGDLHDFMNWQGPILTDSGGFQVFSLGDIRKITEEGVHFRNPVNGDKIFMDAEKSMEIQKDLGSDIVMIFDECTPYPATHDEAKKSMEMSLRWAKRSRDHFDKLENPNNLFGIVQGGVYEDLRDVSVKGLTEIGFDGYAVGGLAVGEPKEDMHRVLEHTCPQLPEDKPRYLMGVGKPEDLVEGVRRGIDMFDCVMPTRNARNGHLFVTGGVIKIRNAVHKTDTTPLDPHCDCYTCKNYSKSYLHHLDRCNEILGARLNTIHNLRYYQRLMESIRKAIDEDRFDQFVAEFYARRNREVPPLQKDKA

SEQ ID NO: 62178 - protein, 379 aa, Vibrio mimicus; identical to SEQ ID NO: 62174
  misc_feature (1)..(379): tr|A0A2J9V1H7|A0A2J9V1H7_VIBMI Queuine tRNA-ribosyltran sferase OS=Vibrio mimicus OX=674 GN=tgt PE=3 SV=1

SEQ ID NO: 62179 - protein, 377 aa, Vibrio natriegens
  misc_feature (1)..(377): tr|A0A1B1E9Y4|A0A1B1E9Y4_VIBNA Queuine tRNA-ribosyltran sferase OS=Vibrio natriegens OX=691 GN=tgt PE=3 SV=1
MKLKFDLKKKNGTARRGQLTFERGTVQTPAFMPVGTYGTVKGMTPEEVKGTGAEILLGNTFHLWLRPGQEVMKMHGDLHDFMNWHGPILTDSGGFQVFSLGKMRTITEQGVHFRNPVNGDKIFMDAEKSMEIQKDLGSDIVMIFDECTPYPATHDEAKKSMEMSLRWAQRSRDHFDKLENPNNLFGIVQGGVYEDLRDVSVKGLTEIGFDGYAVGGLAVGEPKEDMHRILEHTCPQLPEDKPRYLMGVGKPEDLVEGVRRGIDMFDCVMPTRNARNGHLFVTGGVIKIRNAKHKTDTTPLDPHCDCYTCQNYSKSYLHHLERCNEILGARLNTIHNLRYYQRLMESIRKAIDEDRFDEFVEEFYARRDREVPPLSKA

SEQ ID NO: 62180 - protein, 378 aa, Vibrio navarrensis
  misc_feature (1)..(378): tr|A0A099LSQ8|A0A099LSQ8_9VIBR Queuine tRNA-ribosyltran sferase OS=Vibrio navarrensis OX=29495 GN=tgt PE=3 SV=1
MKLKFDLKKKNGNARRGQLTFERGTVQTPAFMPVGTYGTVKGMTPEEVKDTGAEILLGNTFHLWLRPGQEVMKMHGDLHDFMNWQGPILTDSGGFQVFSLGDIRKITEEGVHFRNPVNGDKIFMDAEKSMEIQKDLGSDIVMIFDECTPYPATHAEAKKSMEMSLRWAQRSRDHFDKLENPNNLFGIVQGGVYEDLRDVSVKGLTEIGFDGYAVGGLAVGEPKEDMHRVLEHTCPQLPEDKPRYLMGVGKPEDLVEGVRRGIDMFDCVMPTRNARNGHLFVTGGVIKIRNATHKTDTSALDPHCDCYTCKNYSKSYLHHLDRCNEILGARLNTIHNLRYYQRLMESIRKAIDEDRFEQFVEEFYARRNREVPPLGKQA

SEQ ID NO: 62181 - protein, 378 aa, Vibrio neocaledonicus
  misc_feature (1)..(378): tr|A0A4P8FVI9|A0A4P8FVI9_9VIBR Queuine tRNA-ribosyltran sferase OS=Vibrio neocaledonicus OX=1208308 GN=tgt PE=3 SV=1
MKLKFDLKKKNGNARRGQLTFERGTVQTPAFMPVGTYGTVKGMTPEEVKGTGAEILLGNTFHLWLRPGQEVMKMHGDLHDFMNWHGPILTDSGGFQVFSLGKMRTITEEGVYFRNPVNGDKIFMDAEKSMEIQKDLGSDIVMIFDECTPYPATHDEAKKSMEMSLRWAQRSRDHFEKLENPNNLFGIVQGGVYEDLRDVSVKGLTEIGFDGYAVGGLAVGEPKEDMHRILEHTCPQLPEDKPRYLMGVGKPEDLVEGVRRGIDMFDCVMPTRNARNGHLFVTGGVIKIRNAKHKTDTTPLDPHCDCYTCQNYSKSYLHHLERCNEILGARLNTIHNLRYYQRLMESIRKAIDEDRFDEFVTEFYDRRGREVPPLAKEQ

SEQ ID NO: 62182 - protein, 378 aa, Vibrio neptunius
  misc_feature (1)..(378): tr|A0A0F4NZ32|A0A0F4NZ32_9VIBR Queuine tRNA-ribosyltran sferase OS=Vibrio neptunius OX=170651 GN=tgt PE=3 SV=1
MKLKFDLKKKDGVARRGQLTFERGTVQTPAFMPVGTYGTVKGMTPEEVKGTGAEILLGNTFHLWLRPGQEIMKMHGDLHDFMNWHGPILTDSGGFQVFSLGDIRKITEEGVHFRNPVNGDKIFMDAEKSMEIQKDLGSDIVMIFDECTPYPATHAEAKKSMEMSLRWAQRSRDHFDKLENENNLFGIVQGGVYEDLRDVSVKGLTEIGFDGYAVGGLAVGEPKEDMHRILEHTCPQLPEDKPRYLMGVGKPEDLVEGVRRGIDMFDCVMPTRNARNGHLFVTGGVIKIRNAKHKTDTTPLDPECDCYTCQNYSKSYLHHLDRCNEILGARLNTIHNLRYYQRVMESIRKAIDEDRFDEFVKEFYERRGREVPPLAKEQ

SEQ ID NO: 62183 - protein, 378 aa, Vibrio nereis
  misc_feature (1)..(378): tr|A0A0M0HPP3|A0A0M0HPP3_VIBNE Queuine tRNA-ribosyltran sferase OS=Vibrio nereis OX=693 GN=tgt PE=3 SV=1
MKLKFDLKKKDGTARRGQLTFERGTVQTPAFMPVGTYGTVKGMTPEEVKGTGAEILLGNTFHLWLRPGQEVMKMHGDLHDFMNWQGPILTDSGGFQVFSLGDIRKITEAGVHFRNPVNGDKIFMDAEKSMEIQNDLGSDIVMIFDECTPYPATHAEAKKSMEMSLRWAQRSRDHFNKLENPNNLFGIVQGGVYEDLRDVSVEGLTKIGFDGYAVGGLAVGEPKEDMHRILEHTCPQLPEDKPRYLMGVGKPEDLVEGVRRGIDMFDCVMPTRNARNGHLFVTGGVIKIRNAKHKTDTTPLDPHCDCYTCTHYSKSYLHHLDRCNEILGARLNTIHNLRYYQRLMESIRKAIDEDRFDEFVQEFYARRDREVPPLSKAE

SEQ ID NO: 62184 - protein, 376 aa, Vibrio nigripulchritudo
  misc_feature (1)..(376): tr|U4KCU9|U4KCU9_9VIBR Queuine tRNA-ribosyltransferase OS=Vibrio nigripulchritudo OX=28173 GN=tgt PE=3 SV=1
MKLKYELKKTNGNARRGQLTFERGSVQTPAFMPVGTYGTVKGMTPEEVKGTGAEILLGNTFHLWLRPGQEVMKMHGDLHDFMNWHGPILTDSGGFQVFSLGDIRKITEEGVHFRNPVNGDKIFMDAEKSMEIQKDLGSDVVMIFDECTPYPATHDEAKKSMEMSLRWAQRSRDHFDKLENPNSLFGIVQGGVYEDLRDVSVKGLTDIGFDGYAVGGLAVGEPKEDMHRVLEHTCPQLPIDKPRYLMGVGKPEDLVEGVRRGIDMFDCVMPTRNARNGHLFVTGGVIKIRNAKHKTDTTPLDPECDCYTCKNYSKAYLHHLDRCNEILGARLNTIHNLRYYQRVMESIRNAIDEDRFDQFVEEFYARRNREVPPLNK

SEQ ID NO: 62185 - protein, 376 aa, Vibrio nigripulchritudo; identical to SEQ ID NO: 62184
  misc_feature (1)..(376): tr|U4E6S3|U4E6S3_9VIBR Queuine tRNA-ribosyltransferase OS=Vibrio nigripulchritudo FTn2 OX=1238441 GN=tgt PE=3 SV=1

SEQ ID NO: 62186 - protein, 378 aa, Vibrio orientalis
  misc_feature (1)..(378): tr|C9QL41|C9QL41_VIBOR Queuine tRNA-ribosyltransferase OS=Vibrio orientalis CIP 102891 = ATCC 33934 OX=675816 GN=tgt PE=3 SV=1
MKLKFDLKKKDGVARRGQLTFERGTVQTPAFMPVGTYGTVKGMTPEEVKGTGAEILLGNTFHLWLRPGQEVMKMHGDLHDFMNWHGPILTDSGGFQVFSLGKMRTITEQGVHFRNPVNGDKIFMDAEKSMEIQKDLGSDIVMIFDECTPYPATHNEAKKSMEMSLRWAQRSRDHFDKLENPNNLFGIVQGGVYEDLRDVSVKGLTEIGFDGYAVGGLAVGEPKEDMHRILEHTCPQLPEDKPRYLMGVGKPEDLVEGVRRGIDMFDCVMPTRNARNGHLFVTGGVIKIRNAKHKTDTTALDPHCDCYTCQNYSKSYLHHLERCNEILGARLNTIHNLRYYQRLMESIRTAIDEDRFDEFVQEFYERRGREVPPLAKEQ

SEQ ID NO: 62187 - protein, 378 aa, Vibrio owensii
  misc_feature (1)..(378): tr|A0A0C1YZW7|A0A0C1YZW7_9VIBR Queuine tRNA-ribosyltran sferase OS=Vibrio owensii CAIM 1854 = LMG 25443 OX=1229 493 GN=tgt PE=3 SV=1
MKLKFDLKKKNGNARRGQLTFERGTVQTPAFMPVGTYGTVKGMTPEEVKGTGAEILLGNTFHLWLRPGQEVMKMHGDLHDFMNWHGPILTDSGGFQVFSLGKMRKITEKGVHFRSPVNGDKIFMDAEKSMEIQKDLGSDIVMIFDECTPYPATHNEAKKSMEMSLRWAQRSRDHFDKLENPNNLFGIVQGGVYEDLRDVSIKGLTEIDFDGYAVGGLAVGEPKEDMHRILEHTCPQLPEDKPRYLMGVGKPEDLVEGVRRGIDMFDCVMPTRNARNGHLFVTGGVIKIRNAKHKTDTTPLDPHCDCYTCQHYSKSYLHHLERCNEILGARLNTIHNLRYYQRLMESIRKAIDEDRFDEFVTEFYERRGREVPPLAKEQ

SEQ ID NO: 62188 - protein, 378 aa, Vibrio owensii; identical to SEQ ID NO: 62157
  misc_feature (1)..(378): tr|A0A3G2PX59|A0A3G2PX59_9VIBR Queuine tRNA-ribosyltran sferase OS=Vibrio owensii OX=696485 GN=tgt PE=3 SV=1

SEQ ID NO: 62189 - protein, 379 aa, Vibrio palustris
  misc_feature (1)..(379): tr|A0A1R4B8D5|A0A1R4B8D5_9VIBR Queuine tRNA-ribosyltran sferase OS=Vibrio palustris OX=1918946 GN=tgt PE=3 SV=1
MKLQFELNKKDGTARRGKITFERGSVQTPAFMPVGTYGTVKGMTPEEVKGTGAEILLGNTFHLWLRPGQEVMKLHGDLHDFMNWQGPILTDSGGFQVFSLGDIRKITEQGVHFRNPVNGDKIFMDAEKSMEIQKDLGSDIVMIFDECTPYPATHAQAKASMQMSLRWAQRSRDHFDALENPNSLFGIVQGGVHEDLRDESVKGLTDIGFDGYAVGGLAVGEPKEEMHRMLEHTCPQLPEDKPRYLMGVGKPEDLVEGVRRGIDMFDCVMPTRNARNGHLFVTGGVIKIRNAKHKTDTTALDPECDCYTCQNYSKSYLHHLDRCNEILGARLNTIHNLRYYQRVMEGIRQAIDEDRFDSFVEEFYALRNREVPPLQKDNA

SEQ ID NO: 62190 - protein, 376 aa, Vibrio panuliri
  misc_feature (1)..(376): tr|A0A1Q9HCS2|A0A1Q9HCS2_9VIBR Queuine tRNA-ribosyltran sferase OS=Vibrio panuliri OX=1381081 GN=tgt PE=3 SV=1
MKLKFDLKKTNGNARRGQLTFERGSVQTPAFMPVGTYGTVKGMTPEEVKETGAEILLGNTFHLWLRPGQEVMKMHGDLHDFMNWQGPILTDSGGFQVFSLGDIRKITEEGVHFRNPVNGDKIFMDAEKSMEIQKDLGSDIVMIFDECTPYPATHDEAKKSMEMSLRWAQRSRDHFDKLENQNNLFGIVQGGVYEDLRDVSVKGLTEIGFDGYAVGGLAVGEPKEDMHRILEHTCPQLPTDKPRYLMGVGKPEDLVEGVRRGIDMFDCVMPTRNARNGHLFVTGGVIKIRNATHKTDTTPLDPHCDCYTCKNYSKSYLHHLDRCNEILGARLNTIHNLRYYQRLMESIRAAIDEDRFDQFVEEFYARRNREVPPLGK

SEQ ID NO: 62191 - protein, 377 aa, Vibrio parahaemolyticus
  misc_feature (1)..(377): sp|Q87S36|TGT_VIBPA Queuine tRNA-ribosyltransferase OS= Vibrio parahaemolyticus serotype O3:K6 (strain RIMD 221 0633) OX=223926 GN=tgt PE=3 SV=1
MKLKFDLKKKNGNARRGQLTFERGTVQTPAFMPVGTYGTVKGMTPEEVKGTGAEILLGNTFHLWLRPGQEVMKMHGDLHDFMNWHGPILTDSGGFQVFSLGKMRTITEKGVHFRNPVNGDKIFMDAEKSMEIQKDLGSDIVMIFDECTPYPATHNEAKKSMEMSLRWAQRSRDHFDKLENPNNLFGIVQGGVYEDLRDVSVKGLTEIGFDGYAVGGLAVGEPKEDMHRILEHTCPQLPEDKPRYLMGVGKPEDLVEGVRRGIDMFDCVMPTRNARNGHLFVTGGVIKIRNAKHKTDTTPLDPHCDCYTCQNYSKSYLHHLERCNEILGARLNTIHNLRYYQRLMESIRKAIDEDRFDEFVQEFYARRDREVPPLSKA

SEQ ID NO: 62192 - protein, 377 aa, Vibrio parahaemolyticus; identical to SEQ ID NO: 62191
  misc_feature (1)..(377): tr|A0A0D1EJ04|A0A0D1EJ04_VIBPH Queuine tRNA-ribosyltran sferase OS=Vibrio parahaemolyticus 49 OX=1288779 GN=tgt PE=3 SV=1

SEQ ID NO: 62193 - protein, 394 aa, Vibrio pectenicida
  misc_feature (1)..(394): tr|A0A427U6Q4|A0A427U6Q4_9VIBR Queuine tRNA-ribosyltran sferase OS=Vibrio pectenicida OX=62763 GN=tgt PE=3 SV=1
MLGTFRQAVSLTIGGLVKLQFDLKKKDGTARRGQLTFERGSVQTPAFMPVGTYGTVKGMTPEEVKDTGAEILLGNTFHLWLRPGQEVMKMHGDLHDFMNWQGPILTDSGGFQVFSLGDMRKITEQGVHFRSPVNGDKIFMDAEKSMEIQQDLGSDIVMIFDECTPYPATHDEAKKSMEMSLRWAQRSRDHFDKLENPNSLFGIVQGGVYEDLRDVSVKGLTEIGFDGYAVGGLAVGEPKEDMHRVLEHTCPQLPEDKPRYLMGVGKPEDLVEGVRRGIDMFDCVMPTRNARNGHLFVTGGVIKIRNAKHKTDTTPLDPECDCYTCQNYSKAYLHHLDRCNEILGARLNTIHNLRYYQRVMEGIRSAIDEDRFYEFVQEFYARRDREVPPLAKEQ

SEQ ID NO: 62194 - protein, 376 aa, Vibrio penaeicida
  misc_feature (1)..(376): tr|A0A3S0PSK9|A0A3S0PSK9_9VIBR Queuine tRNA-ribosyltran sferase OS=Vibrio penaeicida OX=104609 GN=tgt PE=3 SV=1
MKLTYELKKTNGNARRGQLTFERGTVQTPAFMPVGTYGTVKGMTPEEVKGTGAEILLGNTFHLWLRPGQEVMKMHGDLHDFMNWHGPILTDSGGFQVFSLGDIRKITEEGVHFRNPVNGDRIFMDAEKSMEIQKDLGSDVVMIFDECTPYPATHDEAKKSMEMSLRWAQRSRDHFDKLDNQNSLFGIVQGGVYEDLRDVSVKGLTDIGFDGYAVGGLAVGEPKEDMHRVLEHTCPQLPEDKPRYLMGVGKPEDLVEGVRRGIDMFDCVMPTRNARNGHLFVTGGVIKIRNATHKTDTTPLDPECDCYTCQNYSKAYLHHLDRCNEILGSRLNTIHNLRYYQRVMESIRTAIDEDRFDQFVEDFYARRNREVPPLNK

SEQ ID NO: 62195 - protein, 42 aa, Vibrio ponticus
  misc_feature (1)..(42): tr|A0A090PKA4|A0A090PKA4_9VIBR tRNA-guanine transglycos ylase OS=Vibrio ponticus OX=265668 GN=JCM19238_1518 PE= 4 SV=1
MKLKFDLKKTNGNARRGQLTFERGTVQTPAFMPVGTYGTVKA

SEQ ID NO: 62196 - protein, 335 aa, Vibrio ponticus
  misc_feature (1)..(335): tr|A0A090P505|A0A090P505_9VIBR Queuine tRNA-ribosyltran sferase OS=Vibrio ponticus OX=265668 GN=tgt PE=3 SV=1
MTPEEVKETGAEILLGNTFHLWLRPGQEVMKMHGDLHDFMNWQGPILTDSGGFQVFSLGDIRKITEEGVHFRNPVNGDKIFMDAEKSMEIQKDLGSDIVMIFDECTPYPATHDEAKKSMEMSLRWAQRSRDHFDKLENPNNLFGIVQGGVYEDLRDVSVKGLTEIGFDGYAVGGLAVGEPKEDMHRVLEHTCPQLPTDKPRYLMGVGKPEDLVEGVRRGIDMFDCVMPTRNARNGHLFVTGGVIKIRNATHKTDTTPLDPHCDCYTCKNYSKSYLHHLDRCNEILGARLNTIHNLRYYQRLMESIRSAIDEDRFDQFVEEFYARRNREVPPLGKQ

SEQ ID NO: 62197 - protein, 376 aa, Vibrio proteolyticus
  misc_feature (1)..(376): tr|U3BMY2|U3BMY2_VIBPR Queuine tRNA-ribosyltransferase OS=Vibrio proteolyticus NBRC 13287 OX=1219065 GN=tgt PE =3 SV=1
MKLTFDLKKKNGNARRGQLTFERGTVQTPAFMPVGTYGTVKGMTPEEVKGTGAEILLGNTFHLWLRPGQEVMKMHGDLHDFMNWHGPILTDSGGFQVFSLGDIRKITEEGVHFRNPVNGDKIFMDAEKSMEIQKDLGSDIVMIFDECTPYPATHAEAKTSMEMSLRWAQRSRDHFDKLDNPNNLFGIVQGGVYEDLRDVSVKGLTEIGFDGYAVGGLAVGEPKEDMHRILEHTCPQLPEDKPRYLMGVGKPEDLVEGVRRGIDMFDCVMPTRNARNGHLFVTGGVIKIRNAKHKTDTSPLDPQCDCYTCQNYSKSYLHHLDRCNEILGARLNTIHNLRYYQRLMESIRKAIDEDRFDQFVEEFYARRNREVPPLSK

SEQ ID NO: 62198 - protein, 376 aa, Vibrio qinghaiensis
  misc_feature (1)..(376): tr|A0A223MVS7|A0A223MVS7_9VIBR Queuine tRNA-ribosyltran sferase OS=Vibrio qinghaiensis OX=2025808 GN=tgt PE=3 S V=1
MKLTFELKKKNGNARRGQLTFERGTVQTPAFMPVGTYGTVKGMTPEEVKETGAEILLGNTFHLWLRPGQEVMKMHGDLHDFMNWQGPILTDSGGFQVFSLGDIRKITEEGVHFRNPVNGDKIFMDAEKSMEIQKDLGSDIVMIFDECTPYPATHDEAKKSMEMSLRWAQRSRDHFDKLENTNSLFGIVQGSVYEDLRDVSVKGLTEIGFDGYAVGGLAVGEPKEDMHRVLEHTCPQLPEDKPRYLMGVGKPEDLVEGVRRGIDMFDCVMPTRNARNGHLFVTGGVIKIRNAVHKTDTTALDPHCDCYTCKNYSKSYLHHLDRCNEILGARLNTIHNLRYYQRLMASIRLAIEEDRFDAFVEEFYARRNREVPPMGQ

SEQ ID NO: 62199 - protein, 377 aa, Vibrio quintilis
  misc_feature (1)..(377): tr|A0A1M7YZP1|A0A1M7YZP1_9VIBR Queuine tRNA-ribosyltran sferase OS=Vibrio quintilis OX=1117707 GN=tgt PE=3 SV=1
MKLKFELKKKNGNARRGQIQFERGTVQTPAFMPVGTYGTVKGMTPEEVKDTGAEILLGNTFHLWLRPGQEIMKMHGDLHDFMNWQGPILTDSGGFQVFSLGDIRKITEEGVHFRNPVNGEKIFMDAEKSMEIQNDLGSDVVMIFDECTPYPATHDEARSSMEMSLRWAKRSRDHFDKLENPNSLFGIVQGSVYEDLRDISAKGLTDIGFDGYAVGGLAVGEPKEDMHRILEHTCPLLPEDKPRYLMGVGKPEDLVEGVRRGVDMFDCVMPTRNARNGHLFVTGGVVKIRNARHKTDTTPLDPECDCYTCKNYSKSYLHHLDRCNEILGARLNTIHNLRYYQRLMASIRQAIEADRFEEFVTDFYARRDRDVPPVGQV

SEQ ID NO: 62200 - protein, 377 aa, Vibrio renipiscarius
  misc_feature (1)..(377): tr|A0A0C2KDG9|A0A0C2KDG9_9VIBR Queuine tRNA-ribosyltran sferase OS=Vibrio renipiscarius OX=1461322 GN=tgt PE=3 SV=1
MKLTFDLKKKDGVARRGQLTFERGTVQTPAFMPVGTYGTVKGMTPEEVKETGAEILLGNTFHLWLRPGQEVMKMHGDLHDFMNWQGPILTDSGGFQVFSLGKMRKITEEGVHFRSPVNGDKVFMDAEKSMEIQKDLGSDIVMIFDECTPYPATHDEAKKSMEMSLRWAQRSRDHFDKLENPNSLFGIVQGGVYEDLRDVSVKGLTEIGYDGYAVGGLAVGEPKEDMHRILEHTCPQLPEDKPRYLMGVGKPEDLVEGVRRGIDMFDCVMPTRNARNGHLFVTGGVIKIRNATHKTDTTPLDPQCDCYTCKNYSKAYLHHLDRCNEILGARLNTIHNLRYYQRLMESIRTAIDEDRFEQFVEEFYARRNREVPPIGKQ

SEQ ID NO: 62201 - protein, 378 aa, Vibrio rotiferianus; identical to SEQ ID NO: 62125
  misc_feature (1)..(378): tr|A0A2K7SS02|A0A2K7SS02_9VIBR Queuine tRNA-ribosyltran sferase OS=Vibrio rotiferianus OX=190895 GN=tgt PE=3 SV =1

SEQ ID NO: 62202 - protein, 377 aa, Vibrio ruber
  misc_feature (1)..(377): tr|A0A1R4LMY5|A0A1R4LMY5_9VIBR Queuine tRNA-ribosyltran sferase OS=Vibrio ruber DSM 16370 OX=1123498 GN=tgt PE= 3 SV=1
MKLKFELKKKQGNARRGQITFERGTVQTPVFMPVGTYGTVKGMTPEEVKETGAEILLGNTFHLWLRPGQEVMKMHGDLHDFMNWQGPILTDSGGFQVFSLGDIRKITEEGVHFRNPVNGEKIFMDAEKSMEIQNDLGSDIVMIFDECTPYPATHTEAKQSMEMSLRWAKRSREHFDQLENPNSLFGIVQGGVYEDLRDVSVAGLTEIGFDGYAVGGLAVGEPKEDMHRILEHTCPQLPEDKPRYLMGVGKPEDLVEGVRRGIDMFDCVMPTRNARNGHLFVTGGVIKIRNAKHKTDTTPLDPHCDCYTCKHYSKSYLHHLDRCNEILGARLNTIHNLRYYQRLMASIREAIEADRFDVFVEEFYARRERAVPPLAKA

SEQ ID NO: 62203 - protein, 381 aa, Vibrio rumoiensis
  misc_feature (1)..(381): tr|A0A1E5E5J7|A0A1E5E5J7_9VIBR Queuine tRNA-ribosyltran sferase OS=Vibrio rumoiensis 1S-45 OX=1188252 GN=tgt PE =3 SV=1
MEYELIKKDGVARRGRLTFKRGSVETPAFMPVGTYGTVKGMTPEEVKDTGAEILLGNTFHLWLRPGQEIMKLHGDLHDFMNWHGPILTDSGGFQVFSLGAMRKITEEGVHFRNPVNGDRIFMDAEKSMEIQKDLGSDIVMIFDECTPYPATHEEAKKSMEMSLRWAQRSRDHFDKLENPNSLFGIVQGGVYGDLRDVSVKGLTEIGFDGYAVGGLAVGEPKEDMHHMLEHTCPQLPEDKPRYLMGVGKPEDLVEGVRRGIDMFDCVMPTRNARNGHLFVTGGVVKIRNASHKTDTSPLDPHCDCYTCKNYSKSYLHHLDRCNEILGARLNTIHNLRYYQRLMASIRKAIDEDRFDEFVQEFYARRDREVPPLQKEIRSSAQ

SEQ ID NO: 62204 - protein, 377 aa, Vibrio sagamiensis; identical to SEQ ID NO: 62109
  misc_feature (1)..(377): tr|A0A511QJ79|A0A511QJ79_9VIBR Queuine tRNA-ribosyltran sferase OS=Vibrio sagamiensis NBRC 104589 OX=1219064 GN =tgt PE=3 SV=1

SEQ ID NO: 62205 - protein, 377 aa, Vibrio scophthalmi
  misc_feature (1)..(377): tr|A0A1C7F633|A0A1C7F633_9VIBR Queuine tRNA-ribosyltran sferase OS=Vibrio scophthalmi OX=45658 GN=tgt PE=3 SV=1
MKLKFDLKKKDGVARRGQLIFERGTVQTPAFMPVGTYGTVKGMTPEEVKETGAEILLGNTFHLWLRPGQEVMKMHGDLHDFMNWQGPILTDSGGFQVFSLGKMRKITEEGVHFRSPVNGDKIFMDAEKSMEIQKDLGSDIVMIFDECTPYPATHDEAKKSMEMSLRWAQRSRDHFDKLENPNSLFGIVQGGVYEDLRDVSVKGLTEIGYDGYAVGGLAVGEPKEDMHRILEHTCPQLPEDKPRYLMGVGKPEDLVEGVRRGIDMFDCVMPTRNARNGHLFVTGGVIKIRNATHKTDTTPLDPQCDCYTCKNYSKAYLHHLDRCNEILGARLNTIHNLRYYQRLMESIRTAIDEDRFDQFVEEFYARRNREVPPIGKQ

SEQ ID NO: 62206 - protein, 377 aa, Vibrio scophthalmi
  misc_feature (1)..(377): tr|A0A1B1NRA3|A0A1B1NRA3_9VIBR Queuine tRNA-ribosyltran sferase OS=Vibrio scophthalmi OX=45658 GN=tgt PE=3 SV=1
MKLKFDLKKKDGVARRGQLTFERGTVQTPAFMPVGTYGTVKGMTPEEVKETGAEILLGNTFHLWLRPGQEVMKMHGDLHDFMNWQGPILTDSGGFQVFSLGKMRKITEEGVHFRSPVNGDKIFMDAEKSMEIQKDLGSDIVMIFDECTPYPATHDEAKKSMEMSLRWAQRSRDHFDKLENPNSLFGIVQGGVYEDLRDVSVKGLTEIGYDGYAVGGLAVGEPKEDMHRILEHTCPQLPEDKPRYLMGVGKPEDLVEGVRRGIDMFDCVMPTRNARNGHLFVTGGVIKIRNATHKTDTTPLDPQCDCYTCKNYSKAYLHHLDRCNEILGARLNTIHNLRYYQRLMESIRTAIDEDRFDQFVEEFYARRNREVPPIGKQ

SEQ ID NO: 62207 - protein, 377 aa, Vibrio shilonii; identical to SEQ ID NO: 62120
  misc_feature (1)..(377): tr|A6D750|A6D750_9VIBR Queuine tRNA-ribosyltransferase OS=Vibrio shilonii AK1 OX=391591 GN=tgt PE=3 SV=1

SEQ ID NO: 62208 - protein, 378 aa, Vibrio sinaloensis; identical to SEQ ID NO: 62128
  misc_feature (1)..(378): tr|A0A0A5I033|A0A0A5I033_9VIBR Queuine tRNA-ribosyltran sferase OS=Vibrio sinaloensis OX=379097 GN=tgt PE=3 SV= 1

SEQ ID NO: 62209 - protein, 378 aa, Vibrio sinaloensis
  misc_feature (1)..(378): tr|E8MCY4|E8MCY4_9VIBR Queuine tRNA-ribosyltransferase OS=Vibrio sinaloensis DSM 21326 OX=945550 GN=tgt PE=3 S V=1
MKLKFDLKKKDGVARRGQLTFERGTVQTPAFMPVGTYGTVKGMTPEEVKGTGAEILLGNTFHLWLRPGQEIMKMHGDLHDFMNWHGPILTDSGGFQVFSLGKMRTITEEGVHFRNPVNGDKIFMDAEKSMEIQKDLGSDIVMIFDECTPYPATHDEAKKSMEMSLRWAQRSRDHFDKLENPNNLFGIVQGGVYEDLRDVSVKGLTDIGFDGYAVGGLAVGEPKEDMHRILEHTCPQLPEDKPRYLMGVGKPEDLVEGVRRGIDMFDCVMPTRNARNGHLFVTGGVIKIRNAKHKTDTTPLDPHCDCYTCQNYSKSYLHHLERCNEILGARLNTIHNLRYYQRLMESIRSAIDEDRFDEFVKEFYERRGREVPPLSKEQ

SEQ ID NO: 62210 - protein, 377 aa, Vibrio sp.
  misc_feature (1)..(377): tr|A0A1A6KFA9|A0A1A6KFA9_9VIBR Queuine tRNA-ribosyltran sferase OS=Vibrio sp. UCD-FRSSP16_10 OX=1853257 GN=tgt PE=3 SV=1
MKFELKKTDGTARRGQLQFERGSVQTPAFMPVGTYGTVKGMTPEEVTETGAEILLGNTFHLWLRPGQEVMKLHGDLHDFMNWQGPILTDSGGFQVFSLGDLRKITEQGVHFRNPVNGDKIFMDAEKSMEIQKDLGSDIVMIFDECTPYPATHDEAQKSMEMSLRWAQRSRDHFDKLENTNSLFGIVQGGVYEDLRDVSVEGLTNIGFDGYAVGGLAVGEPKEDMHRILEHTCPQLPQDKPRYLMGVGKPEDLVEGVRRGIDMFDCVMPTRNARNGHLFVTGGVIKIRNAKHKTDTTPLDPECDCYTCRNYSKSYLHHLDRCNEILGSRLNTIHNLRYYQRLMESIRKAIDEDRFDAFVEEFYARRDRDVPPMLKAEA

SEQ ID NO: 62211 - protein, 377 aa, Vibrio sp.; identical to SEQ ID NO: 62120
  misc_feature (1)..(377): tr|A0A084T9F8|A0A084T9F8_9VIBR Queuine tRNA-ribosyltran sferase OS=Vibrio sp. ER1A OX=1517681 GN=tgt PE=3 SV=1

SEQ ID NO: 62212 - protein, 377 aa, Vibrio spartinae
  misc_feature (1)..(377): tr|A0A1N6LZV4|A0A1N6LZV4_9VIBR Queuine tRNA-ribosyltran sferase OS=Vibrio spartinae OX=1918945 GN=tgt PE=3 SV=1
MKLKFELKKKQGNARRGQITFERGTVQTPAFMPVGTYGTVKGMTPEEVKETGAEILLGNTFHLWLRPGQEVMKMHGDLHDFMNWQGPILTDSGGFQVFSLGDIRKITEEGVHFRNPVNGEKIFMDAEKSMEIQNDLGSDIVMIFDECTPYPATHAEAKQSMEMSLRWAKRSRDHFDQLENPNSLFGIVQGGVYEDLRDVSAAGLTALDFDGYAVGGLAVGEPKEDMHRILEHTCPQLPEDKPRYLMGVGKPEDLVEGVRRGIDMFDCVMPTRNARNGHLFVTGGVIKIRNAKHKTDTTPLDPHCDCYTCKHYSKSYLHHLDRCNEILGARLNTIHNLRYYQRLMESIRQAIEADRFDAFVEEFYARRERAVPPLAKA

SEQ ID NO: 62213 - protein, 378 aa, Vibrio splendidus; identical to SEQ ID NO: 62117
  misc_feature (1)..(378): tr|A0A0P6YGG8|A0A0P6YGG8_VIBSP Queuine tRNA-ribosyltran sferase OS=Vibrio splendidus OX=29497 GN=tgt PE=3 SV=1

SEQ ID NO: 62214 - protein, 378 aa, Vibrio splendidus
  misc_feature (1)..(378): tr|A0A2N7KYU7|A0A2N7KYU7_VIBSP Queuine tRNA-ribosyltran sferase OS=Vibrio splendidus OX=29497 GN=tgt PE=3 SV=1
MKLKYELKKTNSGARRGQLQFERGSVETPAFMPVGTYGTVKGMTPEEVKDTGAEILLGNTFHLWLRPGQEIMKLHGDLHDFMNWKGPILTDSGGFQVFSLGATRKITEEGVHFRNPVNGDKIFMDAEKSMEIQKDLGSDIVMIFDECTPYPATHKEAKDSMEMSLRWAQRSRNHFDEQENPNSLFGIVQGGVYEDLRDVSVKGLTEIGFDGYAVGGLAVGEPKEDMHRILEHTCPQLPEDKPRYLMGVGKPEDLVEGVRRGIDMFDCVMPTRNARNGHLFVTEGVIKIRNAKHKTDTTPLDSDCDCYTCKNYSKSYLHHLDRCNEILGARLNTIHNLRFYQRIMSDIRQSIDEDRFEEFVAEFYARMGREVPPLGKES

SEQ ID NO: 62215 - protein, 378 aa, Vibrio superstes
  misc_feature (1)..(378): tr|A0A511QMB0|A0A511QMB0_9VIBR Queuine tRNA-ribosyltran sferase OS=Vibrio superstes NBRC 103154 OX=1219062 GN=t gt PE=3 SV=1
MKFELKKTDGVARRGQLDFERGSVQTPAFMPVGTYGTVKGMTPEEVKGTGAEILLGNTFHLWLRPGQEVMKLHGDLHDFMNWQGPILTDSGGFQVFSLGDIRKITEKGVHFRNPVNGDKIFMDAEKSMEIQKDLGSDVVMIFDECTPYPATHNEAQKSMEMSLRWAQRSRDHFDKLENPNSLFGIVQGGVYEDLRDVSVEGLTKIGFDGYAVGGLAVGEPKEDMHRILEHTCPQLPIDKPRYLMGVGKPEDLVEGVRRGIDMFDCVMPTRNARNGHLFVTGGVIKIRNAKHKTDTTPLDPECDCYTCQNYSKSYLHHLDRCNEILGSRLNTIHNLRYYQRLMESIRTAIDEDRFESFVEEFYARRDRDVPPMLKADAE

SEQ ID NO: 62216 - protein, 376 aa, Vibrio tapetis
  misc_feature (1)..(376): tr|A0A2N8ZF16|A0A2N8ZF16_9VIBR Queuine tRNA-ribosyltran sferase OS=Vibrio tapetis subsp. tapetis OX=1671868 GN= tgt PE=3 SV=1
MKLKYELKKKNGNARRGQLTFERGTVQTPAFMPVGTYGTVKGMTPEEVKGTGAEILLGNTFHLWLRPGQEIMKLHGDLHDFMNWKGPILTDSGGFQVFSLGATRKITEEGVHFRNPVNGDKVFMDAEKSMQIQYDLGSDVVMIFDECTPYPATHDEAKKSMEMSLRWAQRSRDEFDRQENQNSLFGIIQGGVYEDLRDVSVKGLTDIGFDGYAVGGLAVGEPKEDMHRILEHTCPQIPEDKPRYLMGVGKPEDLVEGVRRGIDMFDCVMPTRNARNGHLFVTGGVIKIRNAKHKMDTTPLDPHCDCYTCQNYSKSYLHHLDRCNEILGARLNTIHNLRYYQRVMEGIRTAIDEDRFDEYVEEFYALRDREVPPLSK

SEQ ID NO: 62217 - protein, 378 aa, Vibrio tasmaniensis
  misc_feature (1)..(378): sp|B7VJR8|TGT_VIBTL Queuine tRNA-ribosyltransferase OS= Vibrio tasmaniensis (strain LGP32) OX=575788 GN=tgt PE= 3 SV=1
MKLKYELKKTNSGARRGQLQFERGTVETPAFMPVGTYGTVKGMTPEEVKDTGAEILLGNTFHLWLRPGQEIMKLHGDLHDFMNWKGPILTDSGGFQVFSLGATRKITEEGVHFRNPVNGDKIFMDAEKSMEIQKDLGSDIVMIFDECTPYPATHKEAKDSMEMSLRWAQRSRDHFDKQENPNSLFGIVQGGVYEDLRDVSVKGLTEIGFDGYAVGGLAVGEPKEDMHRILEHTCPQLPEDKPRYLMGVGKPEDLVEGVRRGIDMFDCVMPTRNARNGHLFVTEGVIKIRNAKHKTDTTPLDSDCDCYTCKNYSKSYLHHLDRCNEILGARLNTIHNLRFYQRVMSDIRQSIDEDRFEEFVAEFYARMGREVPPLGKES

SEQ ID NO: 62218 - protein, 378 aa, Vibrio tasmaniensis; identical to SEQ ID NO: 62217
  misc_feature (1)..(378): tr|A0A2N7NEG8|A0A2N7NEG8_9VIBR Queuine tRNA-ribosyltran sferase OS=Vibrio tasmaniensis OX=212663 GN=tgt PE=3 SV =1

SEQ ID NO: 62219 - protein, 377 aa, Vibrio thalassae
  misc_feature (1)..(377): tr|A0A240EHD2|A0A240EHD2_9VIBR Queuine tRNA-ribosyltran sferase OS=Vibrio thalassae OX=1243014 GN=tgt PE=3 SV=1
MKLQYELKKKNGHARRGQLTFERGTVQTPAFMPVGTYGTVKGMTPEEVKGTGAEILLGNTFHLWLRPGQEVMKMHGDLHDFMNWQGPILTDSGGFQVFSLGDIRKITEEGVHFRNPVNGDKIFMDAEKSMEIQKDLGSDIVMIFDECTPYPATHAEAKKSMEMSLRWAQRSRDHFDQLENPNSLFGIVQGSVYEDLRDVSVEGLTNIGFDGYAVGGLAVGEPKEDMHRVLEHTTPKLPEDKPRYLMGVGKPEDLVEGVRRGIDMFDCVMPTRNARNGHLFVTGGIVKIRNATNKTDTGPLDEHCDCYTCKNYSKAYLHHLDRCNEILGARLNTIHNLRYYQRLMESIRTAIDEDRFDAFVEEFYARRNREVPPLDMK

SEQ ID NO: 62220 - protein, 378 aa, Vibrio toranzoniae; identical to SEQ ID NO: 62130
  misc_feature (1)..(378): tr|A0A109D8H5|A0A109D8H5_9VIBR Queuine tRNA-ribosyltran sferase OS=Vibrio toranzoniae OX=1194427 GN=tgt PE=3 SV =1

SEQ ID NO: 62221 - protein, 378 aa, Vibrio tubiashii
  misc_feature (1)..(378): tr|A0A0A5IA03|A0A0A5IA03_9VIBR Queuine tRNA-ribosyltran sferase OS=Vibrio tubiashii OX=29498 GN=tgt PE=3 SV=1
MKLKFDLKKKDGVARRGQLTFERGTVQTPAFMPVGTYGTVKGMTPEEVKGTGAEILLGNTFHLWLRPGQEVMKMHGDLHDFMNWQGPILTDSGGFQVFSLGKMRTITEQGVHFRNPVNGDKIFMDAEKSMEIQKDLGSDIVMIFDECTPYPATHDEAKKSMEMSLRWAQRSRDHFDKLDNPNNLFGIVQGGVYEDLRDVSVKGLTEIGFDGYAVGGLAVGEPKEDMHRILEHTCPQLPEDKPRYLMGVGKPEDLVEGVRRGIDMFDCVMPTRNARNGHLFVTGGVIKIRNAKHKTDTTALDPHCDCYTCQNYSKSYLHHLERCNEILGARLNTIHNLRYYQRLMESIRNAIDEDRFDEFVQEFYERRGREVPPLAKEQ

SEQ ID NO: 62222 - protein, 378 aa, Vibrio tubiashii
  misc_feature (1)..(378): tr|F9TBP2|F9TBP2_9VIBR Queuine tRNA-ribosyltransferase OS=Vibrio tubiashii ATCC 19109 OX=1051646 GN=tgt PE=3 S V=1
MKLKFDLKKKDGVARRGQLTFERGTVQTPAFMPVGTYGTVKGMTPEEVKGTGAEILLGNTFHLWLRPGQEVMKMHGDLHDFMNWHGPILTDSGGFQVFSLGKMRTITEQGVHFRNPVNGDKIFMDAEKSMEIQKDLGSDIVMIFDECTPYPATHDEAKKSMEMSLRWAQRSRDHFDKLENPNNLFGIVQGGVYEDLRDVSVKGLTDIGFDGYAVGGLAVGEPKEDMHRILEHTCPQLPEDKPRYLMGVGKPEDLVEGVRRGIDMFDCVMPTRNARNGHLFVTGGVIKIRNAKHKTDTTPLDPHCDCYTCQNYSKSYLHHLERCNEILGARLNTIHNLRYYQRLMESIRKAIDEDRFDEFVTEFYERRGREVPPLAKEQ

SEQ ID NO: 62223 - protein, 381 aa, Vibrio variabilis
  misc_feature (1)..(381): tr|A0A090S8F0|A0A090S8F0_9VIBR Queuine tRNA-ribosyltran sferase OS=Vibrio variabilis OX=990271 GN=tgt PE=3 SV=1
MKLQYELKKKDGHARRGQLTFERGTVQTPAFMPVGTYGTVKGMTPEEVRGTGAEILLGNTFHLWLRPGQEIMKLHGDLHDFMNWHGPILTDSGGFQVFSLGDIRKITEEGVHFRNPVNGDRIFMDAEKSMEIQKDLGSDVVMIFDECTPYPATHAEAKKSMEMSLRWAQRSRDHFDKLDNENSLFGIVQGSVYEDLREVSVKGLTDIGFDGYAVGGLAVGEPKEEMHRVLEFTTPKLPEDKPRYLMGVGKPEDLVEGVRRGIDMFDCVMPTRNARNGHLFVTGGVIKIRNATNKTDTGPLDENCDCYTCQNYSKAYLHHLDRCNEILGARLNTIHNLRHYQMLMESIRKAIDEDRFEQFVEEFYARRNREVPPLDMKVDAQ

SEQ ID NO: 62224 - protein, 378 aa, Vibrio vulnificus; identical to SEQ ID NO: 62146
  misc_feature (1)..(378): sp|Q8DEY0|TGT_VIBVU Queuine tRNA-ribosyltransferase OS= Vibrio vulnificus (strain CMCP6) OX=216895 GN=tgt PE=3 SV=2

SEQ ID NO: 62225 - protein, 378 aa, Vibrio vulnificus; identical to SEQ ID NO: 62146
  misc_feature (1)..(378): tr|A0A087IHZ2|A0A087IHZ2_VIBVL Queuine tRNA-ribosyltran sferase OS=Vibrio vulnificus OX=672 GN=tgt PE=3 SV=1

SEQ ID NO: 62226 - protein, 376 aa, Vibrio xiamenensis
  misc_feature (1)..(376): tr|A0A1G7W5U2|A0A1G7W5U2_9VIBR Queuine tRNA-ribosyltran sferase OS=Vibrio xiamenensis OX=861298 GN=tgt PE=3 SV= 1
MKLQFNLNKKNGNARRGQLTFERGTVQTPAFMPVGTYGTVKGMTPEEVKATGAEILLGNTFHLWLRPGQEVMKMHGDLHDFMNWQGPILTDSGGFQVFSLGDIRKITEEGVHFRNPVNGDKIFMDAEKSMEIQKDLGSDIVMIFDECTPYPATHDEAKKSMEMSLRWAQRSRDHFDKLENPNNLFGIVQGGVYEDLRDVSVKGLTEIGFDGYAVGGLAVGEPKEDMHRILEHTCPQLPEDKPRYLMGVGKPEDLVEGVRRGIDMFDCVMPTRNARNGHLFVTGGVIKIRNAVHKTDTSPLDPHCDCYTCKNYSKSYLHHLDRCNEILGARLNTIHNLRYYQRLMESIRQAIDEDRFDDFVTEFYERRGREVSPLGK

SEQ ID NO: 62227 - protein, 376 aa, Vibrionales bacterium; identical to SEQ ID NO: 62154
  misc_feature (1)..(376): tr|A0A366XPN5|A0A366XPN5_9GAMM Queuine tRNA-ribosyltran sferase OS=Vibrionales bacterium C3R12 OX=2267228 GN=tg t PE=3 SV=1

SEQ ID NO: 62228 - protein, 387 aa, Vibrionales bacterium
  misc_feature (1)..(387): tr|A5L7R7|A5L7R7_VIBBS Queuine tRNA-ribosyltransferase OS=Vibrionales bacterium (strain SWAT-3) OX=391574 GN=t gt PE=3 SV=1
MFLWHIGGFVKLKYELKKTIAGARRGQLQFERGTVETPAFMPVGTYGTVKGMTPEEVKDTGAEILLGNTFHLWLRPGQEIMKMHGDLHDFMNWQGPILTDSGGFQVFSLGAMRKITEEGVHFRNPVNGDKIFMDAEKSMEIQKDLGSDIVMIFDECTPYPATHKEAKDSMEMSLRWAERSRNHFDKLENPNSLFGIVQGGVYEDLRDVSVKGLTEIGFDGYAVGGLAVGEPKEDMHRILEHTCPQLPEDKPRYLMGVGKPEDLVEGVRRGIDMFDCVMPTRNARNGHLFVTEGVIKIRNAKHKTDTTPLDSECDCYTCKNYSKSYLHHLDRCNEILGARLNTIHNLRFYQRVMSDIRQSIDEDRFEEFVAEFYARMGREVPPLGKES

SEQ ID NO: 62229 - protein, 380 aa, Vibrionimonas magnilacihabitans
  misc_feature (1)..(380): tr|A0A2S8SG31|A0A2S8SG31_9BACT Queuine tRNA-ribosyltran sferase OS=Vibrionimonas magnilacihabitans OX=669455 GN =tgt PE=3 SV=1
MAALTFELQASGIAGSEARAGKIRTDHGEIITPIFMPVGTVGSVKAVTKQQLKDDVQAQIILGNTYHLYLRPGTGVLEAAGGLHRFNGWDRPILTDSGGYQVFSLAGNRKIKEEGVWFQSHIDGSRHLFSPESVMDIQRSIGADIMMAFDECQPYPSEYHYAKKSMELTHRWLDRCIQRLAETPDKYGYTQNLFPIVQGSTYKDLRDASCDYIASKNAVGNAIGGLSVGEPEDMMYEFTESCASRLPFNKPRYLMGVGTPWNILECIHRGIDLFDCVMPTRNGRNGMLFTTQGVVNIRNKKWATDFSPIDPGLPNEMSQYYTKAYLRHLFVSEELLGLQLASLQNLSFYLWLVGEARKHILGGDFVSWKNEMVQIVKQRL

SEQ ID NO: 62230 - protein, 376 aa, Vicingus serpentipes
  misc_feature (1)..(376): tr|A0A5C6RTV0|A0A5C6RTV0_9FLAO Queuine tRNA-ribosyltran sferase OS=Vicingus serpentipes OX=1926625 GN=tgt PE=3 SV=1
MDFKLEKKDINSKARAGTITTAHGEIKTPIFMPVGTAGTVKGVHQHEIKDDIKAQIILGNTYHLYLRPKLDILKSAGGLHKFINWDKPILTDSGGYQVYSLSGRRKIKEEGATFSSHIDGSKHLFTPEYVMDIQRTIGADIIMAFDECTPYPCDYKYAKNSMHMTHRWLKRCCERFDSTEPLYGYDQTLFPIVQGSTYKDLRKQSAEKIASFEREGNAIGGLSVGEPDDEMYEMCEVVTNILPEDKPRYLMGVGTPINLLENIALGIDMFDCVMPTRNARNGMLFTSQGTINIKNKKWENDLSPIDPDGTSYVDSFYSKAYLRHLIISKEILGAQIATIHNLAFYLWLVTEAREQILAGTFYDWKAKMVKQLGQKL

SEQ ID NO: 62231 - protein, 360 aa, Victivallales bacterium
  misc_feature (1)..(360): tr|A0A2S0KWE4|A0A2S0KWE4_9BACT Queuine tRNA-ribosyltran sferase OS=Victivallales bacterium CCUG 44730 OX=209424 2 GN=tgt PE=3 SV=1
MFEVLSRCGNARRGVLTTRRGTVQTPVFMPVGTRASVKAMSPAELEELGAEIILGNTYHLFLRPGMELMAKAGGLHRFSSWKRSILTDSGGFQVFSLATLRKMEPDGVRFASHIDGTRFFLGPRESMAIQRTLDSDIVMAFDECTPYPATFEQAEKSLAVTTRWERMSREQPLNDGQIRFGIVQGSVYPELRKRAAESLVEIGFDGYAIGGVSVGESEPEMMLAVDAAAPHLPDNAPRYLMGVGTPRQIVESVARGVDMFDCVMPTRLGRHGSAFVGGGGTIPVKAGRYADDFTPIDPECSCYACRNFTRAYIRHLFNVGEILGVRLVTLHNLHYFLNLMRRIRASIENGTFEELRKEFQ

SEQ ID NO: 62232 - protein, 366 aa, Victivallis vadensis
  misc_feature (1)..(366): tr|A0A2U1AVW1|A0A2U1AVW1_9BACT Queuine tRNA-ribosyltran sferase OS=Victivallis vadensis OX=172901 GN=tgt PE=3 S V=1
MPGIFELLKKDSASAARRGRLTTRRGVIETPVFMPVGTRATVKAMSPAELEELGAQIILGNTYHLFLRPGMEIIAAAGGLHRFENWNRSILTDSGGFQVFSLTGLRKMEPDGVRFASHIDGTRFFLGPVESMRIQRTLDSDIVMAFDECTPYPATRQQAEKSLAITTRWERMSREQPLNDGQIRFGIVQGSVFPDLREQAAKSIVGIGFDGYAIGGVSVGESEPEMMAAVDAAAPHLPENAPRYLMGVGTPRQIVESVARGVDMFDCVMPTRLARHGSAFIGNDTIPVKAGRYAKDFTPIDPQCTCYACRNFTKAYIRHLFNVGEILGVRLVTMHNLHYFINLMRRIRTSIEEGTFDLLRREFQAR

SEQ ID NO: 62233 - protein, 379 aa, Virgibacillus chiguensis
  misc_feature (1)..(379): tr|A0A1M5M6T5|A0A1M5M6T5_9BACI Queuine tRNA-ribosyltran sferase OS=Virgibacillus chiguensis OX=411959 GN=tgt PE =3 SV=1
MTPITYELKKTCKQTGARLGRVHTPHGSFDTPTFMPVGTLATVKTMSPEELTEINANIILSNTYHLWLRPGEDIIKEAGGLHQFMNWDGAILTDSGGFQVFSLSENRHITEEGVHFRSHLNGEKLFLSPEKAIQIQNALGSDIMMALDECPPYPAEYDYMKSSVERTSRWAERCLKAHERTDEQGLFGIIQGGEYEALRKQSARDLISLDFPGYAIGGLSVGEPKDVMNRVLEFTTPLMPSNKPRYLMGVGSPDSLIDGAIRGVDMFDCVLPTRIARNGTCMTANGRLVVRNAKHARDFSPIDENCDCHVCKNYTRAYIRHLIKCNETFGFRLTTYHNLYFLLKLMEQVRKAISEDRLGSFREEFFEQYGFNKPNARNF

SEQ ID NO: 62234 - protein, 379 aa, Virgibacillus dokdonensis; identical to SEQ ID NO: 62233
  misc_feature (1)..(379): tr|A0A3E0WQP8|A0A3E0WQP8_9BACI Queuine tRNA-ribosyltran sferase OS=Virgibacillus dokdonensis OX=302167 GN=tgt P E=3 SV=1

SEQ ID NO: 62235 - protein, 379 aa, Virgibacillus dokdonensis
  misc_feature (1)..(379): tr|A0A2K9J8N3|A0A2K9J8N3_9BACI Queuine tRNA-ribosyltran sferase OS=Virgibacillus dokdonensis OX=302167 GN=tgt P E=3 SV=1
MTPITYELKKTCKQTGARLGRVHTPHGSFDTPTFMPVGTLATVKTMSPEELAEINANIILSNTYHLWLRPGEDIIKEAGGLHQFMNWNGAILTDSGGFQVFSLSENRHITEEGVHFRSHLNGEKLFLSPEKAIQIQNALGSDIMMALDECPPYPAEYQYMKSSVERTSRWAERCLKAHERKGEQGLFGIIQGGEYEALRKQSARDLISLDFPGYAIGGLSVGEPKDVMNRVLEFTTPFMPSHKPRYLMGVGSPDSLIDGAIRGVDMFDCVLPTRIARNGTCMTSNGRLVVRNAKYARDFAPIDKNCDCYVCKNYTRAYIRHLIKCNETFGFRLTTYHNLYFLLKLMEQVRKAISEDRLGSFREEFFEQYGFNKPNARNF

SEQ ID NO: 62236 - protein, 379 aa, Virgibacillus halodenitrificans
  misc_feature (1)..(379): tr|A0A1J0H0Y2|A0A1J0H0Y2_VIRHA Queuine tRNA-ribosyltran sferase OS=Virgibacillus halodenitrificans OX=1482 GN=t gt PE=3 SV=1
MTPITYELIKTCKQTGARLGRVHTPHGSFDTPTFMPVGTLATVKTMSPEELKNINANIILSNTYHLWLRPGEDIVREAGGLHKFMNWDGAILTDSGGFQVFSLSDMREIKEEGVHFRNHLNGEKLFLSPEKAMHIQNALGSDIMMAFDECPPYPATYEYMKSSVERTSRWAERCLEAHGRPQDQGLFGIVQGGEYEDLRKQSARDLVSLDFPGYAIGGLSVGEPKDVMNRVLEFTTPVLPSDKPRYLMGVGSPDSLIDGAIRGIDMFDCVLPTRIARNGTCMTSKGRLVVRNAKYARDFGPLDENCDCHVCKKYSRAYIRHLIKCNETFGFRLTTYHNLYFLVKLMGQVRKAISDDRLGDFKEDFFEQYGLNKPNAKNF

SEQ ID NO: 62237 - protein, 379 aa, Virgibacillus indicus
  misc_feature (1)..(379): tr|A0A265NDJ2|A0A265NDJ2_9BACI Queuine tRNA-ribosyltran sferase OS=Virgibacillus indicus OX=2024554 GN=tgt PE=3 SV=1
MTAITYELFKTCKQTGARLGRVHTPHGSFDTPTFMPVGTLATVKTMSPEDLKEMNANIILSNTYHLWLRPGEDIIKEAGGLHKFMNWDGAILTDSGGFQVFSLSDMRKIKEEGVHFRNHLSGEKLFLSPEKAMQIQNALGSDIMMAFDECPPYPATHEYMKASVERTSRWAERCLNAHERKDVQGLFGIIQGGEFEDLRKQSAEDLVSLDFPGYAVGGLSVGEPKDVMNHVLEFTTPLMPPNKPRYLMGVGSPDSLIDGAIRGIDMFDCVLPTRIARNGTCMTSNGRLVVRNAKYARDFGPIDENCDCHVCKNYSRAYIRHLIKCNETFGFRLTTYHNLHFLLKLMEQVRTAISEDRLGDFKDAFFEQYGLNQPNAKNF

SEQ ID NO: 62238 - protein, 379 aa, Virgibacillus massiliensis
  misc_feature (1)..(379): tr|A0A024QB24|A0A024QB24_9BACI Queuine tRNA-ribosyltran sferase OS=Virgibacillus massiliensis OX=1462526 GN=tgt PE=3 SV=1
MTPITYELIKTCKQTGARLGRVHTPHGSFDTPVFMPVGTLATVKTMSPEELKEMNANIILSNTYHLWLRPGQDIIKEAGGLHRFMNWNGAILTDSGGFQVFSLSDMRDIKEEGVHFRNHLSGEKLFLSPEKAMSIQNDLGSDIMMAFDECPPYPAEHQYMKDSVERTSRWAERCLTAHQRKDDQGLFGIIQGGEYEDLRKQSASDLVSLDFPGYAIGGLSVGEPKAVMNKVLEFTTPLLPANKPRYLMGVGSPDSLIDGALRGVDMFDCVLPTRIARNGTCMTSNGRLVVRNAKYARDFTPIDENCDCHVCRNYTRAYIRHLIKCNETFGFRLTTYHNLHFLLKLMEQVRTAISEDRLGSFKEEFFEQYGFNKPNARNF

SEQ ID NO: 62239 - protein, 379 aa, Virgibacillus necropolis
  misc_feature (1)..(379): tr|A0A221MBY1|A0A221MBY1_9BACI Queuine tRNA-ribosyltran sferase OS=Virgibacillus necropolis OX=163877 GN=tgt PE =3 SV=1
MTPITYELIKTCKQTGARLGKVHTPHGSFDTPMFMPVGTLATVKTMSPEELKEMEARIILSNTYHLWLRPGEDIIKEAGGLHRFMNWDRPILTDSGGFQVFSLSKIREIQEEGVHFRNHISGEKLFLSPEKAMQIQNALGSDIMMAFDECPPYPASFDYMKSSVERTSRWAERCLEAHQNPTTQGLFGIIQGGEYEELRKQSAKDLASLDLPGYAIGGLSVGEPKDIMNRMLEYTTPLMPSTKPRYLMGVGSPDSLIDGSIRGIDMFDCVLPTRIARNGTCMTSTGRLVVRNAKYARDFSPIDENCDCHVCKNYTRAYIRHLIKSKETFGFRLTTYHNLHFLLKLMEQVRTAISEDRLGDFKEAFFEQYGLNQPNAKNF

SEQ ID NO: 62240 - protein, 379 aa, Virgibacillus pantothenticus
  misc_feature (1)..(379): tr|A0A0L0QPY3|A0A0L0QPY3_VIRPA Queuine tRNA-ribosyltran sferase OS=Virgibacillus pantothenticus OX=1473 GN=tgt PE=3 SV=1
MTPITYELKKTCKQTGARLGRVHTPHGSFDTPAFMPVGTLATVKTMSPEELTEMNANIILSNTYHLWLRPGQDIIKEAGGLHQFMNWDGAILTDSGGFQVFSLSEMRNITEEGVHFRSHLNGEKLFLSPEKAINIQNDLGSDIMMALDECPPYPADHAYMKSSVERTSRWAERCLHAHQRKDEQGLFGIIQGGEYEDLRKQSANDLISLDFPGYAIGGLSVGEPKDVMNRVLEFTTPLMPDDKPRYLMGVGSPDSLIDGAVRGVDMFDCVLPTRIARNGTCMTSNGRLVVRNAKYARDFSPIDENCDCHVCKNYTRAYIRHLIKCNETFGFRLTTYHNLYFLLKLMEQVRKAISEDRLGSFREEFFEQYGFNKPNARNF

SEQ ID NO: 62241 - protein, 379 aa, Virgibacillus phasianinus
  misc_feature (1)..(379): tr|A0A220U5U0|A0A220U5U0_9BACI Queuine tRNA-ribosyltran sferase OS=Virgibacillus phasianinus OX=2017483 GN=tgt PE=3 SV=1
MTAITYELIKTCKQTGARLGKVHTPHGSFDTPMFMPVGTLATVKTMSPEELKEIDAKIILSNTYHLWLRPGSDIIKDAGGLHKFMNWDRPILTDSGGFQVFSLSKIRDIKEEGVHFRNHISGEKLFLSPEKAMQIQNDLGSDIMMAFDECPPYPASYDYMKASVERTSRWAERCLSAHQSPGNQGLFGIIQGGEYEDLRKQSAQDLASLDLPGYAIGGLSVGEPKNIMNRMLEYTTPLMPANKPRYLMGVGSPDSLIDGSIRGIDMFDCVLPTRIARNGTCMTSTGRLVVRNAKYARDFSPIDENCGCHVCKNYTRAYIRHLIKCNETFGFRLTTYHNLHFLLKLMEQVREAISEDRLGDFKEAFFEKYGFNQPNAKNF

SEQ ID NO: 62242 - protein, 379 aa, Virgibacillus profundi
  misc_feature (1)..(379): tr|A0A2A2IAB2|A0A2A2IAB2_9BACI Queuine tRNA-ribosyltran sferase OS=Virgibacillus profundi OX=2024555 GN=tgt PE= 3 SV=1
MTPITYEFIKTCKQTGARLGRVHTPHGSFDTPTFMPVGTLATVKTMSPEDLKEMNANIILSNTYHLWLRPGEDIIKEAGGLHKFMNWDRTILTDSGGFQVFSLSDMREIKEEGVHFRNHLNGAKLFLSPEKAMQIQNDLGSDIMMAFDECPPYPATYDYMKSSVERTSRWAERCLEAHERKDIQGLFGIIQGGEYEALRKQSAEDLVSMNFPGYAIGGLSVGEPKDIMNRVLEFTTPLLPSDKPRYLMGVGSPDSLIDGAIRGIDMFDCVLPTRIARNGTCMTSNGRLVVRNAKYARDFGPIDENCDCHVCKNYSRAYVRHLIKCNETFGFRLTTYHNLHFLLKLMEQVRTAISEDRLGDFKEAFFEQYGLNQPNAKNF

SEQ ID NO: 62243 - protein, 379 aa, Virgibacillus salinus
  misc_feature (1)..(379): tr|A0A1H1B4G3|A0A1H1B4G3_9BACI Queuine tRNA-ribosyltran sferase OS=Virgibacillus salinus OX=553311 GN=tgt PE=3 SV=1
MTAITYEHIKTCKQTGARLGKVHTPHGSFDTPTFMPVGTLATVKTMSPEELQQMNANIILSNTYHLWLRPGEDIIREAGGLHKFMNWDGAILTDSGGFQVFSLSKMRDIKEEGVHFRSHLSGEKLFLSPEKAMEIQNALGSDIMMAFDECPPYPATHNYMKASVERTSRWAERCLNSHQRPSDQGLFGIIQGGEYEELRKQSAADLTSMDFPGYAIGGLSVGEPKDVMNRVLEFTTPLLPSNKPRYLMGVGSPDSLIDGAIRGIDMFDCVLPTRIARNGTCMTSNGRLVVRNAKYARDFSPIDENCDCHVCKNYSRAYIRHLVKCNETFGFRLTTYHNLFFLLKLMEQVRAAINDDRLGDFKEAFFEQYGLNQPNAKNF

SEQ ID NO: 62244 - protein, 379 aa, Virgibacillus soli; identical to SEQ ID NO: 52054
  misc_feature (1)..(379): tr|A0A0Q9XXK9|A0A0Q9XXK9_9BACI Queuine tRNA-ribosyltran sferase OS=Virgibacillus soli OX=480284 GN=tgt PE=3 SV= 1

SEQ ID NO: 62245 - protein, 379 aa, Virgibacillus sp.
  misc_feature (1)..(379): tr|A0A075JNP0|A0A075JNP0_9BACI Queuine tRNA-ribosyltran sferase OS=Virgibacillus sp. SK37 OX=403957 GN=tgt PE=3 SV=1
MTPITYELIKTCKQTGARLGRVHTPHGSFDTPTFMPVGTLATVKTMSPEELKNINANIILSNTYHLWLRPGEDIVREAGGLHKFMNWDGAILTDSGGFQVFSLSDMREIKEEGVHFRNHLNGEKLFLSPEKAMHIQNALGSDIMMAFDECPPYPATYDYMKSSVERTSRWAERCLEAHGRPQDQGLFGIVQGGEYEDLRKQSARDLISMDFPGYAIGGLSVGEPKDVMNRVLEFTTPVLPTNKPRYLMGVGSPDSLIDGAIRGIDMFDCVLPTRIARNGTCMTSKGRLVVRNAKYARDFSPIDENCDCHVCKNYSRAYIRHLIKCNETFGFRLTTYHNLYFLVKLMGQVRKAISDDRLGDFKEDFFEQYGLNKPNAKNF

SEQ ID NO: 62246 - protein, 378 aa, Virgibacillus sp.; identical to SEQ ID NO: 61575
  misc_feature (1)..(378): tr|A0A268I4T0|A0A268I4T0_9BACI Queuine tRNA-ribosyltran sferase OS=Virgibacillus sp. 7505 OX=2022548 GN=tgt PE= 3 SV=1

SEQ ID NO: 62247 - protein, 380 aa, Viridibacillus arenosi
  misc_feature (1)..(380): tr|W4EQB5|W4EQB5_9BACL Queuine tRNA-ribosyltransferase OS=Viridibacillus arenosi FSL R5-213 OX=1227360 GN=tgt PE=3 SV=1
MSQAIRYELIKTDKQTGARLGIVHTPHGSFETPAFMPVGTQASVKTMSPEEVKDMGAGIILSNTYHLWLRPGHEIVREAGGLHKFMNWDRPILTDSGGFQVFSLSHIRKIEEEGVHFRNHLNGDKLFLSPEKAMEIQNALGADIMMAFDECPPFPATFEYMKASVERTSRWAERCLEAHARPQDQGLFGIVQGGEFEELRKQSAKDLVSMDFPGYAIGGLSVGEPKDIMNRMLEYTTPLLPAEKPRYLMGVGSPDSLIDGAIRGIDMFDCVLPTRIARNGTCMTSEGRLVIKNAKFARDFGPLDPNCDCYTCRNYSRAYIRHLLKAEETFGIRLTSYHNLYFLQDLMRNVRQAIREDRLGDFREEFFEAYGFNKPNAKNF

SEQ ID NO: 62248 - protein, 380 aa, Viridibacillus arvi
  misc_feature (1)..(380): tr|A0A0M0LNL0|A0A0M0LNL0_9BACL Queuine tRNA-ribosyltran sferase OS=Viridibacillus arvi OX=263475 GN=tgt PE=3 SV =1
MSQAIRYELIKTDKQTGARLGIVHTPHGSFETPAFMPVGTQASVKTMSPEEVKDMGAGIILSNTYHLWLRPGHDIVREAGGLHKFMNWDRPILTDSGGFQVFSLSHIRKIEEEGVHFRNHLNGDKLFLSPEKAMEIQNALGADIMMAFDECPPFPATFEYMKASVERTSRWAERCLEAHARPHDQGLFGIVQGGEFEELRKQSAKDLVSMDFPGYAIGGLSVGEPKDIMNRMLEYTTPLLPAEKPRYLMGVGSPDSLIDGAIRGIDMFDCVLPTRIARNGTCMTSEGRLVIKNAKFARDFGPLDPNCDCYTCRNYSRAYIRHLLKAEETFGIRLTSYHNLYFLQDLMRNVRQAIREDRLGDFREEFFEAYGFNKPNAKNF

SEQ ID NO: 62249 - protein, 380 aa, Viridibacillus sp.
  misc_feature (1)..(380): tr|A0A2N0EXT9|A0A2N0EXT9_9BACL Queuine tRNA-ribosyltran sferase OS=Viridibacillus sp. OK051 OX=1884360 GN=tgt P E=3 SV=1
MSQAIRYELIKTDKQTGARLGIVHTPHGSFETPAFMPVGTQASVKTMSPEEVKDMGAGIILSNTYHLWLRPGHDIVREAGGLHKFMNWDRPILTDSGGFQVFSLSHIRKIEEEGVHFRNHLNGDKLFLSPEKAMEIQNALGADIMMAFDECPPFPATFEYMKASVERTSRWAERCLAAHARPQDQGLFGIVQGGEFEELRKQSAKDLVSMDFPGYAIGGLSVGEPKDIMNRMLEYTTPLLPSEKPRYLMGVGSPDSLIDGAIRGIDMFDCVLPTRIARNGTCMTSEGRLVIKNAKFARDFGPLDPNCDCYTCRNYSRAYIRHLLKAEETFGIRLTSYHNLYFLQDLMRNVRQAIREDRLGDFREEFFEAYGFNKPNAKNF

SEQ ID NO: 62250 - protein, 376 aa, Vitellibacter aquimaris
  misc_feature (1)..(376): tr|A0A137RFU3|A0A137RFU3_9FLAO Queuine tRNA-ribosyltran sferase OS=Vitellibacter aquimaris OX=1548749 GN=tgt PE =3 SV=1
MHFKLEATDLQSSARAATITTDHGVIETPIFMPVGTVGTVKGVHQRELKQDINPDIILGNTYHLYLRPQTPVLEKAGGLHKFMNWDRNILTDSGGYQVYSLSANRKIKEEGVKFKSHIDGSYHVFTPENVMEIQRTIGADIIMAFDECTPYPCEYNYAKRSMHMTHRWLDRCIKHLEKTPLKYDYGQTFFPIVQGSTYKDLRRQSAEYIASVGAEGNAIGGLSVGEPADEMYEMTAVVTEILPKEKPRYLMGVGTPVNILENIALGIDMFDCVMPTRNGRNGMLFTSEGIINIKNKKWEADLSVIDPMGITWVDTDYSKAYLRHLFTVNEMLGRQIATIHNLGFYLWLVREARKHILAGDFAEWKTGMVKKLDQRL

SEQ ID NO: 62251 - protein, 394 aa, Vitiosangium sp.
  misc_feature (1)..(394): tr|A0A2T4V2V9|A0A2T4V2V9_9DELT Queuine tRNA-ribosyltran sferase OS=Vitiosangium sp. GDMCC 1.1324 OX=2138576 GN= tgt PE=3 SV=1
MGEPRKEKGDTRVPPSLVRYELLHEDASGTRARRGRLHTPHGQIETPIFMPVGTVGSVKGVGPDELLTIDAQIILGNTYHLMLRPGDDLVGEMGGLHRFISWNRPMLTDSGGFQVFSLAEKRKITEEGAAFQSHLDGRHILLTPERSIEIQETLGADIIMAFDECPPSTEDRAYMEKSLARTTRWLHRCVKAWSRERSSLFGIVQGGLNKDLRKAHAEEVCAVDLPGFALGGYSVGETPEAMHEGVAFSAPLLPRDKPRYLMGVGTPVDLVTCVEHGVDMFDCVLPTRCARNGLLFTSEGKVTIRNATYAKDPRPADPACSCYTCRNFSRSYLRHLFVAGEILAMRLNTLHNLHYFLDLMKQVRQAIAEDRYATFARDFREKARAQEAERTRPK

SEQ ID NO: 62252 - protein, 392 aa, Vitiosangium sp.
  misc_feature (1)..(392): tr|A0A2T4V332|A0A2T4V332_9DELT Queuine tRNA-ribosyltran sferase OS=Vitiosangium sp. GDMCC 1.1324 OX=2138576 GN= tgt PE=3 SV=1
MAVRFELVTTDPTGARAGVLHTRRGSIPTPVFMPVATHASFRHLGMEEVKATGSKILLSNTYHLMLKPGIDVFNRFGGIHPFMQWDGAVLTDSGGFQIFSLPEDRLITEKGAHFRSFHDNSRQLLSPESSIAMQQAINSEIMMVLDVCIDSRTDEAGTREAMERTHRWAVRSLAAKNKVDTGQALFAIVQGGVHPNLRDESAAFLTQHPFDGFAIGGLAVGETNEERKAMTARAAASLPQDKPRYLMGVGTPTDLLEAVLRGVDMFDCIIPTKMAQQGYAYTFQGLVRITRQVFRLSDEPLDPTCDCYVCKRYSRGYLQHLMSGKHHTGSRMLSVHNVHHYQQLTWKMRDAILQGSYAQAYRELKQLVATPKDLNDAKLAVGAGANTLKEVG

SEQ ID NO: 62253 - protein, 381 aa, Vitreoscilla filiformis
  misc_feature (1)..(381): tr|A0A221KCC7|A0A221KCC7_VITFI Queuine tRNA-ribosyltran sferase OS=Vitreoscilla filiformis OX=63 GN=tgt PE=3 SV =1
MLHFDLLKTDGHARRGRLTLNHGVVETPIFMPVGTYGTVKGVLPQSLYDMGAQIILGNTFHLWMRPGLDVMASFGGLHGFENWTKPILTDSGGFQVWSLGEMRKISEEGVKFASPVNGDKLFLTPEVSMQIQTVLNSDIVMQFDECTPYETKGHLTTEKEARSSMELSRRWAQRCITEFERLQNPNALFGIVQGGMFEHLRQESLEALVEMDLPGYAIGGVSVGEPKEDMRRIMAHTPHRLPAHKPRYLMGVGTPEDLVEGVACGVDMFDCVMPTRNARNGHLFTRFGDLKIRNARHKSDHRPIDETCTCYACKGDGHSGGFSRAYLHHLDRCGEMLGPMLATIHNLHYYLNLMTEVRAALDAGTFQQFRQQFAADRARGV

SEQ ID NO: 62254 - protein, 370 aa, Vitreoscilla sp.
  misc_feature (1)..(370): tr|A0A2L0PJY7|A0A2L0PJY7_VITS1 Queuine tRNA-ribosyltran sferase OS=Vitreoscilla sp. (strain C1) OX=96942 GN=tgt PE=3 SV=1
MLKFELLKQDGLARRGRITLNHGTVETPVFQPVGTYGTVKAMTPKDLDDINAQIILGNTYHLWLRPGLDVIREFGGLHDFMGWQKPILTDSGGFQVFSLSDMRKLTEEGCTFKNPINGDKLFLSPEISMQIQTVLNSDIVMQLDECTPGDASAQAAQKSLQMSLRWAERSKNEFDRLNNPNALFGIVQGAMYEDLRDESLAGLNELDFDGVAIGGLSVGEAKENMYRILQHIGPQLPANKPHYLMGVGTPEDLIEGVANGVDMFDCVMPTRNARNGWLFTRFGDLKIKNAVHKLDKRPIDETCTCYTCRNFSRGYLHHLHRVGEILGAQLNTIHNLHYYQQLMQDVRDAIDAGQFAAFRVQFAAERARGV

SEQ ID NO: 62255 - protein, 371 aa, Vogesella indigofera
  misc_feature (1)..(371): tr|A0A495B588|A0A495B588_VOGIN Queuine tRNA-ribosyltran sferase OS=Vogesella indigofera OX=45465 GN=tgt PE=3 SV =1
MLKFTLHKTSGGARRGTLELNHGKVETPVFQPVGTYGSVKAMSPHELHDIKAQIILGNTFHLWLRPGLDIIEKFGGLHQFIGWDKPILTDSGGFQVFSLGALNKITEEGVTFQSPVNGDKLFLSPEKSMEIQKVLNSDIVMIFDECTPGQVDHATAAKSMRMSLRWAERSRRAFDELKNPNALFGIVQGNLYKDLRQESLDGLMQIGFDGIAIGGLSVGEPKPEMYRMLTELKDMLPAEKPHYLMGVGTPEDLVHGVANGIDMFDCVMPTRNARNGWLFTQWGDLKIKNARYKDDKKPLDEQCECYACRHFSRAYLHHLHRTGEILGARLNTIHNLHYYQVLMQEMRDAIDADQFEDWKAGFHERRARGVN

SEQ ID NO: 62256 - protein, 371 aa, Vogesella sp.
  misc_feature (1)..(371): tr|A0A1C6LFS4|A0A1C6LFS4_9NEIS Queuine tRNA-ribosyltran sferase OS=Vogesella sp. LIG4 OX=1192162 GN=tgt PE=3 SV =1
MLKFTVHKTSGGARRGTLELNHGTVETPVFQPVGTYGSVKAMSPHELTDIGAQIILGNTFHLWLRPGLEIIEQFGGLHDFIGWDKPILTDSGGFQVFSLGAMNKISEEGVTFQSPVNGDKLFLSPEKSMEIQKVLNSDIVMIFDECTPGQVDHATAAKSMRMSLRWAERSRRAFDELKNPNALFGIVQGNLYTDLRQESLDGLMNIGFDGIAIGGLSVGEPKPEMYRMLTELKDMLPAGKPHYLMGVGTPEDLVHGVANGIDMFDCVMPTRNARNGWIFTQWGDVKIKNARYKADKKPLDEHCGCYTCRHFSRAYLHHLHRTGEILGARLNTIHNLYYYQALMQEMRDAIEADQFEDWKAGFHQRRASGVN

SEQ ID NO: 62257 - protein, 371 aa, Vogesella sp.
  misc_feature (1)..(371): tr|A0A0J5GDV6|A0A0J5GDV6_9NEIS Queuine tRNA-ribosyltran sferase OS=Vogesella sp. EB OX=1526735 GN=tgt PE=3 SV=1
MLKFTLHKTSGGARRGTLELNHGKVETPVFQPVGTYGSVKAMSPHELHDIKAQIILGNTFHLWLRPGLDIIEKFGGLHQFIGWDKPILTDSGGFQVFSLGALNKITEEGVTFQSPVNGDKLFLSPEKSMEIQKVLNSDIVMIFDECTPGQVDHATAAKSMRMSLRWAERSRRAFDELKNPNALFGIVQGNLYKDLRQESLDGLIQIGFDGIAIGGLSVGEPKPEMYRMLTELKDMLPAEKPHYLMGVGTPEDLVHGVANGIDMFDCVMPTRNARNGWLFTQWGDLKIKNARYKDDKKPLDEQCECYACRHFSRAYLHHLHRTGEILGARLNTIHNLHYYQVLMQEMRDAIDADRFEDWKAGFHERRARGVN

SEQ ID NO: 62258 - protein, 383 aa, Volucribacter psittacicida
  misc_feature (1)..(383): tr|A0A4R1FXR2|A0A4R1FXR2_9PAST Queuine tRNA-ribosyltran sferase OS=Volucribacter psittacicida OX=203482 GN=tgt PE=3 SV=1
MQYQLDKTDGRARRGRLIFQRPQGEFTVETPAFMPVGTYGTVKGMTPEEVRATGAEILLGNTFHLWLRPGQEIMRKHGDLHDFMQWHRPILTDSGGFQVFSLGKLRKISEEGVQFQNPINGERIFLSPEKSMEIQYDLGSDIVMIFDECTPYPATFDYAKQSMEMSLRWAKRSRDRFDQLGNNNALFGIIQGGVYEELRKISVEGLIEIGFDGYAVGGLAVGEPKEDMHRILEYITPKIPADKPRYLMGVGKPEDLVEGVRRGIDMFDCVMPTRNARNGHLFVSDGIVKIRNAKYRDDTSPLDPECDCYTCQHYTKSYLYHLDKCGEILGARLNTIHNLRYYQRLMAQIRQAIEQQRFEQFVQEFYAKIGKPVPPLNQYHSAE

SEQ ID NO: 62259 - protein, 377 aa, Vulcanibacillus modesticaldus
  misc_feature (1)..(377): tr|A0A1D2YX14|A0A1D2YX14_9BACI Queuine tRNA-ribosyltran sferase OS=Vulcanibacillus modesticaldus OX=337097 GN=t gt PE=3 SV=1
MSAIRYELIKKDKKTGARLGRLHTPHGVIETPIFMPVGTQATVKAMSPEELKDMNAQIILSNTYHLFIRPGHDLVKEAGGLHKFMNWDRPILTDSGGFQVFSLSDLRKITEEGVHFRNHLSGEKLFISPEKSIEIQNALGADIIMAFDECPPYPAEREYVKNSLERTTRWAERSLNAHSRPNEQALFGIVQGGMYRDLREQSAKELTSLDFPGYAVGGLSVGEPKELMYEVLEYTTPLLPENKPRYLMGVGDPESLFEGVIRGIDMFDCVLPTRIARNGTTMTSEGRVVIKNAQYARDFTPLDPNCGCYTCQNYSRAYIRHLLKADEIFGLRLTSYHNLYFLLDLMKNIRQAILEDRLLEYKEEFFEQYGINKLRSF

SEQ ID NO: 62260 - protein, 369 aa, Vulcaniibacterium tengchongense
  misc_feature (1)..(369): tr|A0A3N4VW60|A0A3N4VW60_9GAMM Queuine tRNA-ribosyltran sferase OS=Vulcaniibacterium tengchongense OX=1273429 G N=tgt PE=3 SV=1
MSRMSFELLRTDGAARRGRLTFPRGTVETPAFMPVGTYGSVKGVLPAQVRELGAQMILGNTFHLFLRPGLDVIGDHGGLHGFARWDGPILTDSGGFQVFSLAHRRKITEQGVTFAAPTDGSKVFLGPEESMRIQKVLDSDVVMIFDECTPYPASEEVARKSMELSLRWAERSKRAHEGNDAALFGIVQGGVHHELRTRSAQGLKAIGFDGYAIGGLAVGEPEAERNAMLEHTCPQLPEDRPRYLMGVGRPEDLVEGVARGIDMFDCVMPTRNARNGHYFTAAGTVRVRNAKYERDLRPIEEGCDCVACAGGFSRAYLRHLDRCNEMLAPMLGTLHNLRYYQRLMAQMREAIAQGTFAAFRESFHAARRG

SEQ ID NO: 62261 - protein, 379 aa, Vulgatibacter incomptus
  misc_feature (1)..(379): tr|A0A0K1PB55|A0A0K1PB55_9DELT Queuine tRNA-ribosyltran sferase OS=Vulgatibacter incomptus OX=1391653 GN=tgt PE =3 SV=1
MSLDFELLKVDPESAARRGRLRLPHGVVETPIFMPVGTAASVKAIAPDDLERIGAQIILGNTYHLFLRPGHELVRRHGGLHGFMTWPKPILTDSGGFQVYSLAAARKISEEGVVFRSHLDGSRKLLTPELSIEVQEALGADVIMAFDECPPAGSDRRYFEDSLARTTRWAKRCKDAWHPEGKSSLFGIVQGGLHPDLRRRHAEELAELDLPGYALGGYSVGEPIPSMYESVSTSAPNLPADKPRYLMGVGTPEDLVTCVGLGIDMFDCVLPTRTARNARLYTSEGIVNIKNARYADDPAPLDPACDCYTCKNFSRAYLRHLYAAQELLAYRLNSIHNLAFFLDLMARVRAAIEEGRYAAWSKAWLEERSLRLREQKERA

SEQ ID NO: 62262 - protein, 365 aa, Waddlia chondrophila
  misc_feature (1)..(365): tr|D6YTW9|D6YTW9_WADCW Queuine tRNA-ribosyltransferase OS=Waddlia chondrophila (strain ATCC VR-1470 / WSU 86-1 044) OX=716544 GN=tgt PE=3 SV=1
MKFHLIKSDLESKARLGELETAHGKIPTPIFMPVGTRGAVKTITNQHLLEMDAKIILGNTYHLMLRPGMEIMKKAGGLHRLMNWDRPILTDSGGFQVFSLSSLNKVTEEGVYFQSHIDGSRHFLGPEESMEIQKAIGSDIVMAFDECSPYPASRDRIEKAMERTLRWEKRSRDYELGEHQALFAITQGGMFSDLREQSTKELAKIDFDGYAIGGLSVGEPAEMMYEMLDVSEPYLPKDKPRYLMGVGTPRNIIEAVMRGVDLFDCVLPTRNARNGTAFTWSGKVSIKAGKYAEDFTPLDPNLDCYTSQFSKAYIRHLLNVNEITGLSLVTMQNLSFYLDFMEKIRQAIQNETLSEFYANICEIYP

SEQ ID NO: 62263 - protein, 365 aa, Waddlia chondrophila; identical to SEQ ID NO: 62262
  misc_feature (1)..(365): tr|F8LE39|F8LE39_9BACT Queuine tRNA-ribosyltransferase OS=Waddlia chondrophila 2032/99 OX=765953 GN=tgt PE=3 S V=1

SEQ ID NO: 62264 - protein, 257 aa, Waddliaceae bacterium
  misc_feature (1)..(257): tr|A0A2E3LUU9|A0A2E3LUU9_9BACT Queuine tRNA-ribosyltran sferase (Fragment) OS=Waddliaceae bacterium OX=2026802 GN=tgt PE=3 SV=1
MGRLNFRVEKVAEGTRARLGSIETEHGTIQTPIFMPVGTRAAVKTVTNEQLKDIGAQIILGNTYHLMLKPGMEIMEKAGGLHRFMNWDRPILTDSGGFQVFSLSKLNKISEEGVRFRSHIDGKEFFLGPNESMSIQKTLGSDIVMAFDQCPPYPCGRSDLEQSLERTLSWAKICRDFTLQEHQNLFGIVQGGVHADLRKYCAEELCKLDFEGFAIGGVSVGEPVEEMYAAVDASIPFLPEEKPRYLMGVGTPRNIIE

SEQ ID NO: 62265 - protein, 113 aa, Waddliaceae bacterium
  misc_feature (1)..(113): tr|A0A2E3M140|A0A2E3M140_9BACT tRNA guanosine(34) trans glycosylase Tgt (Fragment) OS=Waddliaceae bacterium OX= 2026802 GN=tgt PE=4 SV=1
EAVRRGVDMFDCVMPTRNARNGTAFTWSGKVNIKAGRYAEDFSPLDPELDCYTSQFSKAYIRHLLNVDEITGLTLVTIQNLAFYLDFVKKLRQSIQNNTFDEFYLKVCNIYPN

SEQ ID NO: 62266 - protein, 376 aa, Weeksella virosa
  misc_feature (1)..(376): tr|F0NXH7|F0NXH7_WEEVC Queuine tRNA-ribosyltransferase OS=Weeksella virosa (strain ATCC 43766 / DSM 16922 / JC M 21250 / NBRC 16016 / NCTC 11634 / CL345/78) OX=865938 GN=tgt PE=3 SV=1
MKFSIEQRDPLSKARAAVVTTDHGEIETPIFMPVGTVGTVKAVQQKELVSDINAQIILGNTYHLYLRPGTEILHKAGGLHQFMNWEKPILTDSGGFQVFSLASSRKKSENGVRFKSHIDGSYHLFTPEKSMEIQRYIGGDIIMAFDELTGIPAEYHDAKRAMNVTHRWLERCRVWLDNNPEFYKHKQTLFPIVQGNDFKDLRQESAKYISDFNAEGNAIGGLSVGEPEEVMYEMTDLVTDILPKEKPRYLMGVGTPWNILEGIALGVDMFDCVMPTRNARNGMLFTWNGVMNMKNAKWKDNFDALDENGTSFVDHYYSKAYVRHLFNAQEFLGKQIASLHNLAFYLDLVRVAREHLLAGDFTQWKNQIIPQLKTRL

SEQ ID NO: 62267 - protein, 381 aa, Weissella bombi
  misc_feature (1)..(381): tr|A0A1C4BUL1|A0A1C4BUL1_9LACT Queuine tRNA-ribosyltran sferase OS=Weissella bombi OX=1505725 GN=tgt PE=3 SV=1
MSDYAVKYELLHVEKHTGARLGKITTPHGEVMTPMFMPVGTQATVKGVSPRELKEINSQFILSNTYHLWLRPGDELIAKAGGLHKFMNWDGPILTDSGGFQVWSLSDHNSITEDGVTFRNHLNGDKMFLSPEVAMRIQNNLGSDVMMQLDEAIPYFETYDYVKNSVERTSRWAERAQKAHKRPNDQALFGIVQGAGFRELRKQSAQDLVSLDLPGYAIGGLSVGESKAEMNRVLDFTVPFLPENKPRYLMGVAAPDSLIDASIRGIDMFDCVLPTRIGRKGTLLTSHGRVVIKNAKYKDDFSLIDPETEDYGSQHFTKAYLHHLFKTNELYGQTIASVHNLRYLLKLMEDVRQAIAEDRLLEFREETLSKYGYFEPNARLF

SEQ ID NO: 62268 - protein, 381 aa, Weissella cibaria
  misc_feature (1)..(381): tr|A0A2S1KSI1|A0A2S1KSI1_9LACT Queuine tRNA-ribosyltran sferase OS=Weissella cibaria OX=137591 GN=tgt PE=3 SV=1
MTDYAVKYELLHVEKHTGARLGKITTPHGEVMTPMFMPVGTQATVKNVSPRELKEIKSQFILSNTYHLWVRPGDELIAEAGGLHKFMNWDGPILTDSGGFQVWSLSERNNIKEEGVTFRNHVNGEEMFLSPEVAMRIQNNLGSDVMMQLDEAIPYFETYDYVKNSVERTSRWAERALAAHRRPEDQALFGIVQGAGFRELRKQSASDLVSLDLPGYAVGGLSVGETKEEMNRVLDFTVPFLPENKPRYLMGVAAPDSLIDGAIRGIDMFDSVLPTRIARKGTLMTSKGRIVITNSKYKNDFSLIDPETEDYGSQNFTKAYLHHLFKADELYAQNIASVHNLRYLLKLMEDMRQAIAEDRLLEFREEVMENYGYKNPNARLF

SEQ ID NO: 62269 - protein, 381 aa, Weissella cibaria
  misc_feature (1)..(381): tr|A0A0D1K6C8|A0A0D1K6C8_9LACT Queuine tRNA-ribosyltran sferase OS=Weissella cibaria OX=137591 GN=tgt PE=3 SV=1
MSDYAVKYELLHVEKHTGARLGKITTPHGEVMTPMFMPVGTQATVKNVSPRELKEIKSQFILSNTYHLWVRPGDELIAEAGGLHKFMNWDGPILTDSGGFQVWSLSERNNIKEEGVTFRNHVNGEEMFLSPEVAMRIQNNLGSDVMMQLDEAIPYFETYDYVKNSVERTSRWAERALAAHRRPEDQALFGIVQGAGFRELRKQSASDLVSLDLPGYAVGGLSVGETKEEMNRVLDFTVPFLPENKPRYLMGVAAPDSLIDGAIRGIDMFDSVLPTRIARKGTLMTSKGRIVITNSKYKNDFSLIDPETEDYGSQNFTKAYLHHLFKADELYAQNIASVHNLRYLLKLMEDMRQAIAEDRLLEFREEVMENYGYKNPNARLF

SEQ ID NO: 62270 - protein, 381 aa, Weissella confusa
  misc_feature (1)..(381): tr|A0A5E8F927|A0A5E8F927_WEICO Queuine tRNA-ribosyltran sferase OS=Weissella confusa LBAE C39-2 OX=1127131 GN=t gt PE=3 SV=1
MSDYAVKYELLHVEKHTGARLGKITTPHGEVMTPMFMPVGTQATVKNVSPRELKEIKSQFILSNTYHLWVRPGDELIAEAGGLHKFMNWDGPILTDSGGFQVWSLSERNNIKEEGVTFRNHVNGEEMFLSPEVAMRIQNNLGSDVMMQLDEAIPYFETYDYVKNSVERTSRWAERAMAAHRRPEDQALFGIVQGAGFRELRKQSARDLVSLDLPGYAVGGLSVGETKEEMNRVLDFTVPFLPENKPRYLMGVAAPDSLIDGAIRGIDMFDSVLPTRIARKGTLMTSKGRIVITNSKYKNDFSLIDPETEDYGSQNFTKAYLHHLFKADELYAQNIASVHNLRYLLKLMEDMRQAIAEDRLLEFREEVMANYGYNNANARLF

SEQ ID NO: 62271 - protein, 381 aa, Weissella confusa; identical to SEQ ID NO: 62270
  misc_feature (1)..(381): tr|A0A0R2FBF2|A0A0R2FBF2_WEICO Queuine tRNA-ribosyltran sferase OS=Weissella confusa OX=1583 GN=tgt PE=3 SV=1

SEQ ID NO: 62272 - protein, 382 aa, Weissella halotolerans
  misc_feature (1)..(382): tr|A0A0R2GAE8|A0A0R2GAE8_9LACT Queuine tRNA-ribosyltran sferase OS=Weissella halotolerans DSM 20190 OX=1123500 GN=tgt PE=3 SV=1
MAQTSAIKYELLHVEKHTGARLGKITTPHGEVMTPMFMPVGTQASVKNISPRELKEIHSQFILANTYHLWLRPGDDLIAQAGGLHKFMDWDGPILTDSGGFQVWSLSDHNQISEEGVTFRNHLDGRKMFLSPEVAMRIQNNLGSDIMMQLDEAIPYFESYDYVKNSVERTTRWAERALKAHKRPDDQALFGIVQGAGFKDLRKASADSLVALDLPGYAVGGLSVGESKPEMNRVLDFTVPWLPEDKPRYLMGVAAPDSLVDGVIRGIDMFDCVLPTRIGRNGTLMTKHGRIVITNAKYKNDFSPIDPDLDDYASTHFTKAYLHHLIKANELLGQNLASLHNLRYLLKLMEDMRQAIAEDRLLDFRAELMENYGYNKPNARLF

SEQ ID NO: 62273 - protein, 381 aa, Weissella hellenica
  misc_feature (1)..(381): tr|A0A4Y4G887|A0A4Y4G887_WEIHE Queuine tRNA-ribosyltran sferase OS=Weissella hellenica OX=46256 GN=tgt PE=3 SV= 1
MSDYAVKYELLHVEKHTGARLGKITTPHGEVMTPMFMPVGTQATVKGVSPRELKEINSQFILSNTYHLWLRPGDELIAQAGGLHKFMNWDGPILTDSGGFQVWSLSDHNHITEDGVTFRNHLNGDKMFLSPEVAMRIQNNLGSDVMMQLDEAIPYFETYDYVKNSVERTSRWAERAQIAHKRPDDQALFGIVQGAGFRELRKQSAQDLVSLDLPGYAIGGLSVGESKAEMNRVLDFTVPFLPSNKPRYLMGVAAPDSLIDASIRGIDMFDCVLPTRIGRKGTLLTSNGRIVIKNAKYKNDFSLIDPETEDYGSQHFTKAYLHHLFKTNELYGQTIASVHNLRYLLKLMEDMRQAIAEDRLLEFREETLSKYGYFEPNARLF

SEQ ID NO: 62274 - protein, 381 aa, Weissella hellenica
  misc_feature (1)..(381): tr|A0A5B8TVL7|A0A5B8TVL7_WEIHE Queuine tRNA-ribosyltran sferase OS=Weissella hellenica OX=46256 GN=tgt PE=3 SV= 1
MSDYAVKYELLHVEKHTGARLGKITTPHGEVMTPMFMPVGTQATVKGVSPRELKEINSQFILSNTYHLWLRPGDELIAQAGGLHKFMNWDGPILTDSGGFQVWSLSDHNHITEDGVTFRNHLNGDEMFLSPEVAMRIQNNLGSDVMMQLDEAIPYFETYDYVKNSVERTSRWAERAQIAHRRPEDQALFGIVQGAGFRELRKQSAQDLVSLDLPGYAIGGLSVGESKAEMNRVLDFTVPFLPSNKPRYLMGVAAPDSLIDASIRGIDMFDCVLPTRIGRKGTLLTSNGRVVIKNAKYKNDFSLIDSETEDYGSQHFTKAYLHHLFKTNELYGQTIASVHNLRYLLKLMEDMRQAIAEDRLLEFREETLSKYGYFEPNARLF

SEQ ID NO: 62275 - protein, 381 aa, Weissella jogaejeotgali
  misc_feature (1)..(381): tr|A0A1L6RC32|A0A1L6RC32_9LACT Queuine tRNA-ribosyltran sferase OS=Weissella jogaejeotgali OX=1631871 GN=tgt PE =3 SV=1
MSDYAVKYELLHVEKHTGARLGKITTPHGEVMTPMFMPVGTQATVKGVSPRELKEINSQFILSNTYHLWLRPGDELIAKAGGLHKFMNWDGPILTDSGGFQVWSLSDHNHITEDGVTFRNHLNGDEMFLSPEVAMRIQNNLGSDVMMQLDEAIPYFETYDYVKNSVERTSRWAERAQKAHKREQDQALFGIVQGAGFRELRKQSAQDLVSLDLPGYAIGGLSVGESKPEMNRVLDFTVPFLPENKPRYLMGVAAPDSLIDAAIRGIDMFDCVLPTRIGRKGTLMTSNGRIVIKNAKYKDDFSLIDPETEDYGSQHFTKAYLHHLFKTNELYGQTIASVHNLRYLLKLMEDVRQAIAEDRLLEFREETLRKYGYFEPNARLF

SEQ ID NO: 62276 - protein, 404 aa, Weissella kandleri
  misc_feature (1)..(404): tr|A0A0R2JCL6|A0A0R2JCL6_9LACT Queuine tRNA-ribosyltran sferase OS=Weissella kandleri OX=1616 GN=tgt PE=3 SV=1
MQQYSKFDQFLMEKYPLKEEYLNDPDRPVIYELLHVEKHTGARLGRIYTRHGIVHTPMFMPVGTQASVKNVSPRDLEAINTQFILSNTYHLWVRPGDDLIAKAGGLHKFMQWNGPILTDSGGFQVWSLAKNNKISEEGVDFKNHVDGASMFLSPEVAMRIQNNLGSDVMMQLDEAIPYFETYDYVKNSVERTTRWAKRAKIAHARPNDQALFGIIQGAGFKDLRRLSAEGLVDLDLPGYAVGGLSVGESKEEMNRVLDFTVDWMPADKPRYLMGVAAPDSLIDSAIRGIDMFDCVLPTRIARNGSLMTKNGRIVITNGRYKDDFSLIDADTEDYGSQNFTKAYLHHLFKANELLGQNIASVHNLRYLLKLMEEMREAIYNDELIEFREQVLEDYGYNKPNARLF

SEQ ID NO: 62277 - protein, 404 aa, Weissella koreensis
  misc_feature (1)..(404): tr|F8HYT2|F8HYT2_WEIKK Queuine tRNA-ribosyltransferase OS=Weissella koreensis (strain KACC 15510) OX=1045854 G N=tgt PE=3 SV=1
MRQYSEFDQFLMEKYPLKEELMNDPKRPVVYELLHVEKHTGARLGRIYTRHGVVHTPMFMPVGTQASVKNVSPRDLEDINSQFILSNTYHLWVRPGDELIAKAGGLHKFMQWNGPILTDSGGFQVWSLSKNNKISEKGVDFKNHVDGSQMFLSPEVAMSIQNNLGSDVMMQLDEAIPYFETYDYVKNSVERTTRWAKRAKEAHNRPNDQALFGIIQGAGFKDLRKLSADGLIDLDLPGYAVGGLSVGESKEEMNRVLDFTVDWMPADKPRYLMGVAAPDSLIDSAIRGIDMFDCVLPTRIARNGSLMTKHGRIVITNSKYKDDFSLIDEDTEDYGSNTFTKAYLHHLFKANELYGQNIASVHNLRYLLKLMEEMREAIYHDELLDFRAQVLEDYGYNQPNARLF

SEQ ID NO: 62278 - protein, 404 aa, Weissella koreensis; identical to SEQ ID NO: 62277
  misc_feature (1)..(404): tr|J1GN31|J1GN31_9LACT Queuine tRNA-ribosyltransferase OS=Weissella koreensis KCTC 3621 OX=1123721 GN=tgt PE=3 SV=1

SEQ ID NO: 62279 - protein, 382 aa, Weissella minor
  misc_feature (1)..(382): tr|A0A0R2JTD2|A0A0R2JTD2_9LACT Queuine tRNA-ribosyltran sferase OS=Weissella minor OX=1620 GN=tgt PE=3 SV=1
MTDDYAVKYELLHVEKHTGARLGKITTPHGEVMTPMFMPVGTQASVKNVSPRELHEINSQFILSNTYHLWLRPGDDLIAEAGGLHKFMDWDGPILTDSGGFQVWSLSDHNSISEEGVTFRNHLNGEKMFLSPEVAMRIQNNLGSDVMMQLDEAIPYFESYDYVKNSVERTSRWAERAIAAHKRPEDQALFGIVQGAGFKQLRKQSAEDLVSLDLPGYAVGGLSVGESKEEMNRVLDFTVPWLPENKPRYLMGVAAPDSLVDGVMRGIDMFDCVLPTRIGRNGTLMTKYGRIVITNSKYKNDFSPIDPDLDDYGSTHFTKAYLHHLFKSNELLGQNIASVHNLRYLLKLMEDMREAIAEDRLLEFRAELMENYGYNKENARLF

SEQ ID NO: 62280 - protein, 403 aa, Weissella oryzae
  misc_feature (1)..(403): tr|A0A069CS98|A0A069CS98_WEIOS Queuine tRNA-ribosyltran sferase OS=Weissella oryzae (strain DSM 25784 / JCM 181 91 / SG25) OX=1329250 GN=tgt PE=3 SV=1
MKRSKFDEYLLEKYPINEAYVNDPNRPVIYELLHVEKDTGARLGRIYTRHGIVHTPMFMPVGTQATVKNVSPRDLDEINAQFVLSNTYHLWLRPGDDIVAAAGGLHKFMNYNGPMLTDSGGFQVWSLAKHNSIAEEGVTFKNHLNGDQMFLSPEVAMRIQNNLGSDVMMQLDEAIPYFESYDYVKNSVERTTRWAERAKIAHKRPQDQALFGIIQGAGFKELRKLSAEGLVALDLPGYAVGGLSVGETKEEMNRVLDFTMPMLPADKPRYLMGVAAPDSLIDGAIRGVDMFDSVLPTRIGRKGTLMTSHGRIVIRNHKYQNDFSLIDPETEDYGSQTFSKAYLHHLFKTNELYGQNIASVHNLRYLLKLMEDMRQAIDEDRLLAFRADLMEKYGYNKANARLF

SEQ ID NO: 62281 - protein, 381 aa, Weissella paramesenteroides
  misc_feature (1)..(381): tr|C5RD22|C5RD22_WEIPA Queuine tRNA-ribosyltransferase OS=Weissella paramesenteroides ATCC 33313 OX=585506 GN= tgt PE=3 SV=1
MSDYAVKYELLHVEKHTGARLGKITTPHGEVMTPMFMPVGTQATVKGVSPRELKEIKSQFILSNTYHLWLRPGDELIAQAGGLHKFMNWDGPILTDSGGFQVWSLSDHNHITEEGVTFRNHLNGDEMFLSPEVAMRIQNNLGSDVMMQLDEAIPYFETYDYVKNSVERTSRWAERAQKAHKREQDQALFGIVQGAGFKELRKQSAQDLVSLDLPGYAIGGLSVGESKPEMNRVLDFTVPFLPEHKPRYLMGVAAPDSLIDAVIRGIDMFDCVLPTRIGRKGTLMTSNGRVVIKNAKYKDDFSLIDPETEDYGSQHFTKAYLHHLFKTNELYGQTIASVHNLRYLLKLMEDMRQAIAGDRLLEFREETLRKYGYFEPNARLF

SEQ ID NO: 62282 - protein, 381 aa, Weissella paramesenteroides
  misc_feature (1)..(381): tr|A0A4Q7ITE7|A0A4Q7ITE7_WEIPA Queuine tRNA-ribosyltran sferase OS=Weissella paramesenteroides OX=1249 GN=tgt P E=3 SV=1
MSDYAVKYELLHVEKHTGARLGKITTPHGEVMTPMFMPVGTQATVKGVSPRELKEIKSQFILSNTYHLWLRPGDELIAQAGGLHKFMNWDGPILTDSGGFQVWSLSDHNHITEEGVTFRNHLNGDEMFLSPEVAMRIQNNLGSDVMMQLDEAIPYFETYDYVKNSVERTSRWAERAQKAHKREQDQALFGIVQGAGFKELRKQSAQDLVSLDLPGYAIGGLSVGESKPEMNRVLDFTVPFLPENKPRYLMGVAAPDSLIDAAIRGIDMFDCVLPTRIGRKGTLMTSNGRVVIKNAKYKDDFSLIDSETEDYGSQHFTKAYLHHLFKTNELYGQTIASVHNLRYLLKLMEDMRQAIAEDRLLEFREETLRKYGYFEPNARLF

SEQ ID NO: 62283 - protein, 404 aa, Weissella soli
  misc_feature (1)..(404): tr|A0A288QW75|A0A288QW75_9LACT Queuine tRNA-ribosyltran sferase OS=Weissella soli OX=155866 GN=tgt PE=3 SV=1
MRQFSEFDRYLLEKFPIKEEYLNDPDRPLIYELLHVEKHTGTRLGRIYTRHGIVHTPMFMPVGTQASVKNVSPRDLEEINAQFILSNTYHLWVRPGDDLIAEAGGLHKFMQWDGPILTDSGGFQVWSLSKNNKISEEGVTFKNHVDGAEMFLSPEVAMRIQNNLGSDIMMQLDEAIPYFESYEYVQNSVERTTRWAERAKAAHARPKDQSLFGIVQGAGFKELRKLSAEGLVALDLPGYAVGGLSVGESKEEMNRVLDFTMPLLPADKPRYLMGVAAPDSLFDSAMRGIDMFDSVLPTRIGRNGTLMTDNGRIVITNGKFARDFSLIDEHTDDFGSQHFTKAYLHHLFKANELYAQNIASVHNLRYLLKLMEDMRKSILEDNFLEFRAEVLEKYGYNKPNARLF

SEQ ID NO: 62284 - protein, 404 aa, Weissella soli
  misc_feature (1)..(404): tr|A0A5B8SPX8|A0A5B8SPX8_9LACT Queuine tRNA-ribosyltran sferase OS=Weissella soli OX=155866 GN=tgt PE=3 SV=1
MRQFSEFDRYLLEKFPIKEEYLNDPDRPLIYELLHVEKHTGTRLGRIYTRHGIVHTPMFMPVGTQASVKNVSPRDLEEINAQFILSNTYHLWVRPGDDLIAEAGGLHKFMQWDGPILTDSGGFQVWSLSKNNKISEEGVTFKNHVDGAEMFLSPEVAMRIQNNLGSDIMMQLDEAIPYFESYEYVQNSVERTTRWAERAKVAHARPKDQSLFGIVQGAGFKDLRELSAEGLVALDLPGYAVGGLSVGESKEEMNRVLDFTMPLLPADKPRYLMGVAAPDSLFDSAMRGIDMFDSVLPTRIGRNGTLMTDNGRIVITNGKFARDFSLIDEHTDDFGSQHFTKAYLHHLFKANELYAQNIASVHNLRYLLKLMEDMRKSILEDNFLEFRAEVLEKYGYNKPNARLF

SEQ ID NO: 62285 - protein, 381 aa, Weissella sp.; identical to SEQ ID NO: 62269
  misc_feature (1)..(381): tr|A0A139QJS7|A0A139QJS7_9LACT Queuine tRNA-ribosyltran sferase OS=Weissella sp. DD23 OX=1777865 GN=tgt PE=3 SV =1

SEQ ID NO: 62286 - protein, 381 aa, Weissella sp.
  misc_feature (1)..(381): tr|A0A4P6YVG2|A0A4P6YVG2_9LACT Queuine tRNA-ribosyltran sferase OS=Weissella sp. 26KH-42 OX=2506420 GN=tgt PE=3 SV=1
MTEPAIKYRLIHEDKHTGARLGEIITPHGTYPTPMFMPVGTQASVKNISTRELKEMGAEFILGNTYHLWLRPGDELIAEAGGLHKFMNWDQPILTDSGGFQVFSLAGNRSIKEEGVTFKNHLNGDTMFLSPEKAMSIENNLGSDVMMSLDEAIPYFETYDYVKNSVERTSRWAERGLNAHRRPEDQGLFGIVQGAGFKSLRKQSAADLVSMDFPGYAVGGLSVGESKVEMNRVLDFTTPLLPADKPRYLMGVGSADSLIDGAMRGIDMFDCVLPTRIARKGTLMTHHGRLVVKNGKYKADFRPIDDECDCYVCQNYTRAYLRHLFNANELHGQNLASYHNLYFLLKMMEDLRTAIANDQVLEFREMVFAQYGFDQVNARNF

SEQ ID NO: 62287 - protein, 381 aa, Weissella thailandensis
  misc_feature (1)..(381): tr|A0A512PW70|A0A512PW70_9LACT Queuine tRNA-ribosyltran sferase OS=Weissella thailandensis OX=89061 GN=tgt PE=3 SV=1
MSDYAVKYELLHVEKHTGARLGKITTPHGEVMTPMFMPVGTQATVKGVSPRELKEINSQFILSNTYHLWLRPGDELIARAGGLHKFMNWDGPILTDSGGFQVWSLSDHNHITEDGVTFRNHLNGDEMFLSPEVAMRIQNNLGSDVMMQLDEAIPYFETYDYVKNSVERTSRWAERAQKAHKREQDQALFGIVQGAGFRELRKQSAQDLVSLDLPGYAIGGLSVGESKPEMNRVLDFTVPFLPENKPRYLMGVAAPDSLIDAAIRGIDMFDCVLPTRIGRKGTLMTSNGRIVIKNAKYKDDFSLIDPETEDYGSQHFTKAYLHHLFKTNELYGQTIASVHNLRYLLKLMEDVRQAIAEDRLLEFREETLRKYGYFEPNARLF

SEQ ID NO: 62288 - protein, 381 aa, Weissella thailandensis; identical to SEQ ID NO: 62275
  misc_feature (1)..(381): tr|G0UF51|G0UF51_9LACT Queuine tRNA-ribosyltransferase OS=Weissella thailandensis fsh4-2 OX=1056112 GN=tgt PE= 3 SV=1

SEQ ID NO: 62289 - protein, 382 aa, Weissella viridescens
  misc_feature (1)..(382): tr|A0A0R2H275|A0A0R2H275_WEIVI Queuine tRNA-ribosyltran sferase OS=Weissella viridescens OX=1629 GN=tgt PE=3 SV =1
MAEDYAVKYELLHVEKHTGARLGKITTPHGEVMTPMFMPVGTQATVKNVSTRELREIHSQFILANTYHLWLRPGDELIAQAGGLHKFMDWDGPILTDSGGFQVWSLSQHNKISEEGVTFRNHLNGEKMFLSPEVAMRIQNNLGSDVMMQLDEAIPYFETYDYVKNSVERTSRWAERAMAAHKRPEDQALFGIVQGAGFKQLRKQSANDLVSLDLPGYAVGGLSVGESKEEMNRVLDFTVPWLPENKPRYLMGVAAPDSLVDGVMRGIDMFDCVLPTRIGRNGTLMTKHGRVVITNAKYKNDFSPIDLDLDDYGSTHYTKAYLHHLFNANELLGQNIASVHNLRYLLKLMEDMRQAIAEDRLLDFRAELMENYGYNKKNARLF

SEQ ID NO: 62290 - protein, 198 aa, Weissella viridescens
  misc_feature (1)..(198): tr|A0A380P0Q0|A0A380P0Q0_WEIVI Queuine tRNA-ribosyltran sferase OS=Weissella viridescens OX=1629 GN=tgt_1 PE=4 SV=1
MTPMFMPVGTQATVKNVSTRELREIHSQFILANTYHLWLRPGDELIAQAGGLHKFMDWDGPILTDSGGFQVWSLSQHNKISEEGVTFRNHLNGEKMFLSPEVAMRIQNNLGSDVMMQLDEAIPYFETYDYVKIQLNVHHVGLNEPWRHTSDLKIKRYLVLCKEQDLSNCVSNLLMIWFLWICRDMRLVDYQLVSLRKK

SEQ ID NO: 62291 - protein, 376 aa, Wenxinia marina
  misc_feature (1)..(376): tr|A0A0D0PBD5|A0A0D0PBD5_9RHOB Queuine tRNA-ribosyltran sferase OS=Wenxinia marina DSM 24838 OX=1123501 GN=tgt PE=3 SV=1
MTDRFSFALHATDGAARTGAISTPRGTIRTPAFMPVGTAATVKAMLPDSVAATGADILLGNTYHLMLRPGAERVARLGGLHSFMNWDRPILTDSGGFQVMSLADLRRLTEEGVTFRSHVDGSKHFLSPETSMEIQRLLGSDIVMAFDECPALPADEARVAESMRLSMRWAERSKAAFGDRPGHALFGIQQGGVTRELRQESAEALTRIGFDGYAVGGLAVGEGQEAMFGVLDYAPGMLPADRPRYLMGVGKPDDIVGAVKRGIDMMDCVLPSRSGRTGQAWTRRGQVNLRNARHADDPRPLDEACTCPACRGYSRAYLHHVVRAKEMIAGMLLTWHNLHYYQELMAGMRDAIAAGRFAAFEAEFHAARAAGDIEPV

SEQ ID NO: 62292 - protein, 376 aa, Wenxinia saemankumensis
  misc_feature (1)..(376): tr|A0A1M5ZZ43|A0A1M5ZZ43_9RHOB Queuine tRNA-ribosyltran sferase OS=Wenxinia saemankumensis OX=1447782 GN=tgt PE =3 SV=1
MTDRFSFALHATDGAARTGLISTPRGGIRTPAFMPVGTAATVKAMLPGSVRQTGADILLGNTYHLMLRPGAERVARLGGLHRFMNWDRPILTDSGGFQVMSLASLRKLTEEGVTFASHIDGSKHMLSPETSMEIQRLLGSDIVMAFDECPALPADRARIEESMRLSMRWAQRSRDAFGDRPGHALFGIQQGGLEPDLREESAEALTGIGFDGYAIGGLAVGEGQEAMFACLDHAPGALPVDKPRYLMGVGKPDDIVGAVKRGVDMMDCVLPSRSGRTGQAWTRRGQVNLRNARHADDPRPLDAACTCPACTGYSRAYLHHVVRAGEMIAGMLLTWHNLHYYQELMGGMRDAIAAGRFAAWEAGFHAARAEGDIERL

SEQ ID NO: 62293 - protein, 376 aa, Wenyingzhuangia fucanilytica
  misc_feature (1)..(376): tr|A0A1B1Y784|A0A1B1Y784_9FLAO Queuine tRNA-ribosyltran sferase OS=Wenyingzhuangia fucanilytica OX=1790137 GN=t gt PE=3 SV=1
MKFKIEALDPQSKARAGEVTTDHGVIETPIFMPVGTMGTVKGVHQRELKEEINPDIILGNTYHLYLRPKTDVLEAAGGLHKFMNWDRPILTDSGGYQVYSLSGRRKIKEEGVKFKSHIDGSYHFFSPENVMEIQRKIGADIIMAFDECTPYPCDYNYAKRSMHMTHRWLNRCINHLEKVPYRYDYAQTFFPIVQGSTYTDLRKQSAEYIANAGAEGNAIGGLSVGEPAEEMYAMTDVVCSILPEDKPRYLMGVGTPINILENIALGVDMFDCVMPTRNARNGMLFTSEGHINIKNKKWENDFSPVDPAGITWVDTEYSKAYLRHLFVSNEFLGKQIATIHNLGFYLWLVREARKHIIAGDFREWKDKMVKQMDNRL

SEQ ID NO: 62294 - protein, 376 aa, Wenyingzhuangia marina
  misc_feature (1)..(376): tr|A0A1M5S437|A0A1M5S437_9FLAO Queuine tRNA-ribosyltran sferase OS=Wenyingzhuangia marina OX=1195760 GN=tgt PE= 3 SV=1
MKFKIEALDPKSKARAGEITTDHGVIETPIFMPVGTMGTVKGVHQRELKEEINPDIILGNTYHLYLRPKTDVLEAAGGLHKFMNWDRPILTDSGGYQVYSLSGRRKIKEEGVKFKSHIDGSYHFFSPENVMEIQRKIGADIIMAFDECTPYPCDYNYAKRSMHMTHRWLNRCIDHLEKVPYRYDYAQTFFPIVQGSTYTDLRKQSAEYIANAGAEGNAIGGLSVGEPAEEMYAMTDVVCSILPEDKPRYLMGVGTPINILENIALGVDMFDCVMPTRNARNGMLFTSEGHINIKNKKWENDFSPVDPAGITWVDTEYSKAYLRHLFVSNEFLGKQIATIHNLGFYLWLVREARKHIIAGDFREWKDKMVKQMDNRL

SEQ ID NO: 62295 - protein, 368 aa, Wenzhouxiangella marina
  misc_feature (1)..(368): tr|A0A0K0XY05|A0A0K0XY05_9GAMM Queuine tRNA-ribosyltran sferase OS=Wenzhouxiangella marina OX=1579979 GN=tgt PE =3 SV=1
MQFSLLATDGQARRGRLQFDRGSVETPAFMPVGTYGTVKAMTPEELRELGAEIILGNTFHLMLRPGTEVISAHGDLHDFMGWSGPILTDSGGFQVWSLADLRKMDERGVTFASPVDGSRVFLGPEESMAVQRALGSDIVMIFDECTPWPATHEQAAESMRRSLRWAERSKQAHGDSDSALFGIVQGGMYEDLRVESASGLIGIGFDGYAIGGLSVGEPEEDRNRVLEATCPALPDDRPRYLMGVGRPEDILEAVLRGVDMFDCVMPTRNARNGHLFTRRGVLKIRNARYERDTRPIDEDCQCYTCRHYSRAYVKHLQKCNEILGHRLATIHNLHYYQDLMKAIRSAIEAGELQALAVSLRADWQAGIP

SEQ ID NO: 62296 - protein, 368 aa, Wenzhouxiangella sediminis
  misc_feature (1)..(368): tr|A0A3E1KBN4|A0A3E1KBN4_9GAMM Queuine tRNA-ribosyltran sferase OS=Wenzhouxiangella sediminis OX=1792836 GN=tgt PE=3 SV=1
MEFDLLATDGGARRGRLTFGRGTVETPAFMPVGTYGTVKAMTPEELREIGAEIVLGNTFHLMLRPGTEVIAAHGDLHDFMGWDGPILTDSGGFQVFSLADLRKMTEEGVTFASPVDGSKVFLGPEDSMAVQRALGSDIVMIFDECTPYPASEQEARDSMERSLRWAERSRRAHGDNPAALFGIVQGGMYPPLRRRSVEGLLDIGFDGYAIGGLSVGESESERESILEATCPLLPADRPRYLMGVGRPEDLVAAVARGVDMFDCVMPTRNARNGYLFTSRGIVKIRNARHERDTGPVDPDCDCYTCRRFSRAYLKHLNKCNEILGHRLATIHNLHYYQSLMRQMRQAIEAGNFEQLARSLADGWSARDP

SEQ ID NO: 62297 - protein, 368 aa, Wenzhouxiangella sp.
  misc_feature (1)..(368): tr|A0A372BVY2|A0A372BVY2_9GAMM Queuine tRNA-ribosyltran sferase OS=Wenzhouxiangella sp. 15181 OX=2301224 GN=tgt PE=3 SV=1
MRFELLGADGEARRGRLTFERGTVETPAFMPVGTYGTVKAMTPEELRGIGAEIILGNTFHLMLRPGTDVIAAHGDLHDFMGWDGPILTDSGGFQVFSLAELRKMDEKGVTFASPVDGSKVFLGPEESMTVQRALGSDIVMIFDECTPYPATEQQARDSMERSLRWAERSKQAHADNPAALFGIVQGGMYPDLRRRSVEGLREIGFDGYAIGGLSVGESEGERESILSTTCPLLPRDVPRYLMGVGRPQDLVAAVARGIDMFDCVMPTRNARNGHLFTSRGVIKIRNARHARDTGPVDPDCDCYTCSRFSRAYLKHLNKCNEILGHRLATIHNLYYYQSLMRRMREAIEAGRFDELATELEAGWSGEYS

SEQ ID NO: 62298 - protein, 364 aa, Westiellopsis prolifica; identical to SEQ ID NO: 57410
  misc_feature (1)..(364): tr|A0A4Q9JFM2|A0A4Q9JFM2_9CYAN Queuine tRNA-ribosyltran sferase OS=Westiellopsis prolifica IICB1 OX=1970206 GN= tgt PE=3 SV=1

SEQ ID NO: 62299 - protein, 420 aa, Williamsia limnetica
  misc_feature (1)..(420): tr|A0A318RNS2|A0A318RNS2_9NOCA Queuine tRNA-ribosyltran sferase OS=Williamsia limnetica OX=882452 GN=tgt PE=3 S V=1
MSDTDQGPDRTFTVGTSLSGTLGRTGVISTPHGQINTPAFVPVGTKATVKTVVPEAVRDLGAQAVLANAYHLYLQPGPDIIDEAGGLGKFMNWPGPTYTDSGGFQVMSLGAGFKKVIAMDVTGMQNDEVIAEGKERLARVDDDGVTFKSHLDGSTHRFTPEISMQIQHQLGADIIFGFDELTTLMNTRAYQETSLERTRLWAIRCLAEHNRLTAARAHRPVQSLWGVIQGAQYEDLRRKAARDLRAMSDIDVAEGGRGFGGYGIGGALEKQNLGTIVRWVNEELPEDKARHLLGISEPDDIFTAIESGIDTFDCVSPSRVARNGAIYSLDGRYNVTNSRFRRDFRPLDPEMDNYTTQYTRAYIHHLFKAKEGLAATLCTIHNEHFIVTLVERARQAIIDGTYYEYRDEFLRRYYAGAEKA

SEQ ID NO: 62300 - protein, 420 aa, Williamsia marianensis
  misc_feature (1)..(420): tr|A0A315TCD9|A0A315TCD9_9NOCA Queuine tRNA-ribosyltran sferase OS=Williamsia marianensis OX=322609 GN=tgt PE=3 SV=1
MNDPQQGPDRSFTLGTSLAGTLGRTGTINTPHGQIKTPAFVPVGTKATVKTVVPEAVRDLGAQAVLANAYHLYLQPGPHIIDEAGGLGKFMNWSGPTYTDSGGFQVMSLGAGFKKVIAMDVTGMQNDEVIAEGKERLARVDDDGVKFKSHLDGSPHRFTPEVSMQIQHQLGADIIFAFDELTTLMNTREYQETSLERTRLWAIRCLAEHNRLTAERSHRPTQSLWGVLQGAQYEDLRRKAARDLVAMSERDVDNGGRGFGGYGIGGALEKQNLGTIVRWVNEELPQDKARHLLGISEPDDIFTAIENGVDTFDCVSPSRVARNGAIYSLDGRYNVTNSRFRNDFGPLDPEIENYTTQYTRAYIHHLFKAKEGLAATLCTIHNEHFIVTLVERARQAIEDGTYFEFRDEFLGRYYAQAKTS

SEQ ID NO: 62301 - protein, 420 aa, Williamsia marianensis
  misc_feature (1)..(420): tr|A0A2G3PV16|A0A2G3PV16_9NOCA Queuine tRNA-ribosyltran sferase OS=Williamsia marianensis OX=322609 GN=tgt PE=3 SV=1
MNDPQQGPDRSFTLGTSLPGTLGRTGTIDTPHGQIKTPAFVPVGTKATVKTVVPEAVRDLGAQAVLANAYHLYLQPGPHIIDEAGGLGKFMNWPGPTYTDSGGFQVMSLGAGFKKVIAMDVTGMQNDEVIAEGKERLARVDDDGVTFKSHLDGSSHRFTPEVSMQIQHQLGADIIFAFDELTTLMNTREYQETSLERTRLWAVRCLAEHNRLTAERSHRPTQSLWGVLQGAQYEDLRRKAARDLVAMSERDVDNGGRGFGGYGIGGALEKQNLGTIVRWVNEELPQDKARHLLGISEPDDIFTAIENGVDTFDCVSPSRVARNGAIYSLDGRYNVTNSRFRNDFRPLDPEIENYTTQYTRAYIHHLFKAKEGLAATLCTIHNEHFIVTLVERARQAIEDGTYFEFRDEFLGRYYAQAKTS

SEQ ID NO: 62302 - protein, 420 aa, Williamsia muralis
  misc_feature (1)..(420): tr|A0A495K7N0|A0A495K7N0_9NOCA Queuine tRNA-ribosyltran sferase OS=Williamsia muralis OX=85044 GN=tgt PE=3 SV=1
MNDPQQGPDRSFTLGTSLAGTLGRTGTINTPHGQIKTPAFVPVGTKATVKTVVPEAVRDLGAQAVLANAYHLYLQPGPHIIDEAGGLGKFMNWPGPTYTDSGGFQVMSLGAGFKKVIAMDVTGMQNDEVIAEGKERLARVDDDGVTFKSHLDGSPHRFTPEVSMQIQHQLGADIIFAFDELTTLMNTREYQETSLERTRLWAIRCLAEHNRLTAERSHRPTQSLWGVLQGAQYEDLRRKAARDLVAMSERDVDNGGRGFGGYGIGGALEKQNLGTIVRWVNEELPQDKARHLLGISEPDDIFTAIENGVDTFDCVSPSRVARNGAIYSLDGRYNVTNSRFRNDFGPLDPEIENYTTQYTRAYIHHLFKAKEGLAATLCTIHNEHFIVTLVERARQAIEDGTYFEFRDEFLGRYYAQAKTS

SEQ ID NO: 62303 - protein, 432 aa, Williamsia sp.
  misc_feature (1)..(432): tr|V8D1H7|V8D1H7_9NOCA Queuine tRNA-ribosyltransferase OS=Williamsia sp. D3 OX=1313067 GN=tgt PE=3 SV=1
MPGGAAHWEDASVNDPQHGPDRSFTLGTSLAGTLGRTGTISTPHGQIKTPAFVPVGTKATVKTVVPEAVRDLGAQAVLANAYHLYLQPGPHIIDEAGGLGKFMNWPGPTYTDSGGFQVMSLGAGFKKVIAMDVTGMQNDEVIAEGKERLARVDDDGVTFKSHLDGSPHRFTPEVSMQIQHQLGADIIFAFDELTTLMNTREYQETSLERTRLWAIRCLAEHNRLTAERSHRPTQSLWGVLQGAQYEDLRRKAARDLVAMSERDVDNGGRGFGGYGIGGALEKQNLGTIVRWVNEELPQDKARHLLGISEPDDIFTAIENGVDTFDCVSPSRVARNGAIYSLDGRYNVTNSRFRNDFGPLDPEIENYTTQYTRAYIHHLFKAKEGLAATLCTIHNEHFIVTLVERARQAIEDGTYFEFRDEFLGRYYAQAKTS

SEQ ID NO: 62304 - protein, 424 aa, Williamsia sp.
  misc_feature (1)..(424): tr|A0A0Q5R6X4|A0A0Q5R6X4_9NOCA Queuine tRNA-ribosyltran sferase OS=Williamsia sp. Leaf354 OX=1736349 GN=ASG12_0 3080 PE=3 SV=1
MPDPDTTDRSATTPDHSFVFGTELAGTLGRTGVIRTPHGDIRTPAFIPVGTKATVKTVVPEAVADLGAQAVLANAYHLYLQPGPEIVDAAGGLGRFMNWPGPTYTDSGGFQVMSLGVGFKKVISMEVRETENDDVIAPGKERLARVDDDGVTFKSHLDGTTHRFSPEVSMQIQHQLGADIIFAFDELTTLMNTRAYQVDSLERTRLWAIRCLDEHNRLTRERHDRPLQSLWGVVQGAQYEDLRRAAARGLMEASRRDQDAGGRGFGGYGIGGALEKENLGQIVGWVNDELPRDTAKHLLGISEPDDIFTAIENGIDTFDCVSPSRVARNGAIYSFDGRYNITNSRFRADFSPMEPELENYSTQYSRAYIHHLFKAKEGLASTLCTIHNEHFIVTLVDRARQAIEDGNYIEYRDAFLARYYAGSS

SEQ ID NO: 62305 - protein, 418 aa, Williamsia sterculiae
  misc_feature (1)..(418): tr|A0A1N7F724|A0A1N7F724_9NOCA Queuine tRNA-ribosyltran sferase OS=Williamsia sterculiae OX=1344003 GN=tgt PE=3 SV=1
MGHGLPADAAFRVQARLPGTLGRVGVLVTPHGEIRTPAFVPVGTKATVKTVLPESVAAVGAQAVLANAYHLYLQPGSEIVDLAGGLGRFMNWSGPTFTDSGGFQVMSLGAGFKKVIAMDVTGLQDDAVIAEGKERLALVDDDGVTFKSHLDGSRHRFTPESSMRIQHELGADIIFAFDELTTLMNTRAYQVDSLERTRQWAIRCLIAHNDLSRERTHRPLQSLWGVLQGAQYEDLRRKAARDLAEISDRDVDAGGRGFGGYGIGGALEKQNLGTIVRWVNEELPEHKPKHLLGISEPDDIFTAIENGVDTFDCVSPSRVARNGAIYSRDGRYNITNSRFKRDFGPLDPEVENYTSRYSRAYIHHLFKAKEGLASTLCTIHNEHFIVSLVDRARQAIIDGDYEAFRDDFLGRYYAGAHT

SEQ ID NO: 62306 - protein, 376 aa, Williamwhitmania taraxaci
  misc_feature (1)..(376): tr|A0A1G6JHI2|A0A1G6JHI2_9BACT Queuine tRNA-ribosyltran sferase OS=Williamwhitmania taraxaci OX=1640674 GN=tgt PE=3 SV=1
MKFTLLKTDKECKARRGRLETDHGTIETPIFMPVGTAGTVKGVLQRDVKTEVKAEIILGNTYHLYLRPGLDVLEKAGGLHKFMAWDMPILTDSGGFQVFSLAHNRKLNTNGCEFRSHIDGSKHLFTPENVVDIQRKIGADIIMAFDECPPGTADFAYAAKSLDITQQWLERGLKHFDSTDPKYGYSQTFFPIVQGCVYPDLRRKAAEGAAKFYREGYAIGGLSVGEPEEVMYEMIEVVEPILPSDRPRYLMGVGTPANILEAIARGVDMFDCVMPTRNGRNGMLFTREGIINIKNLRWKDDFSPIDPDGTNYVDTTFSKAYLRHLFVANEMLGPQLASIHNLSFYLWLVNEARLKIEEGTFLSWKNMMIKKLTTRL

SEQ ID NO: 62307 - protein, 376 aa, Winogradskyella arenosi
  misc_feature (1)..(376): tr|A0A368ZF12|A0A368ZF12_9FLAO Queuine tRNA-ribosyltran sferase OS=Winogradskyella arenosi OX=533325 GN=tgt PE= 3 SV=1
MKFQRVAQDKQSKARAGVITTDHGKIETPIFMPVGTVASVKGVHQRELKNDINPDIILGNTYHLYLRPQTPILEQAGGLHKFMNWDRNILTDSGGYQVYSLSSNRKIKEEGVKFKSHIDGSYHVFTPENVMEVQRSIGADIIMAFDECTPYPCDYNYAKRSMHMTHRWLERCLTHLKKTPFTYDYEQTFFPIVQGSTYKDLRKQSAEYIANAGAEGNAIGGLSVGEPAEEMYAMTDVVCSILPEDKPRYLMGVGTPINILENIALGVDMFDCVMPTRNARNGMLFTAHGSINIKNLKWANDFSPIDEMGITFVDTEYSKAYLRHLFTVNELLGKQIATIHNLGFYLWLTREARKHIIAGDFREWKDKMVKQMDNRL

SEQ ID NO: 62308 - protein, 376 aa, Winogradskyella aurantia
  misc_feature (1)..(376): tr|A0A265UR63|A0A265UR63_9FLAO Queuine tRNA-ribosyltran sferase OS=Winogradskyella aurantia OX=1915063 GN=tgt P E=3 SV=1
MEFKQLANDKESKARAGLITTDHGTIETPIFMPVGTVASVKGVHQRELKNDINPDIILGNTYHLYLRPQTTILEEAGGLHKFMNWDRNILTDSGGYQVYSLSANRKIKEEGVKFKSHIDGSYHVFTPENVMEIQRSIGADIIMAFDECTPYPCDYNYAKRSMHMTHRWLDRCMQHLKTLPFKYDYAQTFFPIVQGSTYKDLRRQSAEYIANVGAEGNAIGGLSVGEPAEEMYAMTEVVCDILPQDKPRYLMGVGTPINILENIALGVDMFDCVMPTRNARNGMLFTANGTINIKNKKWENDFSPIDDMGITFVDTDYSKAYLKHLFSVNELLGKQIATIHNLGFYLWLVREARKHIIDGDFGVWKDIMVKQMDKRL

SEQ ID NO: 62309 - protein, 376 aa, Winogradskyella epiphytica
  misc_feature (1)..(376): tr|A0A2V4WUI3|A0A2V4WUI3_9FLAO Queuine tRNA-ribosyltran sferase OS=Winogradskyella epiphytica OX=262005 GN=tgt PE=3 SV=1
MKFQRVAQDKQSKARAGTITTDHGTIETPIFMPVGTVGSVKGVHQRELKNDINPDIILGNTYHLYLRPQTPILEKAGGLHKFMNWDRNILTDSGGYQVYSLSANRKIKEEGVKFKSHIDGSYHTFTPENVMEVQRSIGADIIMAFDECTPYPCDYNYAKRSMHMTHRWLERCLTHLKKTPFKYDYEQTFFPIVQGSTYKDLRQQSAEYIANAGAQGNAIGGLSVGEPAEEMYAMTEVVCDILPEDKPRYLMGVGTPINILENIALGVDMFDCVMPTRNARNGMLFTAHGSINIKNLKWAEDFSPIDEMGITFVDTEYTKAYLRHLFTVNELLGKQIATIHNLGFYLWLTREARKHIIAGDFREWKDKMVKQMDNRL

SEQ ID NO: 62310 - protein, 376 aa, Winogradskyella eximia
  misc_feature (1)..(376): tr|A0A3D9H009|A0A3D9H009_9FLAO Queuine tRNA-ribosyltran sferase OS=Winogradskyella eximia OX=262006 GN=tgt PE=3 SV=1
MKFQRVANDKQTKARAGSITTDHGTIETPIFMPVGTVASVKGVHQRELKDDINPDIILGNTYHLYLRPQTPILEQAGGLHKFMNWDRNILTDSGGYQVYSLSSNRKIKEEGVKFKSHIDGSYHVFTPENVMEVQRKIGADIIMAFDECTPYPCDYNYAKRSMHMTHRWLERCLTHLKKTPLTYDYDQTFFPIVQGSTYKDLRQQSAEYIANAGAEGNAIGGLSVGEPAEEMYAMTDVVCSILPEDKPRYLMGVGTPINILENIALGVDMFDCVMPTRNARNGMLFTAHGSINIKNLKWANDFSPIDEMAITFVDTEYSKAYLRHLFTVNELLGKQIATIHNLGFYLWLTREARKHIIAGDFRAWKEKMVKQMDNRL

SEQ ID NO: 62311 - protein, 376 aa, Winogradskyella jejuensis
  misc_feature (1)..(376): tr|A0A1M5JG18|A0A1M5JG18_9FLAO Queuine tRNA-ribosyltran sferase OS=Winogradskyella jejuensis OX=1089305 GN=tgt PE=3 SV=1
MDFKKIATDAGSKARAGEITTDHGKIETPIFMPVGTVASVKGVHQRELKNDINPDIILGNTYHLYLKPQTKILEQAGGLHKFMNWDRNILTDSGGYQVYSLSANRKIKEEGVKFKSHIDGSTHMFTPENVMEIQRSIGADIIMAFDECTPYPCDYNYAKRSMHMTHRWLDRCINHLDKTPFTYDYAQTFFPIVQGSTYKDLRRQSAEYIANAGAEGNAIGGLSVGEPAEEMYAMTDVVCEILPEDKPRYLMGVGTPINILENIALGVDMFDCVMPTRNARNGMLFTAHGTINIKNAKWAEDFSPIDEMGITFVDTEYSKAYLKHLFSVNELLGKQIATIHNLGFYLWLVREARKHIIAGDFREWKDKMVKQMDKRL

SEQ ID NO: 62312 - protein, 376 aa, Winogradskyella pacifica
  misc_feature (1)..(376): tr|A0A3D9MYK6|A0A3D9MYK6_9FLAO Queuine tRNA-ribosyltran sferase OS=Winogradskyella pacifica OX=664642 GN=tgt PE =3 SV=1
MKFQRVAKDTQSKARAGTITTDHGTIETPIFMPVGTVASVKGVHQRELKNDINPDIILGNTYHLYLRPQTPILEQAGGLHKFMNWDRNILTDSGGYQVYSMSSNRKIKEEGVKFKSHIDGSYHVFTPENVMEVQRSIGADIIMAFDECTPYPCDYNYAKRSMHMTHRWLERCLTHLKKTPFKYDYEQTFFPIVQGSCYKDLREQSAEYIANAGAEGNAIGGLSVGEPAEEMYAMTDIVCNILPEDKPRYLMGVGTPINILENIALGVDMFDCVMPTRNARNGMLFTAHGSINIKNLKWANDFSPVDEMGITFVDTEYSKAYLRHLFTVNELLGKQIATIHNLGFYLWLTREARKHIIAGDFRAWKDKMVKQMDNRL

SEQ ID NO: 62313 - protein, 376 aa, Winogradskyella psychrotolerans
  misc_feature (1)..(376): tr|S7X0R0|S7X0R0_9FLAO Queuine tRNA-ribosyltransferase OS=Winogradskyella psychrotolerans RS-3 OX=641526 GN=tg t PE=3 SV=1
MKFQRVAKDTQSKARAGTITTDHGIIETPIFMPVGTVASVKGVHQRELKNDINPDIILGNTYHLYLRPQTPILEQAGGLHKFMNWDRNILTDSGGYQVYSMSSNRKIKEEGVKFKSHIDGSYHVFTPENVMEVQRSIGADIIMAFDECTPYPCDYNYAKRSMHMTHRWLERCLTHLKKTPFKYDYEQTFFPIVQGSCYKDLREQSAEYIANAGAAGNAIGGLSVGEPAEEMYAMTDIVCSILPEDKPRYLMGVGTPINILENIALGVDMFDCVMPTRNARNGMLFTAHGSINIKNLKWADDFSPVDEMGITFVDTEYSKAYLRHLFTVNELLGKQIATIHNLGFYLWLTREARKHIIAGDFRAWKDKMVKQMDNRL

SEQ ID NO: 62314 - protein, 376 aa, Winogradskyella sp.
  misc_feature (1)..(376): tr|A0A1Y0MJW6|A0A1Y0MJW6_9FLAO Queuine tRNA-ribosyltran sferase OS=Winogradskyella sp. PC-19 OX=754417 GN=tgt P E=3 SV=1
MDFKKIAIDAGSKARAGEIKTDHGKIETPIFMPVGTVATVKGVHQRELKNDINPDIILGNTYHLYLRPQTKILEEAGGLHKFMNWDRNILTDSGGYQVYSLSANRKIKEEGVKFKSHIDGSMHMFTPENVMEIQRSIGADIIMAFDECTPYPCDYNYAKRSMHMTHRWLDRCINHLEKTPFKYDYEQTFFPIVQGSTYKDLRKQSAEYIANAGAQGNAIGGLSVGEPAEEMYGMTEVVCDILPEDKPRYLMGVGTPINILENIALGVDMFDCVMPTRNARNGMLFTAHGTINIKNAKWANDFSPIDDMGITYVDTDYSKAYLKHLFTVNELLGKQIATIHNLGFYLWLVREARKHIIAGDFRVWKDKMVKQMDKRL

SEQ ID NO: 62315 - protein, 376 aa, Winogradskyella sp.
  misc_feature (1)..(376): tr|A0A024FDD7|A0A024FDD7_9FLAO Queuine tRNA-ribosyltran sferase OS=Winogradskyella sp. PG-2 OX=754409 GN=tgt PE =3 SV=1
MKFQRLANDKATKARAGSITTDHGVIETPIFMPVGTVASVKGVHQRELKNDINPDIILGNTYHLYLRPQTPILEKAGGLHKFMNWDRNILTDSGGYQVYSLSANRKIKEEGVKFKSHIDGSYHVFTPENVMEVQRSIGADIIMAFDECTPYPCDYNYAKRSMHMTHRWLERCLTHLKKTPLKYDYEQTFFPIVQGSTYKDLRKQSAEYIANAGAEGNAIGGLSVGEPAEEMYAMTDVVCSILPEDKPRYLMGVGTPINILENIALGVDMFDCVMPTRNARNGMLFTAHGSINIKNLKWADDFSPIDEMGITFVDTEYSKAYLRHLFTVNELLGKQIATIHNLGFYLWLTREARKHIIEGDFGVWKDKMVKQMDKRL

SEQ ID NO: 62316 - protein, 376 aa, Winogradskyella thalassocola
  misc_feature (1)..(376): tr|A0A1G8BV95|A0A1G8BV95_9FLAO Queuine tRNA-ribosyltran sferase OS=Winogradskyella thalassocola OX=262004 GN=tg t PE=3 SV=1
MKFTRVANDKETKARAGSITTDHGTIETPIFMPVGTVGSVKGVHQRELKNDINPDIILGNTYHLYLRPQTPILEQAGGLHKFMNWDRNILTDSGGYQVYSMSSNRKIKEEGVKFKSHIDGSYHVFTPENVMEVQRSIGADIIMAFDECTPYPCDYNYAKRSMHMTHRWLERCLTHLKKTPFKYDYEQTFFPIVQGSCYKDLREQSAEYIANAGAAGNAIGGLSVGEPAEEMYAMTDIVCSILPEDKPRYLMGVGTPINILENIALGVDMFDCVMPTRNARNGMLFTAHGSINIKNLKWADDFSPVDEMGITFVDTEYTKAYLRHLFTVNELLGKQIATIHNLGFYLWLTREARKHIIAGDFRAWKDKMVKQMDNRL

SEQ ID NO: 62317 - protein, 376 aa, Winogradskyella wandonensis
  misc_feature (1)..(376): tr|A0A4R1KNG2|A0A4R1KNG2_9FLAO Queuine tRNA-ribosyltran sferase OS=Winogradskyella wandonensis OX=1442586 GN=tg t PE=3 SV=1
MNFTRIAADKNSKARAGEITTDHGKIETPIFMPVGTVATVKGVHQRELKNDINPDIILGNTYHLYLRPQTQILEKAGGLHKFMNWDRNILTDSGGYQVYSLSANRKIKEEGVKFKSHIDGSMHLFTPENVMEIQRSIGADIIMAFDECTPYPCDYKYAQRSMHMTHRWLERCLTHLKKTPFKYDYSQAFFPIVQGSTYKDLRKQSAEYIAGVGAEGNAIGGLSVGEPAEEMYAMTDVVCDILPEDKPRYLMGVGTPINILENIALGVDMFDCVMPTRNARNGMLFTAHGTINIKNRKWADDFSPIDEMGITFVDTEYSKAYLKHLFSVNELLGKQIATIHNLGFYLWLVREARKHIIEGDFRTWKDKMVKQMDKRL

SEQ ID NO: 62318 - protein, 375 aa, Woeseia oceani
  misc_feature (1)..(375): tr|A0A193LE68|A0A193LE68_9GAMM Queuine tRNA-ribosyltran sferase OS=Woeseia oceani OX=1548547 GN=tgt PE=3 SV=1
MKLRIDARCGAARTGVLEFRRGTVRTPAFMPVGTYGSVKSVTPEEVRASGADILLGNTFHLMLRPGAEIVRAHGGLHEFIHWDRPILTDSGGFQVFSLAAMRKLSPEGVSFRSPVNGDEVFLTPERSMEVQHALNADVTMIFDECTPYPATEREAATSMRLSLDWARRSRQRFDELRAANPERGEALFGIVQGGIYDELRQESLQGLQGIGFDGYAIGGLAVGEPEDERLAVMDALCPTLPDDRPRYLMGVGTPLDIAEAVSRGVDMFDCVMPTRHARNGHLFTSEGVIRIRNARHTSDTGPLDPACDCYTCQNYSRAYLRHLEKCGEMLGPRLCTIHNLHYYQRLMTDLRAAITAGELPAAVARLKSVYQQSRG

SEQ ID NO: 62319 - protein, 372 aa, Woeseia sp.
  misc_feature (1)..(372): tr|A0A2E6ECK1|A0A2E6ECK1_9GAMM Queuine tRNA-ribosyltran sferase OS=Woeseia sp. OX=1980636 GN=tgt PE=3 SV=1
MKFEVHQRSGSARTGTMYFRRGKVRTPAFMPVGTYGSVKSVTPEEVANLGAEMILGNTFHLLLRPGMQIIRGHGGLHEFMNWNGPILTDSGGFQVFSLAEMRELSEEGVCFRSPIDGDKVFLTPERSMEIQHDLNADVAMVFDECTKYPASESDALESMELSLRWAQRSRDRFDGLKEKEPDRGEALFGIVQGGIYEKLRRDSLNGLTEIGFDGYAVGGLAVGETAEEREIVLDALVPRIPKTHPRYLMGVGTPLDIAEAVSRGIDMFDCVMPTRHARTGHLFTSEGVVKIRNAKYTDNQGPLDPNCSCYTCKNYSLAYLRHLEKCGEVLGLRLHTIHNLTYYQKLMERLRHAIARKQLDILLVELRNLYGG

SEQ ID NO: 62320 - protein, 372 aa, Woeseia sp.
  misc_feature (1)..(372): tr|A0A2E6ZJE6|A0A2E6ZJE6_9GAMM Queuine tRNA-ribosyltran sferase OS=Woeseia sp. OX=1980636 GN=tgt PE=3 SV=1
MNFSVENHCGAARSGVLKLRHGEIQTPVFMPVGTYGAVKGVSPEELEGNGAQIILGNTFHLMLRPGVEVIRAHGGLHEFINWKRPILTDSGGFQVFSLASIRKLSENGVCFRSPVNGDEVMLTPEKSMEVQHELNADITMIFDECTAYPISKIEAQKSMQLSLRWASRSRIRFDELKKIEPDRGDALFGIIQGGMYNDLRQESLDELEKIGFDGYAFGGLAVGESKDERHDVLSSLMPSMPADKPRYLMGVGTPVDIAEGVLRGIDMFDCVIPTRHARNAQLYTSRGKINIRHAKYKDDTSPPDVDCNCYTCTNYSIGYLRHLEKCGEMLGSRLATIHNLHYYHNLMNNIRNSIISGKLPEFVAKLRDIYDN

SEQ ID NO: 62321 - protein, 395 aa, Woeseiaceae bacterium
  misc_feature (1)..(395): tr|A0A2D9M2D5|A0A2D9M2D5_9GAMM Queuine tRNA-ribosyltran sferase OS=Woeseiaceae bacterium OX=2026806 GN=tgt PE=3 SV=1
  misc_feature (77)..(77): Xaa can be any naturally occurring amino acid
  misc_feature (175)..(175): Xaa can be any naturally occurring amino acid
  misc_feature (180)..(180): Xaa can be any naturally occurring amino acid
  misc_feature (182)..(184): Xaa can be any naturally occurring amino acid
  misc_feature (186)..(186): Xaa can be any naturally occurring amino acid
  misc_feature (189)..(191): Xaa can be any naturally occurring amino acid
  misc_feature (290)..(290): Xaa can be any naturally occurring amino acid
  misc_feature (315)..(315): Xaa can be any naturally occurring amino acid
MSRMFDFKVLHSTGAARRGQMRTAHGIVETPAFMPVGTGGAVKSVTQRNLQELGAQMLMANTYHLYLRPGAELIARXGGLHRFMAWDRPIMTDSGGYQVFSLASRRTINDDGATFQSHIDGRECHLTPEDVATIQWRLGSDIAMVFDECEAYPSSVEATRRAMERTLRWASRARXRFVSXQXXXAXQPXXXSPNPEQAQFGIIQGGIYKELRASSVEHTVSLGFDAYAIGGLSVGEPYELMYDVVAETAPQLPQDRPRYLMGAGMPDDLVEAAARGIDLFDCVLPTRNAXNGQLFTSTGCLNIKQARYKEDDRPXDETCQCQVCSHHSRAYLRHLFVTHEMTAATLNTLHNLHFYLDTMRRIRDAIMFGSLEELRHEFRLIYPRTPGRESQEAMS

SEQ ID NO: 62322 - protein, 373 aa, Woeseiaceae bacterium
  misc_feature (1)..(373): tr|A0A2E5CIV6|A0A2E5CIV6_9GAMM Queuine tRNA-ribosyltran sferase OS=Woeseiaceae bacterium OX=2026806 GN=tgt PE=3 SV=1
  misc_feature (4)..(4): Xaa can be any naturally occurring amino acid
  misc_feature (10)..(11): Xaa can be any naturally occurring amino acid
  misc_feature (16)..(16): Xaa can be any naturally occurring amino acid
  misc_feature (32)..(32): Xaa can be any naturally occurring amino acid
  misc_feature (35)..(35): Xaa can be any naturally occurring amino acid
  misc_feature (41)..(41): Xaa can be any naturally occurring amino acid
  misc_feature (46)..(46): Xaa can be any naturally occurring amino acid
  misc_feature (67)..(67): Xaa can be any naturally occurring amino acid
  misc_feature (78)..(78): Xaa can be any naturally occurring amino acid
  misc_feature (83)..(83): Xaa can be any naturally occurring amino acid
  misc_feature (116)..(116): Xaa can be any naturally occurring amino acid
  misc_feature (160)..(160): Xaa can be any naturally occurring amino acid
  misc_feature (164)..(164): Xaa can be any naturally occurring amino acid
  misc_feature (175)..(175): Xaa can be any naturally occurring amino acid
  misc_feature (178)..(178): Xaa can be any naturally occurring amino acid
  misc_feature (184)..(184): Xaa can be any naturally occurring amino acid
  misc_feature (186)..(186): Xaa can be any naturally occurring amino acid
  misc_feature (227)..(227): Xaa can be any naturally occurring amino acid
  misc_feature (248)..(248): Xaa can be any naturally occurring amino acid
  misc_feature (265)..(265): Xaa can be any naturally occurring amino acid
  misc_feature (290)..(291): Xaa can be any naturally occurring amino acid
  misc_feature (307)..(308): Xaa can be any naturally occurring amino acid
  misc_feature (324)..(324): Xaa can be any naturally occurring amino acid
  misc_feature (348)..(348): Xaa can be any naturally occurring amino acid
  misc_feature (353)..(353): Xaa can be any naturally occurring amino acid
  misc_feature (356)..(357): Xaa can be any naturally occurring amino acid
  misc_feature (360)..(360): Xaa can be any naturally occurring amino acid
  misc_feature (364)..(364): Xaa can be any naturally occurring amino acid
  misc_feature (371)..(371): Xaa can be any naturally occurring amino acid
MRFXIINEDXXARTGXISLRRGEIQTPAFMPXGTXGAVKSXTPEEXSESSTDIILSNTFHLMLRPGXEIIKKHGGLHXFMNWXGPILTDSGGFQVFSLEKKRKITKDGVHFQSPIXGAKVFLSPELSIDAQHHLDSDIVMIFDECTIYPATKKEAKDSMXLSIXWAKRSKNSFLXLKXDQAEEXAXLFGIVQGGMYNDLRLESLEKLHDIGFDGYAIGGLAVGEPEXEREAILENLIPHMKKNKPRYXMGVGFPVDIAKSVHLGXDMFDCVIPTRHARNGHLFTSLGIIXXRNSSFKDDTDKLDPIXXCYVCRNYSRSYLRHLXKINEMLGSRLCTIHNVHYYQNLMXEIRAXIEXXTLXAYIXELESIFXRK

SEQ ID NO: 62323 - protein, 243 aa, Wohlfahrtiimonas chitiniclastica
  misc_feature (1)..(243): tr|A0A162TP03|A0A162TP03_9GAMM Queuine tRNA-ribosyltran sferase OS=Wohlfahrtiimonas chitiniclastica OX=400946 G N=BMY_0162 PE=3 SV=1
MEIQRRLGSDIVMAFDECTPYPADYETARKSMEMSMRWAKRSKDAFEGNPNALFGIIQGGMHEDLRTRSLEALLEIDFHGYAVGGLAVGEPMDERHRILEHLTPQMRDDKPRYLMGVGKPEDLIEGVERGIDMFDCVMPTRNARNGHLFTRYGDVRIRNQKYQFDTNPVDPSCTCYTCQNFSRSYLRHLDKTKELLGAHLNSIHNIHYYLQLMQEIRDSIEAGKFQEFKRQFYSDRQTIGKEA

SEQ ID NO: 62324 - protein, 370 aa, Wohlfahrtiimonas chitiniclastica
  misc_feature (1)..(370): tr|A0A256CQ19|A0A256CQ19_9GAMM Queuine tRNA-ribosyltran sferase OS=Wohlfahrtiimonas chitiniclastica OX=400946 G N=tgt PE=3 SV=1
MEFSLLSTDGGARRGRLTFERGVIETPIFMPVGTIATVKGLTPNNLLDANAQIILGNTFHLWLRPGLDVINAHGDLHDFMRWDKPILTDSGGFQVFSLAELRKITEEGVTFRSPFDGKKCFLDPETSMEIQRRLGSDIVMAFDECTPYPADYETARKSMEMSMRWAKRSKDAFEGNPNALFGIIQGGMHEDLRTRSLEALLEIDFHGYAVGGLAVGEPMDERHRILEHLTPQMRDDKPRYLMGVGKPEDLIEGVERGIDMFDCVMPTRNARNGHLFTRYGDVRIRNQKYQFDTNPVDPSCTCYTCQNFSRSYLRHLDKTKELLGAHLNSIHNIHYYLQLMQEIRDSIEAGKFQEFKRQFYSDRQTIGKEA

SEQ ID NO: 62325 - protein, 370 aa, Wohlfahrtiimonas sp.
  misc_feature (1)..(370): tr|A0A256CCN9|A0A256CCN9_9GAMM Queuine tRNA-ribosyltran sferase OS=Wohlfahrtiimonas sp. G9077 OX=1980118 GN=tgt PE=3 SV=1
MEFSLLSTDGGARRGRLTFERGVIETPIFMPVGTIATVKGLTPNNLLEANAQIILGNTFHLWLRPGLDVINAHGDLHDFMRWDKPILTDSGGFQVFSLAELRKITEEGVTFRSPFDGKKCFLDPETSMEIQRRLGSDIVMAFDECTPYPADYETARKSMEMSMRWAKRSKDAFEGNPNALFGIIQGGMHEDLRTRSLEALLEIDFHGYAVGGLAVGEPMDERHRILEHLTPQMRDDKPRYLMGVGKPEDLIEGVERGIDMFDCVMPTRNARNGHLFTRYGDVRIRNQKYQFDTNPVDPSCTCYTCQNFSRSYLRHLDKTKELLGAHLNSIHNIHYYLQLMQEIRDSIEAGKFQEFKRQFYSDRQTIGKEA

SEQ ID NO: 62326 - protein, 403 aa, Wolbachia endosymbiont
  misc_feature (1)..(403): tr|A0A176Q8N1|A0A176Q8N1_9RICK Queuine tRNA-ribosyltran sferase OS=Wolbachia endosymbiont of Laodelphax striate llus OX=368602 GN=tgt PE=3 SV=1
MEKFSFRITKQSGSARVSIIKTPNGNIETPAFIFCATKAAIKAADIERIREAGTQIILSNTYHLMLQPGEDTVAKLGGLHKMMGWNGPMLTDSGGYQIFSLGHGSVSEEIKGIRQKQKTLIKINEDGAIFRSYINGKTYCLTPEKSIQIQQKLGADLILVLDECTPFHVSKEYTRKSMLMSHRWAERSLNEFEKNNNGKQALYGISQGGIYQDLRRESCDFINDLPFFGQAIGGSLGQSKEQMYDVVSFTMQHLKKDRPTHLLGIGGIVDIFRAVEFGVDTFDCVHPTRLARHGGALVKVKNRDSISSKCKEHINLRNQRFELDDNPIESDCLCFTCRKHSRAYIHHLLKAKELLAYTLVTIHNVFFMNKLMVSIREAILNDRLDQEKNNWISEIPLHCELYT

SEQ ID NO: 62327 - protein, 403 aa, Wolbachia endosymbiont
  misc_feature (1)..(403): tr|A0A3B0JN17|A0A3B0JN17_9RICK Queuine tRNA-ribosyltran sferase OS=Wolbachia endosymbiont of Aleurodicus flocci ssimus OX=2152762 GN=tgt PE=3 SV=1
MEKFSFRITKQSGSARVGTIKTPNGNIETPAFIFCATKAAIKAADIERIREAGTQIILSNTYHLMLQPGEDTVAKLGGLHKMMGWNGPMLTDSGGYQIFSLGHGSVSEEIKGIRQKQKTLIKINEDGAIFRSYINGKTYCLTPERSIQIQQKLGADLILVLDECTPFHVSKEYTRKSMLMSHRWAERSLNEFEKNNDGKQALYGISQGGVYQYLRGESCDFINNLPFFGQAIGGSLGQSKEQMYDVVSFTMERLKKERPTHLLGIGGIVDIFRAVELGVDTFDCVHPTRLARHGGALVKVKNRDSISSKCKEHINLRNQRFELDNNPIENDCLCFTCRKHSRAYIHHLLKAKELLAYTLVTIHNVFFMNELMESIRQAILNDRLDQEKNNWVSEVPLHCELYT

SEQ ID NO: 62328 - protein, 403 aa, Wolbachia pipientis
  misc_feature (1)..(403): tr|A0A518LRY0|A0A518LRY0_WOLPI Queuine tRNA-ribosyltran sferase OS=Wolbachia pipientis OX=955 GN=tgt PE=3 SV=1
MEKFSFRITKQSGSARVGIIKTPNGNIETPAFIFCATKAAIKASDIERIREAGTQIILSNTYHLMLQPGEDTVAKLGGLHKMMGWNGPMLTDSGGYQIFSLGHGSVSEEIKGIRQKQKTLIKINEDGAIFRSYINGKTYCLTPEKSIQIQQKLGADLILVLDECTPFHVSKEYTRKSMLMSHRWAERSLNEFEKNNDGKQALYGISQGGVYQDLRGESCNFINNLPFFGQAIGGSLGQSKEQMYDVVSFTMEHLKKDRPTHLLGIGGIVDIFRGVELGVDTFDCVHPTRLARHGGALVKVKNRDSISSKCKEHINLRNQRFELDDNPIENDCLCFTCRKHSRAYIHHLLKAKELLAYTLVTIHNVFFMNKLMESIRQAILNDRLDQEKNNWISEIPLHCELYT

SEQ ID NO: 62329 - protein, 404 aa, Wolbachia pipientis
  misc_feature (1)..(404): tr|A0A1V2N5B8|A0A1V2N5B8_WOLPI Queuine tRNA-ribosyltran sferase OS=Wolbachia pipientis wVitA OX=1379786 GN=tgt PE=3 SV=1
MKEEFSFKRIKQSGSARVGTIKTPNGSVETPAFIFCATKAAIKAADIERISEAGTQIILSNTHHLMLQPGENTVAKLGGLRKMIGWNGPMLTDSGGYQIFSLGHGSVSEEIKGIRKKQKTLIKINEDGAIFRSYINGKIYCLTPEKSVQIQQKLGADLILVLDECTPFHVSKEYTAKSMLMSHRWAERSLNEFEKNNNGKQALYGISQGGVYQDLRRESCDFINDLPFFGQAIGGSLGQSKEQMHDVVSFTMDHLKKDRPTHLLGIGGIVDIFRGVELGIDTFDCVHPTRLARHGGALVKVKNRNSISSKCKEHINLRNQRFELDNNPIESDCLCFTCRKHSRAYIHHLLKAKELLAYTLVTIHNIFFMNKLMASIRQAILDDRLDREKNNWISETPLHCELYT

SEQ ID NO: 62330 - protein, 405 aa, Wolbachia sp.
  misc_feature (1)..(405): tr|C0R3J8|C0R3J8_WOLWR Queuine tRNA-ribosyltransferase OS=Wolbachia sp. subsp. Drosophila simulans (strain wRi ) OX=66084 GN=tgt PE=3 SV=1
MKEEFAFKIIKQSGSARVGIIKTPNGNIETPAFIFCATKAAIKAADIERIREEGTQIILSNTYHLMLQPGENTVAKLGGLHKMMGWNGPMLTDSGGYQIFSLGHGSVSEEIKGIRKKQKTLIKINEDGAIFRSYINGKTYCLTPEKSIQIQQKLGADLILVLDECTPFHVSKEYTAKSMLMSHRWAERSLNEFEKNNNGKQALYGISQGGIYHDLRRESCDFINNLPFFGQAIGGSLGQSKEQMYDVVSFTMDHLKKDRPTHLLGIGGIVDIFHGVSLGIDTFDCVHPTRLARHGGALIKVKNRDSISSKCKEHINLRNQQFELDDNPIESDCLCFTCRKHSRAYIHHLLKAKELLAYTLVTIHNIFFMNKLMASIRQAILDDRLDQEKNNWISEIPLHFDLASL

SEQ ID NO: 62331 - protein, 410 aa, Wolbachia sp.
  misc_feature (1)..(410): tr|A0A3D1L396|A0A3D1L396_WOLSP Queuine tRNA-ribosyltran sferase OS=Wolbachia sp. OX=956 GN=tgt PE=3 SV=1
MSSTHKIANGSLSQPIYDEKCFAFSVHKQSGSARVGTIKTPHGDIETPAFIFCATKAAIKAADIERINEAGTQIILSNTYHLMLQPGEDTVAKLGGLHKMMGWNKPMLTDSGGYQIFSLGHGSVSDEIKGIRSKQKTLIKINEDGAIFRSYINGKIYCLTPEKSIQIQQKLGADLIVVLDECTPFHVSKEYTEKSMLMSHKWAERCLTELEKSNCSKQALYGISQGGIYQDLRRESCDFINSLPFFGQAIGGSLGQSKQQMYDVVSFTIEHLKKDRPTHLLGIGGIVDIFHGVNLGIDTFDCVHPTRLARHGGALVKIKNRNSLSSQCKEHINLRNQQFELDENPIESDCSCFTCQRYSRAYIHHLLKARELLAYTLVTIHNVFFMNKLMEAIRQAILEGRLDQERNNWI

SEQ ID NO: 62332 - protein, 377 aa, Wolinella succinogenes; identical to SEQ ID NO: 56025
  misc_feature (1)..(377): sp|Q7M8N8|TGT_WOLSU Queuine tRNA-ribosyltransferase OS= Wolinella succinogenes (strain ATCC 29543 / DSM 1740 / LMG 7466 / NCTC 11488 / FDC 602W) OX=273121 GN=tgt PE=3 SV=1

SEQ ID NO: 62333 - protein, 384 aa, Xanthobacter autotrophicus
  misc_feature (1)..(384): tr|A7IN98|A7IN98_XANP2 Queuine tRNA-ribosyltransferase OS=Xanthobacter autotrophicus (strain ATCC BAA-1158 / P y2) OX=78245 GN=tgt PE=3 SV=1
MTAHTPVDTFSFTLSATDGAARTGFVSTPRGAIRTPAFMPVGTAATVKGLYFDQVKQTGADIVLANTYHLMLRPGAERIAKLGGLHSFMRWDGPILTDSGGFQVMSLSSLRKMSEQGVTFRSHVDGAYFEMSPERSVEIQGLLGADIQMQLDECVRLPCTDEEAARAMRLSLRWAERSKRAFEAQPKGRALFGIVQGGAVPALRVESARALADMDFPGYSIGGLAVGEPQEVMLAMIETVEPHLPVNKPRYLMGVGTPDDLLESVARGIDMFDCVMPTRSGRHALAFTRFGRINLKNARHADDPRPLDEESDCPALRDYSRAYLHHLVRCEEMLGSMLLTWANVHYYEQLMAGARAAIAEGRYADYMAQVKDGWARGDIPVWAG

SEQ ID NO: 62334 - protein, 383 aa, Xanthobacter tagetidis
  misc_feature (1)..(383): tr|A0A3L7A0N4|A0A3L7A0N4_9RHIZ Queuine tRNA-ribosyltran sferase OS=Xanthobacter tagetidis OX=60216 GN=tgt PE=3 SV=1
MTAALTSDTFSFTLSATSGAARTGLVATPRGTIRTPAFMPVGTVATVKGLYFDQVKQAGADIVLANTYHLMLRPGAERVAKLGGLHRFMGWDGPILTDSGGFQVMSLSSLRKMSEQGVTFRSHVDGTLHEMSPERSIEIQGLLGADIQMQLDECVRLPCEDAEAERAMRLSLRWAERSKRAFEAQPKGRALFGIVQGGAVPALRVESARALAEMDFPGYSIGGLAVGEPQEVMLAMIETVAPHLPADKPRYLMGVGTPDDLLQAVARGIDMFDCVMPTRSGRHALAFTRFGRINLKNARHAEDPRPLDEASDCPALRDYSRAYLHHLVRCEEMLGAMLISWANIHYYQQLMAGARAAIAAGRYADYVAETKGGWARGDIPPVG

SEQ ID NO: 62335 - protein, 378 aa, Xanthobacteraceae bacterium
  misc_feature (1)..(378): tr|A0A521W173|A0A521W173_9RHIZ Queuine tRNA-ribosyltran sferase OS=Xanthobacteraceae bacterium OX=2021379 GN=tg t PE=3 SV=1
MSLPNHFRLQATDGAARAGALTTPHGVVRTPAFMPVGTLGAMKGVHWREVRDAGADIVLANTYHLMLRPGAERIAALGGLQKFTTWPGPILTDSGGFQVMSLAQLRKVTEEGVAFRSHIDGASVDLSPERAIEVQRLLGSDIAMQLDECVRLPAGRDEIARAMELSLRWAARSRRAFEIATPGAMLFGIVQGGDVPDLRHHSAAGLIDIGFHGYAIGGLAVGEPQAVMLAMLEETAPLLPTERPRYLMGVGTPEDILEAVGRGIDMFDCVLPTRNGRHGLAFTRRGPVNLRNARHAEDPRPLDDESPWPATRTYARAYLHHLVKANETLGAMLLSEINIAYYQSLMAGIRAAIAAGTFTSFRDAARENWARGDIAPRA

SEQ ID NO: 62336 - protein, 376 aa, Xanthomarina gelatinilytica
  misc_feature (1)..(376): tr|M7MFX5|M7MFX5_9FLAO Queuine tRNA-ribosyltransferase OS=Xanthomarina gelatinilytica OX=1137281 GN=tgt PE=3 S V=1
MIFELKGKDTQSKARAGEITTDHGKIETPIFMPVGTVASVKGVHQRELKNDINPDIILGNTYHLYLRPQTKILEKAGGLHKFMNWDRNILTDSGGYQVYSLSANRKIKEEGVKFKSHIDGSYHTFTPENVMEIQRSIGADIIMAFDECTPYPCDYHYAKRSMHMTHRWLDRCMTHLEKTPFKYGYSQTFFPIVQGSTYKDLRMQSAEYIANAGAEGNAIGGLSVGEPAEEMYAMTEVVTTILPEDKPRYLMGVGTPINILENIALGVDMFDCVMPTRNARNGMLFTAHGTINIKNKKWEADFSPVDELGITFVDTDYTKAYLRHLFSVNERLGAQIATIHNLGFYMWLVREARKHILAGDFRTWKDMMVKQMDKRL

SEQ ID NO: 62337 - protein, 376 aa, Xanthomarina sp.; identical to SEQ ID NO: 62336
  misc_feature (1)..(376): tr|A0A2D8CVZ1|A0A2D8CVZ1_9FLAO Queuine tRNA-ribosyltran sferase OS=Xanthomarina sp. OX=1931211 GN=tgt PE=3 SV=1

SEQ ID NO: 62338 - protein, 377 aa, Xanthomonadaceae bacterium
  misc_feature (1)..(377): tr|A0A2M9EA67|A0A2M9EA67_9GAMM Queuine tRNA-ribosyltran sferase OS=Xanthomonadaceae bacterium NML91-0213 OX=203 2582 GN=tgt PE=3 SV=1
MSRLRFDLLTRDGAARRGRLAFPRGTVETPAFMPVGTYGTVKGMLPDQVRALGAEIILGNTFHLYLRPGLEVIEAHGGLHGFARWDGPILTDSGGFQVFSLAHKRRITEAGVTFAAPTDGSKVFLGPEESMHIQKVLGSDIVMIFDECPPVHVDGKPVDRAVVDRSMELSLRWAERSKRAHEGNDAALFGIVQGGVHHDLRSRSAEGLKAIGFDGYAIGGLAVGETEAERNAMLDHTAPQLPEDRPRYLMGVGRPEDLVEAVARGVDMFDCVMPTRNARNGHYFTSTGAVRIRNAKYERDLRPIEEGCGCAACAGGYSRAYLRHLDRCNEMLGPILGTLHNLWHYQQLMAGMRAAIEAGTFGAFRESFYARRAAGSG

SEQ ID NO: 62339 - protein, 375 aa, Xanthomonadaceae bacterium
  misc_feature (1)..(375): tr|A0A1E4LB16|A0A1E4LB16_9GAMM Queuine tRNA-ribosyltran sferase OS=Xanthomonadaceae bacterium SCN 69-48 OX=1660 171 GN=tgt PE=3 SV=1
MSRMTFQLLGTDGTARRGRITFPRGVIETPAFMPVGTYGSVKGVLPQQVRDLGAQIILGNTFHLFLRPGLEVIEAHGGLHGFARWDGPILTDSGGFQVFSLAHRRKITEAGVTFAAPTDGRKVFLGPEESMHIQKVLGSDIVMIFDECPPVNDKHGQPVHRRVVEKSMELSLRWAERSKKAHEGNDAALFGIVQGGVHHDLRTLSAEGLQQIGFDGYAVGGLAVGESEDERNAMLDHTCPQLPQDRPRYLMGVGRPEDLVEAVARGIDMFDCVMPTRNARNGHFFTSTGVVRVRNSQYEHDLRPIEEGCDCVACAGGFSRSYLRHLDRCNEMLGPVLGTLHNLRYYQRLMAQMREAIAAGTFADFRESFYAARRG

SEQ ID NO: 62340 - protein, 373 aa, Xanthomonadales bacterium
  misc_feature (1)..(373): tr|A0A1Q4FR80|A0A1Q4FR80_9GAMM Queuine tRNA-ribosyltran sferase OS=Xanthomonadales bacterium 63-13 OX=1895867 G N=tgt PE=3 SV=1
MKFDLLATDSTARRGRLTFQRGTIETPAFMPVGTYGTVKAMTPRDVEETGAEIILGNTFHLFLRPGLDVIGDFSGLHRFIGWHKPILTDSGGFQVFSLAHKRKITEEGVTFASPVDGAKVFLSPEESMRIQQVLDSDIAMIFDECTPYPATEQVARESMELSLRWAARSRRAFDEHGNPNSLFGIVQGSVYPDLRKRSAHGLVEIGFDGYAIGGLAVGEPEEERNATLESIEAHLPADKPRYLMGVGRPEDIVEAVRRGVDMFDCVMPTRNARNGFLFTRHGTLRIRNAKFACDTRVIEEGCACYACRSGFSRAYLRHLDRCGEILASQLATIHNLHHYQELMRGLRAAIEASRLDAFVAGFYALRASEGEAI

SEQ ID NO: 62341 - protein, 380 aa, Xanthomonadales bacterium
  misc_feature (1)..(380): tr|A0A3N5L9G6|A0A3N5L9G6_9GAMM Queuine tRNA-ribosyltran sferase OS=Xanthomonadales bacterium OX=2006849 GN=tgt PE=3 SV=1
MRFELLAGDGLARRGRLHLRRGTVETPVFMPVGTYGTVKAMTPEELTGLGAEIVLGNTFHLMLRPGSDVVRAHGGLHGFMHWPGPILTDSGGFQVFSLAELRKLSEQGVHFRSPVNGDPVFLSPEVSMSVQTDLDSDVVMVFDECPPYPATEAEARRSMELSMRWARRSQAAFRELANPNALFGIVQGGTHLALRLESLETLAGIGFDGYAVGGLAVGEPAAERNAVLEALAPRMPAGQPRYLMGVGTPADIVQAVARGVDMFDCVMPTRNARNGHLFTSGGVVKIRNAAHQRDTRPLDPACDCYTCRNYTRAYLRHLDRCNEILGARLHTIHNLHYYIGLMRRIRMAVEQGDYARFAAAFLAGPEGGAGSSGTASAPRV

SEQ ID NO: 62342 - protein, 392 aa, Xanthomonas albilineans
  misc_feature (1)..(392): tr|D2UE22|D2UE22_XANAP Queuine tRNA-ribosyltransferase OS=Xanthomonas albilineans (strain GPE PC73 / CFBP 7063 ) OX=380358 GN=tgt PE=3 SV=1
MSFSISDFSPFSAMSRLQFQLHTTDGAARRGRLTFPRGAVETPAFMPVGTYGSVKGVLPEQIKALGAQIILGNTFHLYLRPGLEVIGDHGGLHGFARWDGPILTDSGGFQVFSLAHRRKISEQGVTFAAPTDGAKVFLGPEESMQIQKVLDADIVMIFDECTPYPATEEVARRSMELSLRWARRSRNAHDALGNDAALFGIVQGGVHADLRSRSIEGLRTIGFDGYAIGGLAVGEPEHERNAMLEHLHPQLPADRPRYLMGVGRPEDLVEGVARGVDMFDCVMPTRNARNGHYFTSFGTVRIRNAKYERDLDPIEPGCGCYACSSGYTRAYLRHLDRCNEMLAPMLGTLHNLWYYQNLMAQMRAAIAAGTFAQFRRSFYAARGVEATLLPSE

SEQ ID NO: 62343 - protein, 381 aa, Xanthomonas alfalfae
  misc_feature (1)..(381): tr|A0A1S1XFP6|A0A1S1XFP6_9XANT Queuine tRNA-ribosyltran sferase OS=Xanthomonas alfalfae OX=366650 GN=tgt PE=3 S V=1
MSRLQFQLQATDGHARRGRLTFPRGTVETPAFMPVGTYGSVKGILPEQIRALGAEIILGNTFHLYLRPGLEVIGDHGGLHGFARWDGPILTDSGGFQVFSLAHRRKITEQGVTFSSPTDGARVFLGPEESMKIQKVLDSDIVMIFDECTPYPATEDVARRSMELSLRWAQRSRDAHDGLGNDAALFGIVQGGVHPDLRSRSLDGLQGIGFDGYAIGGLAVGEPEHERNAMLEHLHPRLPAERPRYLMGVGRPEDLVEGVARGVDMFDCVMPTRNARNGHYFTSFGTVRIRNAKYERDLDTIEPGCGCHACSSGYTRAYLRHLDRCNEMLAPMLGTLHNLWYYEKLMADMRAAIASGTFVEFRRSFYAARGAITPPLPGETS

SEQ ID NO: 62344 - protein, 381 aa, Xanthomonas arboricola
  misc_feature (1)..(381): tr|A0A2N9DA93|A0A2N9DA93_9XANT Queuine tRNA-ribosyltran sferase OS=Xanthomonas arboricola pv. fragariae OX=4878 22 GN=tgt PE=3 SV=1
MSRLQFQLQATDGHARRGRLTFPRGTVETPAFMPVGTYGSVKGILPEQIRALGAEIILGNTFHLYLRPGLDVIGDHGGLHGFARWDGPILTDSGGFQVFSLAHRRKITEQGVTFASPTDGARVFLGPEESMQIQKVLDSDIVMIFDECTPYPATEEVARRSMELSLRWAQRSRQAHDGLGNDAALFGIVQGGVHPDLRSRSLDGLQGIGFDGYAIGGLAVGEPEHERNAMLEHLHPRLPAERPRYLMGVGRPEDLVEGVARGVDMFDCVMPTRNARNGHYFTSFGTVRIRNAKYERDLDTIEPGCGCHACSSGYTRSYLRHLDRCNEMLAPMLGTLHNLWYYEKLMADLRAAIASGTFAEFRRSFYAARGAITPPLPGETS

SEQ ID NO: 62345 - protein, 381 aa, Xanthomonas arboricola
  misc_feature (1)..(381): tr|A0A0E3YM67|A0A0E3YM67_9XANT Queuine tRNA-ribosyltran sferase OS=Xanthomonas arboricola OX=56448 GN=tgt PE=3 SV=1
MSRLQFQLQATDGHARRGRLTFPRGTVETPAFMPVGTYGSVKGILPEQIRALGAEIILGNTFHLYLRPGLDVIGDHGGLHGFARWDGPILTDSGGFQVFSLAHRRKITEQGVTFASPTDGARVFLGPEESMQIQKVLDSDIVMIFDECTPYPATEEVARRSMELSLRWAQRSRQAHDGLGNDAALFGIVQGGVHPDLRSRSLDGLQCIGFDGYAIGGLAVGEPEHERNAMLEHLHPRLPADRPRYLMGVGRPEDLVEGVARGVDMFDCVMPTRNARNGHYFTSFGTVRIRNAKYERDLDTIEPGCGCHACSSGYTRSYLRHLDRCNEMLAPMLGTLHNLWYYEKLMADLRAAIASGTFAEFRRSFYAARGAITPPLPGETS

SEQ ID NO: 62346 - protein, 381 aa, Xanthomonas axonopodis
  misc_feature (1)..(381): tr|A0A2S6XZ26|A0A2S6XZ26_9XANT Queuine tRNA-ribosyltran sferase OS=Xanthomonas axonopodis pv. begoniae OX=47340 3 GN=tgt PE=3 SV=1
MSRLQFQLQATDGHARRGRLTFPRGTVQTPAFMPVGTYGSVKGILPEQIHALGAEIILGNTFHLYLRPGLEVIGDHGGLHGFARWDGPILTDSGGFQVFSLAHRRKITEQGVTFSSPTDGARVFLGPEESMQIQKVLDSDIVMIFDECTPYPATEEVARRSMELSLRWAQRSRDAHDGLGNDAALFGIVQGGVHPDLRSRSLDGLQGIGFDGYAIGGLAVGEPEHERNAMLEHLHPRLPAERPRYLMGVGRPEDLVEGVARGVDMFDCVMPTRNARNGHYFTSFGTVRIRNAKYERDLDTIEPGCGCHACSSGYTRAYLRHLDRCNEMLAPMLGTLHNLWYYEKLMADMRAAIAAGTFVEFRRSFYAARGATTPPLPGEAS

SEQ ID NO: 62347 - protein, 381 aa, Xanthomonas axonopodis
  misc_feature (1)..(381): sp|Q8PJL7|TGT_XANAC Queuine tRNA-ribosyltransferase OS= Xanthomonas axonopodis pv. citri (strain 306) OX=190486 GN=tgt PE=3 SV=1
MSRLQFQLQATDGHARRGRLTFPRGTVETPAFMPVGTYGSVKGILPEQIRALGAEIILGNTFHLYLRPGLEVIGDHGGLHGFARWDGPILTDSGGFQVFSLAHRRKITEQGVTFSSPTDGARVFLGPEESMKIQKVLDSDIVMIFDECTPYPATEDVARRSMELSLRWAQRSRDAHDGLGNDAALFGIVQGGVHPDLRSRSLDGLQAIGFDGYAIGGLAVGEPEHERNAMLEHLHPRLPAERPRYLMGVGRPEDLVEGVARGVDMFDCVMPTRNARNGHYFTSFGTVRIRNAKYERDLDTIEPGCGCHACSSGYTRAYLRHLDRCNEMLAPMLGTLHNLWYYEKLMADMRAAIASGTFVEFRRSFYAARGATTPPLPGETS

SEQ ID NO: 62348 - protein, 381 aa, Xanthomonas bromi
  misc_feature (1)..(381): tr|A0A1C3NR63|A0A1C3NR63_9XANT Queuine tRNA-ribosyltran sferase OS=Xanthomonas bromi OX=56449 GN=tgt PE=3 SV=1
MSRLQFQLQATDGHARRGRLTFPRGTVETPAFMPVGTYGSVKGILPEQIRALGAEIILGNTFHLYLRPGLEVIGDHGGLHGFARWDGPILTDSGGFQVFSLAHRRKITEQGVTFSSPTDGARVFLGPEESMKIQKVLDSDIVMIFDECTPYPATEEVARRSMELSLRWAQRSRDAHDGLDNDAALFGIVQGGVHPDLRSRSLEGLQGIGFDGYAIGGLAVGEPEHERNAMLEHLHPRLPAERPRYLMGVGRPEDLVEGVARGVDMFDCVMPTRNARNGHYFTSFGTVRIRNAKYERDLDTIEPGCGCHACSSGYTRSYLRHLDRCNEMLAPMLGTLHNLWYYEKLMADMRAAIASGTFVQFRRSFYAARGATTPPLPGETS

SEQ ID NO: 62349 - protein, 381 aa, Xanthomonas campestris
  misc_feature (1)..(381): sp|Q8P868|TGT_XANCP Queuine tRNA-ribosyltransferase OS= Xanthomonas campestris pv. campestris (strain ATCC 3391 3 / DSM 3586 / NCPPB 528 / LMG 568 / P 25) OX=190485 GN =tgt PE=3 SV=1
MSRLQFQLQTTDGHARRGRLTFPRGTVETPAFMPVGTYGSVKGILPEQIRALGAEIILGNTFHLYLRPGLDVIGDHGGLHGFARWDGPILTDSGGFQVFSLAHRRKITEQGVTFSSPNDGARVFLGPEESMQIQKVLDSDIVMIFDECTPYPATEDVARRSMELSLRWAQRSRQAHDGLGNDAALFGIVQGGVHPDLRSRSLDGLQAIGFDGYAIGGLAVGEPEHERNAMLEHLHPRLPAERPRYLMGVGRPEDLVEGVARGVDMFDCVMPTRNARNGHYFTSFGTVRIRNAKYERDLDTIEPGCGCHACSSGYTRAYLRHLDRCNEMLAPMLGTLHNLWYYEKLMADMRAAIAAGTFVEFRRSFYAARGATTPPLPGESS

SEQ ID NO: 62350 - protein, 381 aa, Xanthomonas campestris
  misc_feature (1)..(381): sp|B0RRR1|TGT_XANCB Queuine tRNA-ribosyltransferase OS= Xanthomonas campestris pv. campestris (strain B100) OX= 509169 GN=tgt PE=3 SV=1
MSRLQFQLQTTDGHARRGRLTFPRGTVETPAFMPVGTYGSVKGILPEQIRALGAEIILGNTFHLYLRPGLDVIGDHGGLHGFARWDGPILTDSGGFQVFSLAHRRKITEQGVTFSSPTDGARVFLGPEESMQIQKVLDSDIVMIFDECTPYPATEDVARRSMELSLRWAQRSRQAHDGLGNDAALFGIVQGGVHPDLRSRSLDGLQAIGFDGYAIGGLAVGEPEHERNAMLEHLHPRLPAERPRYLMGVGRPEDLVEGVARGVDMFDCVMPTRNARNGHYFTSFGTVRIRNAKYERDLDTIEPGCGCHACSSGYTRAYLRHLDRCNEMLAPMLGTLHNLWYYEKLMADMRAAIAAGTFVEFRRSFYAARGATTPPLPGESS

SEQ ID NO: 62351 - protein, 381 aa, Xanthomonas cannabis
  misc_feature (1)..(381): tr|A0A0B2CFK0|A0A0B2CFK0_9XANT Queuine tRNA-ribosyltran sferase OS=Xanthomonas cannabis pv. cannabis OX=1885894 GN=tgt PE=3 SV=1
MSRLQFQLQTTDGHARRGRLTFPRGTVETPAFMPVGTYGSVKGILPEQIRALGAEIILGNTFHLYLRPGLEVIGDHGGLHGFARWDGPILTDSGGFQVFSLAHRRKITEQGVTFSSPTDGARVFLGPEESMKIQKVLDSDIVMIFDECTPYPATEEVARRSMELSLRWAQRSREAHDGLSNDAALFGIVQGGVHPDLRSRSLDGLHAIGFDGYAIGGLAVGEPEHERNAMLEHLHPQLPADRPRYLMGVGRPEDLVEGVARGVDMFDCVMPTRNARNGHYFTSFGTVRIRNAKYERDLDTIEPGCGCHACSSGYTRAYLRHLDRCNEMLAPMLGTLHNLWYYEKLMADMRAAIASGTFVQFRRSFYAARGATTPPLPGETS

SEQ ID NO: 62352 - protein, 381 aa, Xanthomonas citri
  misc_feature (1)..(381): tr|A0A2R2WLM9|A0A2R2WLM9_XANCI Queuine tRNA-ribosyltran sferase OS=Xanthomonas citri pv. aurantifolii OX=76802 GN=tgt PE=3 SV=1
MSRLQFQLQATDGHARRGRLTFPRGTVETPAFMPVGTYGSVKGILPEQIRALGAEIILGNTFHLYLRPGLEVIGDHGGLHGFARWDGPILTDSGGFQVFSLAHRRKITEQGVTFSSPTDGARVFLGPEESMKIQKVLDSDIVMIFDECTPYPATEDVARRSMELSLRWAQRSRDAHDGLGNDAALFGIVQGGVHPDLRSRSLDGLQAIGFDGYAIGGLAVGEPEHERNAMLEHLHPRLPAERPRYLMGVGRPEDLVEGVARGVDMFDCVMPTRNARNGHYFTSFGTVRIRNAKYERDLDTIEPGCGCHACSSGYTRAYLRHLDRCNEMLAPMLGTLHNLWYYEKLMADMRAAIAAGTFVEFRRSFYAARGATTPPLPGETS

SEQ ID NO: 62353 - protein, 381 aa, Xanthomonas citri
  misc_feature (1)..(381): tr|A0A220WGC2|A0A220WGC2_XANCI Queuine tRNA-ribosyltran sferase OS=Xanthomonas citri pv. vignicola OX=473426 GN =tgt PE=3 SV=1
MSRLQFQLQATDGHARRGRLTFPRGTVETPAFMPVGTYGSVKGILPEQIRALGAEIILGNTFHLYLRPGLEVIGDHGGLHGFARWDGPILTDSGGFQVFSLAHRRKITEQGVTFSSPTDGARVFLGPEESMKIQEVLDSDIVMIFDECTPYPATEDVARRSMELSLRWAQRSRDAHDGLGNDAALFGIVQGGVHPDLRSRSLDGLQAIGFDGYAIGGLAVGEPEHERNAMLEHLHPRLPAERPRYLMGVGRPEDLVEGVARGVDMFDCVMPTRNARNGHYFTSFGTVRIRNAKYERDLDTIEPGCGCHACSSGYTRAYLRHLDRCNEMLAPMLGTLHNLWYYEKLMADMRAAIAAGTFVEFRRSFYAARGATTPPLPGETS

SEQ ID NO: 62354 - protein, 398 aa, Xanthomonas codiaei
  misc_feature (1)..(398): tr|A0A2S7C882|A0A2S7C882_9XANT Queuine tRNA-ribosyltran sferase OS=Xanthomonas codiaei OX=56463 GN=tgt PE=3 SV= 1
MSRLQFQLQTTDGHARRGRLTFPRGTVETPAFMPVGTYGSVKGILPEQIRALGAEIILGNTFHLYLRPGLDVIGDHGGLHGFARWDGPILTDSGGFQVFSLAHRRKITEQGVTFSSPTDGARVFLGPEESMQIQKVLDSDIVMIFDECTPYPATEEVARRSMELSLRWAQRSRDAHDGLGNDAALFGIVQGGVHPDLRSRSLEGLQGIGFDGYAIGGLAVGEPEHERNAMLEHLHPRLPAERPRYLMGVGRPEDLVEGVARGVDMFDCVMPTRNARNGHYFTSFGTVRIRNAKYERDLDTIEPGCGCHACSSGYTRSYLRHLDRCNEMLAPMLGTLHNLWYYEKLMADMRAAIAAGTFVQFRRSFYAARGATTPPLPGKPAEPCRPCPRRGRGGTRMA

SEQ ID NO: 62355 - protein, 381 aa, Xanthomonas cucurbitae
  misc_feature (1)..(381): tr|A0A2S7DU00|A0A2S7DU00_9XANT Queuine tRNA-ribosyltran sferase OS=Xanthomonas cucurbitae OX=56453 GN=tgt PE=3 SV=1
MSRLQFQLQTTDGHARRGRLTFPRGTVETPAFMPVGTYGSVKGILPEQIRALGAEIILGNTFHLYLRPGLEVIGDHGGLHGFARWDGPILTDSGGFQVFSLAHRRKITEQGVTFSSPTDGARVFLGPEESMQIQKVLDSDIVMIFDECTPYPATEEVARRSMELSLRWAQRSRDAHDGLGNDAALFGIVQGGVHPDLRSRSLEGLQGIGFDGYAIGGLAVGEPEHERNAMLEHLHPRLPAERPRYLMGVGRPEDLVEGVARGVDMFDCVMPTRNARNGHYFTSFGTVRIRNAKYERDLDTIEPGCGCHACSSGYTRAYLRHLDRCNEMLAPMLGTLHNLWYYEKLMADMREAIAAGTFVQFRRSFYAARGATTPPLPGETS

SEQ ID NO: 62356 - protein, 381 aa, Xanthomonas cynarae
  misc_feature (1)..(381): tr|A0A2S7ATE4|A0A2S7ATE4_9XANT Queuine tRNA-ribosyltran sferase OS=Xanthomonas cynarae OX=109214 GN=tgt PE=3 SV =1
MSRLQFQLQATDGHARRGRLTFPRGTVETPAFMPVGTYGSVKGILPEQIRALGAEIILGNTFHLYLRPGLDVIGDHGGLHGFARWDGPILTDSGGFQVFSLAHRRKITEQGVTFSSPTDGARVFLGPEESMQIQKVLDSDIVMIFDECTPYPATEEVARRSMELSLRWAQRSRDAHDGLGNDAALFGIVQGGVHPDLRSRSLDGLQAIGFDGYAIGGLAVGEPEHERNAMLEHLHPRLPAERPRYLMGVGRPEDLVEGVARGVDMFDCVMPTRNARNGHYFTSFGTVRIRNAKYERDLDTIEPGCGCHACSSGYTRSYLRHLDRCNEMLAPMLGTLHNLWYYEKLMADLRAAIASGTFVEFRRSFYAARGAITPPLPGETS

SEQ ID NO: 62357 - protein, 381 aa, Xanthomonas dyei
  misc_feature (1)..(381): tr|A0A2S7BZR3|A0A2S7BZR3_9XANT Queuine tRNA-ribosyltran sferase OS=Xanthomonas dyei OX=743699 GN=tgt PE=3 SV=1
MSRLQFQLQTTDGHARRGRLTFPRGTVETPAFMPVGTYGSVKGILPEQIRALGAEIILGNTFHLYLRPGLDVIGDHGGLHGFARWDGPILTDSGGFQVFSLAHRRKITEQGVTFSSPTDGARVFLGPEESMQIQKVLDSDIVMIFDECTPYPATEEVARRSMELSLRWAQRSRDAHDGLGNDAALFGIVQGGVHPDLRSRSLEGLHAIGFDGYAIGGLAVGEPEHERNAMLEHLHPQLPADRPRYLMGVGRPEDLVEGVARGVDMFDCVMPTRNARNGHYFTSFGTVRIRNAKYERDLDTIEPGCGCHACSSGYTRAYLRHLDRCNEMLAPMLGTMHNLWYYEKLMADMRAAIAAGTFVQFRRSFYAARGATTPPLPGETS

SEQ ID NO: 62358 - protein, 381 aa, Xanthomonas euvesicatoria
  misc_feature (1)..(381): tr|A0A2S7EA76|A0A2S7EA76_XANEU Queuine tRNA-ribosyltran sferase OS=Xanthomonas euvesicatoria pv. citrumelonis O X=189396 GN=tgt PE=3 SV=1
MSRLQFQLQATDGHARRGRLTFPRGTVETPAFMPVGTYGSVKGILPEQIRALGAEIILGNTFHLYLRPGLEVIGDHGGLHGFARWDGPILTDSGGFQVFSLAHRRKITEQGVTFSSPTDGARVFLGPEESMEIQKVLDSDIVMIFDECTPYPATEDVARRSMELSLRWAQRSRDAHDGLGNDAALFGIVQGGVHPDLRSRSLDGLQGIGFDGYAIGGLAVGEPEHERNAMLEHLHPRLPAERPRYLMGVGRPEDLVEGVARGVDMFDCVMPTRNARNGHYFTSFGTVRIRNAKYERDLDTIEPGCGCHACSSGYTRAYLRHLDRCNEMLAPMLGTLHNLWYYEKLMADMRAAIASGTFVEFRRSFYAARGATTPPLPGETS

SEQ ID NO: 62359 - protein, 381 aa, Xanthomonas floridensis
  misc_feature (1)..(381): tr|A0A1A9MBK5|A0A1A9MBK5_9XANT Queuine tRNA-ribosyltran sferase OS=Xanthomonas floridensis OX=1843580 GN=tgt PE =3 SV=1
MSRLQFQLQTTDGHARRGRLTFPRGTVETPAFMPVGTYGSVKGILPEQIRALGAEIILGNTFHLYLRPGLEVIGDHGGLHGFARWDGPILTDSGGFQVFSLAHRRKITEQGVTFSSPTDGARVFLGPEESMQIQKVLDSDIVMIFDECTPYPATEEVARRSMELSLRWAQRSRDAHDGLGNDAALFGIVQGGVHPDLRTRSLEGLRAIGFDGYAIGGLAVGEPEHERNAMLEHLHPRLPADRPRYLMGVGRPEDLIEGVARGVDMFDCVMPTRNARNGHYFTSFGTVRIRNAKYERDLDTIEPGCGCHACSSGYTRSYLRHLDRCNEMLAPMLGTLHNLWYYEKLMADMRAAIAAGTFVQFRRSFYAARGATTPPLPGETS

SEQ ID NO: 62360 - protein, 381 aa, Xanthomonas fragariae
  misc_feature (1)..(381): tr|A0A1Y6HL40|A0A1Y6HL40_9XANT Queuine tRNA-ribosyltran sferase OS=Xanthomonas fragariae OX=48664 GN=tgt PE=3 S V=1
MSRLQFQLQTTEGNARRGRLTFPRGTVETPAFMPVGTYGSVKGILPEQIRALGAEIILGNTFHLYLRPGLEVIGDHGGLHGFARWDGPILTDSGGFQVFSLAHRRKITDQGVTFSSPTDGARVFLGPEESMQIQKVLDSDIVMIFDECTPYPATEDVARRSMELSLRWAQRSRDAHDGLGNDAALFGIVQGGVHPDLRSRSLDGLQGIGFDGYAIGGLAVGEPEHERNAMLEHLHPRLPAERPRYLMGVGRPEDLVEGVARGVDMFDCVMPTRNARNGHYFTSFGTVRIRNAKYERDPDTIEPGCGCHACSSGYTRSYLRHLDRCGEMLAPMLGTLHNLWYYEKLMSDMRTAIASGTFVEFRRSFYAARGATTPRLPGESS

SEQ ID NO: 62361 - protein, 381 aa, Xanthomonas gardneri
  misc_feature (1)..(381): tr|F0C169|F0C169_9XANT Queuine tRNA-ribosyltransferase OS=Xanthomonas gardneri ATCC 19865 OX=925777 GN=tgt PE= 3 SV=1
MSRLQFQLQATDGHARRGRLTFPRGTVETPAFMPVGTYGSVKGILPEQIRALGAEIILGNTFHLYLRPGLDVIGDHGGLHGFARWDGPILTDSGGFQVFSLAHRRKITEQGVTFSSPTDGARVFLGPEESMQIQKVLDSDIVMIFDECTPYPATEEVARRSMELSLRWAQRSRDAHDGLGNDAALFGIVQGGVHPDLRSRSLDGLQGIGFDGYAIGGLAVGEPEHERNAMLEHLHPRLPAERPRYLMGVGRPEDLVEGVARGVDMFDCVMPTRNARNGHYFTSFGTVRIRNAKYERDLDTIEPGCGCHACSSGYTRSYLRHLDRCNEMLAPMLGTLHNLWYYEKLMADLRAAIAAGTFVEFRRSFYAARGAITPPLPGETS

SEQ ID NO: 62362 - protein, 381 aa, Xanthomonas gardneri
  misc_feature (1)..(381): tr|A0A1L5Y1X1|A0A1L5Y1X1_9XANT Queuine tRNA-ribosyltran sferase OS=Xanthomonas gardneri OX=90270 GN=tgt PE=3 SV =1
MSRLQFQLQATDGHARRGRLTFPRGTVETPAFMPVGTYGSVKGILPEQIRALGAEIILGNTFHLYLRPGLDVIGDHGGLHGFARWDGPILTDSGGFQVFSLAHRRKITEQGVTFSSPTDGARVFLGPEESMQIQKVLDSDIVMIFDECTPYPATEEVARRSMELSLRWAQRSREAHDGLGNDAALFGIVQGGVHPDLRSRSLDGLQGIGFDGYAIGGLAVGEPEHERNAMLEHLHPRLPAERPRYLMGVGRPEDLVEGVARGVDMFDCVMPTRNARNGHYFTSFGTVRIRNAKYERDLDTIEPGCGCHACSSGYTRSYLRHLDRCNEMLAPMLGTLHNLWYYEKLMADLRAAIASGTFVEFRRSFYAARGAITPPLPGEAS

SEQ ID NO: 62363 - protein, 381 aa, Xanthomonas hortorum
  misc_feature (1)..(381): tr|V7ZCS2|V7ZCS2_9XANT Queuine tRNA-ribosyltransferase OS=Xanthomonas hortorum pv. carotae str. M081 OX=863365 GN=tgt PE=3 SV=1
MSRLQFQLQATDGHARRGRLTFPRGTVETPAFMPVGTYGSVKGILPEQIRALGAEIILGNTFHLYLRPGLDVIGDHGGLHGFARWDGPILTDSGGFQVFSLAHRRKITEQGVTFSSPTDGARVFLGPEESMQIQKVLDSDIVMIFDECTPYPATEEVARRSMELSLRWAQRSRDAHDGLGNDAALFGIVQGGVHPDLRSRSLDGLQGIGFDGYAIGGLAVGEPEHERNAMLEHLHPRLPAERPRYLMGVGRPEDLVEGVARGVDMFDCVMPTRNARNGHYFTSFGTVRIRNAKYERDLDTIEPGCGCHACSSGYTRSYLRHLDRCNEMLAPMLGTLHNLWYYEKLMADLRAAIASGTFVEFRRSFYAARGGATPPLPGETS

SEQ ID NO: 62364 - protein, 381 aa, Xanthomonas hortorum
  misc_feature (1)..(381): tr|A0A2S7E0H5|A0A2S7E0H5_9XANT Queuine tRNA-ribosyltran sferase OS=Xanthomonas hortorum pv. hederae OX=453603 G N=tgt PE=3 SV=1
MSRLQFQLQATDGHARRGRLTFPRGTVETPAFMPVGTYGSVKGVLPEQIRALGAEIILGNTFHLYLRPGLDVIGDHGGLHGFARWDGPILTDSGGFQVFSLAHRRKITEQGVTFSSPTDGARVFLGPEESMQIQKVLDSDIVMIFDECTPYPATEDVARRSMELSLRWAQRSRDAHDGLGNDAALFGIVQGGVHPDLRSRSLDGLQGIGFDGYAIGGLAVGEPEHERNAMLEHLHPRLPAERPRYLMGVGRPEDLVEGVARGVDMFDCVMPTRNARNGHYFTSFGTVRIRNAKYERDLDTIEPGCGCHACSSGYTRSYLRHLDRCNEMLAPMLGTLHNLWYYEKLMADLRAAIASGTFVEFRRSFYAARGAITPPLPGETS

SEQ ID NO: 62365 - protein, 381 aa, Xanthomonas hyacinthi
  misc_feature (1)..(381): tr|A0A2S7F1F7|A0A2S7F1F7_9XANT Queuine tRNA-ribosyltran sferase OS=Xanthomonas hyacinthi OX=56455 GN=tgt PE=3 S V=1
MSRLQFQLDTSDGAARRGRLTFPRGTVETPAFMPVGTYGSVKGVLPEQIRALGAQIILGNTFHLYLRPGLDVIGDHGGLHGFARWDGPILTDSGGFQVFSLAHRRKISEQGVTFASPTDGAKVFLGPEESMRIQKVLDSDIVMIFDECTPYPATEDVARRSMELSLRWAQRSRDAHEALSNDAALFGIVQGGVHADLRTRSIEGLQAIGFDGYAIGGLAVGEPEHERNAMLEHLHPRLPADRPRYLMGVGRPEDLVEGVARGVDMFDCVMPTRNARNGHYFTAFGTVRIRNARYERDLAPIEPGCGCHACSGGYTRSYLRHLDRCNEMLAPMLGTLHNLWYYQKLMADMRAAIAAGTFARFRRSFYAARGAEATAFPSEQG

SEQ ID NO: 62366 - protein, 381 aa, Xanthomonas melonis
  misc_feature (1)..(381): tr|A0A2S7DEF3|A0A2S7DEF3_9XANT Queuine tRNA-ribosyltran sferase OS=Xanthomonas melonis OX=56456 GN=tgt PE=3 SV= 1
MSRLQFQLQTTDGHARRGRLTFPRGTVETPAFMPVGTYGSVKGILPEQIRALGAEIILGNTFHLYLRPGLDVIGDHGGLHGFARWDGPILTDSGGFQVFSLAHRRKITEQGVTFASPTDGARVFLGPEESMQIQKVLDSDIVMIFDECTPYPATEEVARRSMELSLRWAQRSRQAHDGLGNDAALFGIVQGGVHPDLRTRSLEGLRAIGFDGYAIGGLAVGEPEHERNAMLEHLHPRLPADRPRYLMGVGRPEDLVEGVARGVDMFDCVMPTRNARNGHYFTSFGTVRIRNAKYERDLDTIEPGCGCHACSSGYTRSYLRHLDRCNEMLAPMLGTLHNLWYYEKLMADMRAAIASGTFVQFRRSFYAARGATTPPLPGETS

SEQ ID NO: 62367 - protein, 381 aa, Xanthomonas nasturtii
  misc_feature (1)..(381): tr|A0A3E1KIF3|A0A3E1KIF3_9XANT Queuine tRNA-ribosyltran sferase OS=Xanthomonas nasturtii OX=1843581 GN=tgt PE=3 SV=1
MSRLQFQLQATDGHARRGRLTFPRGTVETPAFMPVGTYGSVKGILPEQIRALGAEIILGNTFHLYLRPGLDVIGDHGGLHGFARWDGPILTDSGGFQVFSLAHRRKITEQGVTFSSPTDGARVFLGPEESMQIQKVLDSDIVMIFDECTPYPATEEVARRSMELSLRWAQRSRDAHDGLGNDAALFGIVQGGVHPDLRSRSLDGLRAIGFDGYAIGGLAVGEPEHERNAMLEHLHPRLPAERPRYLMGVGRPEDLVEGVARGVDMFDCVMPTRNARNGHYFTSFGTVRIRNAKYERDLDTIEPGCGCHACCSGYTRSYLRHLDRCNEMLAPMLGTLHNLWYYEKLMSDLRAAIASGTFVEFRRSFYAARGAITPPLPGETS

SEQ ID NO: 62368 - protein, 381 aa, Xanthomonas oryzae
  misc_feature (1)..(381): sp|B2SIN8|TGT_XANOP Queuine tRNA-ribosyltransferase OS= Xanthomonas oryzae pv. oryzae (strain PXO99A) OX=360094 GN=tgt PE=3 SV=1
MSRLQFQLQATDGHARRGRLTFPRGTVETPAFMPVGTYGSVKGILPEHIRALGAEIILGNTFHLYLRPGLDVIGDHGGLHGFARWDGPILTDSGGFQVFSLAHRRKITEQGVTFSSPTDGARVFLGPEESMKIQKVLDSDIVMIFDECTPYPATEDLARRSMELSLRWAQRSRDAHDGLGNDAALFGIVQGGVHPDLRSRSLDGLQSIGFDGYAIGGLAVGEPEHERNAMLEHLHPRLPAECPRYLMGVGRPEDLVEGVARGVDMFDCVMPTRNARNGHYFTSFGTVRIRNAKYERDLDTIEPGCGCHACSSGYTRSYLRHLDRCNEMLAPMLGTLHNLWYYEKLMADMRAAIASGTFVEFRRSFYAARGATTPPLPGETS

SEQ ID NO: 62369 - protein, 381 aa, Xanthomonas oryzae; identical to SEQ ID NO: 62368
  misc_feature (1)..(381): sp|Q5GZY3|TGT_XANOR Queuine tRNA-ribosyltransferase OS= Xanthomonas oryzae pv. oryzae (strain KACC10331 / KXO85 ) OX=291331 GN=tgt PE=3 SV=1

SEQ ID NO: 62370 - protein, 381 aa, Xanthomonas perforans; identical to SEQ ID NO: 62358
  misc_feature (1)..(381): tr|A0A0G9AIL3|A0A0G9AIL3_9XANT Queuine tRNA-ribosyltran sferase OS=Xanthomonas perforans OX=442694 GN=tgt PE=3 SV=1

SEQ ID NO: 62371 - protein, 381 aa, Xanthomonas phaseoli
  misc_feature (1)..(381): tr|A0A1V9HCW1|A0A1V9HCW1_9XANT Queuine tRNA-ribosyltran sferase OS=Xanthomonas phaseoli pv. dieffenbachiae OX=9 2828 GN=tgt PE=3 SV=1
MSRLQFQLQATDGHARRGRLTFPRGTVQTPAFMPVGTYGSVKGILPEQIRALGAEIILGNTFHLYLRPGLEVIGDHGGLHGFARWDGPILTDSGGFQVFSLAHRRKITEQGVTFSSPTDGARVFLGPEESMQIQKVLDSDIVMIFDECTPYPATEEVARRSMELSLRWAQRSRDAHDGLGNDAALFGIVQGGVHPDLRSRSLEGLQGIGFDGYAIGGLAVGEPEHERNAMLEHLHPRLPAERPRYLMGVGRPEDLVEGVARGVDMFDCVMPTRNARNGHYFTSFGTVRIRNAKYERDLDTIEPGCGCHACSSGYTRAYLRHLDRCNEMLAPMLGTLHNLWYYEKLMADMRAAIAAGTFVEFRRSFYAARGATTPPLPGEAS

SEQ ID NO: 62372 - protein, 381 aa, Xanthomonas phaseoli
  misc_feature (1)..(381): tr|A0A1V9HMJ7|A0A1V9HMJ7_9XANT Queuine tRNA-ribosyltran sferase OS=Xanthomonas phaseoli pv. syngonii LMG 9055 O X=1437878 GN=tgt PE=3 SV=1
MSRLQFQLQATDGHARRGRLTFPRGTVQTPAFMPVGTYGSVKGILPEQIRALGAEIILGNTFHLYLHPGLEVIGDHGGLHGFARWDGPILTDSGGFQVFSLAHRRKITEQGVTFSSPTDGARVFLGPEESMQIQKVLDSDIVMIFDECTPYPATEEVAGRSMELSLRWAQRSRDAHDGLGNDAALFGIVQGGVHPDLRSRSLDGLQGIGFDGYAIGGLAVGEPEPERNAMLEHLHPRLPADRPRYLMGVGRPEDLVEGVARGVDMFDCVMPTRNARNGHYFTSFGTVRIRNAKYERDLDTIEPGCGCHACSSGYTRAYLRHLDRCNEMLAPMLGTLHNLWYYEKLMADMRAAIAAGTFVEFRRSFYAARGATTPPLPGEAS

SEQ ID NO: 62373 - protein, 381 aa, Xanthomonas pisi
  misc_feature (1)..(381): tr|A0A2S7CT32|A0A2S7CT32_9XANT Queuine tRNA-ribosyltran sferase OS=Xanthomonas pisi OX=56457 GN=tgt PE=3 SV=1
MSRLQFQLQSTDGHARRGRLTFPRGTVETPAFMPVGTYGSVKGILPEQIRALGAEIILGNTFHLYLRPGLDVIGDHGGLHGFARWDGPILTDSGGFQVFSLAHRRKITEQGVTFSSPTDGARVFLGPEESMQIQKVLDSDIVMIFDECTPYPATEEVARRSMELSLRWAQRSRDAHDGLGNDAALFGIVQGGVHPDLRSRSLDGLQGIGFDGYAIGGLAVGEPEHERNAMLEHLHPRLPADRPRYLMGVGRPEDLVEGVARGVDMFDCVMPTRNARNGHYFTSFGTVRIRNAKYERDLDTIEPGCGCHACSSGYTRSYLRHLDRCNEMLAPMLGTLHNLWYYEKLMADMRAAIAAGTFVQFRRSFYAARGATTPPLPGETS

SEQ ID NO: 62374 - protein, 381 aa, Xanthomonas populi
  misc_feature (1)..(381): tr|A0A2S7F2H9|A0A2S7F2H9_9XANT Queuine tRNA-ribosyltran sferase OS=Xanthomonas populi OX=53414 GN=tgt PE=3 SV=1
MSRLQFQLQANDGHARRGRLTFPRGTVETPAFMPVGTYGSVKGILPEQIRALGAEIILGNTFHLYLRPGLDVIGDHGGLHGFARWNGPVLTDSGGFQVFSLAHRRKITEQGVTFSSPTDGARVFLGPEESMQIQKVLDSDIVMIFDECTPYPATEDVARRSMELSLRWAQRSRQAHDVLGNDAALFGIVQGGVHPDLRSRSLDGLQGIGFDGYAIGGLAVGEPEHERNAMLEHLHPRLPVERPRYLMGVGRPEDLVEGVARGVDMFDCVMPTRNARNGHYFTSFGTVRIRNAKYERDLDTIEPGCGCHACSSGYTRSYLRHLDRCNEMLAPMLGTLHNLWYYEKLMAQMRAAIASGTFVEFRRSFYAARGAITPPLPGEIS

SEQ ID NO: 62375 - protein, 381 aa, Xanthomonas prunicola
  misc_feature (1)..(381): tr|A0A2N3RHL6|A0A2N3RHL6_9XANT Queuine tRNA-ribosyltran sferase OS=Xanthomonas prunicola OX=2053930 GN=tgt PE=3 SV=1
MSRLQFQLQATDGHARRGRLTFPRGTVETPAFMPVGTYGSVKGILPEQIRALGAEIILGNTFHLYLRPGLDVIGDHGGLHGFARWDGPILTDSGGFQVFSLAHRRKITEQGVTFSSPTDGARVFLGPEESMKIQKVLDSDIVMIFDECTPYPATEDVARRSMELSLRWAQRSRDAHDGLGNDAALFGIVQGGVHPDLRSRSLDGLQGIGFDGYAIGGLAVGEPEHERNAMLEHLHPRLPSERPRYLMGVGRPEDLVEGVARGVDMFDCVMPTRNARNGHYFTSFGTVRIRNAKYERDLDTIEPGCGCHACSSGYTRSYLRHLDRCNEMLAPMLGTLHNLWYYEKLMADLRAAIASGTFVQFRRSFYAARGATTPPLPGEAS

SEQ ID NO: 62376 - protein, 381 aa, Xanthomonas sacchari
  misc_feature (1)..(381): tr|A0A0A8E2D4|A0A0A8E2D4_9XANT Queuine tRNA-ribosyltran sferase OS=Xanthomonas sacchari OX=56458 GN=tgt PE=3 SV =1
MSRLQFQLHTTDGAARRGRLTFPRGTVETPAFMPVGTYGSVKGVLPEQIKALGAQIILGNTFHLYLRPGLDVIGDHGGLHGFARWDGPILTDSGGFQVFSLAHRRKISEQGVTFASPTDGAKVFLGPEESMKIQRVLDSDIVMIFDECTPYPATEDVARRSMELSLRWAQRSRDAHDALGNDAALFGIVQGGVHADLRSRSIEGLQAIGFDGYAIGGLAVGEPEHERNAMLEHLHPRLPGDRPRYLMGVGRPEDLVEGVARGVDMFDCVMPTRNARNGHYFTSFGTVRIRNAKYERDLDPIEPGCGCHACSSGYTRAYLRHLDRCNEMLAPMLGTLHNLWYYQKLMADMRAAIAAGTFAQFRRSFYAARGVEATPLPSEQG

SEQ ID NO: 62377 - protein, 381 aa, Xanthomonas sacchari
  misc_feature (1)..(381): tr|A0A5D1A4U1|A0A5D1A4U1_9XANT Queuine tRNA-ribosyltran sferase OS=Xanthomonas sacchari OX=56458 GN=tgt PE=3 SV =1
MSRLQFQLHTTDGAARRGRLTFPRGTVETPAFMPVGTYGSVKGVLPEQIKALGAQIILGNTFHLYLRPGLDVIGDHGGLHGFARWDGPILTDSGGFQVFSLAHRRKISEQGVTFASPTDGAKVFLGPEESMKIQRVLDSDIVMIFDECTPYPATEDVARRSMELSLRWAQRSRDAHDALGNDAALFGIVQGGVHADLRSRSIEGLQAIGFDGYAIGGLAVGEPEHERNAMLEHLHPRLPGDRPRYLMGVGRPEDLVEGVARGVDMFDCVMPTRNARNGHYFTSFGTVRIRNARYERDLDPIEPGCGCHACSSGYTRAYLRHLDRCNEMLAPMLGTLHNLWYYQKLMADMRAAIAAGTFARFRRSFYAARGMEATPLPTEHG

SEQ ID NO: 62378 - protein, 381 aa, Xanthomonas sp.
  misc_feature (1)..(381): tr|A0A3A5ER12|A0A3A5ER12_9XANT Queuine tRNA-ribosyltran sferase OS=Xanthomonas sp. CFBP 7698 OX=2082399 GN=tgt PE=3 SV=1
MSRLQFQLQTTDGHARRGRLTFPRGTVETPAFMPVGTYGSVKGILPEQIRALGAEIILGNTFHLYLRPGLDVIGDHGGLHGFARWDGPILTDSGGFQVFSLAHRRKITEQGVTFSSPTDGARVFLGPEESMKIQKVLDSDIVMIFDECTPYPATEEVARRSMELSLRWAQRSREAHDGLGNDAALFGIVQGGVHPGLRSRSLDGLHAIGFDGYAIGGLAVGEPEHERNAMLEHLHPQLPADRPRYLMGVGRPEDLVEGVARGVDMFDCVMPTRNARNGHYFTSFGTVRIRNAKYERDLDTIEPGCGCHACSSGYTRSYLRHLDRCNEMLAPMLGTLHNLWYYEKLMADMRAAIASGTFVEFRRSFYAARGATTPPLPGETS

SEQ ID NO: 62379 - protein, 381 aa, Xanthomonas sp.
  misc_feature (1)..(381): tr|A0A0Q5G4E3|A0A0Q5G4E3_9XANT Queuine tRNA-ribosyltran sferase OS=Xanthomonas sp. Leaf131 OX=1736270 GN=tgt PE =3 SV=1
MSRLQFQLQATDGHARRGRLTFPRGTVETPAFMPVGTYGSVKGILPEQIHALGAEIILGNTFHLYLRPGLEVIGDHGGLHGFARWDGPILTDSGGFQVFSLAHRRKITEQGVTFSSPTDGARVFLGPEESMKIQKVLDSDIVMIFDECTPYPATEEVARRSMELSLRWAQRSREAHDGLGNDAALFGIVQGGVHPDLRSRSLDGLQGIGFDGYAIGGLAVGEPEHERNAMLEHLHPRLPAERPRYLMGVGRPEDLVEGVARGVDMFDCVMPTRNARNGHYFTSFGTVRIRNAKYERDLDTIEPGCGCHACSSGYTRSYLRHLDRCNEMLAPMLGTLHNLWYYEKLMADLRAAIASGTFVEFRRSFYAARGAITPPLPGETS

SEQ ID NO: 62380 - protein, 381 aa, Xanthomonas theicola
  misc_feature (1)..(381): tr|A0A2S6ZD98|A0A2S6ZD98_9XANT Queuine tRNA-ribosyltran sferase OS=Xanthomonas theicola OX=56464 GN=tgt PE=3 SV =1
MSRLQFQLDTTDGAARRGRLTFPRGTVETPAFMPVGTYGSVKGVLPEQIRALGAQIILGNTFHLYLRPGLDVIGDHGGLHGFARWDGPILTDSGGFQVFSLAHRRKISEQGVTFASPTDGAKVFLGPEESMRIQKVLDSDVVMIFDECTPYPATEDVARRSMELSLRWAQRSRDAHDGLGNDAALFGIVQGGVHADLRTRSIEGLQAIGFDGYAIGGLAVGEPEHERNAMLEHLHPRLPADHPRYLMGVGRPEDLVEGVARGVDMFDCVMPTRNARNGHYFTAFGTVRIRNARYERDLSPIEPGCGCHACSGGYTRSYLRHLDRCNEMLAPMLGTLHNLWYYQKLMADMRAAIAAGTFAQFRRSFYAARGVEAAPLPSEQG

SEQ ID NO: 62381 - protein, 381 aa, Xanthomonas translucens
  misc_feature (1)..(381): tr|A0A1M4ILY0|A0A1M4ILY0_XANCT Queuine tRNA-ribosyltran sferase OS=Xanthomonas translucens pv. graminis OX=1348 74 GN=tgt PE=3 SV=1
MSRLQFQLDTTDGAARRGRLTFPRGTVETPAFMPVGTYGSVKGVLPEQIKALGAQIILGNTFHLYLRPGLDVIGDHGGLHGFARWDGPILTDSGGFQVFSLAHRRKISEQGVTFASPTDGAKVFLGPEESMRIQKVLDSDIVMIFDECTPYPATEDVARRSMELSLRWAQRSREAHDGLDNDAALFGIVQGGVHADLRTRSIEGLQAIGFDGYAIGGLAVGEPEHERNAMLEHLHPRLPAERPRYLMGVGRPEDLVEGVARGVDMFDCVMPTRNARNGHYFTAFGTVRIRNARYERDLAPIEPGCGCHACSGGYTRSYLRHLDRCNEMLAPMLGTLHNLWYYQKLMADMRAAIATGTFAQFRRSFYAARGAEATPLPSEQG

SEQ ID NO: 62382 - protein, 380 aa, Xanthomonas translucens
  misc_feature (1)..(380): tr|A0A0K2ZJA5|A0A0K2ZJA5_XANCT Queuine tRNA-ribosyltran sferase OS=Xanthomonas translucens pv. phlei OX=487906 GN=tgt PE=3 SV=1
MSRLQFQLDTTDGAARRGRLTFPRGTVETPAFMPVGTYGSVKGVLPEQIKALGAQIILGNTFHLYLRPGLDVIGDHGGLHGFARWDGPILTDSGGFQVFSLAHRRKISEQGVTFASPTDGAKVFLGPEESMRIQKVLDSDIVMIFDECTPYPATEDVARRSMELSLRWAQRSREAHDGLDNDAALFGIVQGGVHADLRTRSIEGLQAIGFDGYAIGGLAVGEPEHERNAMLEHLHPRLPADRPRYLMGVGRPEDLVEGVARGVDMFDCVMPTRNARNGHYFTSFGTVRIRNARYERDLAPIEPGCGCHACSGGYTRSYLRHLDRCNEMLAPMLGTLHNLWYYQKLMADMRAAIAAGTFAQFRRSFYAARGVEATPLPSEQ

SEQ ID NO: 62383 - protein, 381 aa, Xanthomonas vasicola
  misc_feature (1)..(381): tr|A0A2P5ZJK1|A0A2P5ZJK1_XANVA Queuine tRNA-ribosyltran sferase OS=Xanthomonas vasicola OX=56459 GN=tgt PE=3 SV =1
MSRLQFQLQATDGHARRGRLTFPRGTVETPAFMPVGTYGSVKGILPEQIRALGAEIILGNTFHLYLRPGLDVIGDHGGLHRFARWDGPILTDSGGFQVFSLAHRRKITEQGVTFSSPTDGARVFLGPEESMQIQKVLDSDIVMIFDECTPYPATEEVARRSMELSLRWAQRSRDAHDGLGNDAALFGIVQGGVHPDLRSRSLDGLQGIGFDGYAIGGLAVGEPEHERNAMLEHLHPRLPSERPRYLMGVGRPEDLVEGVARGVDMFDCVMPTRNARNGHYFTSFGTVRIRNAKYERDLDTIEPGCGCHACSSGYTRSYLRHLDRCNEMLAPMLGTLHNLWYYEKLMADMRAAIASGTFVEFRRSFYAARGATTPPLPGETS

SEQ ID NO: 62384 - protein, 381 aa, Xanthomonas vasicola
  misc_feature (1)..(381): tr|A0A5K1N3F8|A0A5K1N3F8_XANVA Queuine tRNA-ribosyltran sferase OS=Xanthomonas vasicola pv. vasculorum NCPPB 20 6 OX=1094181 GN=tgt PE=4 SV=1
MSRLQFQLQATDGHARRGRLTFPRGTVETPAFMPVGTYGSVKGILPEQIRALGAEIILGNTFHLYLRPGLDVIGDHGGLHRFARWDGPILTDSGGFQVFSLAHRRKITEQGVTFSSPNDGARVFLGPEESMQIQKVLDSDIVMIFDECTPYPATEEVARRSMELSLRWAQRSRDAHDGLGSDAALFGIVQGGVHPDLRSRSLDGLQGIGFDGYAIGGLAVGEPEHERNAMLEHLHPRLPAERPRYLMGVGRPEDLVEGVARGVDMFDCVMPTRNARNGHYFTSFGTVRIRNAKYERDLDTIEPGCGCHACSSGYTRSYLRHLDRCNEMLAPMLGTLHNLWYYEKLMADMRAAIASGTFVEFRRSFYAARGATTPPLPGETS

SEQ ID NO: 62385 - protein, 381 aa, Xanthomonas vesicatoria
  misc_feature (1)..(381): tr|F0BB49|F0BB49_9XANT Queuine tRNA-ribosyltransferase OS=Xanthomonas vesicatoria ATCC 35937 OX=925775 GN=tgt PE=3 SV=1
MSRLQFQLQATDGHARRGRLTFPRGTVETPAFMPVGTYGSVKGILPEQIRALGAEIILGNTFHLYLRPGLDVIGDHGGLHGFARWDGPILTDSGGFQVFSLAHRRKITEQGVTFASPTDGARVFLGPEESMQIQKVLDSDIVMIFDECTPYPATEEVARRSMELSLRWAQRSRDAHDGLGNDAALFGIVQGGVHPDLRTRSLEGLHAIGFDGYAIGGLAVGEPEHERNAMLEHLHPRLPAERPRYLMGVGRPEDLVEGVARGVDMFDCVMPTRNARNGHYFTSFGTVRIRNAKYERDLDTIEPGCGCHACSSGYTRSYLRHLDRCNEMLAPMLGTLHNLWYYEKLMADMRAAIAAGTFVQFRRSFYAARGATTPPLPGETS

SEQ ID NO: 62386 - protein, 381 aa, Xanthomonas vesicatoria
  misc_feature (1)..(381): tr|A0A1L5QPN8|A0A1L5QPN8_9XANT Queuine tRNA-ribosyltran sferase OS=Xanthomonas vesicatoria OX=56460 GN=tgt PE=3 SV=1
MSRLQFQLQATDGHARRGRLTFPRGTVETPAFMPVGTYGSVKGILPEQIRALGAEIILGNTFHLYLRPGLDVIGDHGGLHGFARWDGPILTDSGGFQVFSLAHRRKITEQGVTFASPTDGARVFLGPEESMQIQKVLDSDIVMIFDECTPYPATEEVARRSMELSLRWAQRSRDAHDGLGNDAALFGIVQGGVHPDLRTRSLESLHAIGFDGYAIGGLAVGEPEHERNAMLEHLHPRLPAERPRYLMGVGRPEDLVEGVARGVDMFDCVMPTRNARNGHYFTSFGTVRIRNAKYERDLDTIEPGCGCHACSSGYTRSYLRHLDRCNEMLAPMLGTLHNLWYYEKLMADMRAAIAAGTFVQFRRSFYAARGATTPPLPGETS

SEQ ID NO: 62387 - protein, 368 aa, Xenococcus sp.
  misc_feature (1)..(368): tr|L8M1U0|L8M1U0_9CYAN Queuine tRNA-ribosyltransferase OS=Xenococcus sp. PCC 7305 OX=102125 GN=tgt PE=3 SV=1
MGFSFQLQANCNHSQARAGVFSTPHGIVETPRFMPVGTLATVKGITPRQLQDASAQMILANTYHLHLQPGEDIIAEAGGLHSFMAWDKPILTDSGGFQVFSLSELRKISEEGVIFRSPRDGNMIEITPERSIQIQNALGADVIMAFDECPPSDASQEEVAAATDRTNRWLKRCIAAHENPKTQALFGIVQGGIHLDLRSQAVEELTALDLPGYAIGGVSVGEAPELINATVQHTAPLLPVDKPRYLMGVGTYREMVQAIASGIDLFDCVIPTRFGRHGTALVQGNRINIKNAQYKRDYQPLDETCPCYACTNFTRAYLNHLVRSQEMLGYILLSLHNITELIRFTQQIRQAIFNDTFVSQFSHWIDVD

SEQ ID NO: 62388 - protein, 371 aa, Xenophilus sp.
  misc_feature (1)..(371): tr|A0A254VKS7|A0A254VKS7_9BURK Queuine tRNA-ribosyltran sferase OS=Xenophilus sp. AP218F OX=2014876 GN=tgt PE=3 SV=1
MLKFTVHKTSGGARRGTLELNHGTVETPVFQPVGTYGSVKAMSPVELNDIGAQIILGNTFHLWLRPGLEIVEQFGGLHDFIGWDKPILTDSGGFQVFSLSDMRKLTEEGCTFQSPINGDKLFLSPEISMKIQTVLNSDIVMQLDECTPGQVDHATAQKSLQMSLRWAERSRRAFDDLKNPNALFGIVQGNLYTDLRRESLEGLMQIGFDGIAIGGLSVGEPKPEMYRMLTELKDMLPADKPHYLMGVGTPEDLVHGVANGVDMFDCVMPTRNARNGWIFTQWGDVKIKNARYKDDKRPLDEACECYTCRNFSRAYLHHLHRVGEILGARLNTIHNLYYYQELMRQIRKSIEEDRFEDFRLEFAAHRARGVN

SEQ ID NO: 62389 - protein, 374 aa, Xenorhabdus beddingii
  misc_feature (1)..(374): tr|A0A1Y2SQL7|A0A1Y2SQL7_9GAMM Queuine tRNA-ribosyltran sferase OS=Xenorhabdus beddingii OX=40578 GN=tgt PE=3 S V=1
MKFELQKTDGNARRGRLIFERGVVETPAFMPVGTYGTVKGMTPEEVKETGAQILLGNTFHLWLRPGQEIMKLHGDLHDFMQWQGPILTDSGGFQVFSLGAMRKIKEEGVHFRNPINGTPVFLSPEKSMEIQYDLGSDIVMIFDECTPYPADWDYAKRSMEMSLRWAARSRQRFDEMGNKNALFGIIQGGVYEDLRDVSIKGLVEIGFDGYAVGGLAVGEPKEDMHRILEHVCPQIPQDKPRYLMGVGKPEDLVEGVRRGIDMFDCVMPTRNARNGHLFVTEGVIKIRNAKHKEDTSPLDEHCDCYTCRNYSRAYLHHLDRCNEILGARLNTIHNLRYYQRLMAEIRKAIEEDRLEQFVEAFYQRIGKPVPPLKR

SEQ ID NO: 62390 - protein, 374 aa, Xenorhabdus bovienii
  misc_feature (1)..(374): tr|A0A077PM60|A0A077PM60_XENBV Queuine tRNA-ribosyltran sferase OS=Xenorhabdus bovienii str. kraussei Quebec OX =1398203 GN=tgt PE=3 SV=1
MKFELQKTDGNARRGRLIFDRGVVETPAFMPVGTYGTVKGMTPEEVKEIGAQILLGNTFHLWLRPGQEIMKLHGDLHDFMQWHGPILTDSGGFQVFSLGAMRKIKEEGVHFRNPINGTPVFLSPEKSMEIQYDLGSDIVMIFDECTPYPADWDYAKRSMEMSLRWAARSRQRFNELGNKNALFGIIQGSVYEDLRDVSVKGLVEIGFDGYAVGGLAVGEPKEDMHRILEHVCPQIPQDKPRYLMGVGKPEDLVEGVRRGIDMFDCVMPTRNARNGHLFVTEGVIKIRNAKHKEDTSTLDEHCDCYTCRHYSRAYLHHLDRCNEILGARLNTIHNLRYYQRLMAGIRKAIEENKLEQFVEEFYQRIGKPVPPLNI

SEQ ID NO: 62391 - protein, 374 aa, Xenorhabdus bovienii
  misc_feature (1)..(374): tr|A0A077PEH0|A0A077PEH0_XENBV Queuine tRNA-ribosyltran sferase OS=Xenorhabdus bovienii str. oregonense OX=1398 202 GN=tgt PE=3 SV=1
MKFELQKTDGNARRGRLIFDRGVVETPAFMPVGTYGTVKGMTPEEVKETGAQILLGNTFHLWLRPGQEIMKLHGDLHDFMQWHGPILTDSGGFQVFSLGAMRKIKEEGVHFRNPINGTPVFLSPEKSMEIQHDLGSDIVMIFDECTPYPADWDYAKRSMEMSLRWAARSRQRFNELGNKNALFGIIQGSVYEDLRDVSVKGLVEIGFDGYAVGGLAVGEPKEDMHRILEHVCPQIPQDKPRYLMGVGKPEDLVEGVRRGIDMFDCVMPTRNARNGHLFVTEGVIKIRNAKHKEDTSTLDEHCDCYTCRHYSRAYLHHLDRCNEILGARLNTIHNLRYYQRLMAGIRKAIEENKLEQFVEEFYQRIGKPVPSLNI

SEQ ID NO: 62392 - protein, 374 aa, Xenorhabdus budapestensis
  misc_feature (1)..(374): tr|A0A2D0J1H2|A0A2D0J1H2_XENBU Queuine tRNA-ribosyltran sferase OS=Xenorhabdus budapestensis OX=290110 GN=tgt P E=3 SV=1
MKFELQKTDGHARRGRLIFDRGVVETPAFMPVGTYGTVKGMTPEEVKETGAQILLGNTFHLWLRPGQEIMKLHGDLHDFMQWQGPILTDSGGFQVFSLGAMRKIKEEGVHFRNPINGTPVFLSPEKSMEIQYDLGSDIVMIFDECTPYPADWDYAKRSMEMSLRWAARSRQRFDELGNKNALFGIIQGSVYEDLRDVSVKGLVEIGFDGYAVGGLAVGEPKEDMHRILEHVCPQIPQNKPRYLMGVGKPEDLVEGVRRGIDMFDCVMPTRNARNGHLFVTEGVIKIRNAKHKEDTSPLDEHCDCYTCRNYSRAYLHHLDRCNEILGARLNTIHNLRYYQRLMAGIRKAIEEDKLEQFVEEFYQRIGKPVPPLNV

SEQ ID NO: 62393 - protein, 374 aa, Xenorhabdus cabanillasii
  misc_feature (1)..(374): tr|A0A3D9UED5|A0A3D9UED5_9GAMM Queuine tRNA-ribosyltran sferase OS=Xenorhabdus cabanillasii OX=351673 GN=tgt PE =3 SV=1
MKFELQKTDGRARRGRLIFDRGVVETPAFMPVGTYGTVKGMTPEEVKETGAQILLGNTFHLWLRPGQEIMKLHGDLHDFMQWQGPILTDSGGFQVFSLGAMRKIKEEGVHFRNPINGTPVFLSPEKSMEIQYDLGSDIVMIFDECTPYPADWDYAKRSMEMSLRWAARSRQRFDELGNKNALFGIIQGSVYEDLRDVSVKGLVEIGFDGYAVGGLAVGEPKEDMHRILEHVCPQIPQDKPRYLMGVGKPEDLVEGVRRGIDMFDCVMPTRNARNGHLFVTEGVIKIRNAKHKEDTSPLDEHCDCYTCRNYSRAYLHHLDRCNEILGARLNTIHNLRYYQRLMAGIRKAIEEGKLEQFVEEFYQRIGKPVPPLNV

SEQ ID NO: 62394 - protein, 374 aa, Xenorhabdus cabanillasii; identical to SEQ ID NO: 62393
  misc_feature (1)..(374): tr|W1IXY3|W1IXY3_9GAMM Queuine tRNA-ribosyltransferase OS=Xenorhabdus cabanillasii JM26 OX=1427517 GN=tgt PE=3 SV=1

SEQ ID NO: 62395 - protein, 374 aa, Xenorhabdus doucetiae
  misc_feature (1)..(374): tr|A0A068QPG6|A0A068QPG6_9GAMM Queuine tRNA-ribosyltran sferase OS=Xenorhabdus doucetiae OX=351671 GN=tgt PE=3 SV=1
MKFELQKTDGNARRGRLVFDRGVVETPAFMPVGTYGTVKGMTPEEVKETGAQILLGNTFHLWLRPGQEIMKLHGDLHDFMQWQGPILTDSGGFQVFSLGAMRKIKEEGVHFRNPINGTPVFLSPEKSMEIQYDLGSDIVMIFDECTPYPADWDYAKRSMEMSLRWAARSRQRFDELGNKNALFGIIQGSVYEDLRDVSIKGLVEIGFDGYAVGGLAVGEPKEDMHRILEHVCPQIPQDKPRYLMGVGKPEDLVEGVRRGIDMFDCVMPTRNARNGHLFVTEGVIKIRNAKHKEDTSPLDEHCDCYTCRNYSRAYLHHLDRCNEILGARLNTIHNLRYYQRLMAGIRQAIEEGKLEPFVETFYQQIGKPVPPLNI

SEQ ID NO: 62396 - protein, 374 aa, Xenorhabdus eapokensis
  misc_feature (1)..(374): tr|A0A1Q5TVU7|A0A1Q5TVU7_9GAMM Queuine tRNA-ribosyltran sferase OS=Xenorhabdus eapokensis OX=1873482 GN=tgt PE= 3 SV=1
MKFELQKTDGNARRGRLIFDRGVVETPAFMPVGTYGTVKGMTPEEVKETGAQILLGNTFHLWLRPGQEIMKLHGDLHDFMQWHGPILTDSGGFQVFSLGAMRKIKEEGVHFRNPINGTPVFLSPEKSMEIQYDLGSDIVMIFDECTPYPADWDYAKRSMEMSLRWAARSRQRFNELGNKNALFGIIQGSVYEDLRDVSIKGLVEIGFDGYAVGGLAVGEPKEDMHRILEHVCPQIPQDKPRYLMGVGKPEDLVEGVRRGIDMFDCVMPTRNARNGHLFVTEGVIKIRNAKHKEDISPLDEHCDCYTCRNYSRAYLHHLDRCNEILGARLNTIHNLRYYQRLMAGIRQAIEEGKLAQFVETFYQQIGKPVPPLNI

SEQ ID NO: 62397 - protein, 374 aa, Xenorhabdus ehlersii
  misc_feature (1)..(374): tr|A0A2D0IQB7|A0A2D0IQB7_9GAMM Queuine tRNA-ribosyltran sferase OS=Xenorhabdus ehlersii OX=290111 GN=tgt PE=3 S V=1
MKFELQKTDGNARRGRLIFDRGVVETPAFMPVGTYGTVKGMTPEEVKETGAQILLGNTFHLWLRPGQEIMKLHGDLHDFMQWQGPILTDSGGFQVFSLGAMRKIKEEGVHFRNPINGTPVFLSPEKSMEIQYDLGSDIVMIFDECTPYPADWDYAKRSMEMSLRWAARSRQRFDELDNKNALFGIIQGSVYEDLRDISIKGLVEIGFDGYAVGGLAVGEPKEDMHRILEHVCPQIPLDKPRYLMGVGKPEDLVEGVRRGIDMFDCVMPTRNARNGHLFVTEGVIKIRNAKHKEDTSPLDEHCDCYTCRNYSRAYLHHLDRCNEILGARLNTIHNLRYYQRLMAGIRQAIEEGKLEQFVETFYQQIGKPVPPLNI

SEQ ID NO: 62398 - protein, 374 aa, Xenorhabdus hominickii
  misc_feature (1)..(374): tr|A0A2G0Q8M0|A0A2G0Q8M0_9GAMM Queuine tRNA-ribosyltran sferase OS=Xenorhabdus hominickii OX=351679 GN=tgt_2 PE =3 SV=1
MKFELQKTDGNARRGRLIFDRGVVETPAFMPVGTYGTVKGMTPEEVKETGAQILLGNTFHLWLRPGQEIMKLHGDLHDFMQWHGPILTDSGGFQVFSLGAMRKIKEEGVHFRNPINGTPVFLSPEKSMEIQHDLGSDIVMIFDECTPYPADWDYAKRSMEMSLRWAARSRQRFDELSNKNALFGIIQGSVYEDLRDVSVKGLVEIGFDGYAVGGLAVGEPKEDMHRILEHVCPQIPQDKPRYLMGVGKPEDLVEGVRRGIDMFDCVMPTRNARNGHLFVTEGVIKIRNAKHKEDTSSLDEHCDCYTCRNYSRAYLHHLDRCNEILGARLNTIHNLRYYQRLMAGIRKAIEEDKLKQFVEEFYQRIGKPVPSLNI

SEQ ID NO: 62399 - protein, 374 aa, Xenorhabdus innexi
  misc_feature (1)..(374): tr|A0A1N6N1C6|A0A1N6N1C6_9GAMM Queuine tRNA-ribosyltran sferase OS=Xenorhabdus innexi OX=290109 GN=tgt PE=3 SV= 1
MKFELQKTDGHARRGRLIFDRGIVETPAFMPVGTYGTVKGMTPEEVKDTGAQILLGNTFHLWLRPGQEIMKLHGDLHDFMQWHGPILTDSGGFQVFSLGAMRKIKEEGVHFRNPINGTPVFLSPEKSMEIQHDLGSDIVMIFDECTPYPADWDYAKRSMEMSLRWAARSRQRFDELGNKNALFGIIQGSVYEDLRDVSVKGLVEIGFDGYAVGGLAVGEPKEDMHRILEHVCPQIPQDKPRYLMGVGKPEDLVEGVRRGVDMFDCVMPTRNARNGHLFVTEGVIKIRNAKHKEDTSPLDEHCDCYTCRNYSRAYLHHLDRCNEILGARLNTIHNLRYYQRLMAGIRKAIEEDRLEQFVEEFYQQIGKPVPPLNV

SEQ ID NO: 62400 - protein, 374 aa, Xenorhabdus ishibashii
  misc_feature (1)..(374): tr|A0A2D0KIS9|A0A2D0KIS9_9GAMM Queuine tRNA-ribosyltran sferase OS=Xenorhabdus ishibashii OX=1034471 GN=tgt PE= 3 SV=1
MKFELQKTDGNARRGRLIFDRGVVETPAFMPVGTYGTVKGMTPEEVEETGAQILLGNTFHLWLRPGQEIMKLHGDLHDFMQWQGPILTDSGGFQVFSLGAMRKIKEEGVHFRNPINGTPVFLSPEKSMEIQYDLGSDIVMIFDECTPYPADWDYAKRSMEMSLRWAARSRQRFNELGNKNALFGIIQGSVYEDLRDVSIKGLVEIGFDGYAVGGLAVGEPKEDMHRILEHVCPQIPQDKPRYLMGVGKPEDLVEGVRRGIDMFDCVMPTRNARNGHLFVTEGVIKIRNAKHKEDTSPLDEHCDCYTCRNYSRAYLHHLDRCNEILGARLNTIHNLRYYQRLMAGIRQAIEEGKLEQFVETFYQQIGKPVPPLNI

SEQ ID NO: 62401 - protein, 374 aa, Xenorhabdus japonica
  misc_feature (1)..(374): tr|A0A1I4YKX4|A0A1I4YKX4_9GAMM Queuine tRNA-ribosyltran sferase OS=Xenorhabdus japonica OX=53341 GN=tgt PE=3 SV =1
MKFELQKTDGNARRGRLIFDRGVVETPAFMPVGTYGTVKGMTPEEVEETGAQILLGNTFHLWLRPGQEIMKLHGDLHDFMQWQGPILTDSGGFQVFSLGAMRKIKEEGVHFRNPINGTPVFLSPEKSMEIQYDLGSDIVMIFDECTPYPADWDYAKRSMEMSLCWAARSRQRFDELDNKNALFGIIQGSVYEDLRDVSIKGLVEIGFDGYAVGGLAVGEPKEDMHRILEHVCPQIPQDKPRYLMGVGKPEDLVEGVRRGIDMFDCVMPTRNARNGHLFVTEGVIKIRNAKHKEDTSSLDEHCDCYTCRNYSRAYLHHLDRCNEILGARLNTIHNLRYYQRLMAGIRKAIEEDKLEQFVEEFYQQISKPVPPLNI

SEQ ID NO: 62402 - protein, 374 aa, Xenorhabdus khoisanae
  misc_feature (1)..(374): tr|A0A0J5FVD5|A0A0J5FVD5_9GAMM Queuine tRNA-ribosyltran sferase OS=Xenorhabdus khoisanae OX=880157 GN=tgt PE=3 SV=1
MKFELQKTDGNARRGRLIFERGVVETPAFMPVGTYGTVKGMTPEEVKETGAQILLGNTFHLWLRPGQEIMKLHGDLHDFMQWQGPILTDSGGFQVFSLGAMRKIKEEGVHFRNPINGTPVFLSPEKSMEIQYDLGSDIVMIFDECTPYPADWDYAKRSMEMSLRWAARSRQRFDELSNKNALFGIIQGSVYEDLRDVSIKGLVEIGFDGYAVGGLAVGEPKEDMHRILEHVCPQIPQDKPRYLMGVGKPEDLVEGVRRGIDMFDCVMPTRNARNGHLFVTEGVIKIRNAKHKEDTSPLDEHCDCYTCRNYSRAYLHHLDRCNEILGARLNTIHNLRYYQRLMAGIRKAIEEGKLEQFVEAFYQRIGKSVPPLNI

SEQ ID NO: 62403 - protein, 374 aa, Xenorhabdus koppenhoeferi
  misc_feature (1)..(374): tr|A0A1I7G6X7|A0A1I7G6X7_9GAMM Queuine tRNA-ribosyltran sferase OS=Xenorhabdus koppenhoeferi OX=351659 GN=tgt P E=3 SV=1
MKFELQKTDGNARRGRLVFERGVVETPAFMPVGTYGTVKGMTPEEVKETGAQILLGNTFHLWLRPGQEIMKLHGDLHDFMQWQGPILTDSGGFQVFSLGAMRKIKEEGVHFRNPINGTPVFLSPEKSMEIQYDLGSDIVMIFDECTPYPADWDYAKRSMEMSLRWAARSRQRFDELNNKNALFGIIQGSVYEDLRDVSVKGLVEIGFDGYAVGGLAVGEPKEDMHRILEHVCPQIPQDKPRYLMGVGKPEDLVEGVRRGIDMFDCVMPTRNARNGHLFVTEGVIKIRNAKHKEDTSSLDEHCDCYTCRNYSRAYLHHLDRCNEILGARLNTIHNLRYYQRLMAGIRKAIEEGKLEQFVEEFYQQIGKPVPPLNI

SEQ ID NO: 62404 - protein, 374 aa, Xenorhabdus kozodoii
  misc_feature (1)..(374): tr|A0A2D0L1N3|A0A2D0L1N3_9GAMM Queuine tRNA-ribosyltran sferase OS=Xenorhabdus kozodoii OX=351676 GN=tgt PE=3 S V=1
MKFELQKTDGHARRGRLIFDRGVVETPAFMPVGTYGTVKGMTPEEVKETGAQILLGNTFHLWLRPGQEIMKLHGDLHDFMQWQGPILTDSGGFQVFSLGAMRKIKEEGVHFRNPINGTPVFLSPEKSMEIQYDLGSDIVMIFDECTPYPADWDYAKRSMEMSLRWAARSRQRFDELGNKNALFGIIQGSVYEDLRDISIKGLVEIGFDGYAVGGLAVGEPKEDMHRILEHVCPQIPQDKPRYLMGVGKPEDLVEGVRRGIDMFDCVMPTRNARNGHLFVTEGVIKIRNAKHKEDTSPLDEHCDCYTCRNYSRAYLHHLDRCNEILGARLNTIHNLRYYQRLMAGIRKAIEEGKLEQFVEAFYQQVGKSVPPLTI

SEQ ID NO: 62405 - protein, 374 aa, Xenorhabdus mauleonii
  misc_feature (1)..(374): tr|A0A1I3QE72|A0A1I3QE72_9GAMM Queuine tRNA-ribosyltran sferase OS=Xenorhabdus mauleonii OX=351675 GN=tgt PE=3 SV=1
MKFELQKTDGNARRGRLVFERGVVETPAFMPVGTYGTVKGMTPEEVKDTGAQILLGNTFHLWLRPGQEIMKLHGDLHDFMQWQGPILTDSGGFQVFSLGAMRKIKEEGVHFRNPINGTPVFLSPEKSMEIQYDLGSDIVMIFDECTPYPADWDYAKRSMEMSLRWAARSRQRFDELNNKNALFGIIQGSVYEDLRDVSVKGLVEIGFDGYAVGGLAVGEPKEDMHRILEHVCPQIPQDKPRYLMGVGKPEDLVEGVRRGIDMFDCVMPTRNARNGHLFVTEGVIKIRNAKHKEDTSPLDEHCDCYTCRNYSRAYLHHLDRCNEILGARLNTIHNLRYYQRLMAGIRKAIEEGKLEQFVEEFYQQIGKPVPPLNI

SEQ ID NO: 62406 - protein, 374 aa, Xenorhabdus miraniensis
  misc_feature (1)..(374): tr|A0A2D0JNF7|A0A2D0JNF7_9GAMM Queuine tRNA-ribosyltran sferase OS=Xenorhabdus miraniensis OX=351674 GN=tgt PE= 3 SV=1
MKFELQKTDGNARRGRLIFERGVVETPAFMPVGTYGTVKGMTPEEVKETGAQILLGNTFHLWLRPGQEIMKLHGDLHDFMQWQGPILTDSGGFQVFSLGAMRKIKEEGVHFRNPINGTPVFLSPEKSMEIQYDLGSDIVMIFDECTPYPADWDYAKRSMEMSLRWAARSRQRFDELGNKNALFGIIQGSVYEDLRDVSIKGLVEIGFDGYAVGGLAVGEPKEDMHRILEHVCPQIPQDKPRYLMGVGKPEDLVEGVRRGIDMFDCVMPTRNARNGHLFVTEGVIKIRNAKHKEDTSPLDEHCDCYTCRNYSRAYLHHLDRCNEILGARLNTIHNLRYYQRLMAGIRKAIEEDRLEQFVEEFYQRIGKPVPPLTI

SEQ ID NO: 62407 - protein, 374 aa, Xenorhabdus nematophila
  misc_feature (1)..(374): tr|D3VK78|D3VK78_XENNA Queuine tRNA-ribosyltransferase OS=Xenorhabdus nematophila (strain ATCC 19061 / DSM 337 0 / LMG 1036 / NCIB 9965 / AN6) OX=406817 GN=tgt PE=3 S V=1
MKFELQKTDGNARRGRLVFERGVVETPAFMPVGTYGTVKGMTPEEVKETGAQILLGNTFHLWLRPGQEIMKLHGDLHDFMQWQGPILTDSGGFQVFSLGAMRKIKEEGVHFRNPINGTPVFLSPEKSMEIQYDLGSDIVMIFDECTPYPADWDYAKRSMEMSLRWAARSRQRFDELNNKNALFGIIQGSVYEDLRDVSVKGLVEIGFDGYAVGGLAVGEPKEDMHRILEHVCPQIPQDKPRYLMGVGKPEDLVEGVRRGIDMFDCVMPTRNARNGHLFVTEGVIKIRNAKHKEDTSSLDEHCDCYTCRNYSRAYLHHLDRCNEILGARLNTIHNLRYYQRLMAGIRKAIEEGKLEQFVEAFYQQMGKPVPPLNI

SEQ ID NO: 62408 - protein, 374 aa, Xenorhabdus nematophila; identical to SEQ ID NO: 62407
  misc_feature (1)..(374): tr|A0A0A8NSJ9|A0A0A8NSJ9_XENNE Queuine tRNA-ribosyltran sferase OS=Xenorhabdus nematophila str. Websteri OX=143 7826 GN=tgt PE=3 SV=1

SEQ ID NO: 62409 - protein, 374 aa, Xenorhabdus poinarii
  misc_feature (1)..(374): tr|A0A068QZH8|A0A068QZH8_9GAMM Queuine tRNA-ribosyltran sferase OS=Xenorhabdus poinarii G6 OX=1354304 GN=tgt PE =3 SV=1
MEFELQKTDGNARRGRLIFERGVVETPAFMPVGTYGTVKGMTPEEVKETGAQILLGNTFHLWLRPGQEIMKLHGDLHDFMQWHGPILTDSGGFQVFSLGAMRKIKEEGVHFRNPINGTPVFLSPEKSMEIQYDLGSDIVMIFDECTPYPADWDYAKRSMEMSLRWAARSRQRFDELGNKNALFGIIQGSVYEDLRDVSIKGLVEIGFDGYAVGGLAVGEPKADMHRILAHVCPQIPQDKPRYLMGVGKPEDLVEGVRRGIDMFDCVMPTRNARNGHLFVTEGVIKIRNAKHKEDTSPLDEHCDCYTCRNYSRAYLHHLDRCNEILGARLNTIHNLRYYQRLMAGIRKAIEEGKLSQFVDAFYQQIGKPVPPLNI

SEQ ID NO: 62410 - protein, 374 aa, Xenorhabdus sp.
  misc_feature (1)..(374): tr|A0A2D0L8A3|A0A2D0L8A3_9GAMM Queuine tRNA-ribosyltran sferase OS=Xenorhabdus sp. KJ12.1 OX=1851571 GN=tgt PE= 3 SV=1
MKFELQKTDGHARRGRLIFDRGVVETPAFMPVGTYGTVKGMTPEEVKDTGAQILLGNTFHLWLRPGQEIMKLHGDLHDFMQWHGPILTDSGGFQVFSLGAMRKIKEEGVHFRNPINGTPVFLSPEKSMEIQHDLGSDIVMIFDECTPYPADWDYAKRSMEMSLRWAARSRQRFDELGNKNALFGIIQGSVYEDLRDVSVKGLVEIGFDGYAVGGLAVGEPKEDMHRILEHVCPQIPQDKPRYLMGVGKPEDLVEGVRRGIDMFDCVMPTRNARNGHLFVTEGVIKIRNAKHKEDTSPLDEHCDCYTCRNYSRAYLHHLDRCNEILGARLNTIHNLRYYQRLMAGIRQAIEEDRLEQFVEEFYQRIGKPVPPLNV

SEQ ID NO: 62411 - protein, 374 aa, Xenorhabdus sp.
  misc_feature (1)..(374): tr|A0A0M0TAX3|A0A0M0TAX3_9GAMM Queuine tRNA-ribosyltran sferase OS=Xenorhabdus sp. GDc328 OX=742178 GN=tgt PE=3 SV=1
MKFELQKTDGNARRGRLIFDRGVVETPAFMPVGTYGTVKGMTPEEVKETGAQILLGNTFHLWLRPGQEIMKLHGDLHDFMQWQGPILTDSGGFQVFSLGAMRKIKEEGVHFRNPINGTPVFLSPEKSMEIQYDLGSDIVMIFDECTPYPADWDYAKRSMEMSLRWAARSRQRFDELDNKNALFGIIQGSVYEDLRDISIKGLVEIGFDGYAVGGLAVGEPKEDMHRILEYVCPQIPQDKPRYLMGVGKPEDLVEGVRRGIDMFDCVMPTRNARNGHLFVTEGVIKIRNAKHKEDTSPLDEHCDCYTCRNYSRAYLHHLDRCNEILGARLNTIHNLRYYQRLMAGIRQAIEEGKLEQFVEAFYQQIGKPVPPLNI

SEQ ID NO: 62412 - protein, 374 aa, Xenorhabdus stockiae; identical to SEQ ID NO: 62410
  misc_feature (1)..(374): tr|A0A2D0KSG0|A0A2D0KSG0_9GAMM Queuine tRNA-ribosyltran sferase OS=Xenorhabdus stockiae OX=351614 GN=tgt PE=3 S V=1

SEQ ID NO: 62413 - protein, 374 aa, Xenorhabdus szentirmaii
  misc_feature (1)..(374): tr|W1J1G5|W1J1G5_9GAMM Queuine tRNA-ribosyltransferase OS=Xenorhabdus szentirmaii DSM 16338 OX=1427518 GN=tgt PE=3 SV=1
MKFELQKTDGNARRGRLIFDRGVVETPAFMPVGTYGTVKGMTPEEVKETGAQILLGNTFHLWLRPGQEIMKLHGDLHDFMQWQGPILTDSGGFQVFSLGAMRKIKEEGVHFRNPINGTPVFLSPEKSMEIQYDLGSDIVMIFDECTPYPADWDYAKRSMEMSLRWAARSRQRFDELNNKNALFGIIQGSVYEDLRDVSVKGLVEIGFDGYAVGGLAVGEPKEDMHRILEHVCPQIPQDKPRYLMGVGKPEDLVEGVRRGIDMFDCVMPTRNARNGHLFVTEGVIKIRNAKHKEDTSPLDEHCDCYTCRNYSRAYLHHLDRCNEILGARLNTIHNLRYYQRLMAGIRKAIEEGKLEQFVGEFYQRIGKPVPSLNI

SEQ ID NO: 62414 - protein, 374 aa, Xenorhabdus thuongxuanensis
  misc_feature (1)..(374): tr|A0A1Q5TQP9|A0A1Q5TQP9_9GAMM Queuine tRNA-ribosyltran sferase OS=Xenorhabdus thuongxuanensis OX=1873484 GN=tg t PE=3 SV=1
MKFELQKTDGNARRGRLIFDRGVVETPAFMPVGTYGTVKGMTPEEVKETGAQILLGNTFHLWLRPGQEIMKLHGDLHDFMQWQGPILTDSGGFQVFSLGAMRKIKEEGVHFRNPINGTPVFLSPEKSMEIQYDLGSDIVMIFDECTPYPADWDYAKRSMEMSLRWAARSRQRFNELGNKNALFGIIQGSVYEDLRDISIKGLVEIGFDGYAVGGLAVGEPKEDMHRILEHVCPQIPQDKPRYLMGVGKPEDLVEGVRRGIDMFDCVMPTRNARNGHLFVTEGVIKIRNAKHKEDISPLDEHCDCYTCRNYSRAYLHHLDRCNEILGARLNTIHNLRYYQRLMAGIRQAIEEGKLEQFVETFYQQIGKPVPPLNI

SEQ ID NO: 62415 - protein, 374 aa, Xenorhabdus vietnamensis
  misc_feature (1)..(374): tr|A0A1Y2SI92|A0A1Y2SI92_9GAMM Queuine tRNA-ribosyltran sferase OS=Xenorhabdus vietnamensis OX=351656 GN=tgt PE =3 SV=1
MKFELQKTDGNARRGRLIFDRGVVETPAFMPVGTYGTVKGMTPEEVKETGAQILLGNTFHLWLRPGQEIMKLHGDLHDFMQWQGPILTDSGGFQVFSLGAMRKIKEEGVHFRNPINGTPVFLSPEKSMEIQYDLGSDIVMIFDECTPYPAEWDYAKRSMEMSLRWAARSRQRFDELGNENALFGIIQGSVYEDLRDVSIKGLVEIGFDGYAVGGLAVGEPKEDMHRILEHVCPQIPQDKPRYLMGVGKPEDLVEGVRRGIDMFDCVMPTRNARNGHLFVTEGVIKIRNAKHKEDTSPLDEHCDCYTCRNYSRAYLHHLDRCNEILGARLNTIHNLRYYQRLMAGIRKAIEEGKLEQFVEEFYQQIGKPVPPLNI

SEQ ID NO: 62416 - protein, 376 aa, Xinfangfangia sp.
  misc_feature (1)..(376): tr|A0A3P5XD84|A0A3P5XD84_9RHOB Queuine tRNA-ribosyltran sferase OS=Xinfangfangia sp. CIP 111625 OX=2483812 GN=t gt PE=3 SV=1
MTERFGFTLKATDGKARTGVIHTPRGEIRTPAFMPVGTAATVKAMLPGSVRETGADILLGNTYHLMLRPGAERIARLGGLHRFMNWERPILTDSGGFQVMSLASLRKLTEEGVRFSSHIDGSKHMLSPERSMEIQKLLGSDIVMCFDECPALPATDEVVAKSMRLSMRWAQRSRDAFGDRPGHALFGIMQGGVTRDLREESAKALVEIGFDGYAVGGLAVGEGQEAMFDVLDYAPGFLPEDKPRYLMGVGKPDDIVGAVERGIDMMDCVLPSRSGRTGQAWTRRGQVNLRNARHQDDPRPLDEDCTCPACRGYSRAYLHHVLRAQEIIASMLLTWHNLHYYQELMQGLRDAIAEGRLAAFVAGFHAQRAGGDIGPL

SEQ ID NO: 62417 - protein, 384 aa, Xylella fastidiosa
  misc_feature (1)..(384): sp|Q9PGS5|TGT_XYLFA Queuine tRNA-ribosyltransferase OS= Xylella fastidiosa (strain 9a5c) OX=160492 GN=tgt PE=3 SV=2
MSRLQFQLQATDGAARRGQLSFPCGTVQTPAFMPVGTYGAVKGVLPGQLCDLGAEIILGNTFHLFLRPGLEVIADHGGLHGFMRWNGPILTDSGGFQVFSLAHRRKISEQGVTFAAPTDGAQVFLGPEESMKIQKVLNSDIVMIFDECTPYPATEDVARDSMELSLRWAQRSRDAHDALDNDAALFGIIQGGVHPDLRGRSLDGLQAIGFDGYGIGGLAVGESESERNVILEYLHPRVPADRPRYLMGVGRPEDLVESVARGVDMFDCVMPTRHARNGQYFTGFGTVKIRNACYARDVDPIEPGCGCPACVGGYTRAYLRHLDRCNEMLASMLGTLHNLWYYETLMANMRAAITAGTFFAFRRSFYLARGLDLPPLPEVAGCAG

SEQ ID NO: 62418 - protein, 384 aa, Xylella fastidiosa
  misc_feature (1)..(384): sp|B0U1P6|TGT_XYLFM Queuine tRNA-ribosyltransferase OS= Xylella fastidiosa (strain M12) OX=405440 GN=tgt PE=3 S V=1
MSRLQFQLQATDGAARRGQLSFPCGTVQTPAFMPVGTYGAVKAVLPGQLCDLGAEIILGNTFHLFLRPGLEVIADHGGLHGFMRWNGPILTDSGGFQVFSLAHRRKISEQGVTFAAPTDGAQVFLGPEESMKIQKVLNSDVVMIFDECTPYPATEDVARDSMELSLRWAQRSRDAHDALDNDAALFGIIQGGVHPDLRGRSLDGLQAIGFDGYAIGGLAVGESESERNVILEYLHPRLPVDRPRYLMGVGRPEDLVESVARGVDMFDCVMPTRHARNGQYFTGFGTVKIRNACYARDVDPIEPGCGCPACVGGYTRAYLRHLDRCNEMLASMLGSLHNLWYYETLMANMRAAITAGTFFTFRHSFYLARGLDPPPLPEVASCAG

SEQ ID NO: 62419 - protein, 380 aa, Xylella taiwanensis
  misc_feature (1)..(380): tr|Z9JKL1|Z9JKL1_9GAMM Queuine tRNA-ribosyltransferase OS=Xylella taiwanensis OX=1444770 GN=tgt PE=3 SV=1
MSLLQFQLQATDGAARRGQLSFPCGTVQTPAFMPVGTYGAVKGVLPRQLCDLGAEIILGNTFHLFLRPGLEVIADHGGLRGFMRWDGPILTDSGGFQVFSLAHRRKITEQGVTFAAPTDGAQVFLGPEESMRIQKVLNSDVVMIFDECTPYPATEDVARCSMELSLRWAQRSRDAHDALGNDAALFGIVQGGVHPDLRGRSLDGLQAIGFDGYAIGGLAVGEPECERNAILEYLHPRLPAHRPRYLMGVGRPEDLVESVARGVDMFDCVMPTRHARNGHYFTGFGTVRIRNACYARDLDPIESGCGCPTCVGGYTRAYLRHLDRCNEMLASMLGTLHNLWYYEKLMADMRAAIAAGAFLAFRRSFYAARGLEPPPLSDRC

SEQ ID NO: 62420 - protein, 390 aa, Xylophilus ampelinus
  misc_feature (1)..(390): tr|A0A318SF62|A0A318SF62_9BURK Queuine tRNA-ribosyltran sferase OS=Xylophilus ampelinus OX=54067 GN=tgt PE=3 SV =1
MLSFDLLATDPASHARRGTLTLNHGVVQTPIFMPVGTYGTVKGVMPRSLEEMGAQIILGNTFHLWMRPGLDVMASFGGLHPFEKWNKPILTDSGGFQVWSLGAMRKISEEGVKFASPVNGDRLFLTPEVSMRIQTVLNSDIVMQFDECTPYDTQGHITTEAEARTSMELSLRWARRCQGEFARLENPNALFGIVQGGMFGHLRQESLDRLVEMDFPGYAIGGVSVGEPKEEMLRVMAHTPHRLPAHKPRYLMGVGTPEDLVQGVADGVDMFDCVMPTRNARNGTLFSRYGDLKIRNARHKTDPKPLDTSCTCHACAGTTGVSWDDGGRGGFSRAYLHHLDRCGEMLGPMLTTIHNLHYYLQLMREIRDALDAGRFAAFRAQFKADRARGV

SEQ ID NO: 62421 - protein, 395 aa, Xylophilus sp.
  misc_feature (1)..(395): tr|A0A0Q4G863|A0A0Q4G863_9BURK Queuine tRNA-ribosyltran sferase OS=Xylophilus sp. Leaf220 OX=1735686 GN=tgt PE= 3 SV=1
MSALPRLQFDLLATDPASHARRGTLTLNHGVVQTPIFMPVGTYGTVKGVMPRSLDEMGAQIILGNTFHLWMRPGLDVMESFGGLHQFEKWDKPILTDSGGFQVWSLGAMRKISEEGVKFASPVNGDRLFLTPEVSMQIQTVLNSDIVMQFDECTPYDTQGHITTEAEARTSMELSLRWARRCQSEFARLENPNALFGIVQGGMFENLRQESLDQLVEMDFPGYAIGGVSVGEPKDEMLRVMAHTPHRLPAHKPRYLMGVGTPEDLVQGVADGVDMFDCVMPTRNARNGTLFSRYGDLKIRNARHKTDPQPLDTSCTCHACAGTTGVSWDDGGRGGFSRAYLHHLDRCGEMLGPMLTTIHNLHYYLQLMQEIRDALDAGRFGEFRAQFKADRARGV

SEQ ID NO: 62422 - protein, 375 aa, Yangia pacifica
  misc_feature (1)..(375): tr|A0A1I6QIF0|A0A1I6QIF0_9RHOB Queuine tRNA-ribosyltran sferase OS=Yangia pacifica OX=311180 GN=tgt PE=3 SV=1
MSLTSFTLSGRDGAARTGVISTPRGEIRTPAFMPVGTAATVKAMLPESVRATGADILLGNTYHLMLRPGAERVARLGGLHKFMNWERPILTDSGGFQVMSLSGLRKLTEEGVTFKSHIDGSKHMLSPESSMEIQRLLGSDIVMCFDECPALPADRKRIEQSMRLSMRWAQRSRDAFGDRPGHMLFGIQQGGLEEDLRGESAEALTSIGFDGYAVGGLAVGEGQEAMFKVLDFAPGQLPEDKPRYLMGVGKPDDIVGAVKRGIDMMDCVLPSRSGRTGQAWTRRGMVNIKNARHQDDPRPLDEHCTCPACRSYSRAYLHHVYRAGEMISGMLLTWHNLHYYQELMQGLRDAIAGGTFAAFEDQFHAQRAEGDIPVL

SEQ ID NO: 62423 - protein, 375 aa, Yangia pacifica
  misc_feature (1)..(375): tr|A0A2U8HHD2|A0A2U8HHD2_9RHOB Queuine tRNA-ribosyltran sferase OS=Yangia pacifica OX=311180 GN=tgt PE=3 SV=1
MSLTSFTLHGRDGAARTGVISTPRGEIRTPAFMPVGTAATVKAMLPENVRATGADILLGNTYHLMLRPGAERVARLGGLHKFMNWERPILTDSGGFQVMSLSGLRKLTEEGVTFKSHIDGSKHMLSPESSMEIQRLLGSDIVMCFDECPALPADRKRIEQSMRLSMRWAQRSRDAFGDRPGHMLFGIQQGGLEEDLRGESAEALTSIGFDGYAVGGLAVGEGQEAMFKVLDFAPGQLPEDKPRYLMGVGKPDDIVGAVKRGIDMMDCVLPSRSGRTGQAWTRHGMVNIKNARHQDDPRPLDEDCSCPACRSYSRAYLHHVYRAGEMISGMLLTWHNLHYYQELMQGMRDAIAGGTFAAFEEQFHAQRAEGDIPPL

SEQ ID NO: 62424 - protein, 375 aa, Yangia sp.
  misc_feature (1)..(375): tr|A0A1B1PR70|A0A1B1PR70_9RHOB Queuine tRNA-ribosyltran sferase OS=Yangia sp. CCB-MM3 OX=1792508 GN=tgt PE=3 SV =1
MSQTSFTLSGRDGAARTGVISTPRGEIRTPAFMPVGTAATVKAMLPESVRATGADILLGNTYHLMLRPGAERVARLGGLHKFMNWERPILTDSGGFQVMSLAGLRKLTEEGVTFKSHIDGSKHMLSPESSMEIQRLLGSDIVMCFDECPALPADRKRIEESMRLSMRWAQRSRDAFGDRPGHMLFGIQQGGLEEDLRGESAEALKSIGFDGYAVGGLAVGEGQEAMFKVLDFAPGQLPEDKPRYLMGVGKPDDIVGAVKRGIDMMDCVLPSRSGRTGQAWTRRGMVNIKNARHQDDPRPLDEHCSCPACRSYSRAYLHHVYRAGEMISGMLLTWHNLHYYQELMQGLRDAIASGTFAAFEEEFHAQRAEGDIPSL

SEQ ID NO: 62425 - protein, 375 aa, Yangia sp.; identical to SEQ ID NO: 53879
  misc_feature (1)..(375): tr|A0A2E1D8F1|A0A2E1D8F1_9RHOB Queuine tRNA-ribosyltran sferase OS=Yangia sp. OX=2024862 GN=tgt PE=3 SV=1

SEQ ID NO: 62426 - protein, 374 aa, Yersinia aldovae
  misc_feature (1)..(374): tr|A0A0T9UH31|A0A0T9UH31_YERAL Queuine tRNA-ribosyltran sferase OS=Yersinia aldovae OX=29483 GN=tgt PE=3 SV=1
MKYELQTTDGRARRGRLVFERGVVETPAFMPVGTYGTVKGMTPEEVKETGAQILLGNTFHLWLRPGQEIMKLHGDLHDFMQWHGPILTDSGGFQVFSLGAMRKIKEEGVTFQNPINGDKVFLSPEKSMEIQYDLGSDIVMIFDECTPYPADWDYAKRSMEMSLRWAKRSRDRFDELNNKNALFGIIQGGIYEDLRDVSVKGLVDIGFDGYAVGGLAVGEPKEDMHRILEHVCPQIPADKPRYLMGVGKPEDLVEGVRRGIDMFDCVMPTRNARNGHLFVTDGVVKIRNAKHKSDTATLDEHCDCYTCRNYSRAYLHHLDRCNEILGARLNTIHNLRYYQRLMAGLRQAIEEGKLESFVEDFYGRIGKPVPSLSV

SEQ ID NO: 62427 - protein, 374 aa, Yersinia bercovieri
  misc_feature (1)..(374): tr|A0A2G4U2U5|A0A2G4U2U5_YERBE Queuine tRNA-ribosyltran sferase OS=Yersinia bercovieri OX=634 GN=tgt PE=3 SV=1
MKYELQKTDGRARRGRLIFERGVVETPAFMPVGTYGTVKGMTPEEVKESGAQILLGNTFHLWLRPGQEIMKLHGDLHDFMQWHGPILTDSGGFQVFSLGAMRKIKEEGVTFQNPINGDKVFLSPEKSMEIQNDLGSDIVMIFDECTPYPADWDYAKRSMEMSLRWAARSRQRFDELNNKNALFGIIQGGVYEDLRDVSVKGLVDIGFDGYAVGGLAVGEPKEDMHRILEHVCPQIPADKPRYLMGVGKPEDLVEGVRRGIDMFDCVMPTRNARNGHLFVTDGVVKIRNAKHKSDTATLDEHCDCYTCRNYSRAYLHHLDRCNEILGARLNTIHNLRYYQRLMAGLRQAIEEGKLESFVEDFYGRIGKPVPPLNV

SEQ ID NO: 62428 - protein, 378 aa, Yersinia enterocolitica
  misc_feature (1)..(378): sp|A1JNT0|TGT_YERE8 Queuine tRNA-ribosyltransferase OS= Yersinia enterocolitica serotype O:8 / biotype 1B (stra in NCTC 13174 / 8081) OX=393305 GN=tgt PE=3 SV=1
MKYELQKTDGRARRGRLVFERGVVETPAFMPVGTYGTVKGMTPEEVKETGAQILLGNTFHLWLRPGQEIMKLHGDLHDFMQWHGPILTDSGGFQVFSLGAMRKIKEEGVTFQNPINGDKVFLSPEKSMEIQYDLGSDIVMIFDECTPYPADWDYAKRSMEMSLRWAKRSRDRFDELNNKNALFGIIQGGVYEDLRDVSVKGLVDIGFDGYAVGGLAVGEPKEDMHRILEHVCPQIPADKPRYLMGVGKPEDLVEGVRRGIDMFDCVMPTRNARNGHLFVTDGVVKIRNAKHKSDTATLDEHCDCYTCRNYSRAYLHHLDRCNEILGARLNTIHNLRYYQRLMASLRQAIEEGKLESFVEYFYGRIGKPVPPLSPQLTD

SEQ ID NO: 62429 - protein, 310 aa, Yersinia enterocolitica
  misc_feature (1)..(310): tr|F4N7I4|F4N7I4_YEREN Queuine tRNA-ribosyltransferase OS=Yersinia enterocolitica W22703 OX=913028 GN=tgt PE=3 SV=1
MKYELQKTDGRARRGRLVFERGVVETPAFMPVGTYGTVKGMTPEEVKETGAQILLGNTFHLWLRPGQEIMKLHGDLHDFMQWHGPILTDSGGFQVFSLGAMRKIKEEGVTFQNPINGDKVFLSPEKSMEIQYDLGSDIVMIFDECTPYPADWDYAKRSMEMSLRWAKRSRDRFDELNNKNALFGIIQGGVYEDLRDVSVKGLVDIGFDGYAVGGLAVGEPKEDMHRILEHVCPQIPADKPRYLMGVGKPEDLVEGVRRGIDMFDCVMPTRNARNGHLFVTDGVVKIRNAKHKSDTATLDEHCDCYTCRKL

SEQ ID NO: 62430 - protein, 374 aa, Yersinia entomophaga
  misc_feature (1)..(374): tr|A0A3S6EVC5|A0A3S6EVC5_YERET Queuine tRNA-ribosyltran sferase OS=Yersinia entomophaga OX=935293 GN=tgt PE=3 S V=1
MKYELQKTDGRARRGRLVFERGVVETPAFMPVGTYGTVKGMTPEEVKETGAQILLGNTFHLWLRPGQEIMKLHGDLHDFMQWHGPILTDSGGFQVFSLGAMRKIKEEGVHFKNPINGDSVFLSPEKSMEIQYDLGSDIVMIFDECTPYPADWDYAKRSMEMSLRWAARSRQRFDELNNKNALFGIIQGGVYEDLRDVSVKGLVDIGFDGYAVGGLAVGEPKEDMHRILEHVCPQIPADKPRYLMGVGKPEDLVEGVRRGIDMFDCVMPTRNARNGHLFVTDGVVKIRNAKHKDDTSTLDAECDCYTCRNYSRAYLHHLDRCNEILGARLNTIHNLRYYQRLMAGLRQAIEDGKLESFVEDFYGRIGKPVPPLNV

SEQ ID NO: 62431 - protein, 378 aa, Yersinia frederiksenii
  misc_feature (1)..(378): tr|A0A0B6FKG9|A0A0B6FKG9_YERFR Queuine tRNA-ribosyltran sferase OS=Yersinia frederiksenii Y225 OX=1454377 GN=tg t PE=3 SV=1
MKYELQKTDGRARRGRLIFERGVVETPAFMPVGTYGTVKGMTPEEVAETGAQILLGNTFHLWLRPGQEIMKLHGDLHDFMQWHGPILTDSGGFQVFSLGAMRKIKEEGVTFQNPINGDKVFLSPEKSMEIQNDLGSDIVMIFDECTPYPADWDYAKRSMEMSLRWAARSRQRFDELNNKNALFGIIQGGVYEDLRDVSVKGLVDIGFDGYAVGGLAVGEPKEDMHRILEHVCPQIPEDKPRYLMGVGKPEDLVEGVRRGIDMFDCVMPTRNARNGHLFVTDGVVKIRNAKHKSDTATLDEHCDCYTCRNYSRAYLHHLDRCNEILGARLNTIHNLRYYQRLMAGLRQAIEEGKLENFVEDFYGRIGKPVPPLSPQVSV

SEQ ID NO: 62432 - protein, 374 aa, Yersinia frederiksenii
  misc_feature (1)..(374): tr|A0A0T9ULT8|A0A0T9ULT8_YERFR Queuine tRNA-ribosyltran sferase OS=Yersinia frederiksenii OX=29484 GN=tgt PE=3 SV=1
MKYELLQTDGRARRGRLIFDRGVVETPAFMPVGTYGTVKGMTPEEVKETGAQILLGNTFHLWLRPGQEIMKLHGDLHDFMQWPGPILTDSGGFQVFSLGAMRKIKEEGVTFQNPINGDKVFLSPEKSMEIQYDLGSDIVMIFDECTPYPADWDYAKRSMEMSLRWAARSRQRFDELNNKNALFGIIQGGVYEDLRDVSVKGLVDIGFDGYAVGGLAVGEPKEDMHRILEHVCPQIPADKPRYLMGVGKPEDLVEGVRRGIDMFDCVMPTRNARNGHLFVTDGVVKIRNAKHKSDTATLDEHCDCYTCRNYSRAYLHHLDRCNEILGARLNTIHNLRYYQRLMAGLRQAIEEGKLESFVEDFYGRIGKPVPPLNV

SEQ ID NO: 62433 - protein, 378 aa, Yersinia hibernica
  misc_feature (1)..(378): tr|A0A481QFW7|A0A481QFW7_9GAMM Queuine tRNA-ribosyltran sferase OS=Yersinia hibernica OX=2339259 GN=tgt PE=3 SV =1
MKYELQQTDGRARRGRLVFERGVVETPAFMPVGTYGTVKGMTPEEVKETGAQILLGNTFHLWLRPGQEIMKLHGDLHDFMQWHGPILTDSGGFQVFSLGAMRKIKEEGVTFQNPINGDKVFLSPEKSMEIQYDLGSDIVMIFDECTPYPADWDYAKRSMEMSLRWAARSRQRFDELNNKNALFGIIQGGVYEDLRDVSVKGLVEIGFDGYAVGGLAVGEPKEDMHRILEHVCPQIPADKPRYLMGVGKPEDLVEGVRRGIDMFDCVMPTRNARNGHLFVTDGVVKIRNAKHKSDTATLDEHCDCYTCRNYSRAYLHHLDRCNEILGARLNTIHNLRYYQRLMAGLRQAIEEGKLERFVEDFYGRIGKPVPPLSPQLSV

SEQ ID NO: 62434 - protein, 374 aa, Yersinia intermedia
  misc_feature (1)..(374): tr|A0A0H5LV20|A0A0H5LV20_YERIN Queuine tRNA-ribosyltran sferase OS=Yersinia intermedia OX=631 GN=tgt PE=3 SV=1
MKYELQQTDGRARRGRLIFDRGVVETPAFMPVGTYGTVKGMTPEEVKETGAQILLGNTFHLWLRPGQEIMKLHGDLHDFMQWPGPILTDSGGFQVFSLGAMRKIKEEGVTFQNPINGDKVFLSPEKSMEIQYDLGSDIVMIFDECTPYPADWDYAKRSMEMSLRWAARSRQRFDELNNKNALFGIIQGGVYEDLRDVSVKGLVDIGFDGYAVGGLAVGEPKEDMHRILEHVCPQIPADKPRYLMGVGKPEDLVEGVRRGIDMFDCVMPTRNARNGHLFVTDGVVKIRNAKHKSDTATLDEHCDCYTCRNYSRAYLHHLDRCNEILGARLNTIHNLRYYQRLMAGLRQAIEEGKLESFVEDFYGRIGKPVPPLNV

SEQ ID NO: 62435 - protein, 374 aa, Yersinia intermedia
  misc_feature (1)..(374): tr|A0A0T9M785|A0A0T9M785_YERIN Queuine tRNA-ribosyltran sferase OS=Yersinia intermedia OX=631 GN=tgt PE=3 SV=1
MKYELQKTDGRARRGRLVFERGVVETPAFMPVGTYGTVKGMTPEEVKETGAQILLGNTFHLWLRPGQEIMKLHGDLHDFMQWHGPILTDSGGFQVFSLGAMRKIKEEGVTFQNPINGDKVFLSPEKSMEIQYDLGSDIVMIFDECTPYPADWDYAKRSMEMSLRWAARSRQRFDELNNKNALFGIIQGGVYEDLRDVSVKGLVDIGFDGYAVGGLAVGEPKEDMHRILEHVCPQIPADKPRYLMGVGKPEDLVEGVRRGIDMFDCVMPTRNARNGHLFVTDGVVKIRNAKHKNDVATLDEHCDCYTCRNYSRAYLHHLDRCNEILGARLNTIHNLRYYQRLMAGLRQAIEEGKLEVFVEDFYGRIGKPVPPLNA

SEQ ID NO: 62436 - protein, 374 aa, Yersinia kristensenii
  misc_feature (1)..(374): tr|A0A0T9TJ48|A0A0T9TJ48_YERKR Queuine tRNA-ribosyltran sferase OS=Yersinia kristensenii OX=28152 GN=tgt PE=3 S V=1
MKYELQKTDGRARRGRLIFERGVVETPAFMPVGTYGTVKGMTPEEVKETGAQILLGNTFHLWLRPGQEIMKLHGDLHDFMQWHGPILTDSGGFQVFSLGAMRKIKEEGVTFQNPINGDKVFLSPEKSMEIQNDLGSDIVMIFDECTPYPADWDYAKRSMEMSLRWAARSRQRFDELNNKNALFGIIQGGVYEDLRDVSVKGLVDIGFDGYAVGGLAVGEPKEDMHRILEHVCPQIPADKPRYLMGVGKPEDLVEGVRRGIDMFDCVMPTRNARNGHLFVTDGVVKIRNAKHKSDTATLDEHCDCYTCRNYSRAYLHHLDRCNEILGARLNTIHNLRYYQRLMAGLRQAIEEGKLESFVEDFYGLIGKPVPPLNV

SEQ ID NO: 62437 - protein, 378 aa, Yersinia kristensenii
  misc_feature (1)..(378): tr|A0A0T9M4S8|A0A0T9M4S8_YERKR Queuine tRNA-ribosyltran sferase OS=Yersinia kristensenii OX=28152 GN=tgt PE=3 S V=1
MKYELQKTDGRARRGRLVFERGVVETPAFMPVGTYGTVKGMTPEEVAETGAQILLGNTFHLWLRPGQEIMKLHGDLHDFMQWHGPILTDSGGFQVFSLGAMRKIKEEGVTFQNPINGDKVFLSPEKSMEIQNDLGSDIVMIFDECTPYPADWDYAKRSMEMSLRWAARSRQRFDELNNKNALFGIIQGGVYEDLRDVSVKGLVDIGFDGYAVGGLAVGEPKEDMHRILEHVCPQIPEDKPRYLMGVGKPEDLVEGVRRGIDMFDCVMPTRNARNGHLFVTDGVVKIRNAKHKSDTATLDEHCDCYTCRNYSRAYLHHLDRCNEILGARLNTIHNLRYYQRLMAGLRQAIEEGKLENFVEDFYGRIGKPVPPLSSQVSV

SEQ ID NO: 62438 - protein, 374 aa, Yersinia massiliensis; identical to SEQ ID NO: 62434
  misc_feature (1)..(374): tr|A0A0T9PK36|A0A0T9PK36_9GAMM Queuine tRNA-ribosyltran sferase OS=Yersinia massiliensis OX=419257 GN=tgt PE=3 SV=1

SEQ ID NO: 62439 - protein, 374 aa, Yersinia massiliensis
  misc_feature (1)..(374): tr|A0A2R4NSX9|A0A2R4NSX9_9GAMM Queuine tRNA-ribosyltran sferase OS=Yersinia massiliensis OX=419257 GN=tgt PE=3 SV=1
MKYELQQTDGRARRGRLIFDRGVVETPAFMPVGTYGTVKGMTPEEVKETGAQILLGNTFHLWLRPGQEIMKLHGDLHDFMQWSGPILTDSGGFQVFSLGAMRKIKEEGVTFQNPINGDKVFLSPEKSMEIQYDLGSDIVMIFDECTPYPADWDYAKRSMEMSLRWAARSRQRFDELNNKNALFGIIQGGVYEDLRDVSVKGLVDIGFDGYAVGGLAVGEPKEDMHRILEHVCPQIPADKPRYLMGVGKPEDLVEGVRRGIDMFDCVMPTRNARNGHLFVTDGVVKIRNAKHKSDTATLDEHCDCYTCRNYSRAYLHHLDRCNEILGARLNTIHNLRYYQRLMAGLRQAIEEGKLESFVEDFYGRIGKPVPPLNV

SEQ ID NO: 62440 - protein, 374 aa, Yersinia mollaretii
  misc_feature (1)..(374): tr|A0A0U1I2Z1|A0A0U1I2Z1_YERMO Queuine tRNA-ribosyltran sferase OS=Yersinia mollaretii OX=33060 GN=tgt PE=3 SV= 1
MKYELQKTDGRARRGRLIFERGVVETPAFMPVGTYGTVKGMTPEEVKETGAQILLGNTFHLWLRPGQEIMKLHGDLHDFMNWHGPILTDSGGFQVFSLGAMRKIKEEGVTFQNPINGDKVFLSPEKSMEIQNDLGSDIVMIFDECTPYPADWDYAKRSMEMSLRWAARSRQRFDELNNKNALFGIIQGGVYEDLRDVSVKGLVEIGFDGYAVGGLAVGEPKEDMHRILEHVCPQIPADKPRYLMGVGKPEDLVEGVRRGIDMFDCVMPTRNARNGHLFVTDGVVKIRNAKHKSDTATLDEHCDCYTCRNYSRAYLHHLDRCNEILGARLNTIHNLRYYQRLMAGLRQAIEEGKLESFVEDFYGRIGKPVPPLNV

SEQ ID NO: 62441 - protein, 374 aa, Yersinia mollaretii
  misc_feature (1)..(374): tr|A0A0U1K871|A0A0U1K871_YERMO Queuine tRNA-ribosyltran sferase OS=Yersinia mollaretii OX=33060 GN=tgt PE=3 SV= 1
MKYELQKTDGRARRGRLIFERGVVETPAFMPVGTYGTVKGMTPEEVKETGAQILLGNTFHLWLRPGQEIMKLHGDLHDFMNWHGPILTDSGGFQVFSLGAMRKIKEEGVTFQNPINGDKVFLSPEKSMEIQNDLGSDIVMIFDECTPYPAEWDYAKRSMEMSLRWAARSRQRFDELNNKNALFGIIQGGVYEDLRDVSVKGLVEIGFDGYAVGGLAVGEPKEDMHRILEHVCPQIPADKPRYLMGVGKPEDLVEGVRRGIDMFDCVMPTRNARNGHLFVTDGVVKIRNAKHKSDTATLDEHCDCYTCRNYSRAYLHHLDRCNEILGARLNTIHNLRYYQRLMAGLRQAIEEGKLESFVEDFYGRIGKPVPPLNV

SEQ ID NO: 62442 - protein, 374 aa, Yersinia nurmii; identical to SEQ ID NO: 62430
  misc_feature (1)..(374): tr|A0A0T9L781|A0A0T9L781_9GAMM Queuine tRNA-ribosyltran sferase OS=Yersinia nurmii OX=685706 GN=tgt PE=3 SV=1

SEQ ID NO: 62443 - protein, 374 aa, Yersinia pekkanenii
  misc_feature (1)..(374): tr|A0A0T9NJR3|A0A0T9NJR3_9GAMM Queuine tRNA-ribosyltran sferase OS=Yersinia pekkanenii OX=1288385 GN=tgt PE=3 S V=1
MKYELQKTDGRARRGRLIFERGVVETPAFMPVGTYGTVKGMTPEEVKETGAQILLGNTFHLWLRPGQAIIKAHGDLHDFMQWHGPILTDSGGFQVFSLGAMRKIKEEGVTFQNPINGDKVFLSPEKSMEIQYDLGSDIVMIFDECTPYPADWDYAKGSMEMSLRWAARSRQRFDELDNKNALFGIIQGGVYEDLRDVSVKGLVDIGFDGYAVGGLAVGEPKEDMHRILEHVCPQIPADKPRYLMGVGKPEDLVEGVRRGIDMFDCVMPTRNARNGHLFVTDGVVKIRNAKHKDDTATLDEHCDCYTCRNYSRAYLHHLDRCNEILGARLNTIHNLRYYQRLMAGLRQAIEEGKLESFVEDFYGRIGKPIPPLNA

SEQ ID NO: 62444 - protein, 374 aa, Yersinia pestis
  misc_feature (1)..(374): sp|Q8ZC33|TGT_YERPE Queuine tRNA-ribosyltransferase OS= Yersinia pestis OX=632 GN=tgt PE=3 SV=1
MKYELQKTDGRARRGRLVFERGVVETPAFMPVGTYGTVKGMTPEEVKETGAQILLGNTFHLWLRPGQEIMKLHGDLHDFMQWHGPILTDSGGFQVFSLGAMRKIKEEGVHFKNPINGDSVFLSPEKSMEIQYDLGSDIVMIFDECTPYPADWDYAKRSMEMSLRWAARSRQRFDELNNKNALFGIIQGGVYEDLRDVSVKGLVDIGFDGYAVGGLAVGEPKEDMHRILEHVCPQIPEDKPRYLMGVGKPEDLVEGVRRGIDMFDCVMPTRNARNGHLFVTDGVVKIRNAKHKDDTATLDEHCDCYTCRHYSRAYLHHLDRCNEILGARLNTIHNLRYYQRLMAGLRQAIEEGKLEHFVEDFYGRIGKPVPPLNV

SEQ ID NO: 62445 - protein, 374 aa, Yersinia pestis; identical to SEQ ID NO: 62444
  misc_feature (1)..(374): sp|Q1C4H4|TGT_YERPA Queuine tRNA-ribosyltransferase OS= Yersinia pestis bv. Antiqua (strain Antiqua) OX=360102 GN=tgt PE=3 SV=1

SEQ ID NO: 62446 - protein, 374 aa, Yersinia pseudotuberculosis
  misc_feature (1)..(374): tr|A0A3G5KI52|A0A3G5KI52_YERPU Queuine tRNA-ribosyltran sferase OS=Yersinia pseudotuberculosis OX=633 GN=tgt PE =3 SV=1
MKYELQKTDGRARRGRLVFERGVVETPAFMPVGTYGTVKGMTPEEVKETGAQILLGNTFHLWLRPGQEIMKLHGDLHDFMQWHGPILTDSGGFQVFSLGAMRKIKEEGVHFKNPINGDSVFLSPEKSMEIQYDLGSDIVMIFDECTLYPADWDYAKRSMEMSLRWAARSRQRFDELNNKNALFGIIQGGVYEDLRDVSVKGLVDIGFDGYAVGGLAVGEPKEDMHRILEHVCPQIPEDKPRYLMGVGKPEDLVEGVRRGIDMFDCVMPTRNARNGHLFVTDGVVKIRNAKHKDDTATLDEHCDCYTCRHYSRAYLHHLDRCNEILGARLNTMHNLRYYQRLMAGLRQAIEEGKLEHFVEDFYGRIGKPVPPLNV

SEQ ID NO: 62447 - protein, 374 aa, Yersinia pseudotuberculosis; identical to SEQ ID NO: 62444
  misc_feature (1)..(374): sp|B1JIE9|TGT_YERPY Queuine tRNA-ribosyltransferase OS= Yersinia pseudotuberculosis serotype O:3 (strain YPIII) OX=502800 GN=tgt PE=3 SV=1

SEQ ID NO: 62448 - protein, 378 aa, Yersinia rohdei
  misc_feature (1)..(378): tr|A0A0U1HRQ7|A0A0U1HRQ7_YERRO Queuine tRNA-ribosyltran sferase OS=Yersinia rohdei OX=29485 GN=tgt PE=3 SV=1
MKYELQKTDGRARRGRLVFERGVVETPAFMPVGTYGTVKGMTPEEVKETGAQILLGNTFHLWLRPGQEIMKLHGDLHDFMQWHGPILTDSGGFQVFSLGAMRKIKEEGVTFQNPINGDKVFLSPEKSMEIQNDLGSDIVMIFDECTPYPADWDYAKRSMEMSLRWAARSRQRFDELNNKNALFGIIQGGVYEDLRDVSVKGLVDIGFDGYAVGGLAVGEPKEDMHRILEHVCPQIPEDKPRYLMGVGKPEDLVEGVRRGIDMFDCVMPTRNARNGHLFVTDGVVKIRNAKHKSDTATLDEHCDCYTCRNYSRAYLHHLDRCNEILGARLNTIHNLRYYQRLMAGLRQAIEEGKLESFVEDFYGRIGKPVPPLSPQLSV

SEQ ID NO: 62449 - protein, 374 aa, Yersinia ruckeri
  misc_feature (1)..(374): tr|A0A085U573|A0A085U573_YERRU Queuine tRNA-ribosyltran sferase OS=Yersinia ruckeri OX=29486 GN=tgt PE=3 SV=1
MKYELQKTDGRARRGRLVFERGVVETPAFMPVGTYGTVKGMTPEEVKETGAQILLGNTFHLWLRPGQEIMKLHGDLHDFMQWHGPILTDSGGFQVFSLGAMRKIKEEGVHFKNPINGDSVFLSPEKSMEIQYDLGSDIVMIFDECTPYPADWDYAKRSMEMSLRWAARSRQRFNELNNKNALFGIIQGGVYEDLRDVSVKGLVDIGFDGYAVGGLAVGEPKEDMHRILEHVCPQIPADKPRYLMGVGKPEDLVEGVRRGIDMFDCVMPTRNARNGHLFVTDGVVKIRNAKHKDDTSTLDAECDCYTCRNYSRAYLHHLDRCNEILGARLNTIHNLRYYQRLMAGLRQAIEEGKLESFVEDFYGRIGKPIPPLNV

SEQ ID NO: 62450 - protein, 374 aa, Yersinia similis
  misc_feature (1)..(374): tr|A0A0T9QSW1|A0A0T9QSW1_9GAMM Queuine tRNA-ribosyltran sferase OS=Yersinia similis OX=367190 GN=tgt PE=3 SV=1
MKYELQKTDGRARRGRLVFERGVVETPAFMPVGTYGTVKGMTPEEVKETGAQILLGNTFHLWLRPGQEIMKLHGDLHDFMQWHGPILTDSGGFQVFSLGAMRKIKEEGVHFKNPINGDSVFLSPEKSMEIQYDLGSDIVMIFDECTPYPADWDYAKRSMEMSLRWATRSRQRFDELNNKNALFGIIQGGVYEDLRDVSVKGLVDIGFDGYAVGGLAVGEPKEDMHRILEHVCPQIPEDKPRYLMGVGKPEDLVEGVRRGIDMFDCVMPTRNARNGHLFVTDGVVKIRNAKHKDDTATLDEHCDCYTCRHYSRAYLHHLDRCNEILGARLNTIHNLRYYQRLMAGLRQAIEEGKLEHFVEDFYGRIGKPVPPLNV

SEQ ID NO: 62451 - protein, 374 aa, Yersinia wautersii
  misc_feature (1)..(374): tr|A0A0E8XFF7|A0A0E8XFF7_9GAMM Queuine tRNA-ribosyltran sferase OS=Yersinia wautersii OX=1341643 GN=tgt PE=3 SV =1
MKYELQKTDGRARRGRLVFERGVVETPAFMPVGTYGTVKGMTPEEVKETGAQILLGNTFHLWLRPGQEIMKLHGDLHDFMQWHGPILTDSGGFQVFSLGAMRKIKEEGVHFKNPINGDSVFLSPEKSMEIQYDLGSDIVMIFDECTPYPADWDYAKRSMEMSLRWAARSRQRFDELNNKNALFGIIQGGVYEDLRDVSVKGLVDIGFDGYAVGGLAVGEPKEDMHRILEHVCPQIPEDKPRYLMGVGKPEDLVEGVRRGIDMFDCVMPTRNARNGHLFVTDGVVKIRNAKHKDDTATLDEHCDCYTCRHYSRAYLHHLDRCNEILGARLNTMHNLRYYQRLMAGLRQAIEEGKLEHFVEDFYGRIGKPVPPLNV

SEQ ID NO: 62452 - protein, 374 aa, Yersiniaceae bacterium
  misc_feature (1)..(374): tr|A0A2N5EAV1|A0A2N5EAV1_9GAMM Queuine tRNA-ribosyltran sferase OS=Yersiniaceae bacterium 2016Iso4 OX=2060068 G N=tgt PE=3 SV=1
MKYELIKKEGRARRGRLVFERGVVETPAFMPVGTYGTVKGMTPEEVKESGAQILLGNTFHLWLRPGQEIMKLHGDLHDFMQWHGPILTDSGGFQVFSLGAMRKIKEEGVYFRNPINGDPVFLSPEKSMEIQYDLGSDIVMIFDECTPYPADWDYAKRSMEMSLRWAARSRKRFDELNNNNALFGIIQGSVYEDLRDVSVKGLVEIGFDGYAVGGLAVGEPKEDMHRILEHVCPQIPEDKPRYLMGVGKPEDLVEGVRRGIDMFDCVMPTRNARNGHLFVTDGVVKIRNAKHKEDTSPLDPECDCYTCRNYSRAYLHHLDRCNEILGARLNTIHNLRYYQRVMAGLRQAIDEGKLAQFVTDFYQRIGKPVPPLDA

SEQ ID NO: 62453 - protein, 374 aa, Yersiniaceae bacterium
  misc_feature (1)..(374): tr|A0A2N5E9S5|A0A2N5E9S5_9GAMM Queuine tRNA-ribosyltran sferase OS=Yersiniaceae bacterium 2015Iso6 OX=2060067 G N=tgt PE=3 SV=1
MKYELIKKEGRARRGRLVFDRGVVETPAFMPVGTYGTVKGMTPEEVKESGAQILLGNTFHLWLRPGQEIMKLHGDLHDFMQWHGPILTDSGGFQVFSLGAMRKIKEEGVYFRNPINGDPVFLSPEKSMEIQYDLGSDIVMIFDECTPYPADWDYAKRSMEMSLRWAARSRKRFDELNNNNALFGIIQGSVYEDLRDVSVKGLVEIGFDGYAVGGLAVGEPKEDMHRILEHVCPQIPEDKPRYLMGVGKPEDLVEGVRRGIDMFDCVMPTRNARNGHLFVTEGVVKIRNAKHKEDTSPLDPECDCYTCRNYSRAYLHHLDRCNEILGARLNTIHNLRYYQRVMAGLRQAIDEGKLAQFVTDFYQRIGKPVPPLDA

SEQ ID NO: 62454 - protein, 375 aa, Yokenella regensburgei
  misc_feature (1)..(375): tr|A0A2X2Q5Y3|A0A2X2Q5Y3_9ENTR Queuine tRNA-ribosyltran sferase OS=Yokenella regensburgei OX=158877 GN=tgt PE=3 SV=1
MKFELDTTDGRARRGRLVFDRGVVETPAFMPVGTYGTVKGMTPEEVEATGAQIILGNTFHLWLRPGQEIMKLHGDLHDFMQWKGPILTDSGGFQVFSLGDIRKITEQGVHFRNPINGDPIFLDPEKSMEIQYDLGSDIVMIFDECTPYPADWDYAKRSMEMSLRWAKRSRDRFDGLGNKNALFGIIQGSVYEDLRDISVKGLVEIGFDGYAVGGLAVGEPKEDMHRILEHVCPQIPTDKPRYLMGVGKPEDLVEGVRRGIDMFDCVMPTRNARNGHLFVTDGVVKIRNAKYKSDTSPLDAECDCYTCRNYSRAYLHHLDRCNEILGARLNTIHNLRYYQRLMAGLRKAIEEGKLESFVTDFYQRQGRPVPPLNVD

SEQ ID NO: 62455 - protein, 375 aa, Yokenella regensburgei; identical to SEQ ID NO: 62454
  misc_feature (1)..(375): tr|G9Z456|G9Z456_9ENTR Queuine tRNA-ribosyltransferase OS=Yokenella regensburgei ATCC 43003 OX=1002368 GN=tgt PE=3 SV=1

SEQ ID NO: 62456 - protein, 376 aa, Yoonia litorea
  misc_feature (1)..(376): tr|A0A1I6MCG2|A0A1I6MCG2_9RHOB Queuine tRNA-ribosyltran sferase OS=Yoonia litorea OX=1123755 GN=tgt PE=3 SV=1
MTATFSFDLKATDGKARTGVINTPRGDIRTPAFMPVGTAATVKAMMPESVAATGADILLGNTYHLMLRPTAERIDRLGGLHQFMNWDKPILTDSGGFQVMSLSDLRKLTEEGVTFKSHIDGSRHHLTPERSMEIQKLLGSDIVMCFDECPALPADRKRIQESMELSMRWAQRSRDAFGDRPGHALFGIQQGGLEEDLRGRSAEALRAIEFDGYAVGGLAVGEGQEAMFKVLDFAPDQLPVDKPRYLMGVGKPDDIVGAVKRGIDMMDCVLPSRSGRTGQAFTRRGVVNIKNARHADDPRPLDAECTCPACSNYSRAYLHHVFRAQEMISGMLLTWHNLHYFQEIMAGMRTAIAAGAFADWEADFHAGRAKGDIAPL

SEQ ID NO: 62457 - protein, 377 aa, Yoonia maricola
  misc_feature (1)..(377): tr|A0A2M8WKR4|A0A2M8WKR4_9RHOB Queuine tRNA-ribosyltran sferase OS=Yoonia maricola OX=420999 GN=tgt PE=3 SV=1
MTKRFSFSLNATDGKARTGVISTPRGDIRTPAFMPVGTAATVKAMMPESVAATGADILLGNTYHLMLRPTAERIDRLGGLHKFMNWDKPILTDSGGFQVMSLADLRKMTEKGVTFKSHIDGSRHELTPERSMDIQKLLGSDIVMCFDECPALPADRKRIAQSMELSMRWAQRSRDAFGDRPGHALFGIQQGGLEEDLRAQSAEALKAVEFDGYAVGGLAVGEGQEAMFGVLDFAPDQLPVDKPRYLMGVGKPDDIVGAVKRGIDMMDCVLPSRSGRTGQLFTRRGVVNIKNARHADDPRPLDAQCTCPTCANYTRAYLHHVFRAHEMISGMLLTWHNLHYFQEIMQGMRDAIAAARFAAWETEFHETRALGDIDPTC

SEQ ID NO: 62458 - protein, 376 aa, Yoonia maritima
  misc_feature (1)..(376): tr|A0A2T0W1Q2|A0A2T0W1Q2_9RHOB Queuine tRNA-ribosyltran sferase OS=Yoonia maritima OX=1435347 GN=tgt PE=3 SV=1
MTKRFSFSLNATDGKARTGVISTPRGDIRTPAFMPVGTAATVKAMMPESVAATGADILLGNTYHLMLRPTAERIDRLGGLHKFMNWDKPILTDSGGFQVMSLADLRKLTEKGVTFKSHIDGSKHELTPERSMEIQRLLGSDIVMCFDECPALPADRTRINESMQLSMRWAARSREAFGDRPGHALFGIQQGGLEEDLRAESAQALRDIEFDGYAVGGLAVGEGQEAMFSVLDFAPDQLPTDKPRYLMGVGKPDDIVGAVKRGIDMMDCVLPSRSGRTGQVFTRRGVLNIKNARHMDDPRPLDEQCTCPACSNYSRAYLHHVFRAQEMISGMLLTWHNLHYFQEIMQGMRDAIAVGAFGAWEADFHAQRALGDIAPL

SEQ ID NO: 62459 - protein, 376 aa, Yoonia rosea
  misc_feature (1)..(376): tr|A0A1R3WEN4|A0A1R3WEN4_9RHOB Queuine tRNA-ribosyltran sferase OS=Yoonia rosea OX=287098 GN=tgt PE=3 SV=1
MTQRFSFALNATDGKARTGVISTPRGDIRTPAFMPVGTAATVKAMMPESVAATGADILLGNTYHLMLRPTAERIDRLGGLHKFMNWDKPILTDSGGFQVMSLAELRKLTEKGVTFKSHIDGSKHELTPERSMEIQKLLGSDIVMCFDECPALPADRKRIAESMELSMRWAQRSRDAFGDRPGHALFGIQQGGLEEDLRAQSAEALKAVEFDGYAVGGLAVGEGQEAMFGVLDFAPDQLPVDKPRYLMGVGKPDDIVGAVKRGIDMMDCVLPSRSGRTGQLFTRRGVINIKNARHADDPRPLDEHCTCPACSHYSRAYLHHVFRAQEMISGMLLTWHNLHYFQEIMQGMRDAIAAGRFADWEAEFHATRALGDVPPL

SEQ ID NO: 62460 - protein, 378 aa, Yoonia sediminilitoris
  misc_feature (1)..(378): tr|A0A2T6KRC6|A0A2T6KRC6_9RHOB Queuine tRNA-ribosyltran sferase OS=Yoonia sediminilitoris OX=1286148 GN=tgt PE= 3 SV=1
MWDLMKFSFDLHATDGKARTGVIHTARGDIRTPAFMPVGTAATVKAMMPESVAATGADILLGNTYHLMLRPTAERIDRLGGLHKFMNWHKPILTDSGGFQVMSLSDLRKLTEEGVTFKSHIDGSKHHLTPERSMEIQKLLGSDIVMCFDECPALPADRKRLTESMELSMRWAQRSRDAFGDRPGHALFGIQQGGLEEDLRAQSAEALRAIEFDGYAVGGLAVGEGQEAMFSVLDFAPDQLPQDKPRYLMGVGKPDDIVGAVKRGIDMMDCVLPSRSGRTGQVFTRRGVVNIKNARHADDPRPLDEHCTCPACSHYSRAYLHHVFRAQEMISGMLLTWHNLHYFQDIMQGMRSAISTGAFDAWEADFHGNRALGDIPPC

SEQ ID NO: 62461 - protein, 376 aa, Yoonia tamlensis
  misc_feature (1)..(376): tr|A0A1I6G4C1|A0A1I6G4C1_9RHOB Queuine tRNA-ribosyltran sferase OS=Yoonia tamlensis OX=390270 GN=tgt PE=3 SV=1
MTQSFSFSLNATDGKARTGVISTPRGDIRTPAFMPVGTAATVKAMMPESVAATGADILLGNTYHLMLRPTAERIANLGGLHKFMNWDKPILTDSGGFQVMSLSDLRKMSEKGVTFRSHIDGSKHELTPERSMEIQKLLGSDIVMCFDECPALPADRTRINESMQMSMRWAQRSRDAFGDRPGYALFGIQQGGLEEDLRAESAAALRDIEFDGYAVGGLAVGEGQEAMFNVLDFAPDQLPTDKPRYLMGVGKPDDIVGAVKRGIDMMDCVLPSRSGRTGQIFTRHGVLNIKNARHADDPRPLDENCGCPACRNYSRAYLHHVFRAQEMISGMLLTWHNLHYFQDIMQGMRDAIATGSFAAWEADFHAGRAQGDIEPL

SEQ ID NO: 62462 - protein, 376 aa, Yoonia vestfoldensis
  misc_feature (1)..(376): tr|A0A1Y0EA56|A0A1Y0EA56_9RHOB Queuine tRNA-ribosyltran sferase OS=Yoonia vestfoldensis OX=245188 GN=tgt PE=3 S V=1
MTDRFSFDLHATDGKARSGVIRTPRGEIRTPAFMPVGTAATVKAMLPESVAATGADILLGNTYHLMLRPTAERIAALGGLHAFMNWDKPILTDSGGFQVMSLAGLRKLTEEGVTFKSHIDGSRHHLSPERSMEIQALLGSDIVMCFDECPALPADRDRIKSSMDLSMRWAQRSRDAFGDRPGHALFGIQQGGLEQDLREESANALRAIEFDGYAVGGLAVGEGQEAMFGVLDYAPDQLPVDKPRYLMGVGKPDDIVGAVKRGIDMMDCVLPSRSGRTGQAFTRHGVVNIKNARHQDDPRPLDEACTCPACRGYSRAYLHHVFRANEMISGMLLTWHNLHYFQDIMAGMRAAISAGSFAAWEAEFHRQRAQGDIDPL

SEQ ID NO: 62463 - protein, 376 aa, Yoonia vestfoldensis
  misc_feature (1)..(376): tr|A3V467|A3V467_9RHOB Queuine tRNA-ribosyltransferase OS=Yoonia vestfoldensis SKA53 OX=314232 GN=tgt PE=3 SV= 1
MTQRFSFDLHATDGKARTGAISTPRGVIRTPAFMPVGTAATVKAMLPESVAATGADILLGNTYHLMLRPTAERIARLGGLHKFMNWDKPILTDSGGFQVMSLAGLRKLTEEGVTFKSHIDGSRHHLSPERSMEIQALLGSDIVMCFDECPALPADRDRIKSSMDLSMRWAQRSRDAFGDRPGHALFGIQQGGLEQDLREESAQALQAIGFDGYAVGGLAVGEGQEAMFGVLDYAPDQLPVDKPRYLMGVGKPDDIVGAVKRGIDMMDCVLPSRSGRTGQAFTRHGVVNIKNARHQDDPRPLDEACTCPACRGYSRAYLHHVFRANEMISGMLLTWHNLHYFQQIMAGMRDAISAGTFAAWEADFHALRAQGDIDPL

SEQ ID NO: 62464 - protein, 375 aa, Youhaiella tibetensis
  misc_feature (1)..(375): tr|A0A5B9DN95|A0A5B9DN95_9RHIZ Queuine tRNA-ribosyltran sferase OS=Youhaiella tibetensis OX=1447062 GN=tgt PE=3 SV=1
MKQVNFSLLATDGNARRGRIDTPRGDIQTPAFMPVGTAGTVKAMYPEQVRETGADILLGNTYHLMLRPGAERVASLGGLHTFMDWERPILTDSGGFQVMSLAKLRKLDEKGVTFRSHIDGSAYSLTPERSIEIQTLLDSDIIMQLDECIPLPSETREIERAMELSLRWADRSKTAFNNQANRALFGIVQGGDDLRLRAKSAAGLQSIGFDGYAVGGLAVGEPQEVMFEVLSGVCPLLPSDRPRYLMGVGKPDDILGAIERGIDMFDCVHPTRAGRHGHIYTRFGVINMKNARHKDDARPVDEQSPNRNCRRFSRAYLHHLVKTEEILGAMILSQINLAYYQELVAGARAAIEAGTFSEYAEATRAGWAGGDLPPL

SEQ ID NO: 62465 - protein, 376 aa, Youngiibacter fragilis
  misc_feature (1)..(376): tr|V7I250|V7I250_9CLOT Queuine tRNA-ribosyltransferase OS=Youngiibacter fragilis 232.1 OX=994573 GN=tgt PE=3 S V=1
MYTLLKTEGSARRGRLTTPHGTIETPVFMNVGTLAAIKGAVSSMDLKEIGCQVELSNTYHLHLRPGDKVVRKLGGLHRFMNWDRPILTDSGGFQVFSLASMRKIKEEGVYFSSHIDGSKIFMGPEESMRIQSNLASTIAMAFDECVENPAPREYVERSVERTTRWLDRCRKEMDRLNSLEDTINRKQMLFAINQGGTYKDLRVLHARQISGMDMDGFAIGGLAVGETHDEMYDVIEAVVPYLPKDKPIYLMGVGLPENILEAVDRGVDFFDCVLPARNGRHGHVFTNSGRLNLNNARFETDDAPIDTTCSCPTCRNYTRGYIRHLFKAKEMLAMRLCVLHNLHFYNTMMEEIRDALDSGTFREYKVQKLAMVRGKL

SEQ ID NO: 62466 - protein, 376 aa, Youngimonas vesicularis
  misc_feature (1)..(376): tr|A0A4S3M9M9|A0A4S3M9M9_9RHOB Queuine tRNA-ribosyltran sferase OS=Youngimonas vesicularis OX=1294297 GN=tgt PE =3 SV=1
MAEKFSFQLMATDGKARRGVIRTPRGEIRTPAFMPVGTAATVKAMMPESVAATGADILLGNTYHLMLRPTAERVDRLGGLHKFMNWSKPILTDSGGFQVMSLSDLRKLTEEGVTFKSHVDGSRHFLSPERSMEIQRLLGSDIVMCFDECPALPADEKRVAQSMRLSMRWAQRSRDAFGDRPGHALFGIMQGGVTPELREESAKALVEIGFDGYAVGGLAVGEGQEAMFGVLDYAPDFLPQDKPRYLMGVGKPDDIVGAVKRGIDMMDCVLPSRSGRTGQAWTRHGMVNIKNARHQDDPRPLDEDCTCPACRNYSRAYLHHVFRAKEMICGMLLTWHNLHYYQELMQGMRDAIEAGRFAAWEAEFHAQRAQGDIAPL

SEQ ID NO: 62467 - protein, 375 aa, Zavarzinia compransoris
  misc_feature (1)..(375): tr|A0A317DZE8|A0A317DZE8_9PROT Queuine tRNA-ribosyltran sferase OS=Zavarzinia compransoris OX=1264899 GN=tgt PE =3 SV=1
MTALDFGFTVEARDGMARAGHVRTARGVIRTPAFMPVGTAATVKACMPETVRAAGADIILGNTYHLMLRPGAERVARLGGLHAFMNWPHPILTDSGGFQVMSLSSLRKITEEGVTFQSHIDGSKHAMSPERSIEIQRLLDSDIAMQLDECVALPATRDEAARAMELSLRWARRSKTAFYASEPPPGRAIFGIVQGGTDADLRRASAEGLVEIGFPGYALGGLAVGEPQAEMFATIAATTPHLPGDKPRYLMGVGKPADIVGAVARGIDMFDCVIPTRSGRNGQAFTRSGALNIRNAKFAEDKRPLDERCHCPACRAYSRAYLHHLVKAEEILGAMLMTAHNLRHYQDLTAGLRTAIRRGRLDAFVEAFEGGGADY

SEQ ID NO: 62468 - protein, 375 aa, Zavarzinia sp.
  misc_feature (1)..(375): tr|A0A317E4U3|A0A317E4U3_9PROT Queuine tRNA-ribosyltran sferase OS=Zavarzinia sp. HR-AS OX=2211142 GN=tgt PE=3 SV=1
MTAVDFGFSVEARDGMARAGHVRTARGVIRTPAFMPVGTAATVKAAWPETVRKAGADILLGNTYHLMLRPGAERVARLGGLHKFMNWPHPILTDSGGFQVMSLSSLRKITEEGVTFRSHHDGSSHAMSPERSIEIQRLLDSDIAMQLDECVALPASRDETARAMELSLRWARRSKDAFLASAPPPGRAIFGIVQGGTEFDLRRASAEGLVEIGFPGYALGGLAVGEPQPVMFETIAATTPHLPQDRPRYLMGVGKPSDIVGAVARGIDMFDCVIPTRSGRNGQAFTRQGTLNIRNAKHAEDQGPLDSRCHCPACRDYSRAYIHHLVKSQEILGAMLMTAHNLTYYQDLMVGLRSAIRRGRLAAFVEAFEAGGADY

SEQ ID NO: 62469 - protein, 386 aa, Zeaxanthinibacter enoshimensis
  misc_feature (1)..(386): tr|A0A4R6TR08|A0A4R6TR08_9FLAO Queuine tRNA-ribosyltran sferase OS=Zeaxanthinibacter enoshimensis OX=392009 GN= tgt PE=3 SV=1
MPIFATEIYDLKFTLQHTDPQSKARAASLQTDHGTIETPIFMPVGTVASVKGVHQRELREEVNPDIILANTYHLYLRPKTDILEKAGGLHKFMGWDRNILTDSGGYQVYSLSANRKIKEEGVKFKSHIDGSYHVFTPENVMEIQRTIGADIIMAFDECTPYPCDYKYAKRSMHMTHRWLDRCIAHLEKVPPKYGFDQTFFPIVQGSTYKDLRLQSAEYIANSGCEGNAIGGLSVGEPAEEMYAMTEVVCGVLPEDKPRYLMGVGTPINILENIALGIDMFDCVMPTRNARNGMLFTAEGTINIKNKKWEDDFSPLDPAGTTFVDHEYSKAYLRHLFAANEYLGKQIATIHNLGFYMWLVREARKHILAGDFASWKNQMVRNMDKRL

SEQ ID NO: 62470 - protein, 374 aa, Zetaproteobacteria bacterium
  misc_feature (1)..(374): tr|A0A2A5F1M2|A0A2A5F1M2_9PROT Queuine tRNA-ribosyltran sferase OS=Zetaproteobacteria bacterium OX=2026807 GN=t gt PE=3 SV=1
MSSLHFEILAQDSEGHARRGRIQLPHGMVETPVFMPVGTQATVKSLTPADLEDDIQASIILGNTYHLMLRPGADIVEKMGGLHKFMAWNRPILTDSGGFQVWSLGDLRKIEENGVRFRSHIDGSSWFLGPKESMAIQRQLGSDIVMAFDECTPYPATHEEARKSMQMSMRWAEQCREYLPVNDKQALFGIVQGGMYADLRRESLHAIADMDFEGIALGGLSVGEPKEEMMATLDTLAPYLPKDKPHYVMGVGTPDDLIEGIDRGIDMFDCVMPSRNARNGTLFTNHGKINIKNLKHQTDASPIMEGCTCYTCQNFSRAYLRHLYMAKELLSARLNTLHNLHYYCDLMQRARDALEAGRWISFHDDFLSTYRHNP

SEQ ID NO: 62471 - protein, 382 aa, Zetaproteobacteria bacterium
  misc_feature (1)..(382): tr|A0A3N5JVW2|A0A3N5JVW2_9PROT Queuine tRNA-ribosyltran sferase OS=Zetaproteobacteria bacterium OX=2026807 GN=t gt PE=3 SV=1
MRFTLLKSNSACGPRRGRIQTAHGTVETPVFMPVGTQGTVKTLDPRDLHAESCEILLCNTYHLYLRPGHEIVKTLGGLHRFMGWDRAILTDSGGFQVLSLAALRRISEDGVSFQSHLDGSRHVLTPEKAVEIQLALGVDILMALDECPPHDADAAYHQSSMERTLRWAARCRAAHPGDEPALFGIVQGGTQPELRARSAEETRRIGFSGYALGGLGIGEGSAAMYATVEETATLLPADAPRYLMGVGTPQDLLECIARGVDLFDCVLPTRNARNGTLFTGTGRVNIKGAAHARDERPVDAECACYTCRHFSRAYLRHLYVAGEILGLRLNTIHNVHYYLDLMRQARQAVAAGRFLAWKEAALARMRAEPTTSQHAQEIRTDD

SEQ ID NO: 62472 - protein, 376 aa, Zhengella mangrovi
  misc_feature (1)..(376): tr|A0A2G1QHQ0|A0A2G1QHQ0_9RHIZ Queuine tRNA-ribosyltran sferase OS=Zhengella mangrovi OX=1982044 GN=tgt PE=3 SV =1
MSETFQFRLLASDGGARRGEITMPRGTIRTPAFMPVGTGGTVKAMYMDQVRELGADIILGNTYHLMLRPGAERVARLGGLHDFARWPYPILTDSGGFQVMSLAALRKLDERGVTFKSHIDGVKYDMTPERSIEIQGLLDSDIQMQLDECIRLPAERDDVERAMELSLRWADRCKAAFGDQPGKAMFGIVQGGDVPDLRVRSAQALAAMDLKGYAVGGLAVGEPQAVMLEMLEAVCPVLPAEKPRYLMGVGTPDDMLKSVARGIDMFDCVMPTRAGRHGLAYTRFGKINLRNARHADDPRPLDAESDCPAARDYSRAYLHHLVRSGEALGGMLLTWNNLAYYQRLMQGARDAIEAGRYGNYVAQTQAGWERGDLPAL

SEQ ID NO: 62473 - protein, 420 aa, Zhihengliuella halotolerans
  misc_feature (1)..(420): tr|A0A4Q8AAG3|A0A4Q8AAG3_9MICC Queuine tRNA-ribosyltran sferase OS=Zhihengliuella halotolerans OX=370736 GN=tgt PE=3 SV=1
MSADVPSSHPRQGEFGFTVGARLDGTRARTGVIRTPHGEIATPAFIAVGTKATVKAVTPEAVADFGAQAVLANAYHLYLQPGSDVLDAAGGLGRFMNWPGPTFTDSGGFQVMSLGSGFKKVIDMKATTPSGSDDAVAPGKERLANVDDDGVWFKSHLNGDVHRFTPEVSMNVQHEIGADIMFAFDELTTLHNSRAYQEESLERTRLWAERCITEHFRLTDTRVGKEYQGLFGVIQGAQYEDLRRKACRDLAAMPFDGFGIGGALEKENLGTIVGWCADELPEDKPRHLLGISEPDDIFTAIENGADTFDCVSPTRVARNSAFYTQHGRFNLSGQRYKLDFTPLQAGCDCYTCTHYTRAYIHHLHKAKELLSHTLISIHNERFVVRLVDEARAAIETGTFFELKERVLGEYYAGNPDPQGA

SEQ ID NO: 62474 - protein, 383 aa, Zhizhongheella caldifontis
  misc_feature (1)..(383): tr|A0A2S5SVT2|A0A2S5SVT2_9BURK Queuine tRNA-ribosyltran sferase OS=Zhizhongheella caldifontis OX=1452508 GN=tgt PE=3 SV=1
MTTSPLPHGLHFDVLKTEGHARRGRLTLNHGVVETPIFMPVGTYGTVKGVMPRSLEEMGAQIILGNTFHLWLRPGLDIIRQFGGLHRFEGWTKPILTDSGGFQVWSLGEMRKISEEGVKFASPVNGDKLFLTPEVSMQVQHALDSDIVMQFDECTPYETKGHITTEREARSSMELSLRWAKRCRAEFERLGNRNALFGIVQGGMFEHLRQESLEQLVEMDLPGYAIGGVSVGEPKEDMLRIMAHTPHRLPAGKPRYLMGVGTPEDLVEGVAAGVDMFDCVMPTRNARNGHLFTRFGDLKIRNARHKTDERPIDETCSCYTCKNFSRAYLHHLDRCGEMLGPMLTSIHNLHYYLNLMREVRESLDAGRFQAFRETFRADRQRGV

SEQ ID NO: 62475 - protein, 390 aa, Zhongshania aliphaticivorans
  misc_feature (1)..(390): tr|A0A127M4F0|A0A127M4F0_9GAMM Queuine tRNA-ribosyltran sferase OS=Zhongshania aliphaticivorans OX=1470434 GN=t gt PE=3 SV=1
MSDCRMKFALKTTDGMARRGCLDFPRGKVETPAFMPVGTYGTVKGMLPRDIHEIGADIILGNTFHLSLRPGTEVVKAHGSLHDFIGWSGPILTDSGGFQVWSLGKLRKITEAGVSFKSPVDGSSVYLDPETSMQIQRDLGSDIVMIFDECTPYPATEAEARTSMELSLRWGARSKAAHAGNDAALFGIIQGGMYPELRRESLAGLAEVGFDGYAIGGLSVGEPKDEMLKVLDSLADHLPTDKPRYLMGVGKPSDILEAVMRGVDMFDCVMPTRNARNGHLFTSTGVIKIRNAAHKTSTAPLDANCDCYTCQNFSRAYLHHLDKCKEILGAQLNTIHNLRYYQNHMAAIRLAIEEGRLAQFAAEYYASQEVRPDQAEQPAQRSEENDESGA

SEQ ID NO: 62476 - protein, 374 aa, Zhongshania sp.
  misc_feature (1)..(374): tr|A0A3N0C711|A0A3N0C711_9GAMM Queuine tRNA-ribosyltran sferase OS=Zhongshania sp. DSW25-10 OX=2304603 GN=tgt P E=3 SV=1
MTECRMRFDVKASDGLARRGTLDFPRGKVQTPAFMPVGTYGTVKGMLPRDIKEIGAEIILGNTFHLSLRPGTEVVKAHGDLHDFTGWQGPILTDSGGFQVWSLGKLRKISEAGVSFKSPVNGSDVYLDPETSMQIQRDLGADIVMIFDECTPYPATETEARSSMELSLRWAARSKTAHEGNDAALFGIVQGGMYPELRRESLQGLKDIDFDGFAIGGLSVGEPKDEMLMVLDSLAEHMPEDKPRYLMGVGKPSDILEAVMRGVDMFDCVMPTRNARNGHLFTSTGVIKIRNASHRFNDAPLDAKCDCYTCQNFSRAYLHHLDKCKEILGAQLNTIHNLRYYQNHMAAIRLAIEEGRLAQFAEEFYREQDGRADV

SEQ ID NO: 62477 - protein, 374 aa, Zhongshania sp.; identical to SEQ ID NO: 62476
  misc_feature (1)..(374): tr|A0A2S4HGZ9|A0A2S4HGZ9_9GAMM Queuine tRNA-ribosyltran sferase OS=Zhongshania sp. ZX-21 OX=2067667 GN=tgt PE=3 SV=1

SEQ ID NO: 62478 - protein, 387 aa, Zhouia amylolytica
  misc_feature (1)..(387): tr|A0A1I6RU48|A0A1I6RU48_9FLAO Queuine tRNA-ribosyltran sferase OS=Zhouia amylolytica OX=376730 GN=tgt PE=3 SV= 1
MFIFADIEGLFMKFDLKGKDQGSKARAGVITTDHGTIETPIFMPVGTVASVKGVHQRELKEDINPDIILGNTYHLYLRPKTEILEKAGGLHKFMNWDRNILTDSGGFQVYSLSGRRKIKEEGVKFKSHIDGSYHVFTPENVMDIQRTIGADIIMAFDECTPYPCDYRYAKSSMHRTHRWLDRCVSRFNNTPSKYGYEQTLFPIVQGSTYKDLRLQSAEYIANVGAEGNAIGGLSVGEPAEEMYEMTDIVCSVLPEDKPRYLMGVGTPINILENIALGVDMFDCVMPTRNARNGMLFTAHGTINIKNKKWEDDFSPIDEMGITFVDTYYSKAYLRHLFAANEYLGKQIATIHNLGFYLWLVREARKHILAGDFYEWKNKMVKQMDKRL

SEQ ID NO: 62479 - protein, 387 aa, Zhouia amylolytica
  misc_feature (1)..(387): tr|W2UNV6|W2UNV6_9FLAO Queuine tRNA-ribosyltransferase OS=Zhouia amylolytica AD3 OX=1286632 GN=tgt PE=3 SV=1
MFIFADIEGLFMKFDLKGKDQGSKARAGVITTDHGTIETPIFMPVGTVASVKGVHQRELKEDINPDIILGNTYHLYLRPKTEILEKAGGLHKFMNWDRNILTDSGGFQVYSLSGRRKIKEEGVKFKSHIDGSYHVFTPENVMDIQRTIGADIIMAFDECTPYPCDYRYAKSSMHRTHRWLDRCVSRFNNTPSKYGYEQTLFPIVQGSTYKDLRLQSAEYIANVGAEGNAIGGLSVGEPAEEMYEMTDIVCSVLPEDKPRYLMGVGTPINILENIALGVDMFDCVMPTRNARNGMLFTAHGTINIKNKKWEDDFSPIDEMGITFVDTYYTKAYLRHLFAANEYLGKQIATIHNLGFYLWLVREARKHILAGDFYEWKNKMVKQMDKRL

SEQ ID NO: 62480 - protein, 382 aa, Zobellella denitrificans
  misc_feature (1)..(382): tr|A0A291HR45|A0A291HR45_9GAMM Queuine tRNA-ribosyltran sferase OS=Zobellella denitrificans OX=347534 GN=tgt PE =3 SV=1
MKFELQTTDGRARRGRLVFDRGVVETPAFMPVGTYGTVKGMTPEEVTATGAQILLGNTFHLWIRPGQEVMKLHGDLHDFMNWQGPILTDSGGFQVFSLGDIRKITEEGVYFRNPVNGDKIFLAPETSMEIQYDLGSDIVMIMDECTPYPATWEEAKKSMEMSLRWAKRSRDHFDKLGNKNALFGIIQGSVYEDLRDQSLEGLLDIGFDGYAVGGLAVGEPKHEMHKVLEHTCPKIPEDKPRYLMGVGKPEDLVEGVRRGIDMFDCVMPTRNARNGHLFTTEGVVKIRNAKHKTDTGPLDADCDCYTCKHYSRSYLHHLDKCNEILGARLNTIHNLRYYQRVMEGLRGAIEQGKLDDFVAEFYGRQGRPVPPLGQSAVEHGEG

SEQ ID NO: 62481 - protein, 382 aa, Zobellella denitrificans
  misc_feature (1)..(382): tr|A0A231MX70|A0A231MX70_9GAMM Queuine tRNA-ribosyltran sferase OS=Zobellella denitrificans OX=347534 GN=tgt PE =3 SV=1
MKFELQTTDGRARRGRLVFDRGVVETPAFMPVGTYGTVKGMTPEEVTATGAQILLGNTFHLWIRPGQEVMKLHGDLHDFMNWQGPILTDSGGFQVFSLGDIRKITEEGVYFRNPVNGDKIFLAPETSMEIQYDLGSDIVMIMDECTPYPATWEEAKKSMEMSLRWAKRSRDHFDKLGNKNALFGIIQGSVYEDLRDQSLEGLLEIGFDGYAVGGLAVGEPKHEMHKVLEHTCPRIPEDKPRYLMGVGKPEDLVEGVRRGIDMFDCVMPTRNARNGHLFTTEGVVKIRNAKHKTDTGPLDADCDCYTCKHYSRSYLHHLDKCNEILGARLNTIHNLRYYQRVMEGLRGAIEQGKLDDFVAEFYGRQGRPVPPLGQSAVEHGEG

SEQ ID NO: 62482 - protein, 382 aa, Zobellella endophytica
  misc_feature (1)..(382): tr|A0A2P7R3Y2|A0A2P7R3Y2_9GAMM Queuine tRNA-ribosyltran sferase OS=Zobellella endophytica OX=2116700 GN=tgt PE= 3 SV=1
MKFELQSTDGRARRGRLIFDRGVVETPAFMPVGTYGTVKGMTPEEVAGTGAQILLGNTFHLWIRPGQEVMKLHGDLHDFMNWQGPILTDSGGFQVFSLGDIRKITEEGVYFRNPVNGDKIFLSPEVSMEIQYDLGSDIVMIMDECTPYPATWEEARKSMEMSLRWARRSRDHFDQQGNKNALFGIIQGSVYEDLRDQSLEGLLDIGFDGYAVGGLAVGEPKHEMHKVLEHTCPRIPADKPRYLMGVGKPEDLVEGVRRGIDMFDCVMPTRNARNGHLFTTEGVVKIRNARHKTDTSPLDADCDCYTCKHYSRAYLYHLDKCNEILGARLNTIHNLRYYQRVMEGLRGAIEQGKLDDFVAEFYGRQGKPVPPLGQSEQTDCDH

SEQ ID NO: 62483 - protein, 382 aa, Zobellella taiwanensis
  misc_feature (1)..(382): tr|A0A2P7QG53|A0A2P7QG53_9GAMM Queuine tRNA-ribosyltran sferase OS=Zobellella taiwanensis OX=347535 GN=tgt PE=3 SV=1
MKFELQTTDGRARRGRLMFDRGVVETPAFMPVGTYGTVKGMTPEEVAATGAQILLGNTFHLWIRPGQEVMKLHGDLHDFMNWQGPILTDSGGFQVFSLGHIRKITEEGVYFRNPVNGDKIFLSPEVSMEIQYDLGSDIVMIMDECTPYPATWEEAKKSMEMSLRWAKRSRDHFDKQGNKNALFGIIQGSVYEDLRDQSLEGLLEIGFDGYAVGGLAVGEPKHEMHKVLEHTCPKIPADKPRYLMGVGKPEDLVEGVRRGIDMFDCVMPTRNARNGHLFTTDGVVKIRNAKHKTDTGPLDADCDCYTCKNYSRAYLYHLDKCNEILGARLNTIHNLRYYQRVMEGLRGAIEQGKLDDFVAEFYGRQGRPVPPLGQSEQTDCDH

SEQ ID NO: 62484 - protein, 386 aa, Zobellia galactanivorans
  misc_feature (1)..(386): tr|G0LCT0|G0LCT0_ZOBGA Queuine tRNA-ribosyltransferase OS=Zobellia galactanivorans (strain DSM 12802 / CCUG 47 099 / CIP 106680 / NCIMB 13871 / Dsij) OX=63186 GN=tgt PE=3 SV=1
MFIFAPINNILKFTLHHTDPKSKARAGTMVTDHGVIETPIFMPVGTVASVKSVHQRELKEDINPDIILGNTYHLFLRPKTEILKKAGGLHKFMGWDRNILTDSGGYQVYSLSGNRKIKEEGVKFKSHIDGTTHLFTPENVMEIQRVIGADIIMAFDECTPYPCDYRYAERSMHMTHRWLERCITHLKKTPFEYDYSQAFFPIVQGSTYTDLRKRSAEYIAGVGAEGNAIGGLSVGEPAEEMYAMTEVVCEILPEDKPRYLMGVGTPINILENIALGIDMFDCVMPTRNARNGMLFTAHGTINIKNKKWEDDFSPVDEMGITFVDLEYSKAYLRHLFVAKEYLGKQIATIHNLGFYLWLVREARKHILAGDFTEWKDRMVKQMDKRL

SEQ ID NO: 62485 - protein, 376 aa, Zobellia uliginosa
  misc_feature (1)..(376): tr|A0A1N7MX43|A0A1N7MX43_9FLAO Queuine tRNA-ribosyltran sferase OS=Zobellia uliginosa OX=143224 GN=tgt PE=3 SV= 1
MKFTLHHTDPKSKARAGTMVTDHGVIETPIFMPVGTVASVKSVHQRELKEDINPDIILGNTYHLFLRPKTEILKKAGGLHKFMGWDRNILTDSGGYQVYSLSGNRKIKEEGVKFKSHIDGTTHLFTPENVMEIQRVIGADIIMAFDECTPYPCDYRYAERSMHMTHRWLERCITHLKKTPFEYDYSQAFFPIVQGSTYTDLRKRSAEYIAGVGAEGNAIGGLSVGEPAEEMYAMTEVVCEILPEDKPRYLMGVGTPINILENIALGIDMFDCVMPTRNARNGMLFTAHGTINIKNKKWEDDFSPVDEMGITFVDLEYSKAYLRHLFVAKEYLGKQIATIHNLGFYLWLVREARKHILAGDFTEWKDRMVKQMDKRL

SEQ ID NO: 62486 - protein, 368 aa, Zoogloea ramigera
  misc_feature (1)..(368): tr|A0A4Y4CQ58|A0A4Y4CQ58_ZOORA Queuine tRNA-ribosyltran sferase OS=Zoogloea ramigera OX=350 GN=tgt PE=3 SV=1
MKYELLATDGAARRGRLTLNHGTVDTPAFMPVGTYGTVKGISPQDLRDIGAQICLGNTFHLWLRPGLEVIKAFGGLHQFMAWDGPILTDSGGFQVFSLGALRKITEEGVRFSSPVNGDKLFLTPEESMRIQKVLNSDVVMIFDECTPYPASVPEAADSMRLSLRWARRSRDEFDRLENNNALFGIVQGGMYENLRDESLAGLTDIGFHGYAIGGLSVGEPKEDMQRILHHTAPRLPVDKPRYLMGVGTPEDLVFSVQAGIDMFDCVMPTRNARNGWLFTRHGDVKIRNAVHKKDTRPIDESCDCYTCRNFSRGYLHHLNRLNEILGARLATIHNLHYYQQLMRELRDAIASGTLTDYVARFHRERAGG

SEQ ID NO: 62487 - protein, 370 aa, Zoogloea sp.
  misc_feature (1)..(370): tr|A0A5C7K740|A0A5C7K740_9RHOO Queuine tRNA-ribosyltran sferase OS=Zoogloea sp. OX=49181 GN=tgt PE=3 SV=1
MKYELLATDGAARRGRLTLNHGTVDTPAFMPVGTYGTVKGISPQDLRDIGAQICLGNTFHLWLRPGLEVMEAFGGLHQFMAWDGPILTDSGGFQVFSLGALRKITEEGVRFSSPVNGDKLFLTPEESMRIQKVLNSDVVMIFDECTPYPATVTEAADSMRLSLRWAQRSKDEFNRLENDNALFGIVQGGMYENLRDESLAGLEDVGFHGYAIGGLSVGEPKEDMQRILHHTAPRLPRDKPRYLMGVGTPEDIVFSVQAGIDMFDCVMPTRNARNGWLFTRHGDIKIRNARYKTDTRPLDESCDCYTCRNFSRGYLHHLNRLNEILGARLATIHNLHYYQQLMRDLRDAIASGTLTDYVARFHRERAGQGA

SEQ ID NO: 62488 - protein, 370 aa, Zoogloeaceae bacteirum
  misc_feature (1)..(370): tr|A0A2S0QS06|A0A2S0QS06_9RHOO Queuine tRNA-ribosyltran sferase OS=Zoogloeaceae bacteirum Par-f-2 OX=2080469 GN =tgt PE=3 SV=1
MQFELLATSGGARRGRLTLNHGLVDTPVFMPVGTYGTVKAMTPDMLAGIGAQICLGNTFHLWLRPGLEVIAAHGGLHRFMAWNKPILTDSGGFQVFSLGALRKIGEEGVKFASPIDGARLLLTPEISMQIQTVLNSDVVMIFDECTPYPATRDEAAKSMRLSQRWARRSREEFDRLENRNALFGIVQGGMYEDLRDESLAELEDIGFDGYAIGGLSVGEPKDDMQRILAHTAPRLPTNKPRYLMGVGTPEDIVAGVACGIDMFDCVMPTRNARNGWLFTRYGDIKIKNAIHKADTRPLDPSCDCYTCRNFSRAYLHHLHRTGEILGSMLNTVHNLRYYQTLTAELREAIAADRFAAYVTRFHQERAAGTA

SEQ ID NO: 62489 - protein, 373 aa, Zooshikella ganghwensis
  misc_feature (1)..(373): tr|A0A4P9VKW6|A0A4P9VKW6_9GAMM Queuine tRNA-ribosyltran sferase OS=Zooshikella ganghwensis OX=202772 GN=tgt PE= 3 SV=1
MRFETLTTDGQARRARLVFPRGVVETPTFMPVGTYGTVKGMLPKDIEAIGAQIILGNTFHLMLRPGTEIISKHGDLHDFNGWNKPILTDSGGFQVFSLGEMRKITEEGVSFRSPVDGAKVFLSPERSMEVQRALGSDIVMIFDECTPYPATESEAKKSMEMSLRWAKRSREAHGDSPSALFGIIQGGMYQHLREQSLAGLKAIDFDGYAIGGLSVGEPKNDMFRVLEGITPLMPENKPRYLMGVGTPEDLVEGVRRGVDMFDCVMPTRNARNGHLFTAAGVVKIRNAVHKHDTGPLDETCDCYTCQNFSRAYLHHLDKCGEILSSQLNTIHNLRYYQRVMAGLREAIEAGKLNDFVTAFYHARGMDVPPLTTE

SEQ ID NO: 62490 - protein, 376 aa, Zunongwangia atlantica
  misc_feature (1)..(376): tr|A0A1Y1T5D1|A0A1Y1T5D1_9FLAO Queuine tRNA-ribosyltran sferase OS=Zunongwangia atlantica 22II14-10F7 OX=118576 7 GN=tgt PE=3 SV=1
MEFELLKTDPASKARAGKITTDHGVIETPIFMPVGTVASVKGVHQTELKQEINPDIILGNTYHLYLRPKTEILKKAGGLHKFMNWDRNILTDSGGYQVYSLSGRRKIKEEGVKFKSHIDGSYHVFTPENVMEIQREIGADIIMAFDECTPYPCDYNYAKRSMHMTHRWLDRCIKHFTETPPLYGYDQTLFPIVQGSTYKDLRRQSAEYIASRNAEGNAIGGLSVGEPAEEMYAMTEVVTEILPEEKPRYLMGVGTPINILENIALGIDMFDCVMPTRNARNGMLFTAHGTINIKNKKWADDFSPIDDMGITFVDTQYSKAYVRHLFTVNEMLGKQIATIHNLGFYLWLVREARKHILAGDFRAWKDMMVKQMDKRL

SEQ ID NO: 62491 - protein, 383 aa, Zunongwangia mangrovi
  misc_feature (1)..(383): tr|A0A1I1KQQ0|A0A1I1KQQ0_9FLAO Queuine tRNA-ribosyltran sferase OS=Zunongwangia mangrovi OX=1334022 GN=tgt PE=3 SV=1
MQPLIFYMEFELLKTDPASKARAGKITTDHGVIETPIFMPVGTVASVKGVHQTELKQEINPDIILGNTYHLYLRPKTEILKKAGGLHKFMNWDRNILTDSGGYQVYSLSGRRKIKEEGVKFKSHIDGSYHVFTPENVMEIQREIGADIIMAFDECTPYPCDYNYAKRSMHMTHRWLDRCIKHFAETPPLYGYDQTLFPIVQGSTYKDLRRQSAEYIASRNAEGNAIGGLSVGEPAEEMYAMTEVVTEILPEEKPRYLMGVGTPINILENIALGIDMFDCVMPTRNARNGMLFTAHGTINIKNKKWADDFSPIDDMGITFVDTQYSKAYVRHLFTVNEMLGKQIATIHNLGFYLWLVREARKHILAGDFRTWKDMMVKQMDKRL

SEQ ID NO: 62492 - protein, 376 aa, Zunongwangia profunda
  misc_feature (1)..(376): tr|D5BH67|D5BH67_ZUNPS Queuine tRNA-ribosyltransferase OS=Zunongwangia profunda (strain DSM 18752 / CCTCC AB 2 06139 / SM-A87) OX=655815 GN=tgt PE=3 SV=1
MEFELLKTDPASKARAGKITTDHGVIETPIFMPVGTVASVKGVHQTELKQEINPDIILGNTYHLYLRPKTGILKKAGGLHKFMNWDRNILTDSGGYQVYSLSGRRKIKEEGVKFKSHIDGSYHVFTPENVMEIQREIGADIIMAFDECTPYPCDYNYAKRSMHMTHRWLDRCIKHFGETPPLYGYDQTLFPIVQGSTYKDLRRQSAEYIASRNAEGNAIGGLSVGEPAEEMYAMTEVVTEILPEDKPRYLMGVGTPINILENIALGIDMFDCVMPTRNARNGMLFTAHGSINIKNKKWEDDFSPIDDMGITFVDTQYSKAYVRHLFTVNEMLGKQIATIHNLGFYLWLVREARKHILAGDFRAWKDMMVKQMDKRL

SEQ ID NO: 62493 - protein, 112 aa, Zunongwangia profunda
  misc_feature (1)..(112): tr|A0A3D5IYG3|A0A3D5IYG3_9FLAO tRNA guanosine(34) trans glycosylase Tgt (Fragment) OS=Zunongwangia profunda OX= 398743 GN=tgt PE=4 SV=1
LGIDMFDCVMPTRNARNGMLFTAHGSINIKNKKWEDDFSPIDDMGITFVDTQYSKAYVRHLFTVNEMLGKQIATIHNLGFYLWLVREARKHILAGDFRAWKDMMVKQMDKRL

SEQ ID NO: 62494 - protein, 376 aa, Zunongwangia sp.; identical to SEQ ID NO: 62492
  misc_feature (1)..(376): tr|A0A2E0NTN5|A0A2E0NTN5_9FLAO Queuine tRNA-ribosyltran sferase OS=Zunongwangia sp. OX=1965325 GN=tgt PE=3 SV=1

SEQ ID NO: 62495 - protein, 378 aa, Zymobacter palmae
  misc_feature (1)..(378): tr|A0A348HHJ1|A0A348HHJ1_9GAMM Queuine tRNA-ribosyltran sferase OS=Zymobacter palmae OX=33074 GN=tgt PE=3 SV=1
MREECFMHFERIAQDGKARRGRLSFPRGTVETPAFMPVGTYGTVKGMTPHDIEKIGAEIILGNTFHLWLRPGMEVMETHGDLHDFSQWQRPILTDSGGFQVFSLGEMRKITEEGVHFRSPVDGSKVFMGPEESMAVQRSLGSDIVMIFDECTPYPATYEQAKDSMELSLRWAQRSRTAHGSSPSALFGIIQGGMYKELRERSLKGLVEIGFDGLAIGGLSVGEPKEEMMKVLDYLPTMMPSHLPRYLMGVGKPEDLVEGVRRGVDMFDCVMPTRNARNGHLFTFDGVVRIRNASHRHSTAPLEADCDCYTCQHFSRGYLHHLDRCGEMLGAQLNTIHNLRHYQRLMAGLRGAIEAGTLTDYVENFYARRGQPVPPLAD

SEQ ID NO: 62496 - protein, 395 aa, Zymomonas mobilis
  misc_feature (1)..(395): tr|A0A2R9NVA6|A0A2R9NVA6_ZYMMB Queuine tRNA-ribosyltran sferase OS=Zymomonas mobilis subsp. mobilis NRRL B-1252 6 OX=1194424 GN=tgt PE=3 SV=1
MMTAVKGRNVVEATAQETDRPRFSFSIAAREGKARTGTIEMKRGVIRTPAFMPVGTAATVKALKPETVRATGADIILGNTYHLMLRPGAERIAKLGGLHSFMGWDRPILTDSGGYQVMSLSSLTKQSEEGVTFKSHLDGSRHMLSPERSIEIQHLLGSDIVMAFDECTPYPATPSRAASSMERSMRWAKRSRDAFDSRKEQAENAALFGIQQGSVFENLRQQSADALAEIGFDGYAVGGLAVGEGQDEMFRVLDFSVPMLPDDKPHYLMGVGKPDDIVGAVERGIDMFDCVLPTRSGRNGQAFTWDGPINIRNARFSEDLKPLDSECHCAVCQKWSRAYIHHLIRAGEILGAMLMTEHNIAFYQQLMQKIRDSISEGRFSQFAQDFRARYFARNS

SEQ ID NO: 62497 - protein, 387 aa, Zymomonas mobilis
  misc_feature (1)..(387): tr|F8ESG0|F8ESG0_ZYMMT Queuine tRNA-ribosyltransferase OS=Zymomonas mobilis subsp. pomaceae (strain ATCC 29192 / JCM 10191 / NBRC 13757 / NCIMB 11200 / NRRL B-4491) OX=579138 GN=tgt PE=3 SV=1
MTEAVAKEEISHPRFTFSITARDGKARTGSIAMKRGVIRTPAFMPVGTAATVKAMKPEAVSATGADIILGNTYHLMLRPGAERLAKLGGLHQFMGWDRPILTDSGGYQVMSLSSLTKKSEEGVTFKSHLDGSRHILTPERSIEIQRLLGSDIVMAFDECTPYPATPTLAASSMERSMRWAKRSREAFDKNKDQSVNSALFGIQQGSVFENLRKKSADALAEIGFDGYAVGGLAVGEGQEAMFRVLDFSVPMLPDDKPHYLMGVGKPDDIVGAVERGIDMFDCVLPTRSGRNGQAFTWDGPINIRNARFAEDMKPLDSSCHCVVCQKWSRAYIHHLIRAGEILGAMLMTEHNIAFYQQLMQGLRMAIEEGRLSDFATAFRARYRAKNN

SEQ ID NO: 62498 - protein, 375 aa, Escherichia coli; identical to SEQ ID NO: 50999
  misc_feature (1)..(375): sp|P0A847|TGT_ECOLI Queuine tRNA-ribosyltransferase OS= Escherichia coli (strain K12) OX=83333 GN=tgt PE=1 SV=1

SEQ ID NO: 62499 - protein, 375 aa, Escherichia coli; identical to SEQ ID NO: 50999
  misc_feature (1)..(375): sp|P0A849|TGT_ECO57 Queuine tRNA-ribosyltransferase OS= Escherichia coli O157:H7 OX=83334 GN=tgt PE=3 SV=1

SEQ ID NO: 62500 - protein, 359 aa, [Actinobacillus] rossii
  misc_feature (1)..(359): tr|A0A380U1S8|A0A380U1S8_9PAST S-adenosylmethionine:tRN A ribosyltransferase-isomerase OS=[Actinobacillus] ross ii OX=123820 GN=queA PE=3 SV=1
MRLSDFYFDLPDELIARYPKPERTASRLLQLNGENGDISHRTFSDVLDLINEGDLLIFNNTRVIPARMYGRKLSGGKIEVLVERVLSETTFLAHVRSSKSPKVGAELILGEDKLGDGHGVKATMIGRQEALFELKIADKSTALLDVLQKIGHMPLPPYIDRPDEDADQERYQTVYNKVPGAVAAPTAGLHFDNELLAKLKAKGVNFAFVTLHVGAGTFQPVRVEKIEDHHMHAEYAEVSQEVCDAILSTKAAGKRVIAVGTTSVRSIESAALEAEENGSSQLIEPFFSDTSIFIYPGKKFRVIDCLITNFHLPESTLIMLVSAFAGYEHTMNAYKSAVENRYRFFSYGDAMFITKKTTV

SEQ ID NO: 62501 - protein, 343 aa, [Arcobacter] porcinus
  misc_feature (1)..(343): tr|A0A1C0AZV4|A0A1C0AZV4_9PROT S-adenosylmethionine:tRN A ribosyltransferase-isomerase OS=[Arcobacter] porcinus OX=1935204 GN=queA PE=3 SV=1
MNDNLKTSSYDFFLPNEQIATKAANPADSAKLLVYNRATNEITHTIFRNIMDFLPEELTIFLNDTKVIKARIFGKKSTGAKIELLLNKALFMNRFSVYIKGKVNINTELFFDGNLCAKVIELNEDGSRVVEFYKKENEKQKLDFSSLVKILNKIGHIPLPPYINREDTKEDEKDYQTLFAKKDGAVAAPTASLHFTPELLKKIENRYGLNYLTLHVGAGTFKPVDVEDILSHPMHSEYFEISKECKDKIDSAKNILAVGTTVTRTLEFYARRNMICGECDLFLNPLNKPIIVNHLLTNFHLPKSTLIMLVASFIGLEKTLELYDISIKNNYRFYSYGDAMLII

SEQ ID NO: 62502 - protein, 343 aa, [Arcobacter] porcinus
  misc_feature (1)..(343): tr|A0A5C2HIF4|A0A5C2HIF4_9PROT S-adenosylmethionine:tRN A ribosyltransferase-isomerase OS=[Arcobacter] porcinus OX=1935204 GN=queA PE=3 SV=1
MNDNLKTSSYDFFLPNEQIATKAANPADSAKLLVYNRATNEITHTIFRNIMDFLPEELTIFLNDTKVIKARIFGKKSTGAKIELLLNKALFMNRFSVYIKGKVNINTELFFDGNLCAKVIELNEDGSRVVEFYKKENEKQKLDFSSLVEILNKIGHIPLPPYINREDTKEDEKDYQTLFAKKYGAVAAPTASLHFTPELLEKMKQKYGLNYLTLHVGAGTFKPVDVEDILSHPMHSEYFEISKECKDKIDSAKNILAVGTTVTRTLEFYARKNMICGECDLFLNPSNKPIIVNHLLTNFHLPKSTLIMLVASFIGLEKTLELYDIAIKNDYRFYSYGDAMLII

SEQ ID NO: 62503 - protein, 347 aa, [Bacillus] sp.
  misc_feature (1)..(347): tr|A0A150YL11|A0A150YL11_9BACI S-adenosylmethionine:tRN A ribosyltransferase-isomerase OS=[Bacillus] sp. KCTC 1 3219 OX=1811976 GN=queA PE=3 SV=1
MKVEDFDFYLPEQLIAQTPLLDRTASRLLVVNPHSKELEHHQFAHILEELQAGDCLVLNDTRVLPARLIGVKEDTGANIEILLLKQTNEDEWETLVKPAKRVKIGTVITFGEGLLHAECVAELEHGGRLFQFQYEGIFYEILERLGEMPLPPYIREKLDNQERYQTVYAKERGSAAAPTAGLHFTEQLLEAIRAKGVEIAFVTLHVGLGTFRPVSVESIEDHDMHAEFYSISEQTASIINRTKANGGNIIAVGTTSTRTLETVASKNNGKIIAEQGWTSIFIYPGYEFKAVDGLITNFHLPKSTLVMLVSALASKDSILHAYKEAVEENYRFFSFGDAMFIRPKVKP

SEQ ID NO: 62504 - protein, 341 aa, [Bacteroides] coagulans
  misc_feature (1)..(341): tr|A0A2U1E2G7|A0A2U1E2G7_9FIRM S-adenosylmethionine:tRN A ribosyltransferase-isomerase OS=[Bacteroides] coagula ns OX=46507 GN=queA PE=3 SV=1
MIRVDDYDFDLPEELIAQTPLKERDKSRLMVVDKKGSEPKDYVFSDLVDLLDEGDILVFNDSRVIPARLFGHRKDKEEKVEFLLLKELGDDRWQCLSKPGKKAKVGTEFFFGDELSLVVDEVDEEGLRYVTLKYDGILYEILDRLGTMPLPPYIHEKLEDQEMYQTVYAKDPGSAAAPTAGLHFTDELLEKLKNKGIEELFITLNVGLGTFRPVTSEFIEDHKMHEELYTVSEEVAAKINAAKKAGKKVVAVGTTTIRTLESAADENGEVRAGSRWTNIFIYPGYKFKVVDKLITNFHLPKSTLLMLISAIMGRENALHAYKIAVDRKYRFFSFGDAMFIE

SEQ ID NO: 62505 - protein, 200 aa, [Bacteroides] pectinophilus
  misc_feature (1)..(200): tr|B7AT74|B7AT74_9FIRM S-adenosylmethionine:tRNA ribosy ltransferase-isomerase OS=[Bacteroides] pectinophilus A TCC 43243 OX=483218 GN=BACPEC_01343 PE=3 SV=1
MMELHDFYYDLPQELIAQDPLSDRSASRLMLLDKNTGEIEHKIFKDIIDYLNPGDCLVINDTKVIPARLIGERVGTGATIEVLLLKRKEDMKDVWEVLVKPGKKAKIGTKISFGDGRLVAEVIDIVEEGNRLIQFTYEGIFEEILDELGQMPLPPYITHKLQDKNRYQTVYAKHEGSAAAPTAGLHFTKELLERIQEKRC

SEQ ID NO: 62506 - protein, 118 aa, [Bacteroides] pectinophilus
  misc_feature (1)..(118): tr|B7AT75|B7AT75_9FIRM S-adenosylmethionine:tRNA ribosy ltransferase-isomerase OS=[Bacteroides] pectinophilus A TCC 43243 OX=483218 GN=BACPEC_01344 PE=3 SV=1
MHSEYYVVTQEAADKINNAKADGGRVICVGTTSCRTIESASDDDGRVKACSGWTEIFIYPGYKFKVLDALITNFHLPESTLLMLVSALAGREHILAAYKTAVEEKYRFFSFGDAMFIH

SEQ ID NO: 62507 - protein, 342 aa, [Brevibacterium] frigoritolerans
  misc_feature (1)..(342): tr|A0A4R6AKZ9|A0A4R6AKZ9_9BACI S-adenosylmethionine:tRN A ribosyltransferase-isomerase OS=[Brevibacterium] frig oritolerans OX=450367 GN=queA PE=3 SV=1
MKVDLFDFNLPEELIAQVPLLERDASKLMVLDKETGSIQHEQFRSIIDYFHEGDCLVLNNTRVLPARLIGEKKDTGAKIELLLLKQEQGDVWEVLAKPAKRVKIGTELVFGDGILHAVCTGESEHGGRLLEFKYEGIFYEALDSLGKMPLPPYIKEQLDDQERYQTVFSRERGSAAAPTAGLHFTEQILDQLKDKGVHIVFITLHVGLGTFRPVNADVVEEHEMHAEFYQMSAGTAQLLNQVRAEGGRIISVGTTSTRTLETIASKNDGTFIEDSGWTNIFIYPGYEFRAIDGMVTNFHLPKSSLIMLVSALATREHVMNAYETAVREKYRFFSFGDAMLII

SEQ ID NO: 62508 - protein, 342 aa, [Brevibacterium] frigoritolerans
  misc_feature (1)..(342): tr|A0A561DLA0|A0A561DLA0_9BACI S-adenosylmethionine:tRN A ribosyltransferase-isomerase OS=[Brevibacterium] frig oritolerans OX=450367 GN=queA PE=3 SV=1
MKLDMFDFHLPEELIAQVPLEDREASRLMVLDKETGKLQHDVFSHITEYIKPGDCLVLNDTKVLPARLYGSKEGTGAKIEVLLLKQEHDDVWETLVKPAKRIKEGSTIVFGDGKLSAVCTGVLEHGGRILEFKYDGIFYEILEKLGEMPLPPYIKEQLDDQDRYQTVYARERGSAAAPTAGLHFTEDLLEKLKGMGVHIAFITLHVGLGTFRPVSVDDIDSHEMHSEFYQMTEGTARLLNDVKEKGGKIITVGTTSTRTLETIASRNDGVFKEENGWTSIFIYPGYEFKGIDAMITNFHLPKSTLIMLISALAGREHVLHAYEAAVEEKYRFFSFGDAMLIK

SEQ ID NO: 62509 - protein, 349 aa, [Clostridium] aldenense
  misc_feature (1)..(349): tr|A0A3E2WI85|A0A3E2WI85_9FIRM S-adenosylmethionine:tRN A ribosyltransferase-isomerase OS=[Clostridium] aldenen se OX=358742 GN=queA PE=3 SV=1
MDVKDFYFDLPEELIAQDPLKDRSSSRLLVLDRDTGEVQHRVFRDIVEYLRPGDCLVINDTKVIPARLFGIKKDTGAKIEILLLKRRENDIWETLVRPGKKCRPGTVIEFGEGLLSGTVVETVDDGNRLIRFSYKGIFEEILDQLGQMPLPPYITHELKDKNRYQTVYAKHEGSAAAPTAGLHFTNELLKQIEEMGVKVAHVTLHVGLGTFRPVKVENVLDHHMHSEFYVVEESEARKVNDTKAAGGRVICVGTTSCRTVESASTDDGILQAKTGWTEIFIYPGYRFKVLDALITNFHLPESTLVMLVSALAGRGHILDAYKEAVKERYRFFSFGDAMFIASSPVAQKR

SEQ ID NO: 62510 - protein, 349 aa, [Clostridium] aldenense
  misc_feature (1)..(349): tr|A0A413VUM6|A0A413VUM6_9FIRM S-adenosylmethionine:tRN A ribosyltransferase-isomerase OS=[Clostridium] aldenen se OX=358742 GN=queA PE=3 SV=1
MDVKDFYFDLPEELIAQDPLKERSSSRLLVLDKDTGEVQHRVFRDIVEYLRPGDCLVINDTKVIPARLFGIKKDTGAKIEILLLKRRENDIWETLVRPGKKCRPGTVIEFGEGLLSGTVVETVDDGNRLIRFSYKGIFEEILDQLGQMPLPPYITHELKDKNRYQTVYAKHEGSAAAPTAGLHFTNELLKQIEDMGVKVAHVTLHVGLGTFRPVKVENVLDHHMHSEFYVVEESEARKVNDTKAAGGRVICVGTTSCRTVESASTDDGILQAKTGWTEIFIYPGYRFKVLDALITNFHLPESTLVMLVSALAGREHILDAYKEAVKERYRFFSFGDAMFIASSPVAQKR

SEQ ID NO: 62511 - protein, 346 aa, [Clostridium] algidixylanolyticum
  misc_feature (1)..(346): tr|A0A419T3Z5|A0A419T3Z5_9FIRM S-adenosylmethionine:tRN A ribosyltransferase-isomerase OS=[Clostridium] algidix ylanolyticum OX=94868 GN=queA PE=3 SV=1
MNVKDFDFDLPQELIAQDPLLDRSSSRLLVLDKQTGEIKHKHFRDILSYLKEGDCLVINDTKVIPARLFGVKEGTEAKIEILLLKRRENDIWETLVKPGKKAKEGTVISFGDGLLKGTVIDVVEEGNRLIQFSYDGIFEEILDQLGQMPLPPYITHQLQDKNRYQTVYAKHEGSAAAPTAGLHFTKELLEEIEKKGITIARVTLHVGLGTFRPVKVDEIESHHMHSEFYVVEEAEAKKVNDAKKNGGRIICVGTTSCRTVESASTEEGILKAGSGWTEIFIYPGYRFKTLDCLITNFHLPESTLVMLVSALAGREHVLHAYHEAIKERYRFFSFGDAMFLADLQEN

SEQ ID NO: 62512 - protein, 341 aa, [Clostridium] aminophilum
  misc_feature (1)..(341): tr|A0A1I6KDT2|A0A1I6KDT2_9FIRM S-adenosylmethionine:tRN A ribosyltransferase-isomerase OS=[Clostridium] aminoph ilum OX=1526 GN=queA PE=3 SV=1
MNVKDFDYDLPQELIAQDPLEDRASSRLLVLDKDTGKTEHKIFHDIIDYLNPGDALVINDTKVIPARLHGVKEDTGAHIEVLLLTRKKDDIWETLVKPGKKCKPGTVISFGDGLLKGTVVDVIEDGNRLIQFQYEGIFEEILDQLGQMPLPPYITHQLKDKNRYQTVYAEHEGSAAAPTAGLHFTKELLQRIEDKGVKIVHVTLHVGLGTFRPVKVDTIEEHQMHSEFYIVSQEAADTVNAVKKAGGRIICVGTTSCRTLESAADENGILHAKSSWTSIFIYPGYKFKILDCLITNFHLPQSTLVMLVSALAGREHILNAYKEAIAERYRFFSFGDAMFIH

SEQ ID NO: 62513 - protein, 318 aa, [Clostridium] asparagiforme
  misc_feature (1)..(318): tr|C0D9T2|C0D9T2_9FIRM S-adenosylmethionine:tRNA ribosy ltransferase-isomerase (Fragment) OS=[Clostridium] aspa ragiforme DSM 15981 OX=518636 GN=queA PE=3 SV=1
AVTHRVFRDIVEYLRPGDCLVINDTKVIPARLMGVKADTGAKIEVLLLKRRENDIWETLVKPGKKAKPGTELSFGDGLLTGTVVETVDDGNRLIQFHYEGIFEEILDQLGQMPLPPYITHQLKDKNRYQTVYAKHEGSAAAPTAGLHFTNELLKEIGDMGVKIAHVTLHVGLGTFRPVKVENVLDHHMHSEFYVVEESEAAKVNETKAAGGRVICVGTTSCRTVESASTEDGVLKAGTGWTEIFIYPGYRFKILDALITNFHLPESTLVMLVSALAGREHILAAYEEAIRERYRFFSFGDAMFIAPDPVALPRKTEEK

SEQ ID NO: 62514 - protein, 354 aa, [Clostridium] asparagiforme
  misc_feature (1)..(354): tr|A0A413FBQ7|A0A413FBQ7_9FIRM S-adenosylmethionine:tRN A ribosyltransferase-isomerase OS=[Clostridium] asparag iforme OX=333367 GN=queA PE=3 SV=1
MDVKDFNFDLPQELIAQDPLDDRASSRLLVLDKDTGAVTHRVFRDIVEYLRPGDCLVINDTKVIPARLMGVKADTGAKIEVLLLKRRENDIWETLVKPGKKAKPGTELSFGDGLLTGTVVETVDDGNRLIQFHYEGIFEEILDQLGQMPLPPYITHQLKDKNRYQTVYAKHEGSAAAPTAGLHFTNELLKEIGDMGVKIAHVTLHVGLGTFRPVKVENVLDHHMHSEFYVVEESEAAKVNETKAAGGRVICVGTTSCRTVESASTEDGVLKAGTGWTEIFIYPGYRFKILDALITNFHLPESTLVMLVSALAGREHILAAYEEAIRERYRFFSFGDAMFIAPDPVALPRKTEEK

SEQ ID NO: 62515 - protein, 349 aa, [Clostridium] bolteae
  misc_feature (1)..(349): tr|R0AMS0|R0AMS0_9FIRM S-adenosylmethionine:tRNA ribosy ltransferase-isomerase OS=[Clostridium] bolteae 90B8 OX =997897 GN=queA PE=3 SV=1
MDVKDFDYELPEELIAQDPLEDRSASRLMVLDRETGEIQHRIFKDITEYLRPGDCLVINDTKVIPARLFGVKKDTGAKIEILLLKRRENDIWETLVRPGKKAKPGTVIEFGEGLLTGTVVDTVDDGNRLIQFHYKGIFEEILDQLGQMPLPPYITHQLKDKNRYQTVYARHEGSAAAPTAGLHFTQELLAEIEGMGVKIAHVTLHVGLGTFRPVKVENVQDHHMHSEFYIVEESEAKKVNDTRAAGGRVICVGTTSCRTVESASTEDGVLKAGTGWTEIFIYPGYRFKVLDALITNFHLPQSTLVMLVSALAGREHILDAYREAVKEGYRFFSFGDAMFIAAHPAAEKR

SEQ ID NO: 62516 - protein, 349 aa, [Clostridium] bolteae
  misc_feature (1)..(349): tr|A0A412YU67|A0A412YU67_9FIRM S-adenosylmethionine:tRN A ribosyltransferase-isomerase OS=[Clostridium] bolteae OX=208479 GN=queA PE=3 SV=1
MDVKDFDYELPEELIAQDPLEDRSASRLMVLDRETGEIQHRIFKDITEYLRPGDCLVINDTKVIPARLFGVKKDTGAKIEILLLKRRENDIWETLVRPGKKAKPGTVIEFGEGLLTGTVVDTVDDGNRLIQFHYKGIFEEILDQLGQMPLPPYITHQLKDKNRYQTVYARHEGSAAAPTAGLHFTQELLAEIEGMGVKIAHVTLHVGLGTFRPVKVENVQDHHMHSEFYIVEESEAKKVNDTRVAGGRVICVGTTSCRTVESASTEDGVLKAGTGWTEIFIYPGYRFKVLDALITNFHLPQSTLVMLVSALAGREHILDAYREAVKEGYRFFSFGDAMFIAAHPAAEKR

SEQ ID NO: 62517 - protein, 349 aa, [Clostridium] celerecrescens
  misc_feature (1)..(349): tr|A0A084JMB2|A0A084JMB2_9FIRM S-adenosylmethionine:tRN A ribosyltransferase-isomerase OS=[Clostridium] celerec rescens OX=29354 GN=queA PE=3 SV=1
MNVRDFYFDLPQELIAQDPLEDRSASRLLVLDKHTGEIKHRHFRDVLSYLRKGDCLVINDTKVIPARLFGVKEGTEAKIEILLLKRRENDIWETLVKPGKKAKVGTVISFGDGLLKGTVIDVVEEGNRLIQFSYEGIFEEILDRLGQMPLPPYITHQLKDKNRYQTVYAKHEGSAAAPTAGLHFTKELLEEIVAMGVTIAHVTLHVGLGTFRPVKVDEIESHHMHSEFYIIEEEEAKKVNEAKKNGGRIVCVGTTSCRTVESASTEEGILKAGSGWTEIFIYPGYRFKILDCLITNFHLPESTLVMLVSALAGRDHVLHAYEEAIKERYRFFSFGDAMFLTDLHHEEES

SEQ ID NO: 62518 - protein, 349 aa, [Clostridium] celerecrescens
  misc_feature (1)..(349): tr|A0A2M8Z7X1|A0A2M8Z7X1_9FIRM S-adenosylmethionine:tRN A ribosyltransferase-isomerase OS=[Clostridium] celerec rescens 18A OX=1286362 GN=queA PE=3 SV=1
MNVRDFYFDLPQELIAQDPLEDRSASRLLVLDKHTGEIQHRHFRDILSYLRKGDCLVINDTKVIPARLFGVKEGTEAKIEILLLKRKENDIWETLVKPGKKAKVGTVITFGEGLLKGTVIDVVEEGNRLIQFSYEGIFEEILDRLGQMPLPPYITHQLKDKNRYQTVYAKHEGSAAAPTAGLHFTKELLEEIEDMGVAIAHVTLHVGLGTFRPVKVDEIEAHHMHSEFYIIEEEEAKKVNEAKQNGGRIVCVGTTSCRTVESASTEEGILKAGSGWTEIFIYPGYRFTILDCLITNFHLPESTLVMLVSALAGRDHVLHAYAEAIKERYRFFSFGDAMLLTDLRYEGES

SEQ ID NO: 62519 - protein, 341 aa, [Clostridium] cellulosi
  misc_feature (1)..(341): tr|A0A078KSP7|A0A078KSP7_9FIRM S-adenosylmethionine:tRN A ribosyltransferase-isomerase OS=[Clostridium] cellulo si OX=29343 GN=queA PE=3 SV=1
MKKSDFYYDLPEELIAQEPLKQRDASRLMTLNRKTGETGDYHFYDIVDMLNPSDCLILNDSRVLPARIYGVKEGTGGHIEFLLLTQKGKDTWEVLLKPGRIAKPGAKFIFGDGLLKAEILEIVEGGNRIVKFTYDGNFFELLEKIGEMPLPHYIKHKLEDKERYQTVYSKKPGSAAAPTAGLHFTPELLERIKAKGVKIGFVTLHVGVGTFRPVKTENIEDHVMHFEHYELPQETADLILETKKKGGRVIAVGTTSCRTLETVAHLDGGIKASEGWTGIFIYPGYEFKAIDALITNFHLPESTLIMLVSAFAGREHVLAAYEKAIKEKYRFYSFGDAMFIY

SEQ ID NO: 62520 - protein, 341 aa, [Clostridium] cf.
  misc_feature (1)..(341): tr|D6DHB8|D6DHB8_CLOSC S-adenosylmethionine:tRNA ribosy ltransferase-isomerase OS=[Clostridium] cf. saccharolyt icum K10 OX=717608 GN=queA PE=3 SV=1
MDVKDFYFDLPQELIAQDPLEDRASSRLLVLDRSTGEVEHRKFRDILEYLNPGDCLVINDTKVIPARLIGSKEGTDAKIEVLLLKRKENDIWETLVKPGKKAKPGTVIRFGDGILKGTVVDVVEEGNRLIQFSYEGIFEEILDQLGQMPLPPYITHQLKDKNRYQTVYAKHEGSAAAPTAGLHFTKELLQEIEDRGVKIAHVTLHVGLGTFRPVKVENVLDHHMHSEFYVVEESEAEKINSTKREGGRVICVGTTSCRTIESASDENGVLKAGSGWTDIFIYPGYQFKILDCLITNFHLPESTLVMLVSALAGREHVLAAYEEAVKERYRFFSFGDAMFIH

SEQ ID NO: 62521 - protein, 349 aa, [Clostridium] citroniae
  misc_feature (1)..(349): tr|A0A3E2VEN0|A0A3E2VEN0_9FIRM S-adenosylmethionine:tRN A ribosyltransferase-isomerase OS=[Clostridium] citroni ae OX=358743 GN=queA PE=3 SV=1
MDVKDFYFDLPEELIAQDPLEDRSSSRLLVLDKDTGEIRHRVFRDIVEYLRPGDCLVINDTKVIPARLFGTKKDTGAKIEILLLKRRENDIWETLVRPGKKAKPGTVIDFGEGLLTGTVIDTVDDGNRLIRFSYKGIFEEILDQLGQMPLPPYITHQLQDKNRYQTVYAKHEGSAAAPTAGLHFTKELLKQIEDMGVKIAHVTLHVGLGTFRPVKVENVLDHHMHSEFYVVEESEARKVNDTKAAGGRVICVGTTSCRTVESASTQEGILEAKTGWTEIFIYPGYRFKVLDALITNFHLPESTLVMLVSALAGREHILNAYQEAVKERYRFFSFGDAMFIASDPKTGNR

SEQ ID NO: 62522 - protein, 349 aa, [Clostridium] citroniae
  misc_feature (1)..(349): tr|A0A0J9BU53|A0A0J9BU53_9FIRM S-adenosylmethionine:tRN A ribosyltransferase-isomerase OS=[Clostridium] citroni ae WAL-19142 OX=742734 GN=queA PE=3 SV=1
MDVKDFYFDLPEELIAQDPLEDRSSSRLLVLDKDTGEIRHRVFRDIVEYLRPGDCLVINDTKVIPARLFGTKKDTGAKIEILLLKRRENDIWETLVRPGKKAKPGTVIDFGEGLLTGTVIDTVDDGNRLIRFSYKGIFEEILDQLGQMPLPPYITHQLQDKNRYQTVYAKHEGSAAAPTAGLHFTKELLKQIEDMGVKIAHVTLHVGLGTFRPVKVENVLDHHMHSEFYVVEESEARKVNDTKAAGGRVICVGTTSCRTVESASTQEGILEAKTGWTEIFIYPGYRFKVLDALITNFHLPESTLVMLVSALAGREHILNAYQEAVKERYRFFSFGDAMFIASDPKTGNQ

SEQ ID NO: 62523 - protein, 354 aa, [Clostridium] clostridioforme
  misc_feature (1)..(354): tr|A0A227LWM7|A0A227LWM7_9FIRM S-adenosylmethionine:tRN A ribosyltransferase-isomerase OS=[Clostridium] clostri dioforme OX=1531 GN=queA PE=3 SV=1
MDVKDFDYELPEELIAQDPLEDRSASRLMVLDRETGEIQHRIFKDITQYLRPGDCLVINDTKVIPARLFGVKKDTGAKIEILLLKRGENDIWETLVRPGKKAKPGTVIEFGEGLLTGTVVDTVDDGNRLIQFYYKGIFEEILDQLGQMPLPPYITHQLMDKNRYQTVYARHEGSAAAPTAGLHFTQELLDEIEGMGVKIAHVTLHVGLGTFRPVKVENVQDHHMHSEFYIVEESEAKKVNDTKAAGGRVICVGTTSCRTVESASTEDGVLKSGNGWTEIFIYPGYRFKVLDALITNFHLPQSTLVMLVSALAGREHILNAYRKAVKERYRFFSFGDAMFIAAHPAAEKRQGLWE

SEQ ID NO: 62524 - protein, 354 aa, [Clostridium] clostridioforme
  misc_feature (1)..(354): tr|A0A174T2Y0|A0A174T2Y0_9FIRM S-adenosylmethionine:tRN A ribosyltransferase-isomerase OS=[Clostridium] clostri dioforme OX=1531 GN=queA PE=3 SV=1
MDVKDFDYELPEELIAQDPLEDRSASRLMVLDRETGEIQHRIFKDITQYLRPGDCLVINDTKVIPARLFGVKKDTGAKIEILLLKRGENDIWETLVRPGKKAKPGTVIEFGEGLLTGTVVDTVDDGNRLIQFYYKGIFEEILDQLGQMPLPPYITHQLKDKNRYQTVYARHEGSAAAPTAGLHFTQELLDEIEGMGVKIAHVTLHVGLGTFRPVKVENVQDHHMHSEFYIVEESEAKKVNDTKAAGGRVICVGTTSCRTVESASTEDGVLKSGTGWTEIFIYPGYRFKVLDALITNFHLPQSTLVMLVSALAGREHILNAYREAVKERYRFFSFGDAMFIAAHPAAEKRQGLWE

SEQ ID NO: 62525 - protein, 341 aa, [Clostridium] cocleatum
  misc_feature (1)..(341): tr|A0A1I0C6X2|A0A1I0C6X2_9FIRM S-adenosylmethionine:tRN A ribosyltransferase-isomerase OS=[Clostridium] cocleat um OX=69824 GN=queA PE=3 SV=1
MKLSEFDFNLPEELIAQTPLDKRDTSRLMVLNRKLQTIEHKHFYDLIDYLKPGDILVRNNTKVIPARLFGIKEETNGHVEVLLLKDQGNDNWECLVGNARIVKVDTIIKFGDGLLKARCIEIKDEGIRVFKMIYDGIFYEILDQLGTMPLPPYIKEKLNDQNRYQTVYAKIEGSAAAPTAGLHFTDEIITKIKDKGIEILDVTLHVGLGTFRPVKVDDVLDHHMHSEYYMIEPDVARKLNAAKNNGQRIIAVGTTSTRTLEANMQKYGKFKATHENTDIFIYPGYKYKAIDCLITNFHLPKSTLLMLISAFSNKEFIFKAYQEAINEKYRFFSFGDSMLII

SEQ ID NO: 62526 - protein, 343 aa, [Clostridium] fimetarium
  misc_feature (1)..(343): tr|A0A1I0MQF0|A0A1I0MQF0_9FIRM S-adenosylmethionine:tRN A ribosyltransferase-isomerase OS=[Clostridium] fimetar ium OX=99656 GN=queA PE=3 SV=1
MNKEEFFYELPEALIAQDPLSDRSSSRLMVLDKNTGEIRHKIFKDIIDYLEPNDCLVINDTKVIPARLIGERVGTGATIEVLLLKRKPDEKDIWEVLVKPGKKAKVGTEISFGDGKLVAKVIDIVEEGNRLIQFSYNGIFEEILDELGQMPLPPYITHKLEDKNRYQTVYAKYQGSAAAPTAGLHFTKELLGKIKEKGVTIASVTLHVGLGTFRPVKEENILEHHMHSEFYMINEEAAKKINETKKNGGRIIAVGTTSTRTLESAAKEDGTIEASSGWTEIFIYPGYTFKSIDALITNFHLPESTLIMLISALAGREHVLNAYATAVEEKYRFFSFGDAMLIH

SEQ ID NO: 62527 - protein, 350 aa, [Clostridium] hiranonis
  misc_feature (1)..(350): tr|B6FYF4|B6FYF4_9FIRM S-adenosylmethionine:tRNA ribosy ltransferase-isomerase OS=[Clostridium] hiranonis DSM 1 3275 OX=500633 GN=queA PE=3 SV=1
MIIRKEERALKTSDFNFDLPQELIAQTPIEDRSASRLMVLDKETGEIEHKIFRDIKEYLKPGDCLVLNDTRVIPARLIGEKVDTGGKIEFLLLKRNTDDTWESLVKPGKRAKIGTKFSFGGGKLIGEVVGMADEGARIIKFHYDGIFEEILDELGNMPLPPYITEKLEEKERYQTVYSKHNGSAAAPTAGLHFTNELLEEIKEMGVDIAFVTLHVGLGTFRPVKVDDVLNHEMHSEFYMVTQEAADKINKAKENGNRVICVGTTSCRTIESAAEEDGHMTAKSGWTNIFIYPGYKFKVLDNLITNFHLPESTLIMLVSALCGREHVLNAYNEAIKERYRFFSFGDAMFIK

SEQ ID NO: 62528 - protein, 341 aa, [Clostridium] hiranonis
  misc_feature (1)..(341): tr|A0A5C0T277|A0A5C0T277_9FIRM S-adenosylmethionine:tRN A ribosyltransferase-isomerase OS=[Clostridium] hiranon is OX=89152 GN=queA PE=3 SV=1
MKTSDFNFDLPQELIAQTPIEDRSASRLMVLDKETGEIEHKIFRDIKEYLKPGDCLVLNDTRVIPARLIGEKVDTGGKIEFLLLKRNTDDTWESLVKPGKRAKIGTKFSFGGGKLIGEVVGMADEGARIIKFHYDGIFEEILDELGNMPLPPYITEKLEEKERYQTVYSKHNGSAAAPTAGLHFTNELLEEIKEMGVDIAFVTLHVGLGTFRPVKVDDVLNHEMHSEFYMVTQEAADKINKAKENGNRVICVGTTSCRTIESAAEEDGHMTAKSGWTNIFIYPGYKFKVLDNLITNFHLPESTLIMLVSALCGREHVLNAYNEAIKERYRFFSFGDAMFIK

SEQ ID NO: 62529 - protein, 341 aa, [Clostridium] hylemonae
  misc_feature (1)..(341): tr|C0BZE3|C0BZE3_9FIRM S-adenosylmethionine:tRNA ribosy ltransferase-isomerase OS=[Clostridium] hylemonae DSM 1 5053 OX=553973 GN=queA PE=3 SV=1
MKRQDFYYELPEELIAQDPLEDRSSSRLLVLDKESGLVSHHVFKDITDYLHRGDCLVINDTKVIPARLVGSRIGTDARIEVLLLKRKENDIWETLVKPGKKAKIGTKISFGEGILTGEVIDVVEEGNRLIQFSYEGIFEEILDRLGQMPLPPYITHQLEDKNRYQTVYAKHSGSAAAPTAGLHFTPELLEEIQKKGVDIARVTLHVGLGTFRPVKADDILEHHMHSEFFQIDEAAAMKINKAKDTGGKVICVGTTSCRTIESAADKTGHITAKSGWTDIFIYPGYEFKLLDGLITNFHLPESTLIMLVSALAGREHVLAAYEEAVKERYRFFSFGDAMYIG

SEQ ID NO: 62530 - protein, 341 aa, [Clostridium] indolis
  misc_feature (1)..(341): tr|A0A3P6JZ25|A0A3P6JZ25_9FIRM S-adenosylmethionine:tRN A ribosyltransferase-isomerase OS=[Clostridium] indolis OX=69825 GN=queA PE=3 SV=1
MDIESFDYHLPESLIAQTPLKNRDESRLLVLGRKTGDIEHKYFKNVIDYLQAGDTLVLNDTRVMPARLFGLKEETGAKVEMLMLTQLEDDDWEVLLKPAKRIKTGDKLSFGDGKIIAECVEELNQGGRIMRLDYDGILQERLDELGEMPLPPYIKERLDDPDRYQTVYAKASGSAAAPTAGLHFTDELLEQIKAKGVNITFITLHVGLGTFRPVSVENIDDHEMHSEYYQMDQETADLLNETKAKGHRVISVGTTSTRTLETIRASHNEFVADSGWTDIFIFPGFEFKAIDGLITNFHLPKSTLVMLVSAFSTKDYILNAYHQAVKSEYRFFSFGDAMLII

SEQ ID NO: 62531 - protein, 354 aa, [Clostridium] lavalense
  misc_feature (1)..(354): tr|A0A2T3FCF7|A0A2T3FCF7_9FIRM S-adenosylmethionine:tRN A ribosyltransferase-isomerase OS=[Clostridium] lavalen se OX=460384 GN=queA PE=3 SV=1
MDVKDFNFDLPQELIAQDPLDDRASSRLLVLDKDTGAVTHRVFRDIVEYLRPGDCLVINDTKVIPARLMGVKADTGAKIEVLLLKRRENDIWETLVKPGKKAKPGTELSFGDGLLTGTVVETVDDGNRLIQFHYEGIFEEILDQLGQMPLPPYITHQLKDKNRYQTVYAKHEGSAAAPTAGLHFTNELLQEIEDMGVKIAHVTLHVGLGTFRPVKVENVLDHHMHSEFYVVEESEAAKVNETKAAGGRVICVGTTSCRTVESASTEAGVLKAGTGWTEIFIYPGYRFKILDALITNFHLPESTLVMLVSALAGREHILAAYEEAIRERYRFFSFGDAMFIAPDPVALPRKTEES

SEQ ID NO: 62532 - protein, 354 aa, [Clostridium] lavalense
  misc_feature (1)..(354): tr|A0A1I0FSX3|A0A1I0FSX3_9FIRM S-adenosylmethionine:tRN A ribosyltransferase-isomerase OS=[Clostridium] lavalen se OX=460384 GN=queA PE=3 SV=1
MDVKDFNFDLPQELIAQDPLDDRASSRLLVLDKDTGAVTHRVFRDIVEYLRPGDCLVINDTKVIPARLMGVKADTGAKIEVLLLKRRENDIWETLVKPGKKAKPGTELSFGDGLLTGTVVETVDDGNRLIQFHYEGIFEEILDQLGQMPLPPYITHQLKDKNRYQTVYAKHEGSAAAPTAGLHFTNELLQEIEDMGVKIAHVTLHVGLGTFRPVKVENVLDHHMHSEFYVVEESEAAKVNETKAAGGRVICVGTTSCRTVESASTEDGVLKAGTGWTEIFIYPGYRFKILDALITNFHLPESTLVMLVSALAGREHILAAYEEAIRERYRFFSFGDAMFIAPDPVALPQKTEEK

SEQ ID NO: 62533 - protein, 344 aa, [Clostridium] leptum
  misc_feature (1)..(344): tr|A0A412RD58|A0A412RD58_9FIRM S-adenosylmethionine:tRN A ribosyltransferase-isomerase OS=[Clostridium] leptum OX=1535 GN=queA PE=3 SV=1
MKTSDFYYDLPEELIAQTPIEPRDHSRLMVLDKKTGSIGHRHFYDIIEFLNPGDCLILNDSRVLPARIYGIKEGTGSQVEFLLLTHKEENVWEVLAGPGKKAKPGARFIFGNGLLKAEVLEVVEGGNRVIRFEFDPKEGNFYNILDRIGQMPLPPYITKRLENKERYQTVYSKELGSAAAPTAGLHFTPELLEKLKNKGIRLGFVTLHVGLGTFRPVKVDDVTEHKMHSEHYEISQEVADLILETKKNGGRVIGVGTTSCRTVESVATFEGQIKASEGWTNIFIYPGYEFKVLDGLITNFHLPESTLIMLVSAFAGYDHTMQAYKTAVQERYRFFSFGDSMLIL

SEQ ID NO: 62534 - protein, 341 aa, [Clostridium] leptum
  misc_feature (1)..(341): tr|A7VX15|A7VX15_9FIRM S-adenosylmethionine:tRNA ribosy ltransferase-isomerase OS=[Clostridium] leptum DSM 753 OX=428125 GN=queA PE=3 SV=1
MKTSDFYYDLPEELIAQTPIEPRDHSRLMVLDKKTGSIGHRHFYDIIEFLNPGDCLILNDSRVLPARIYGIKEGTGSQVEFLLLTHKEENVWEVLAGPGKKAKPGARFIFGNGLLKAEVLEVVEGGNRVIRFEFDPKEGNFYNILDRIGQMPLPPYITKRLENKERYQTVYSKELGSAAAPTAGLHFTPELLEKLKNKGIRLGFVTLHVGLGTFRPVKVDDVTEHKMHSEHYEISQEVADLILETKKNGGRVIGVGTTSCRTVESVATFEGQIKASEGWTNIFIYPGYEFKVLDGLITNFHLPESTLIMLVSAFAGYDHTMQAYKTAVQERYRFFLLVIAC

SEQ ID NO: 62535 - protein, 340 aa, [Clostridium] methylpentosum
  misc_feature (1)..(340): tr|C0EF11|C0EF11_9FIRM S-adenosylmethionine:tRNA ribosy ltransferase-isomerase OS=[Clostridium] methylpentosum DSM 5476 OX=537013 GN=queA PE=3 SV=1
MNTSDFYFDLPKELIAQTPIEPRDHSRMLCLDRNTGKLAHKHFYDVVDLLEPGDTLVINDSRVLPARLYGKKQGTGSDIEFLLLEQKQQDVWEILCKPGKKAKVGAKFTFGGLLDAEIIEVCDDGNRIAKFTYDGSFFDILDQIGQMPLPPYITEKLEDKERYQTVYADELGSAAAPTAGLHFTPELLGKLENKGVNIARVTLHVGLGTFRPVKVDDVTKHKMHSEHYAISQETADLINRTKANGKRVIAVGTTSCRTLESVATFTGGIQKAEGYTDIFIYPGYEFKVLDGLITNFHLPESTLIMLVSAFAGYDQVMEAYHTAVQERYRFFSFGDAMCIL

SEQ ID NO: 62536 - protein, 341 aa, [Clostridium] paradoxum
  misc_feature (1)..(341): tr|A0A150FP63|A0A150FP63_CLOPD S-adenosylmethionine:tRN A ribosyltransferase-isomerase OS=[Clostridium] paradox um JW-YL-7 = DSM 7308 OX=1121328 GN=queA PE=3 SV=1
MKTKEFYFDLPQELIAQKPLKERDKSRLMILDKQTGDIEHKIFRDIIDYLSEGDCLVLNNTRVIPARLIGEKVDTKGKIEFLLLNRIELDTWEVLVKPGKRAKVGTEFSFGDGKLRAKVLDIGSEGSRIVKFEYKGVFEEILDELGNMPLPPYITETLEDKERYQTVYSKHEGSAAAPTAGLHFTNELIEKIKEKGVQIAFITLHVGLGTFRPVKVEDITQHKMHSEFYMIQQEEAEKINRAKMNGKKVIAVGTTSCRTLESAVDENGILKAKNGWTDIFIYPGYEFKIVDALITNFHLPESTLIMLVSALCGKENILNAYNVAVKERYRFFSFGDAMFIK

SEQ ID NO: 62537 - protein, 341 aa, [Clostridium] polysaccharolyticum
  misc_feature (1)..(341): tr|A0A1H9Y053|A0A1H9Y053_9FIRM S-adenosylmethionine:tRN A ribosyltransferase-isomerase OS=[Clostridium] polysac charolyticum OX=29364 GN=queA PE=3 SV=1
MKTSDFYFDLPEELIAQDPLEDRSSSKLLVLKKETGAITHKVFKDIKEYLKAGDCLVLNNTKVIPARLIGEKEGTGAKIELLLLKRFEGDVWETLVKPGKKAKPGTRVIFGGGLLTGEIIEIAEEGNRHVKFHYEGIFEEILDQLGQMPLPPYITHQLQDKNRYQTVYAKYEGSAAAPTAGLHFTKELLQELKDMGVEIASVTLHVGLGTFRPVKVDDVTRHHMHSEFYQVLPEEAEKINRAKREGRRIICVGTTSCRTIESAADENGVVQAGSGDTEIFIYPGYQFKVLDCLITNFHLPESTLLMLVSALAGKEHIMDAYKKAVELKYRFFSFGDAMFIE

SEQ ID NO: 62538 - protein, 358 aa, [Clostridium] populeti
  misc_feature (1)..(358): tr|A0A1I6L4Y3|A0A1I6L4Y3_9FIRM S-adenosylmethionine:tRN A ribosyltransferase-isomerase OS=[Clostridium] populet i OX=37658 GN=queA PE=3 SV=1
MYNKYILFMNMTKKEDYMKTKDFYFDLPEELIAQDPLADRSGSRLLILNKDTGKVEHKIFKNVKEYLRAGDCLVLNNTKVIPARLIGEREGTGAKVELLLLKRMENDVWETLVKPGKKARTGSRIVFGNGLLVGEIMDIVEEGNRYVKFYYDGIFEEILDQLGQMPLPPYITHQLQDKNRYQTVYAKYEGSAAAPTAGLHFTKELLEEIEKMGVVIAHVTLHVGLGTFRPVKVEDVTNHHMHSEYFQVFPDEAEKINAAKRAGNRVICVGTTSCRTVESAADENGFVKPGSGDTDIFIYPGYQFKVLDCLITNFHLPESTLLMLVSALAGKEQVMAAYEEAVKERYRFFSFGDAMLIL

SEQ ID NO: 62539 - protein, 349 aa, [Clostridium] sphenoides
  misc_feature (1)..(349): tr|A0A381JG35|A0A381JG35_9FIRM S-adenosylmethionine:tRN A ribosyltransferase-isomerase OS=[Clostridium] sphenoi des OX=29370 GN=queA PE=3 SV=1
MNVRDFYFDLPQELIAQDPLEDRSASRLLVLDKHTGEIQHRHFRDILSFLRKGDCLVINDTKVIPARLFGVKEGTEAKIEILLLKRRENDIWETLVKPGKKAKVGTVITFGEGLLKGTVIDVVEEGNRLIQFSYEGIFEEILDRLGQMPLPPYITHQLKDKNRYQTVYAKHEGSAAAPTAGLHFTKELLEEIEDMGVSIAHVTLHVGLGTFRPVKVDEIEAHHMHSEFYIIEEEEAKKVNEAKQNGGRIVCVGTTSCRTVESASTDEGILKAGSGWTEIFIYPGYRFKILDCLITNFHLPESTLVMLVSALAGRDHVLHAYEEAIKERYRFFSFGDAMLLTDLLYEGES

SEQ ID NO: 62540 - protein, 341 aa, [Clostridium] spiroforme
  misc_feature (1)..(341): tr|A0A1Y4QID2|A0A1Y4QID2_9FIRM S-adenosylmethionine:tRN A ribosyltransferase-isomerase OS=[Clostridium] spirofo rme OX=29348 GN=queA PE=3 SV=1
MKLSEFDFELPEELIAQTPLDKRDTSRLMVLNRENQTIEHKHFYDIIDYLKPGDVLVRNNTKVIPARLFGIKEETNGHVEVLLLKDQGNDVWECLVGNARIVKLDTVITFGDGLLKAKCLEIKDEGIRVFKMIYDGIFYEILDQLGTMPLPPYIKEKLNDQSRYQTVYAKIEGSAAAPTAGLHFTDDIIKKIKAKGIEILDITLHVGLGTFRPVKVDNVLEHHMHSEYYMIEPEVADKLNQAKANGQRIIAVGTTSTRTLEANMQKYGKFTATHENTDIFIYPGYQYQAIDCLITNFHLPKSTLLMLISAFATKEFIFKAYHEAIENKYRFFSFGDSMFIM

SEQ ID NO: 62541 - protein, 349 aa, [Clostridium] spiroforme
  misc_feature (1)..(349): tr|B1C318|B1C318_9FIRM S-adenosylmethionine:tRNA ribosy ltransferase-isomerase OS=[Clostridium] spiroforme DSM 1552 OX=428126 GN=queA PE=3 SV=1
MYIRGRFKMKLSEFDFELPEELIAQTPLDKRDTSRLMVLNRENQTIEHKHFYDIINYLKPGDVLVRNNTKVIPARLFGVKEETNGHVEVLLLKDQGNDVWECLVGNARIVKLDTIITFGDGLLKAKCLEIKDEGIRVFKMIYDGIFYEILDQLGTMPLPPYIKEKLNDQSRYQTVYAKIEGSAAAPTAGLHFTDDIIRKIKAKGIEILDITLHVGLGTFRPVKVDNVLEHHMHSEYYMIEPEVADKLNQAKANGQRIIAVGTTSTRTLEANMQKYGKFTATHENTDIFIYPGYQYQAIDCLITNFHLPKSTLLMLISAFATKEFIFKAYHEAIENKYRFFSFGDSMFIM

SEQ ID NO: 62542 - protein, 347 aa, [Clostridium] symbiosum
  misc_feature (1)..(347): tr|U2BYE8|U2BYE8_CLOSY S-adenosylmethionine:tRNA ribosy ltransferase-isomerase OS=[Clostridium] symbiosum ATCC 14940 OX=411472 GN=queA PE=3 SV=1
MDVKDFYYDLPEELIAQDPLEDRSSSRLLVLNKDTGEIQHKVFRDILSYLRKGDCLVINDTKVIPARLIGSKEGTDAKIEVLLLKRRENDIWETLVKPGKKAKIGTVINFGEGLLKGTVVDVVEEGNRLIQFSYKGIFEEILDELGQMPLPPYITHQLQDKNRYQTVYAKHEGSAAAPTAGLHFTNELLGKIAEKGIEIAHVTLHVGLGTFRPVKVDNVLEHHMHSEFYIVEEEEARKINDTKKKGGRVICVGTTSCRTLESAAGEDGILKAGSGWTDIFIYPGYRFKILDCLITNFHLPESTLVMLVSALAGREHVLKAYEEAIKERYRFFSFGDAMFIASKPEQD

SEQ ID NO: 62543 - protein, 347 aa, [Clostridium] symbiosum
  misc_feature (1)..(347): tr|E7GPE3|E7GPE3_CLOSY S-adenosylmethionine:tRNA ribosy ltransferase-isomerase OS=[Clostridium] symbiosum WAL-1 4163 OX=742740 GN=queA PE=3 SV=1
MDVKDFYYDLPEELIAQDPLEDRSSSRLLVLNKDTGEIQHKVFRDILSYLRKGDCLVINDTKVIPARLIGSKEGTDAKIEVLLLKRRENDIWETLVKPGKKAKIGTVINFGEGLLKGTVVDVVEEGNRLIQFSYKGIFEEILDELGQMPLPPYITHQLQDKKRYQTVYAKHEGSAAAPTAGLHFTNELLGKIAEKGIEIAHVTLHVGLGTFRPVKVDNVLEHHMHSEFYIVEEEEARKINDTKKKGGRVICVGTTSCRTLESAAGEDGILKAGSGWTDIFIYPGYRFKILDCLITNFHLPESTLVMLVSALAGREHVLKAYEEAIKERYRFFSFGDAMFIASKPEQD

SEQ ID NO: 62544 - protein, 341 aa, [Clostridium] thermoalcaliphilum
  misc_feature (1)..(341): tr|A0A1V4I9U5|A0A1V4I9U5_9FIRM S-adenosylmethionine:tRN A ribosyltransferase-isomerase OS=[Clostridium] thermoa lcaliphilum OX=29349 GN=queA PE=3 SV=1
MKTSDFYFDLPQELIAQKPLEERDKSRLMVLDKESGEIEHKVFRDIIDYLSEGDCLVLNNTRVLPARLIGEKLDTKAKMEFLLLKRIDLDTWETLVKPGKRAKIGSEFSFGDGRLKAKVVDIGEEGARIVKFEYDGIFEEILDELGNMPLPPYITETLEDKERYQTVYSKHQGSAAAPTAGLHFTNEILEKIKAKGVEIAFITLHVGLGTFRPVKVENVLEHKMHSEFYMIEKEEAEKINKAKANGKKVIAVGTTSCRTLESASDENGVLHPKSGWTDIFIYPGHEFKIVDSLITNFHLPESTLIMLVAALCGKENILNAYNIAVTERYRFFSFGDAMFIK

SEQ ID NO: 62545 - protein, 327 aa, [Clostridium] ultunense
  misc_feature (1)..(327): tr|A0A1M4PN32|A0A1M4PN32_9FIRM S-adenosylmethionine:tRN A ribosyltransferase-isomerase OS=[Clostridium] ultunen se Esp OX=1288971 GN=queA PE=3 SV=1
MKTEDFYYDLPGELIAQFPIKDREESKLLILDKKTGNIEDRIFKDIIDYFNPGDCLVLNDTRVIPARLFGSRIGKDEKIEFLLLRRIENDMWEILARPGKKVRPGNRIVFGQGLLVADVLSIGEDGTRKVKFNYNGIFEEILDKLGEMPLPPYITEKLEDGERYQTVYSKHDGSAAAPTAGLHFTKELLKQIEEKGVNIAYLTLHVGLGTFRPVKVENIEEHHMHSEYYEVSHKAAHMINRAKRDGGRVIAVGTTTTRTLETIGSLEGMIIPKKGWTDIFIYPGYKFKIIDGLITNFHLPESTLLMLVSALAGRLLFNRSHLLLYFL

SEQ ID NO: 62546 - protein, 407 aa, [Collinsella] massiliensis
  misc_feature (1)..(407): tr|A0A1Y3XQX5|A0A1Y3XQX5_9ACTN S-adenosylmethionine:tRN A ribosyltransferase-isomerase OS=[Collinsella] massili ensis OX=1232426 GN=queA PE=3 SV=1
MRTDDFDYNLPEELIAQAPAEPRDSCRLLVLHRGEPLATTGDVVPLAHGGSVEHRHFYDIIDYLEPGDLLVANETRVMPARLIGRKAKTGGMAETLLLTRREDLDPLGHVWECLVNPGKRLKPGAVVEYRAGGPHAPETAPVVLTGEIVDFVPDSRGGRIVRFTPQGEGTDGRPRTLDEAIHAAGHVPLPPYITDYEGDPEKYQTVYAMSEEHSAAAPTAGLHFTPELIERIKQKGVGWATVELEVGIDTFRLVEEDDPTEHVMHTERYHLPQAVVDAVHAAKAGGHRVIAVGTTAVRSLESAWEASAPASDPAVVARRFEDAPDSAAVARAGDIVARADATTNLYLMPGSTYHVVDALITNFHVPRSTLMMLVSALATREQIMDAYAEAVAERYRFFSFGDAMLIE

SEQ ID NO: 62547 - protein, 356 aa, [Curtobacterium] plantarum
  misc_feature (1)..(356): tr|A0A3M7UKS6|A0A3M7UKS6_9GAMM S-adenosylmethionine:tRN A ribosyltransferase-isomerase OS=[Curtobacterium] plan tarum OX=221276 GN=queA PE=3 SV=1
MRVADFAFELPESLIAHYPQAQRSGCRLLSLDGPSGTLSHGVFTDVLDKLNPGDLLVFNNTRVIPARVFGRKASGGKIEMLVERMLDDKRVLAHVRASKAPKPGAELLLGEDESVKATMVARHDALFEIVFDDERAVLDILNSVGHMPLPPYIDRPDEEADRELYQTVYSARPGAVAAPTAGLHFDEPLLQALKEKGIEMAFVTLHVGAGTFQPVRVDNIEEHHMHAEYAEVPQEVVDAVLACKARGNKVVAVGTTSVRSLESAAKASQDALIAPFFDDTQIFIYPGYEYQVIDALITNFHLPESTLIMLVSAFAGYQHTMAAYCAAVAEQYRFFSYGDAMFISKNPQAPLEKVGD

SEQ ID NO: 62548 - protein, 349 aa, [Desulfotomaculum] guttoideum
  misc_feature (1)..(349): tr|A0A1I0F829|A0A1I0F829_9FIRM S-adenosylmethionine:tRN A ribosyltransferase-isomerase OS=[Desulfotomaculum] gu ttoideum OX=58134 GN=queA PE=3 SV=1
MNVRDFYFDLPQELIAQDPLEDRSASRLLVLDKHTGEIQHRHFRDILSFLRKGDCLVINDTKVIPARLFGVKEGTEAKIEILLLKRRENDIWETLVKPGKKAKVGTVITFGEGLLKGTVIDVVEEGNRLIQFSYEGIFEEILDRLGQMPLPPYITHQLKDKNRYQTVYAKHEGSAAAPTAGLHFTKELLEEIEDMGVSIAHVTLHVGLGTFRPVKVDEIEAHHMHSEFYIIEEEEAKKVNEAKQNGGRIVCVGTTSCRTVESASTDEGILKAGSGWTEIFIYPGYRFKILDCLITNFHLPESTLVMLVSALAGRDHVLHAYEEAIKERYRFFSFGDAMLLTDLRYGGES

SEQ ID NO: 62549 - protein, 344 aa, [Eubacterium] cellulosolvens
  misc_feature (1)..(344): tr|I5AR62|I5AR62_EUBCE S-adenosylmethionine:tRNA ribosy ltransferase-isomerase OS=[Eubacterium] cellulosolvens 6 OX=633697 GN=queA PE=3 SV=1
MPMKTSDFNYDLPVELIAQDPLEDRSASRMMYMDKETGELKDEIFTEVIDHLREGDCLVLNDTKVIPARLYGTKKDTGALIEVLLLTRKQNDVWETLVRPGKKCKIGTEIVFGEEGLMTGKVIDVTEDGNRFIQFSYEGIFEEILDRLGEMPLPPYIKHKLQDKTMYNTVYAKNDGSAAAPTAGLHFTKELLEKISAKGVKIAHVTLHVGLGTFRPVKVDDVTQHKMHSELYIVEEDQAKIINDTKAAGGRVICVGTTSCRTLESATDENGILQPGSAWTNIFIYPGYTFKIMDGLITNFHLPESTLIMLVSAFAGKDKVMHAYETAVEKKYRFFSFGDAMMII

SEQ ID NO: 62550 - protein, 343 aa, [Eubacterium] eligens
  misc_feature (1)..(343): tr|A0A174Z2A1|A0A174Z2A1_9FIRM S-adenosylmethionine:tRN A ribosyltransferase-isomerase OS=[Eubacterium] eligens OX=39485 GN=queA PE=3 SV=1
MDLHDFYYDLPEELIAQDPLSDRSSSRLMVLDKETGEIEHKIFRDIVDYLRPGDCLVVNDTKVIPARLIGTKADTGATIEVLLLKRLEDRQDTWEVLVKPGKKAKVGAKISFGEGKLIGEIIDIVEEGNRLIQFTYDGIFEEILDELGQMPLPPYITHKLEDKNRYQTVYAKHEGSAAAPTAGLHFTTELLEKIKAMGVNIARVTLHVGLGTFRPVKVENILDHHMHSEFYVVTQEAADMINNTRKNGGRVIAVGTTSTRTLESVALEDGTIPAKSGWTEIFIYPGYKFKAIDCLITNFHLPESTLVMLVSALAGREHVLHAYEVAVQEKYRFFSFGDAMFIK

SEQ ID NO: 62551 - protein, 343 aa, [Eubacterium] eligens
  misc_feature (1)..(343): tr|A0A413YZ06|A0A413YZ06_9FIRM S-adenosylmethionine:tRN A ribosyltransferase-isomerase OS=[Eubacterium] eligens OX=39485 GN=queA PE=3 SV=1
MDLHDFYYDLPEELIAQDPLSDRSSSRLMVLDKETGEIEHKIFRDIVDYLKPGDCLVVNDTKVIPARLIGTKVDTGATIEVLLLKRLEDRQDTWEVLVKPGKKAKVGAKISFGEGKLIGEIIDIVEEGNRLIQFTYDGIFEEILDELGQMPLPPYITHKLEDKNRYQTVYAKHEGSAAAPTAGLHFTTELLEKIKAMGVNIARVTLHVGLGTFRPVKVENILDHHMHSEFYVVTQEAADMINNTRKNGGRVIAVGTTSTRTLESVALEDGTIPAKSGWTEIFIYPGYKFKAIDCLITNFHLPESTLVMLVSALAGREHVLHAYEVAVQEKYRFFSFGDAMFIK

SEQ ID NO: 62552 - protein, 351 aa, [Eubacterium] infirmum
  misc_feature (1)..(351): tr|A0A377FMZ3|A0A377FMZ3_9FIRM S-adenosylmethionine:tRN A ribosyltransferase-isomerase OS=[Eubacterium] infirmu m OX=56774 GN=queA PE=3 SV=1
MHINDFDYELPEELIAQKPQKDRDKCRLMVLRRKENSIEHRHFFDILEYLKEGDCLLLNDSKVIPARLYGIKEGTGARVEFLLIKRVDGDIWETMVRPGKRLKPGDSVLFSDEDGKKLRAEILDYGEDGTRIVKMEYDGILMERLEEIGSMPLPPYISRPSNDEDKDDYQTVYCHEEGSVAAPTAGLHFTTELLEKAKEKGVKIAFVTLHVGIGTFRPVKCETIEEHHMHFEEYSISEEAAEIVNRTVLEGGRIISVGTTSTRTAESAAYFDEKSGKYLIAAGSGSTDIFIYPGYKFKIIGSLITNFHLPKSTLMMLVSALYDREHILKAYGKAAREKYRFFSYGDAMFIE

SEQ ID NO: 62553 - protein, 352 aa, [Eubacterium] rectale
  misc_feature (1)..(352): tr|D4JPG0|D4JPG0_9FIRM S-adenosylmethionine:tRNA ribosy ltransferase-isomerase OS=[Eubacterium] rectale M104/1 OX=657317 GN=queA PE=3 SV=1
MDVKDFDYDLPEELIAQDPLEDRSSSRLMVLDKKTGEVSHHVFKEIVKYLRPGDCLVLNNTKVIPARLFGVKEGTMAKIEILLLKRRQNDVWETLVKPGKKAKPGTKIIFGDGLLTGEVIDVVDDGNRLIQFSYEGIFEEILDKLGQMPLPPYITHQLKDKNRYQTVYAKYDGSAAAPTAGLHFTKELLQQVKDKGVDIAEVTLHVGLGTFRPVKVDNVLDHHMHSEFYMVSQEAADKINNAKKNGGRIISVGTTSTRTLEAASDENGMLKECSGWTDIFIYPGYSFKVIDCLITNFHLPQSTLVMLVSALAGREHVLNAYKEAVEERYRFFSFGDAMFITNDMHMDDEAAE

SEQ ID NO: 62554 - protein, 352 aa, [Eubacterium] rectale
  misc_feature (1)..(352): tr|A0A3E4Y857|A0A3E4Y857_9FIRM S-adenosylmethionine:tRN A ribosyltransferase-isomerase OS=[Eubacterium] rectale OX=39491 GN=queA PE=3 SV=1
MDVKDFDYDLPEELIAQDPLEDRSSSRLMVLDKNTGEVSHHVFKEIVKYLRPGDCLVLNNTKVIPARLFGVKEGTMAKIEILLLKRRQNDVWETLVKPGKKAKPGTRIIFGDGLLTGEVIDVVDDGNRLIQFSYEGIFEEILDKLGQMPLPPYITHQLKDKNRYQTVYAKYDGSAAAPTAGLHFTKELLQQVKDKGVDIAEVTLHVGLGTFRPVKVDNVLDHHMHSEFYMVSQEAADKINNAKKNGGRIISVGTTSTRTLEAASDENGMLKECSGWTDIFIYPGYSFKVIDCLITNFHLPQSTLVMLVSALAGREHVLNAYKEAVEERYRFFSFGDAMFITNDMHMEDEMAE

SEQ ID NO: 62555 - protein, 386 aa, [Eubacterium] siraeum
  misc_feature (1)..(386): tr|B0MPQ6|B0MPQ6_9FIRM S-adenosylmethionine:tRNA ribosy ltransferase-isomerase OS=[Eubacterium] siraeum DSM 157 02 OX=428128 GN=queA PE=3 SV=1
MLFVNGEAVKNNLIFFRKCVIIKQYAISRKKKCVKNAKNRGKTMLKSDFYYDLPQELIAQTPLEPRDSSRLMKIDRKSGKITHDRFYNICDYLEKGDLLVLNDSKVFPARLYGVKQETGAAVQFLLLHQISHNRWEVMVKPGKRLKIGTKVDFSGILTAEIVDYAEGGDRIAEFTYDGDSIFEVLDRIGQMPLPPYITEKLKDKDRYNTIYSHEVGSAAAPTAGLHFTENVFAKLREKGVDTAFVTLHVGLGTFRPVKEDNILDHKMHVEHYSIPQETADKIKACRERGGRVISVGTTSCRTLESAASLDPNGEIKACSHDTGIFIYPGYEFKAIDGLITNFHLPESTLIMLVSAFLGREKTLNAYNVAIQEKYRFFSFGDSMIII

SEQ ID NO: 62556 - protein, 343 aa, [Eubacterium] siraeum
  misc_feature (1)..(343): tr|A0A174ZSL7|A0A174ZSL7_9FIRM S-adenosylmethionine:tRN A ribosyltransferase-isomerase OS=[Eubacterium] siraeum OX=39492 GN=queA PE=3 SV=1
MLKSDFYYDLPQELIAQTPLEPRDSSRLMKIDRKSGEITHDRFYNICDYLEKGDLLVLNDSKVFPARLYGVKQETGAAVQFLLLHQISHNRWEVMVKPGKRLKIGTKVDFSGILTAEIVDYAEGGDRIAEFTYDGDSIFEVLDRIGQMPLPPYITEKLKDKDRYNTIYSHEVGSAAAPTAGLHFTENVFAKLREKGVDTAFVTLHVGLGTFRPVKEDNILDHKMHVEHYSIPQETADKIKACRERGGRVISVGTTSCRTLESAASLDPNGEIKACSHDTGIFIYPGYEFKAIDGLITNFHLPESTLIMLVSAFLGREKTLNAYNVAIQEKYRFFSFGDSMIII

SEQ ID NO: 62557 - protein, 344 aa, [Eubacterium] yurii
  misc_feature (1)..(344): tr|E0QK98|E0QK98_9FIRM S-adenosylmethionine:tRNA ribosy ltransferase-isomerase OS=[Eubacterium] yurii subsp. ma rgaretiae ATCC 43715 OX=864565 GN=queA PE=3 SV=1
MKTEEFFYDLPERLIAQTPLKDRSSSKLLLLNKESGNTKHEIFKNIIDYLDKNDVLVFNNTRVLPARLYGLKKDTGANVEILLLKRYSMKKWQVLVKPAKRLKKGSTVSFGEDLLLMTILEEYDEGIRDVEFSYEGVFEDIISQIGFMPLPPYIKEKLQDKERYQTIYSKINGSSAAPTAGLHFTKELIASLEEKGVQIEYLTLHVGLGTFRPVKAEEVTDHVMHSEHYVIDEDTAQRLNKAKKEGKKIIAVGTTTVRTLESAVNRDNILEKLEDDTSIFIYPPYDFKFVDSIITNFHLPQSTLIMMISAFAGKDKVFNAYKVAIENEYRFFSFGDSMFIDKDV

SEQ ID NO: 62558 - protein, 344 aa, [Eubacterium] yurii
  misc_feature (1)..(344): tr|A0A1T5K530|A0A1T5K530_9FIRM S-adenosylmethionine:tRN A ribosyltransferase-isomerase OS=[Eubacterium] yurii O X=39498 GN=queA PE=3 SV=1
MKTEEFFYDLPERLIAQTPLKDRSSSKLLLLNKNSGNTKHEIFKNIINYINKDDVLVFNNTRVLPARLYGVKKDTGAHVEILLLRRYSLKKWQVLVKPAKRLKKDTVVSFGEDLLLMTVLEEYDEGIRDVEFSYDGVFEDIISQIGFMPLPPYIKEKLQDKERYQTIYSKINGSSAAPTAGLHFTKELINALEEKAVQIEYLTLHVGLGTFRPVKVEEVTEHVMHSEHYVIDEATAQRLNKAKKEGRKIIAVGTTTVRTLESAVNADNILEKLEDDTSIFIYPPYDFKFVDSIITNFHLPQSTLIMMISAFAGKDKVFSAYNEAIKNEYRFFSFGDSMFIDKDL

SEQ ID NO: 62559 - protein, 338 aa, [Flavobacterium] thermophilum
  misc_feature (1)..(338): tr|A0A377G370|A0A377G370_9BACL S-adenosylmethionine:tRN A ribosyltransferase-isomerase OS=[Flavobacterium] ther mophilum OX=1414643 GN=queA PE=3 SV=1
MFDFHLPEELIAQTPLPDRAASRLMVLDKRTGAIRHETFRNIISYLNPSDCLVLNDTRVMPARLYGEKEETGGTVEVLLLKQLDGDRWETLVKPGKRVKPGTKLTFGEGKLEAVCLDTLEHGGRVLEFSYDGLFYEVLAELGEMPLPPYIKEKLDDPERYQTVYAREIGSAAAPTAGLHFTEELLDAIREKGVHIVFITLHVGLGTFRPVQVDEVEKHDMHAEFYQMSEETAETLNRVRNQGGRIIAVGTTSTRTLETIAGKHNGRFVAESGWTDIFIYPGYEFKGIDGLVTNFHLPKSTLIMLVSALAGRENILHAYQVAVKERYRFFSFGDAMLII

SEQ ID NO: 62560 - protein, 349 aa, [Flexibacter] sp.
  misc_feature (1)..(349): tr|A0A1V2CFN4|A0A1V2CFN4_9FLAO S-adenosylmethionine:tRN A ribosyltransferase-isomerase OS=[Flexibacter] sp. ATC C 35103 OX=1937528 GN=queA PE=3 SV=1
MKLSHFQFNLPKELLAEFPAENRDESRLMVIDRQKQTIEHKMFKDVINYFDDGDVLILNNTKVFPARLYGNKEKTGARIEVFLLRELNSEQRLWDVLVDPARKIRIGNKLYFGDDDSLVAEVIDNTTSRGRTLRFLYDGSYEEFRNKLTELGETPIPKYISREVTAEDAERYQTIYAKEEGAVAAPTAGLHFSKHLLKKLEIKGINFAEVTLHVGLGTFNPVEVEDLSKHKMDSEELIIKQEACDIVNEAKAKKKRICAVGTTSMRAIESSVSSQNTLNPYEGWTNKFIFPPHDFSIANCMITNFHTPKSTLLMMISAFCGHDLMKRAYDEAIKEEYKFYSYGDAMLII

SEQ ID NO: 62561 - protein, 349 aa, [Flexibacter] sp.
  misc_feature (1)..(349): tr|A0A1V2BBM7|A0A1V2BBM7_9BACT S-adenosylmethionine:tRN A ribosyltransferase-isomerase OS=[Flexibacter] sp. ATC C 35208 OX=1936242 GN=queA PE=3 SV=1
MKLSQFRFDLPLNLIAQHPSKTRDEARLMVVNRATGKIEHKVFKDILNYFNDKDVMMVNNTKVFPARLYGRKEKTGAKIEVFLLRELNKQNRLWDVIVDPARKIRVGNKLYFGDDESLVAEVIDNTTSRGRTIRFLFEGNDEEFKQVLDTLGETPLPKYIKRKPEDEDKERYQTVYAKYEGAVAAPTAGLHFSRELIKRLEIKGIKFAEVTLHTGLGTFRPIEVEDLSKHKMDAEYFNIDEYAVKIVNKAKEENRKVCAIGTTTVRAVESSVTAQNMLKAAEGWTNTFIHPPYDFAIPNALVTNFHLPKTSLLIMVCAFAGYDLVMEAYQQAIKEKYRFFSYGDAMLIL

SEQ ID NO: 62562 - protein, 363 aa, [Haemophilus] felis
  misc_feature (1)..(363): tr|A0A1T0AXU2|A0A1T0AXU2_9PAST S-adenosylmethionine:tRN A ribosyltransferase-isomerase OS=[Haemophilus] felis O X=123822 GN=queA PE=3 SV=1
MRLADFYFDLPDELIARYPKSDRKSSRLLQLNGETGALSHGVFADVLELVNVGDLLIFNNTRVIPARMFGRKESGGKVEVLVERMLDDRRCLAHIRSSKAPKAGATLFLGEDKLGESKGVKMLMLARHDNLFELELSDAQLSLLDVLQQIGHMPLPPYIDRPDEAADQERYQTVYNKVPGAVAAPTAGLHFDDELLAQLKAKGVNFAFVTLHVGAGTFQPVRVEHIEDHKMHAEYVEVSQEVCDAIIATKQAGKRVIAVGTTSVRSVETAALASIEQGSDALIRPYFSDTSIFLYPSKKFHIVDGLITNFHLPESTLIMLVSAFAGYQHTMRAYQCAVENRYRFFSYGDAMFITKNPNVNGLA

SEQ ID NO: 62563 - protein, 369 aa, [Oscillatoria] sp.
  misc_feature (1)..(369): tr|D8G5N5|D8G5N5_9CYAN S-adenosylmethionine:tRNA ribosy ltransferase-isomerase OS=[Oscillatoria] sp. PCC 6506 O X=272129 GN=queA PE=3 SV=1
MTEINSSLDLKLEAYNYVLPPERIAQNPVVPRDSSRLLVVDSPHSHQHSIFRELPNFLKRGDLLVLNNTRVLPARLKGRKPNGYPVEALLMEERERNCWLALVKPGKRLKPGARIEFDPLNGEIPNGDRLSATVLERDEATGGRLLQFEVPVGMSLVQLLPEYGHIPLPPYIKNSQALGEQYQTIYAEKLGAIAAPTAGLHFTDELLKGLQEKGIEQAFVTLHVGVGTFRPVEVEDLTTHQMHREWVEVPAITVDKIRQTQANGGRIIAVGTTAVRALEGAAAAAQKQNLPSLQAFCGHTDLFIYPGYRWQVVEGLITNFHLPQSSLLMLVSAMIGRQRLFELYEEAIAHQYRFYSFGDAMLILPEVNC

SEQ ID NO: 62564 - protein, 363 aa, [Pasteurella] mairii
  misc_feature (1)..(363): tr|A0A379B4Y1|A0A379B4Y1_9PAST S-adenosylmethionine:tRN A ribosyltransferase-isomerase OS=[Pasteurella] mairii OX=757 GN=queA PE=3 SV=1
MHLSDFYFDLPDELIARYPKVERTSSRLLQLNGQNGELFHRTFSDVVDLINEGDLLIFNNTRVIPARIFGRKASGGKIEVLIERILTENRFLAHIRASKAPKDGAELILGEDKLGEGKGIKARMISRHEALFEVEIVEKNTALLEILPQIGHMPLPPYIDRPDEEADKERYQTVYNKVPGAVAAPTAGLHFDQPLLDKLKAKGVNFAFVTLHVGAGTFQPVRVEQIEDHKMHAEYVEVPQEVVEAILATKANGKRVIAVGTTSVRSIESAALFAEENQLNTPIAPFFSDTSIFIYPGKKFRVTDALITNFHLPESTLIMLVSAFAGYQHTMNAYKSAVENRYRFFSYGDAMFISKNPNVKGLE

SEQ ID NO: 62565 - protein, 362 aa, [Polyangium] brachysporum
  misc_feature (1)..(362): tr|A0A0G3BVQ6|A0A0G3BVQ6_9BURK S-adenosylmethionine:tRN A ribosyltransferase-isomerase OS=[Polyangium] brachysp orum OX=413882 GN=queA PE=3 SV=1
MPSSDPHSPATPASASPTPGAYTLSDFDFELPPELIAQQPAPERSGSRLLDGRGPTPVDRIFRELPGLLQPGDLLVFNDTRVIKARLYGAKASGGAIEALVERVLPGHEVLAHLRASKSPKAGTVVRFAQAFDAEVLGRGGPDGGLFHLRFPEEPLALLERHGHVPLPPYITHEDTSEDARRYQTVFADKPGAVAAPTAALHFDDGVLAALAERGITTAGVTLHVGAGTFQPVRTENLAEHKMHSEWFEVSAATVAAVAQARERGGRVVAVGTTTLRALESAALGGRLVAGARETDIFITPGFEFRVVDRLVTNFHLPKSTLMMLVSAFAGYAHVMALYRHAIAQRYRFFSYGDAMLLERPF

SEQ ID NO: 62566 - protein, 373 aa, [Polyangium] brachysporum
  misc_feature (1)..(373): tr|A0A0G3BVM9|A0A0G3BVM9_9BURK S-adenosylmethionine:tRN A ribosyltransferase-isomerase OS=[Polyangium] brachysp orum OX=413882 GN=AAW51_4735 PE=3 SV=1
MIAADQAVQRPADARLLVIAADGSIRPTARSRLIEWLRPGDLLVANDAATLPASLFGTHEPSGGAIEVRLAGRDTLDPRSVSPFTAVVFGAGDHRARTEDRAPPPTLRAGDRLLLGPLDARVDALLGHARLLTLRFAGTPAEIWAGLARHGRPVQYAHVPMPLALWDVWTPIAGLPVAFEPPSAGFALDWRLLSSLRARGVAFSTLTHAAGLSSTGDLQLDRRLPLPEAYRIPKVTAEAIAATRRGGGRVVAVGTTVVRALEQAWATHGTVPPGDGLATLRIGSSTRLQVVDVLLSGTHEPDTSHHALLRAFTDDTTLRRADRALEAEGFRTHEFGDSVWLERRDRRPVNVGPGPGATGVRPADDHREGAASR

SEQ ID NO: 62567 - protein, 355 aa, [Pseudomonas] geniculata
  misc_feature (1)..(355): tr|A0A0L8AB88|A0A0L8AB88_9GAMM S-adenosylmethionine:tRN A ribosyltransferase-isomerase OS=[Pseudomonas] genicul ata N1 OX=1167641 GN=queA PE=3 SV=1
MRAIVDLLPPTALKKSDFHYDLPAELIAQAPLAERSASRLLLVPPAPDGFTDLQVRDLPSLLQPGDLLVFNDTRVIPARLFGQKASGGRVEILIERLLGGQQARAQVGASKSPKAGSRIALDAGGEAEVLGRDGEFYVLQFHVPESLEQWLLHAGRLPLPPYIQREPGVDDRERYQTVFAREVGAVAAPTAGLHFDEPLLAALKDKGVDFGHVTLHVGAGTFQPVRADDLKDHVMHREWLNVGAELVQQVRRTRAAGGRVIGVGTTVVRALESAMRDGELLPFAGETQIFITPGYRIRSVDAMVTNFHLPESTLLMMISAFAGKERVFEAYQHAIEQRYRFFSYGDAMLLFPQAG

SEQ ID NO: 62568 - protein, 354 aa, [Pseudomonas] mesoacidophila
  misc_feature (1)..(354): tr|A0A2A4F7P9|A0A2A4F7P9_9BURK S-adenosylmethionine:tRN A ribosyltransferase-isomerase OS=[Pseudomonas] mesoaci dophila OX=265293 GN=queA PE=3 SV=1
MFTLSDFDFNLPPELIAQTALPDRTASRLLEVDNTAAPARLVDRRFAELPSCIAPGDLLVFNDTKVLKARFFGHKASGGKVEVLIERVTGTHTALAQIRASKSPGPGTTLTLADAFDVTVGERVEPFFTLHFPAPCLTLIEQYGRLPLPPYIEHDPDATDETRYQTVYASNPGAVAAPTAGLHFDEPLLAKLDAMGVERATLTLHVGAGTFQPVRVENIAEHKMHSEWYELPQSLVDRIAATRARGGNVIAVGTTSMRALEAAARDAAAAGRPLAATQAETDIFITPGYAFRVVDRLVTNFHLPKSTLLMLVSAFAGVDTIRAAYQHAIDERYRFFSYGDAMLLTRRDTPQAGA

SEQ ID NO: 62569 - protein, 341 aa, [Ruminococcus] gnavus
  misc_feature (1)..(341): tr|R5UAB2|R5UAB2_9FIRM S-adenosylmethionine:tRNA ribosy ltransferase-isomerase OS=[Ruminococcus] gnavus CAG:126 OX=1263106 GN=queA PE=3 SV=1
MKTSDFYYDLPEELIAQDPLEDRSGSRLLFLDKETGKTEHHIFRDVIDYLNPGDCLVINDTKVIPARLIGEKEGTGAKIEVLLLKRGENDVWETLVKPGKKAKPGTRISFGDGLLVGEVVDVVEEGNRLIHFEYKGIFEEILDQLGQMPLPPYITHQLEDRSRYNTVYAAHEGSAAAPTAGLHFTPKLLKEIQEKGVDIARVTLHVGLGTFRPVKVEDVTEHHMHSEFYMVDAEAAEKINKAKEHGGRVICVGTTSCRTIESAADENGRLKPCSGWTEIFIYPGYQFKILDGLITNFHLPESTLIMLVSALAGKEHVMAAYEEAVKERYRFFSFGDAMIIL

SEQ ID NO: 62570 - protein, 341 aa, [Ruminococcus] torques
  misc_feature (1)..(341): tr|A0A173XQB9|A0A173XQB9_9FIRM S-adenosylmethionine:tRN A ribosyltransferase-isomerase OS=[Ruminococcus] torque s OX=33039 GN=queA PE=3 SV=1
MKTSDFYYDLPEELIAQDPLEDRSSSRLMTVDKETGKIGHHVFSEIIDYLNEGDCLVINDTKVIPARLIGAKEETGAKIEVLLLKRGADDVWETLVKPGRKAKPGTRISFGDGLLVGEVVDIVDEGNRLIHFEYEGIFEEILDQLGQMPLPPYITHQLQDKNRYNTVYAEHSGSAAAPTAGLHFTPELLRKIEEKGVDIARVTLHVGLGTFRPVKVDDVENHHMHSEFYMINEEAAEKINHAKDRGGRVICVGTTSCRTIESAADENGRLKACSGWTEIFIYPGYRFKTLDCLITNFHLPESTLIMLVSALAGKEHVMAAYEEAVKERYRFFSFGDAMLIL

SEQ ID NO: 62571 - protein, 341 aa, [Ruminococcus] torques; identical to SEQ ID NO: 62570
  misc_feature (1)..(341): tr|A5KPU6|A5KPU6_9FIRM S-adenosylmethionine:tRNA ribosy ltransferase-isomerase OS=[Ruminococcus] torques ATCC 2 7756 OX=411460 GN=queA PE=3 SV=1

SEQ ID NO: 62572 - protein, 365 aa, Abditibacterium utsteinense
  misc_feature (1)..(365): tr|A0A2S8SR18|A0A2S8SR18_9BACT S-adenosylmethionine:tRN A ribosyltransferase-isomerase OS=Abditibacterium utste inense OX=1960156 GN=queA PE=3 SV=1
MLASELDFDLPEHFIAQTPVEPRDAAKLLVFRRASGQISHHFVRDLPALLRPSDLLIFNDTRVLRARLRGFKPSGGRVEALLLKEITKNRWQALLKPSARLQAGGTVEFVSENSDLHLSARLEARLEDAWILEFHTPKNADIRDFLPTLGEVPLPPYIRQSSPEARYQTTFSRQKTLGNPLDSAAAPTAGLHFTPQLLENLEKRGIDKAFLTLAVGAGTFRPVQSETLEEHRMHREEFEISVQSAQKINEQKARGGRIVAVGTTSVRALESVADERGFVAPGEAATQIFIRPGHVFRGVDALLTNFHQPRSTLLALVAAFIEAGTINKNGENGSKSGLATIREIYALAMKEGYRFHSFGDAMLLD

SEQ ID NO: 62573 - protein, 344 aa, Abiotrophia defectiva
  misc_feature (1)..(344): tr|W1Q5M6|W1Q5M6_ABIDE S-adenosylmethionine:tRNA ribosy ltransferase-isomerase OS=Abiotrophia defectiva ATCC 49 176 OX=592010 GN=queA PE=3 SV=1
MLTTKDFDYHLPEHLIAQTPLADRAASRLLVLDRQTGRKQDLHFDQIINFLNPGDALVVNETRVIPARLFGIKPETGGHLEVLLLNNTQGNQWECLIKPARRAKTGTQIVFGEDGRLTATVVSEGDHGGRIIEFSYEGVFLEILESLGQMPLPPYIKERLEDADRYQTVYAKENGSAAAPTAGLHFTDELLEAIKAKGVEIIPLVLHVGLGTFRPVSADSIEDHEMHAEYYQLSQESADAIQAVQARGGKIFAVGTTSVRTLETIAAKFDGQVRADSGWTQIFISPGFEFKVVDHLITNFHLPCSTLVMLVSAFYNREAVLAAYEHAVEAEYRFFSFGDSMLIL

SEQ ID NO: 62574 - protein, 344 aa, Abiotrophia sp.
  misc_feature (1)..(344): tr|A0A1F1LRM2|A0A1F1LRM2_9LACT S-adenosylmethionine:tRN A ribosyltransferase-isomerase OS=Abiotrophia sp. HMSC2 4B09 OX=1581061 GN=queA PE=3 SV=1
MLTTKDFDYHLPERLIAQTPLADRAASRLLVLDRQTGQKQDLQFDQIINFLNPGDALVVNETRVIPARLFGIKPETGGHLEVLLLNNTQGNQWECLIKPARRAKTGTQIVFGEDGRLTATVVSEGDHGGRIIEFSYEGVFLEILESLGQMPLPPYIKERLEDADRYQTVYAKENGSAAAPTAGLHFTDELLEAIKAKGVEIIPLVLHVGLGTFRPVSADSIEDHEMHAEYYQLSQSSADAIQAVQARGGKIFAVGTTSVRTLETIATKFDGQVRADSGWTQIFISPGFEFKVVDHLITNFHLPCSTLVMLVSAFYNREAVLAAYEHAVEAEYRFFSFGDSMLIL

SEQ ID NO: 62575 - protein, 346 aa, Abyssibacter profundi
  misc_feature (1)..(346): tr|A0A363UPB7|A0A363UPB7_9GAMM S-adenosylmethionine:tRN A ribosyltransferase-isomerase OS=Abyssibacter profundi OX=2182787 GN=queA PE=3 SV=1
MQKSDFHFDLPDHLIAQHPLPDRSGARMLDVDGATGQLRDARVLDLPERLQPGDLVVTNDVRVMPARVFGRKASGGRVEVMIERLVQPRVAWAHVRASKTPKPGGQLVLEGGHAVEVRGRQDDGLFVLELAQGTWPEVLEAVGHMPLPPYIRRADTPDDAERYQTVFARQPGAVAAPTAGLHFDDALMAAIQARGAELASTTLWVGAGTFQPVRSERIDEHRMHAERVQVPQATVDAVEATRARGGRVVAIGTTVVRALEAAAAQGQLAAMDGDTRLFIKPGDQFRVVDALFTNFHLPESTLLMLVCAFAGYDTVMHAYRHAVTQQYRFFSYGDAMWLTPQPEARA

SEQ ID NO: 62576 - protein, 350 aa, Abyssicoccus albus
  misc_feature (1)..(350): tr|A0A3N5BNV2|A0A3N5BNV2_9STAP S-adenosylmethionine:tRN A ribosyltransferase-isomerase OS=Abyssicoccus albus OX =1817405 GN=queA PE=3 SV=1
MNVEQFDFDLPDDLIAQTPLKERSESRLLTLDYANQRIEHRQFFHIQNYLKAGDALVLNNTKVIPARLFGMKETGAAIEILLLEDIGEDTWKALVKPAKRIKIGDKILFGEGVLTAECVAVQDEGIRQLKLQYDGILQNILDKLGTMPLPPYIKETLDDASRYQTVYAKTPGSAAAPTAGLHFTTELLEQLIAQGVDIYYVTLHVGLGTFRPVSVDNVDDHTMHSEYYEIDEVTAKALNDKKLAGKRIISVGTTSTRTLETVYSMYNEFRASSGYTDIFIYPGYEYKAIDGLITNFHLPKSTLMMLVSALAGRELIMKAYSEAIQERYRFFSFGDAMFIYKGEQHGGNNV

SEQ ID NO: 62577 - protein, 369 aa, Acaryochloris marina
  misc_feature (1)..(369): sp|B0C0B9|QUEA_ACAM1 S-adenosylmethionine:tRNA ribosylt ransferase-isomerase OS=Acaryochloris marina (strain MB IC 11017) OX=329726 GN=queA PE=3 SV=1
MLGPTPELDQTLQAYDYLLPETFIAQTPLVPRDRSRLLVVQQQAHQHKIFQDLVALLQPGDLLVFNDTRVIPARLLGRKLNSELAQPVEVFLLEPRQPNTWLALVRPGRRLKPGAQIEFGPPERPLLRAEILATDADTRGRIIQFESLVEEPFEDLLEQLGEVPLPPYIQESTAQPEQYQTVYAQHPGAVAAPTAGLHFTPELLARLQSEGINQAHLTLHVGIGTFRPVETDDILQHHMHSEWVDLPAATVDAIRTTKASGGRVIAVGTTVTRALEGACQNGPLVPWQGRTNLFIYPSYQWRVVDGLITNFHLPKSSLLMLVSALVGRERLLALYEDAIAQQYRFYSFGDAMLVLPEAVIAERSPDPVF

SEQ ID NO: 62578 - protein, 360 aa, Acaryochloris sp.
  misc_feature (1)..(360): tr|A0A2W1JFA4|A0A2W1JFA4_9CYAN S-adenosylmethionine:tRN A ribosyltransferase-isomerase OS=Acaryochloris sp. RCC 1774 OX=1764569 GN=queA_1 PE=3 SV=1
MSNAPYSQDHCLSAYDYTLPETLIAQTPMVPRDRSRLLVVEPTTHQHRHFYELPQLLRSGDLLVLNNTRVIPARLLGYKLSSKGGQIPVEVLLLEPRPDQCWLALVKPGRRLKPGANIIFGNPEQPSLQATVLETDAETRGRIIQFHVDSGKVLEAKIHQLGQLPLPPYIHHSSAAPEQYQTVFAEQPGAVAAPTAGLHFTPQLLEQLSAQGIQQAWITLHVGLGTFRPVEIDHITDHRMHAEWIDISPATVAAVQQTQAQGGRIIAVGTTAVRALEGAAQSGTLQPYRGKTQIFIYPGYQWQVVDGLITNFHLPKSSLMMLVSALIGRQRLLTLYQEAIDERYRFYSFGDAMLIMPVRD

SEQ ID NO: 62579 - protein, 343 aa, Accumulibacter phosphatis
  misc_feature (1)..(343): tr|C7RRA0|C7RRA0_ACCPU S-adenosylmethionine:tRNA ribosy ltransferase-isomerase OS=Accumulibacter phosphatis (st rain UW-1) OX=522306 GN=queA PE=3 SV=1
MLTIDDFDFDLPTELIAQQPTPERTASRLLELADGGLHDRRFSELPQLVDAGDLLVFNDTRVIRARLFGHKESGGQIEVLIERIIDARHALAQIRASKSPKPGSRIVLEDAIALNVCGRSGKHGEFFALELAGPGDLWTLIERHGRLPLPPYITHAAGSDDEARYQTVFARQPGAVAAPTAGLHFDDALLGQLAACSVEVAWLTLHVGAGTFQPVRVHAVAEHRMHAERFEIPPATIAAIARTRARAGKVIAVGTTSLRALEAAAQDGELRAGAAETDIFITPGYRFQVVDRLITNFHLPKSTLLMLVSAFAGLDAIRTAYAHAIRHGYRFFSYGDAMLLSRE

SEQ ID NO: 62580 - protein, 343 aa, Acetanaerobacterium elongatum
  misc_feature (1)..(343): tr|A0A1H0BD05|A0A1H0BD05_9FIRM S-adenosylmethionine:tRN A ribosyltransferase-isomerase OS=Acetanaerobacterium e longatum OX=258515 GN=queA PE=3 SV=1
MRKSDFWYDLPEKLIAQTPIEPRDTSRMLTLDRKTGVIGHRHFYDILDLLNKGDTLILNNSRVLPARLYGKRTDTGGDIEFLLLEQKQQDIWEILVKPGKRARIGSKFVFGDGLLNAEVLDILPADGNRLVRFKWQCGSFFNVLEQIGQMPLPPYIKQKLQDKERYQTVYSKEPGSAAAPTAGLHFTPELLERIKSKGINIGFVTLHVGLGTFRPVKEDNITDHKMHSEHYYLPQETADLINKTKANGKRVIAVGTTSCRTLEAAVATYGCVQACEGYTDIFIYPGFEFKVLDGIITNFHLPESTLIMLVSAFAGYEHTMNAYKIAVEEQYRFFSFGDAMFIV

SEQ ID NO: 62581 - protein, 345 aa, Acetatifactor muris
  misc_feature (1)..(345): tr|A0A2K4ZGY0|A0A2K4ZGY0_9FIRM S-adenosylmethionine:tRN A ribosyltransferase-isomerase OS=Acetatifactor muris O X=879566 GN=queA PE=3 SV=1
MDGVMPKSDYYFELPQELIAQDPLEDRSSSRLLVLDKHTGAVSHRVFRDIGEFLRPGDCLVLNNTKVIPARLLGVRADTGAHVEVLLLKRQEGNVWETLVKPGKKCRPGAKLSFGEGLLGAEILEVTEEGNRLIRFAYEGIFEEVLDRLGEMPLPPYITHKLQDKNRYQTVYAREEGSAAAPTAGLHFTQELLAQLEEKGIRIAFVTLHVGLGTFRPVKEENVLDHHMHSEYYQVPEETATLINRTRTEGGRVICVGTTSCRTLESAADEKGVVQAGSGDTDIFIYPGYRFRVLDALITNFHLPESTLVMLVSALAGRENVLNAYAEAVREQYRFFSFGDAMLVL

SEQ ID NO: 62582 - protein, 351 aa, Acetitomaculum ruminis
  misc_feature (1)..(351): tr|A0A1I0V3S4|A0A1I0V3S4_9FIRM S-adenosylmethionine:tRN A ribosyltransferase-isomerase OS=Acetitomaculum rumini s DSM 5522 OX=1120918 GN=queA PE=3 SV=1
MEVKDFDYELPEELIAQDPLEDRSSSRLMVLSKDNGEIAHRHFYDICNYLKAGDCLVINNTKVIPARIFGVKEGSGAHLEFLLLKRGENDCWETLVKPGKKAKIGTKIVFGDGSLKGEIVDIIEEGNRIIKFEYDGIFEEILDKLGQMPLPPYITHKLKDKNRYQTVYAKYDGSAAAPTAGLHFTKELIEKIKNMGVEVAEVTLHVGLGTFRPVKVDNVLEHHMHSEFYQINQSEADKINKAKRNGGRIIAVGTTSTRTLESAADENGFLTEKSGWTDIFIYPGYNFKIIDCLITNFHLPKSTLVMLVSALAGREQVLKAYGEAVKEKYRFFSFGDAMFITNDMSEKKLDN

SEQ ID NO: 62583 - protein, 341 aa, Acetivibrio ethanolgignens
  misc_feature (1)..(341): tr|A0A0V8QFY9|A0A0V8QFY9_9FIRM S-adenosylmethionine:tRN A ribosyltransferase-isomerase OS=Acetivibrio ethanolgi gnens OX=290052 GN=queA PE=3 SV=1
MQTKDFDFYLPEELIAQDPLEDRSSSRLLVLDKKTGERTHRIFRDIVEYLEPGDCLVINNTKVIPARLIGEKEGTGAHIELLLLKRKEKDIWETLVKPGKKAKPGTRISFGGGLLTGEIIDVVEEGNRLVQFTYEGIFEEILDQLGQMPLPPYITHQLQDKNRYQTVYAKYEGSAAAPTAGLHFTKELLQKIEEKGIVIANVTLHVGLGTFRPVKVEDVTKHHMHSEFYQVEKAEAEKINAAKASGHRVICVGTTSCRTIESAADENGIVRAGNGNTEIFIYPGYSFKILDALITNFHLPESTLLMLVSALAGRENILAAYDEAVKEKYRFFSFGDAMLIH

SEQ ID NO: 62584 - protein, 341 aa, Acetoanaerobium noterae
  misc_feature (1)..(341): tr|A0A1T5CL29|A0A1T5CL29_9FIRM S-adenosylmethionine:tRN A ribosyltransferase-isomerase OS=Acetoanaerobium noter ae OX=745369 GN=queA PE=3 SV=1
MKTNDFYFDLPEDLIAQVPLKNRDESRLMTLDKNTGEVKHKTFRDILECLNDNDILVLNNTRVIPARLFGFKAETNAEIEILLLSRKDINTWEALTKPAKRLKLGTRIIFGDGLLIGVVKELQEEGIRTIEFEYEGIFEDVLDRLGNMPLPPYIHEKLEDKERYQTVYSKVTGSSAAPTAGLHFTPEILLELKNKGVQIEYVTLHVGLGTFRPVKAESIFDHTMHKEYFEIAEDVKNRLNEAKKNGKRIVCVGTTSVRTLESSANIINNLDRDSGWTDIFIYPSYEFKFVDAMITNFHLPESTLIMMISAFAGKNYIMDAYEEAIKEKYRFFSFGDAMYIF

SEQ ID NO: 62585 - protein, 341 aa, Acetoanaerobium sticklandii
  misc_feature (1)..(341): tr|E3PRC9|E3PRC9_ACESD S-adenosylmethionine:tRNA ribosy ltransferase-isomerase OS=Acetoanaerobium sticklandii ( strain ATCC 12662 / DSM 519 / JCM 1433 / NCIMB 10654) O X=499177 GN=queA PE=3 SV=1
MKTNDFYFDLPEDLIAQVPLKNRDESRLMTLDKNTGEVKHKTFRDILECLNDNDILVLNNTRVIPARLFGFKAETNAEIEILLLSRKDINTWEALTKPAKRLKLGTKIIFGDGLLIGIVKELQEDGIRTIEFEYEGIFEDVLDRLGNMPLPPYIHEKLEDKERYQTVYSKVTGSSAAPTAGLHFTPEILLELKNKGVQIEYVTLHVGLGTFRPVKAESIFDHTMHKEYFEIAEDVKNRLNEAKKNGKRIVCVGTTSVRTLESSANILNNLDRNSGWTDIFIYPSYEFKFVDAMITNFHLPESTLIMMISAFAGKTYIMDAYEEAIREKYRFFSFGDAMYIF

SEQ ID NO: 62586 - protein, 352 aa, Acetobacter aceti
  misc_feature (1)..(352): tr|A0A1U9KL92|A0A1U9KL92_ACEAC S-adenosylmethionine:tRN A ribosyltransferase-isomerase OS=Acetobacter aceti OX= 435 GN=queA PE=3 SV=1
MDDRTADFDFHLPESSIAQHPARPRESARLLDVPADSATPFIDRRISDLPDLLRQGDLLVANDTAVIPAQLHALRGEAKIGVTLDQHQADGSWSALIRNVKRLKLGDTLTFPGTAETAEVTTLDGRGGATLRFSVEGDAFDTFLQTAGALALPPYIARPQGPTAEDQSDYRTIFAEHRGAVAAPTAGLHFTPELLRHIDEAGIGRETLTLHVGAGTFLPVRAETLSGHHMHAERGIITQETADRINAVKERGGRIVAIGTTTLRLLESAVSEDGRVMPFDGDTSIFIHPGFKFRAVDMLMTNFHLPRSTLFMLVCAFAGTERMKAAYEHAVRDGYRFYSYGDACLLRRAETP

SEQ ID NO: 62587 - protein, 352 aa, Acetobacter aceti
  misc_feature (1)..(352): tr|A0A0D6MR87|A0A0D6MR87_ACEAC S-adenosylmethionine:tRN A ribosyltransferase-isomerase OS=Acetobacter aceti NBR C 14818 OX=887700 GN=queA PE=3 SV=1
MDDRTADFDFHLPESSIAQHPARPRESARLLDVPADPKAPFIDRHVTDLPGLLRAGDLLVANDTAVIPAQLHARRGEAKIGVTLDQHQADGTWSALIRNAKRLKLGDTLTFPGTDDTAEVATLDGQGGATLRFSAEGDAFDAFLQTAGALALPPYIARPQGPTAEDQSDYRTIFAEHRGAVAAPTAGLHFTPDLLRRIDEAGVGRETLTLHVGAGTFLPVRAETLSGHHMHAERGIITQKTADRINAVKEQGGRIVAVGTTTLRLLESSVTEDGRVMPFDGDTSIFIHPGFKFRAVDMLMTNFHLPRSTLFMLVCAFAGTERMKAAYEHAVRDGYRFYSYGDACLLRRAEVS

SEQ ID NO: 62588 - protein, 360 aa, Acetobacter ascendens
  misc_feature (1)..(360): tr|A0A1D8QY82|A0A1D8QY82_9PROT S-adenosylmethionine:tRN A ribosyltransferase-isomerase OS=Acetobacter ascendens OX=481146 GN=queA PE=3 SV=1
MSSDRTEDFDFHLPESLIAQEPARPREAARLLDATQPDMFADRHIRDLPSLLKREDLLVANNTAVIRAQLHGLRGEAKIGITLDQIQPDGSWHVLVRNARRLKVGDSIAFPGVQDTARVQALEPGGGAILRFSAEGNDFDAFLQKAGALALPPYIHRPKGPTAQDTSDYATIFERNKGAVAAPTAGLHFTPALLKAIDATGAQRCTLTLHVGAGTFLPVREAEISEHKMHSERGIITPETAERINATRKAGGRIIAIGTTSLRLLETATDENGIVHPFDGTTSIFIRPGYKFRAVDMLLTNFHLPRSTLFMLVSAFAGVERARQIYAHAVASGYRFYSYGDACLLRCAHSIHAHHLGTVE

SEQ ID NO: 62589 - protein, 360 aa, Acetobacter ascendens
  misc_feature (1)..(360): tr|A0A1Y0UXB0|A0A1Y0UXB0_9PROT S-adenosylmethionine:tRN A ribosyltransferase-isomerase OS=Acetobacter ascendens OX=481146 GN=queA PE=3 SV=1
MSSDRTEDFDFHLPESLIAQEPARPREAARLLDATQPDMFADRHIRDLPSLLKREDLLVANNTAVIRAQLHGLRGEAKIGITLDQIQPDGSWHVLVRNARRLKVGDSIAFPGVQDTARVQALEPGGGAILRFSTEGNDFDAFLQKAGALALPPYIHRPKGPTAQDTSDYATIFERNKGAVAAPTAGLHFTPALLKAIDATGAQRCTLTLHVGAGTFLPVREAEISEHKMHSERGIITPETAERINATRKAGGRIIAIGTTSLRLLETATDENGIVHPFDGTTSIFIRPGYKFRAVDMLLTNFHLPRSTLFMLVSAFAGVERARQIYAHAVASGYRFYSYGDACLLRCAHSIHAHHLGTVE

SEQ ID NO: 62590 - protein, 359 aa, Acetobacter cerevisiae
  misc_feature (1)..(359): tr|A0A149UV66|A0A149UV66_9PROT S-adenosylmethionine:tRN A ribosyltransferase-isomerase OS=Acetobacter cerevisia e OX=178900 GN=queA PE=3 SV=1
MSDRTEDFDFHLPETLIAQEPARPREAARLLDVPPHGPFMDRHVSDLPSLLKTGDLLVVNDTAVIRAQLHGLRGEAHIGITLDRILPDTSWHVLVRNARRLKVGDTLTFTGSAHTATVLAREEGGGAVLRFSAEGSAFDTFLQDVGALALPPYIHRPHGPTAQDAKDYATIFAEHKGAVAAPTAGLHFTPTLLEAVDATGAERCTLTLHVGAGTFLPVRENDISKHHMHAERGIITPETADRINAVRKAGGRIIAVGTTSLRLLESAADENGIVHPFDDVTSIFIRPGYRFRAVDMLMTNFHLPRSTLFMLVCAFAGEERMRAAYAHAIQTGYRFYSYGDACLLRCANPIEAHRTGESA

SEQ ID NO: 62591 - protein, 359 aa, Acetobacter cerevisiae
  misc_feature (1)..(359): tr|A0A149V9A8|A0A149V9A8_9PROT S-adenosylmethionine:tRN A ribosyltransferase-isomerase OS=Acetobacter cerevisia e OX=178900 GN=queA PE=3 SV=1
MSDRTEDFDFHLPETLIAQEPARPREAARLLDVPPHGPFMDRHVSDLPSLLQAGDLLVANDTAVIRAQLHGLRGEAHIGITLDRILPDTSWHVLVRNARRLKVGDTLTFTGSAHTATVLAREEGGGAVLRFSAEGSAFDTFLQDVGALALPPYIHRPHGPTAQDTKDYATIFAEHKGAVAAPTAGLHFTPTLLEAVDATGAERCTLTLHVGAGTFLPVRENDISKHHMHAERGIITPETADRINAVRKAGGRIIAVGTTSLRLLESAADENGIVHPFDDVTSIFIRPGYRFRAVDMLMTNFHLPRSTLFMLVCAFAGEERMRAAYAHAIQTGYRFYSYGDACLLRCANPIEAHRTGESA

SEQ ID NO: 62592 - protein, 361 aa, Acetobacter cibinongensis
  misc_feature (1)..(361): tr|A0A0D6N171|A0A0D6N171_9PROT S-adenosylmethionine:tRN A ribosyltransferase-isomerase OS=Acetobacter cibinonge nsis 4H-1 OX=1231339 GN=queA PE=3 SV=1
MSNRTEDFDFHLPEALIAQEPARPRESARLLDVPLHGPFRDLHISDLPGILQRGDLLVANDTAVIRAQLHAMRGEAHIGITLDRILPDTTWHVLLRNAKRVKVGDTLTFANTPHTATVVAREEGGGGILRFTAEGEDFDAFLLHVGALALPPYIHRPHGPTEQDARDYATIFEDHKGAVAAPTAGLHFTPALLDAVDATGADRCTLTLHVGAGTFLPVRDDDISKHHMHAERGIITPEVAARINATRKAGGRIIAVGTTSLRLLESAADEHGVVHPFNAETSIFIRPGYQFRAVDMLMTNFHLPRSTLFMLVSAFAGQARMRQAYEHAVQTGYRFYSYGDACLLRCAHSIHTPNPSTGATP

SEQ ID NO: 62593 - protein, 361 aa, Acetobacter cibinongensis
  misc_feature (1)..(361): tr|A0A1Z5YZ41|A0A1Z5YZ41_9PROT S-adenosylmethionine:tRN A ribosyltransferase-isomerase OS=Acetobacter cibinonge nsis OX=146475 GN=queA PE=3 SV=1
MSNRTEDFDFHLPETLIAQEPARPRESARLLDVPLHGPFRDLHVSDLPGLLQPGDLLVANDTAVIRAQLHAMRGEAHIGITLDRILPDTTWHVLLRNAKRVKVGDTLTFANTPHTATVVAREEGGGGVLRFTAEGEAFDAFLLHVGALALPPYIHRPHGPTEQDARDYATIFEDHKGAVAAPTAGLHFTPALLDAVDATGADRCTLTLHVGAGTFLPVRDDDISKHHMHAERGIITPEVAARINATRKAGGRIIAVGTTSLRLLESAADEHGVVHPFNAETSIFIRPGYQFRAVDMLMTNFHLPRSTLFMLVSAFAGQARMRQAYEHAVQTGYRFYSYGDACLLRCAHSIHTPHSSTGATP

SEQ ID NO: 62594 - protein, 353 aa, Acetobacter fabarum
  misc_feature (1)..(353): tr|A0A269Y107|A0A269Y107_9PROT S-adenosylmethionine:tRN A ribosyltransferase-isomerase OS=Acetobacter fabarum O X=483199 GN=queA PE=3 SV=1
MSNRTEDFDFHLPESLIAQEPARPRESARLLDATVPHTLVDRHVRDLPTLLRRGDLLVANNTAVIRAQLHALRGEARIGITLDQIRPDGTWHVLVRNARRLRVGDTLTFAHSDQTAQVVALEPGGGANLRFSCEGDAFDTFLQTAGALALPPYIHRPNGPTAQDSKDYATIFERYKGAVAAPTAGLHFTPDLLDAVDATGAERCTLTLHVGAGTFLPVRADDIAHHHMHSEHGVISPQTAERINATRAAGGRIIAIGTTTLRLLESAADEHGIVHPFAGETAIFIRPGYRFRAVDVLMTNFHLPRSTLFMLVCAFAGQERAKAVYAHALHTGYRFYSYGDACLLECASSIHAR

SEQ ID NO: 62595 - protein, 353 aa, Acetobacter ghanensis
  misc_feature (1)..(353): tr|A0A0U5F163|A0A0U5F163_9PROT S-adenosylmethionine:tRN A ribosyltransferase-isomerase OS=Acetobacter ghanensis OX=431306 GN=queA PE=3 SV=1
MSNRTEDFDFHLPEALIAQEPARPRESARLLDATTPGTLVDRHVCDLPHLLRKGDLLVANNTAVIRAQLHALRGEARIGITLDQIRPDGTWHVLVRNARRLKVGDTLTFPNSVETAQVVTLEPGGGACLRFSCEGDAFDAFLQAAGALALPPYIHRPHGPTAQDSKDYATIFERYKGAVAAPTAGLHFTPELLAAVDATGAERCTLTLHVGAGTFLPVRADDITQHHMHSEHGVITPQTAERINATRAAGGRIIAIGTTTLRLLESAADEHGIVHPFEGETAIFIRPGYRFRAVDVLMTNFHLPRSTLFMLVCAFAGQEQAKAAYAHALKTGYRFYSYGDACLLRCANSIHAH

SEQ ID NO: 62596 - protein, 371 aa, Acetobacter indonesiensis
  misc_feature (1)..(371): tr|A0A0D6N8D4|A0A0D6N8D4_9PROT S-adenosylmethionine:tRN A ribosyltransferase-isomerase OS=Acetobacter indonesie nsis 5H-1 OX=1231340 GN=queA PE=3 SV=1
MSDRTEDFDFHLPESLIAQEPARPRESARLLDVPEHGAFHDRHVSDLPSLLRQGDLLVANDTAVIRAQLHALRGEARIGITLDRILPDTSWHVLVRNARRLRVGDTLTFTGSPHTADVLAREEGGGAILRFSAQGAAFDAFLKDVGALALPPYIHRPNGPTTQDDTDYATIFAEHKGAVAAPTAGLHFTPSLLQAVDATGAERCTLTLHVGAGTFLPVRENDISKHHMHAERGIITQQTADRINAVRRAGGRIIAVGTTSLRLLESAADENGHVHAFDQETSIFIRPGYKFRAVDLLMTNFHLPRSTLFMLVSAFAGTERMRAAYNHAVTSGYRFYSYGDACLLRCANPIDAHRRTHQNTVPLSGEAGASS

SEQ ID NO: 62597 - protein, 359 aa, Acetobacter malorum
  misc_feature (1)..(359): tr|A0A087PPV1|A0A087PPV1_9PROT S-adenosylmethionine:tRN A ribosyltransferase-isomerase OS=Acetobacter malorum O X=178901 GN=queA PE=3 SV=1
MSDRTEDFDFHLPETLIAQEPARPREAARLLDVPPHGPFMDRHVSDLPSLLKAGDLLVANDTAVIRAQLHGLRGEAHIGITLDRILPDTSWHVLVRNARRLKVGDTLTFTGSAHTATVLAREEGGGAVLRFSAEGSAFDTFLQDVGALALPPYIHRPHGPTAQDAKDYATIFAEHKGAVAAPTAGLHFTPKLLDAVDATGAERCTLTLHVGAGTFLPVRENDISKHHMHAERGIITPETAARINEVRKAGGRIIAVGTTSLRLLESAADENGIVHPFDDVTSIFIRPGYRFRAVDMLMTNFHLPRSTLFMLVCAFAGEERMRAAYAHAVQTGYRFYSYGDACLLRCANPIEAHRTGESA

SEQ ID NO: 62598 - protein, 359 aa, Acetobacter malorum
  misc_feature (1)..(359): tr|A0A149V175|A0A149V175_9PROT S-adenosylmethionine:tRN A ribosyltransferase-isomerase OS=Acetobacter malorum O X=178901 GN=queA PE=3 SV=1
MSDRTEDFDFHLPETLIAQEPARPREAARLLDVPPHGPFMDRHVSDLPSLLKAGDLLVANDTAVIRAQLHGLRGEAHIGITLDRILPDTSWHVLVRNARRLKVGDTLTFTGSTHTATVLAREEGGGAVLRFSAEGSAFDTFLQDVGALALPPYIHRPHGPTAQDAQDYATIFAEHKGAVAAPTAGLHFTPTLLEAVDATGAERCTLTLHVGAGTFLPVRENDISKHHMHAERGIITPETADRINAVRKAGGRIIAVGTTSLRLLESAADENGIVHPFDDVTSIFIRPGYRFRAVDILMTNFHLPRSTLFMLVCAFAGEERMRAAYAHAVQTGYRFYSYGDACLLRCANPIEAHRTGESA

SEQ ID NO: 62599 - protein, 351 aa, Acetobacter nitrogenifigens
  misc_feature (1)..(351): tr|A0A511X738|A0A511X738_9PROT S-adenosylmethionine:tRN A ribosyltransferase-isomerase OS=Acetobacter nitrogeni figens DSM 23921 = LMG 23498 OX=1120919 GN=queA PE=3 SV =1
MTDRTADYDFDLPQESIAQSPARPRDSARLLDVAEAGLIDRTMREFPDLLRPGDLLVANDTAVIRAQLHALRGEAKIGVTLDRILPDGSWHALIRNARRLRVGDRLTFPGARAEDVADVLELEDGGGATLRFSAEGDAFDAFLQAAGALALPPYIHRPAGPTSEDERDYTTIFSAHKGAVAAPTAGLHFTPDLLQRIDAAGIERRTLTLHVGAGTFLPVRAETLTGHKMHAERGVVTAETADAINAARARGGRVVAVGTTTLRLLESAVDEQGVVRPFDGETSIFITPGFTFRAVDMLLTNFHLPRSTLFMLVSAFAGTARMRGAYAHAVREGYRFYSYGDACLLRREDNQ

SEQ ID NO: 62600 - protein, 356 aa, Acetobacter oeni
  misc_feature (1)..(356): tr|A0A511XMU6|A0A511XMU6_9PROT S-adenosylmethionine:tRN A ribosyltransferase-isomerase OS=Acetobacter oeni OX=3 04077 GN=queA PE=3 SV=1
MDDLTADFDFDLPQERIAQHPVKPRDSARLLDVPCDPGVPVVDRHVRDLPGLLRAGDLLVANDTAVIPAQLHARRGVAKIGVTLDQHQADGSWSALIKNSKRLRTGDVLTFPGASDGDVATVASLDGEGGATLRFSCEGEAFDGFLRKAGALALPPYIARPSGPTAEDEVDYRTIFAEHRGAVAAPTAGLHFTPELLARLDEAGIGRETLTLHVGAGTFLPVRSETLSAHKMHAERGIITRRAADRINETRAQGGRIVAVGTTSLRLLESAADEGGTVRPFDGETSIFIHPGYRFRAVDLLMTNFHLPRSTLFMLVCAFAGTERMRAAYAHAVSDGYRFYSYGDACLLRRTDAVCP

SEQ ID NO: 62601 - protein, 353 aa, Acetobacter okinawensis
  misc_feature (1)..(353): tr|A0A252BYD5|A0A252BYD5_9PROT S-adenosylmethionine:tRN A ribosyltransferase-isomerase OS=Acetobacter okinawens is OX=1076594 GN=queA PE=3 SV=1
MSNRTEDFDFHLPEALIAQEPARPREAARLLDATSPHTLVDRHVRDLPQLLRKGDLLVANNTAVIRAQLHALRGEARIGITLDQIRPDGTWHVLVRNARRLKVGDTLTFPHSDQTAQVMALEPGGGANLRFSCEGDAFDAFLQAAGALALPPYIHRPNGPTAQDSKDYATIFERYKGAVAAPTAGLHFTPELLAAVDATGAQRCTLTLHVGAGTFLPVRADDIAHHHMHSEHGVITPQTAERINATRAAGGRIIAIGTTTLRLLESAADEHGIVHPFEGETAIFIRPGYRFRAVDVLMTNFHLPRSTLFMLVCAFAGQERAKAVYAHALNTGYRFYSYGDACLLQCASSLHDR

SEQ ID NO: 62602 - protein, 361 aa, Acetobacter orientalis
  misc_feature (1)..(361): tr|A0A252A339|A0A252A339_9PROT S-adenosylmethionine:tRN A ribosyltransferase-isomerase OS=Acetobacter orientali s OX=146474 GN=queA PE=3 SV=1
MSDRTEDFDFHLPETLIAQEPARPRESARLLDVPLHGPFIDRHVSDLPSLLQPQDLLVANDTAVIRAQLQAMRGEAHIGITLDRILPDTSWHVLLRNAKRVRVGDVLTFANTPHTATVTAREEGGGGVLRFSAEGEAFDAFLRHVGALALPPYIHRPHGPTAQDALDYATIFAEHKGAVAAPTAGLHFTPALLNAIDDTGASRCTLTLHVGAGTFLPVRDNDISKHHMHAERGIITPETAERINAVRKAGGRIIAVGTTSLRLLESATDAHGVVHPFNAETSIFIRPGYRFRAVDMLMTNFHLPRSTLFMLVSAFAGQDRMRRAYEHAVQTGYRFYSYGDACLLRCAHSIHTPKPETGVPS

SEQ ID NO: 62603 - protein, 361 aa, Acetobacter orientalis
  misc_feature (1)..(361): tr|A0A252BFN4|A0A252BFN4_9PROT S-adenosylmethionine:tRN A ribosyltransferase-isomerase OS=Acetobacter orientali s OX=146474 GN=queA PE=3 SV=1
MSDRTEDFDFHLPETLIAQEPARPRESARLLDVPLHGPFIDRHVSDLPSLLQPQDLLVANDTAVIRAQLQAMRGEAHIGITLDRILPDTSWHVLLRNAKRVRVGDVLTFANTPHTATVTAREEGGGGVLRFSAEGEAFDAFLRHVGALALPPYIHRPHGPTAQDALDYATIFAEHKGAVAAPTAGLHFTPALLNAIDDTGASRCTLTLHVGAGTFLPVRDNDISKHHMHAERGIITPETAERINAVRKAGGRIIAVGTTSLRLLESAADAHGVVHPFNAETSIFIRPGYRFRAVDMLMTNFHLPRSTLFMLVSAFAGQDRMRLAYEHAVQTGYRFYSYGDACLLRCAHSIHTPKPETGVPS

SEQ ID NO: 62604 - protein, 359 aa, Acetobacter orleanensis
  misc_feature (1)..(359): tr|A0A4Y3TPV7|A0A4Y3TPV7_9PROT S-adenosylmethionine:tRN A ribosyltransferase-isomerase OS=Acetobacter orleanens is OX=104099 GN=queA PE=3 SV=1
MSDRTEDFDFHLPETLIAQEPARPREAARLLDVPAHGPLIDRHVRDLPELLKAGDLLVANDTAVIRAQLHALRGEAHIGITLDRILPDTSWHVLVRNARRLKVGDTLTFTGSPHTATVLAREDGGGAVLRFSAEGAAFDAFLQDVGALALPPYIHRPHGPTAQDTKDYATIFAEHKGAVAAPTAGLHFTPTLLEAVDATGAERCTLTLHVGAGTFLPVRENDISKHHMHAERGVITPETAARINAVRKAGGRIIAVGTTSLRLLESAADENGIVHPFDDVTSIFIRPGYRFRAVDLLLTNFHLPRSTLFMLVCAFAGEERMRAAYAHAVQTGYRFYSYGDACLLRCASPLEAHRTGDTA

SEQ ID NO: 62605 - protein, 360 aa, Acetobacter pasteurianus
  misc_feature (1)..(360): tr|A0A401X0A7|A0A401X0A7_ACEPA S-adenosylmethionine:tRN A ribosyltransferase-isomerase OS=Acetobacter pasteuria nus NBRC 3278 OX=1226660 GN=queA PE=3 SV=1
MSSDRTEDFDFHLPESLIAQEPARPREAARLLDATQPDMFADRHIRDLPSLLKRGDLLVANNTAVIRAQLHGLRGEAKIGITLDQIQPDGSWHVLVRNARRLKVGDTIAFPGVQDTARVQALEPGGGAVLQFSAEGDAFDAFLRKAGALALPPYIHRPEGPTAQDTSDYATIFERNKGAVAAPTAGLHFTPALLKAIDATGAQRCTLTLHVGAGTFLPVREAEISEHKMHSERGIITPETAERINATRKAGGRIIAIGTTSLRLLETATDENGIVHPFDGTTSIFIRPGYQFRAVDMLLTNFHLPRSTLFMLVSAFAGVERARQIYAHAVASGYRFYSYGDACLLRCAHSIHAHHLGTVE

SEQ ID NO: 62606 - protein, 360 aa, Acetobacter pasteurianus
  misc_feature (1)..(360): tr|A0A1A0DDR2|A0A1A0DDR2_ACEPA S-adenosylmethionine:tRN A ribosyltransferase-isomerase OS=Acetobacter pasteuria nus OX=438 GN=queA PE=3 SV=1
MSSDRTEDFDFHLPESLIAQEPARPREAARLLDATQPDMFADRHIRDLPSLLKRGDLLVANNTAVIRAQLHGLRGEAKIGITLDQIQPDGSWHVLVRNARRLKVGDTIAFPGVQDTARVQALEPGGGAVLQFSAEGDSFDAFLQKAGALALPPYIHRPEGPTAQDTSDYATIFERNKGAVAAPTAGLHFTPALLKAIDATGAQRCTLTLHVGAGTFLPVREAEISEHKMHSERGIITPETAERINATRKAGGRIIAIGTTSLRLLETATDENGIVHPFDGTTSIFIRPGYQFRAVDMLLTNFHLPRSTLFMLVSAFAGVERARQIYAHAVASGYRFYSYGDACLLRCAHSIHAHHLGTVE

SEQ ID NO: 62607 - protein, 350 aa, Acetobacter peroxydans
  misc_feature (1)..(350): tr|A0A4Y3TW89|A0A4Y3TW89_9PROT S-adenosylmethionine:tRN A ribosyltransferase-isomerase OS=Acetobacter peroxydan s OX=104098 GN=queA PE=3 SV=1
MSDRTEDFDFPLPQSLIAQEPARPRESARLLDATAPAPTLIDRHIHDLPELFQPGDLLVANDTAVIRAQLQARRGEARIGVTLDQIRPDGTWHVLVRNARRLKPGDTLTFENTAQTAQVVTLEEGGGAILRFSAEGDAFDTFLRDAGVLALPPYILRPDGPTERDSQDYATIFEQVRGAVAAPTAGLHFTPALLAALDARGVSRCTLTLHVGAGTFLPVREADISRHHMHTERGVITPETAERINATRRAGGRIIAVGTTTLRLLESAADEHGVVHPFSGETAIFIRPGYRFRTVDVLMTNFHLPRSTLFMLVSAFAGVERARQVYDHAIASGYRFYSYGDACLLRLSTD

SEQ ID NO: 62608 - protein, 359 aa, Acetobacter persici
  misc_feature (1)..(359): tr|A0A1U9LE27|A0A1U9LE27_9PROT S-adenosylmethionine:tRN A ribosyltransferase-isomerase OS=Acetobacter persici O X=1076596 GN=queA PE=3 SV=1
MSDRTEDFDFHLPETLIAQEPARPREAARLLDVPAHGPLADRHVSDLPGLLKAGDLLIANDTAVIRAQLHALRGEAHIGITLDRILPDTSWHVLVRNARRLKVGDTLTFTGSPHTATVLAREEGGGAVLRFSAEGSAFDTFLQDVGALALPPYIHRPHGPTAQDTRDYATIFEHHKGAVAAPTAGLHFTPALLEAVDATGADRCTLTLHVGAGTFLPVRENDISKHHMHAERGIITPETAARINAARQAGGRIIAVGTTSLRLLESAADENGIVHPFDDVTSIFIRPGYRFRAVDMLMTNFHLPRSTLFMLVCAFAGEERMRAAYAHAIQTGYRFYSYGDACLLRCASPIEAHRTGESA

SEQ ID NO: 62609 - protein, 359 aa, Acetobacter persici
  misc_feature (1)..(359): tr|A0A252ALZ9|A0A252ALZ9_9PROT S-adenosylmethionine:tRN A ribosyltransferase-isomerase OS=Acetobacter persici O X=1076596 GN=queA PE=3 SV=1
MSDRTEDFDFHLPETLIAQEPARPREAARLLDVPAHGPLADRHVSDLPGLLKAGDLLVANDTAVIRAQLHALRGEAHIGITLDRILPDTSWHVLVRNARRLKVGDTLTFTGSPHTATVLAREEGGGAVLRFSAEGSAFDTFLQDVGALALPPYIHRPHGPTAQDTRDYATIFEHHKGAVAAPTAGLHFTPALLEAVDATGADRCTLTLHVGAGTFLPVRENDISKHHMHAERGIITPETAARINAARKAGGRIIAVGTTSLRLLESAADENGIVHPFDDVTSIFIRPGYRFRAVDMLMTNFHLPRSTLFMLVCAFAGEERMRAAYAHAIQTGYRFYSYGDACLLRCASPIESHRTGESA

SEQ ID NO: 62610 - protein, 358 aa, Acetobacter pomorum
  misc_feature (1)..(358): tr|A0A346DX53|A0A346DX53_9PROT S-adenosylmethionine:tRN A ribosyltransferase-isomerase OS=Acetobacter pomorum O X=65959 GN=queA PE=3 SV=1
MSSDRTEDFDFHLPESLIAQEPARPREAARLLDATQPSIFADRHIRDLPSLLKRRDLLVANNTAVIRAQLHGLRGEAKIGITLDQIQPDGSWHVLVRNARRLKVGDIIAFPGVQDIARVLALEPGGGAVLRFSAEGDAFDVFLQKAGALALPPYIHRPEGPTAQDTSDYATIFERNKGAVAAPTAGLHFTPALLKAVDATGAQRCTLTLHVGAGTFLPVREAEISEHKMHSERGIITPETAERINATRKAGGRIIAIGTTSLRLLETATDENGIVHPFDGTTSIFIRPGYQFRAVDMLLTNFHLPRSTLFMLVSAFAGVERARQIYAHAVASGYRFYSYGDACLLRCAHSIHAPTSEQ

SEQ ID NO: 62611 - protein, 358 aa, Acetobacter pomorum
  misc_feature (1)..(358): tr|F1YUU6|F1YUU6_9PROT S-adenosylmethionine:tRNA ribosy ltransferase-isomerase OS=Acetobacter pomorum DM001 OX= 945681 GN=queA PE=3 SV=1
MSSDRTEDFDFHLPESLIAQEPARPREAARLLDATQPGIFADRHIRDLPSLLKRGDLLVANNTAVIRAQLHGLRGEAKIGITLDQIQPDGSWHVLVRNARRLKVGDIIAFPGVQDIARVLALEPGGGAVLRFSAEGDAFDVFLQKAGALALPPYIHRPEGPTAQDTSDYATIFERNKGAVAAPTAGLHFTPALLKAVDATGAQRCTLTLHVGAGTFLPVREAEISEHKMHSERGIITPETAERINTTRKAGGRIIAIGTTSLRLLETATDENGIVHPFDGTTSIFIRPGYQFRAVDMLLTNFHLPRSTLFMLVSAFAGVERARQIYAHAVASGYRFYSYGDACLLRCAHSIHAPTSEQ

SEQ ID NO: 62612 - protein, 371 aa, Acetobacter senegalensis
  misc_feature (1)..(371): tr|A0A149TVS9|A0A149TVS9_9PROT S-adenosylmethionine:tRN A ribosyltransferase-isomerase OS=Acetobacter senegalen sis OX=446692 GN=queA PE=3 SV=1
MSDRTEDFDFHLPETLIAQEPARPRESARLLDVPQDGPFHDRHVSDLPSLLRAGDLLVANDTAVIRAQLHALRGEARIGITLDRILADGTWHVLVRNARRLRVGDTLTFTGSPHTAEVLAREEGGGGVLRFSAEGSAFDAFLKDVGALALPPYIHRPHGPTAQDDKDYATIFAEHKGAVAAPTAGLHFTPSLLEAVDATGAERCTLTLHVGAGTFLPVRENDISKHHMHAERGIITQETADRINAVRQAGGRIIAVGTTSLRLLESAADETGRVHPFDAETSIFIRPGYKFRAVDMLMTNFHLPRSTLFMLVSAFAGTERMRATYAHAVHSGYRFYSYGDACLLRCANPIDAHRISHQTTAHPTGAAGALS

SEQ ID NO: 62613 - protein, 371 aa, Acetobacter senegalensis
  misc_feature (1)..(371): tr|A0A252EH20|A0A252EH20_9PROT S-adenosylmethionine:tRN A ribosyltransferase-isomerase OS=Acetobacter senegalen sis OX=446692 GN=queA PE=3 SV=1
MSDRTEDFDFHLPETLIAQEPARPRESARLLDVPQDGPFHDRHVSDLPSLLRAGDLLVANDTAVIRAQLHALRGEARIGITLDRILADGTWHVLVRNARRLRVGDTLTFTGSPHTAEVLAREEGGGAVLRFSAEGSAFDAFLKDVGALALPPYIHRPHGPTAQDDKDYATIFAEHKGAVAAPTAGLHFTPSLLEAVDATGAERCTLTLHVGAGTFLPVRENDISKHHMHAERGIITQETAERINAVRQTGGRIIAVGTTSLRLLESAADETGRVHPFDAETSIFIRPGYKFRAVDMLMTNFHLPRSTLFMLVSAFAGTERMRAAYAHAVNSGYRFYSYGDACLLRCATPIDAHRISHQTTAHPTGAAGALS

SEQ ID NO: 62614 - protein, 360 aa, Acetobacter sp.; identical to SEQ ID NO: 62588
  misc_feature (1)..(360): tr|A0A368AGZ6|A0A368AGZ6_9PROT S-adenosylmethionine:tRN A ribosyltransferase-isomerase OS=Acetobacter sp. BCRC 14118 OX=1868878 GN=queA PE=3 SV=1

SEQ ID NO: 62615 - protein, 358 aa, Acetobacter sp.
  misc_feature (1)..(358): tr|A0A5C1YPQ5|A0A5C1YPQ5_9PROT S-adenosylmethionine:tRN A ribosyltransferase-isomerase OS=Acetobacter sp. KACC 21233 OX=2592655 GN=queA PE=3 SV=1
MSDRTEDFDFHLPESLIAQEPARPREAARLLDASSPDALADRHVRDLPGLLRAGDLLVANDTAVIRAQLQARRGEAHIGITLDQIRPDGAWHVLARNARRLKVGDTLTFSGTDVTASVQALEDGGGAVLHFSAQGDAFDQFLLAAGALALPPYIHRPHGPTQRDAQDYATIFERARGAVAAPTAGLHFTPALLDAVDATGAQRRTLTLHVGAGTFLPVRDDDISRHRMHSERGVITQETADAINATRKTGGRIIAIGTTTLRLLESAADTNGIVHPFEGETAIFIRPGYRFRAVDMLMTNFHLPRSTLFMLVSAFAGVERARQIYTHAVTHGYRFYSYGDACLLRCASPLDAPCTGAR

SEQ ID NO: 62616 - protein, 353 aa, Acetobacter syzygii
  misc_feature (1)..(353): tr|A0A270BWM7|A0A270BWM7_9PROT S-adenosylmethionine:tRN A ribosyltransferase-isomerase OS=Acetobacter syzygii O X=146476 GN=queA PE=3 SV=1
MSNRTEDFDFHLPDALIAQEPARPRESARLLDATTPTALVDRHVRDLPNLLRKGDLLVANNTAVIRAQLHALRNEAKIGITLDQIRPDGTWHVLVRNARRLRVGDTLTFPNSVQTALVTALEPGGGACLRFSCEGDAFDAFLQAAGALALPPYIHRPDGPTAQDTKDYATIFERHKGAVAAPTAGLHFTPELLAAVDATGAERCALTLHVGAGTFLPVRADDITQHHMHSEHGVITAQTAERINATRAAGGRIIAIGTTTLRLLESAADAYGIIHPFAGETAIFIRPGYRFKAVDVLMTNFHLPRSTLFMLVCAFAGQEQAKAAYAHALSTGYRFYSYGDACLLQCANSIHTP

SEQ ID NO: 62617 - protein, 371 aa, Acetobacter tropicalis
  misc_feature (1)..(371): tr|A0A252A693|A0A252A693_9PROT S-adenosylmethionine:tRN A ribosyltransferase-isomerase OS=Acetobacter tropicali s OX=104102 GN=queA PE=3 SV=1
MSDRTEDFDFHLPETLIAQEPARPRESARLLDVPQDGPFHDRHVSDLPSLLRAGDLLVTNDTAVIRAQLHALRGEARIGITLDRILADGTWHVLVRNARRLRVGDTLTFTGSPQTAEVLAREEGGGAVLRFSAEGSAFDAFLKDVGALALPPYIHRPHGPTAQDDKDYATIFAEHKGAVAAPTAGLHFTPSLLEAVDATGAERCTLTLHVGAGTFLPVRENDISKHHMHAERGIITQKTADRINAVRQAGGRIIAVGTTSLRLLESAADETGRVHPFDAETSIFIRPGYKFRAVDMLMTNFHLPRSTLFMLVSAFAGTERMRAAYAHAVHSGYRFYSYGDACLLRCANPIDAHRISHQTTAHPTGAAGALS

SEQ ID NO: 62618 - protein, 371 aa, Acetobacter tropicalis
  misc_feature (1)..(371): tr|A0A0C9LJ75|A0A0C9LJ75_9PROT S-adenosylmethionine:tRN A ribosyltransferase-isomerase OS=Acetobacter tropicali s OX=104102 GN=queA PE=3 SV=1
MSDRTEDFDFHLPETLIAQEPARPRESARLLDVPQDGPFHDRHVSDLPSLLRADDLLVANDTAVIRAQLHALRGEARIGITLDRILADGTWHVLVRNARRLRVGDTLTFTGSPHTAEVLAREEGGGAVLRFSAEGSAFDAFLKDVGALALPPYIHRPHGPTAQDDKDYATIFAEHKGAVAAPTAGLHFTPSLLEAVDATGAERCTLTLHVGAGTFLPVRENDISKHHMHAERGIITQETAERINAVRQAGGRIVAVGTTSLRLLESAADETGRVHPFDAETSIFIRPGYKFRAVDMLMTNFHLPRSTLFMLVSAFAGTERMRAAYAHAVHSGYRFYSYGDACLLRCANPIDTHRISHQTTAHPTGAAGALS

SEQ ID NO: 62619 - protein, 363 aa, Acetobacteraceae bacterium
  misc_feature (1)..(363): tr|A0A327M9J0|A0A327M9J0_9PROT S-adenosylmethionine:tRN A ribosyltransferase-isomerase OS=Acetobacteraceae bact erium DB1506 OX=2230885 GN=queA PE=3 SV=1
MRAEEFDFALPERLIAQAPARPRDAARLLLVRPEGCADRGIGDLPALLGPGDVMVVNDTRVIPARLRARRGAAAIEIMLNRAEPDGTWEALVRNARRLRPGDALQVEGAPELPCRVLAREGGTARLDFGPDPAVLAAALERAGEIPLPPYIARPEGPRPEDREDYQTLFAARPGAVAAPTASLHFTPGLVAALEARGVRRATVTLHVGAGTFLPLRGEDPRAHRLHAEWGEVTPEAAAIINAARPAGGRILAIGTTALRLLETAAQGAGGDPLRPVRPFRGLTDLYLLPGHRFRAADLLLTNFHLPRSTLFMLVSAFAGTARMRAAYAHAIAAGYRFYSYGDASLLTRADAVAGSRASEGQQP

SEQ ID NO: 62620 - protein, 348 aa, Acetobacteraceae bacterium
  misc_feature (1)..(348): tr|A0A354UYH7|A0A354UYH7_9PROT S-adenosylmethionine:tRN A ribosyltransferase-isomerase OS=Acetobacteraceae bact erium OX=1909293 GN=queA PE=3 SV=1
MTLADFDYELPPERIAHEPVRPRDSARLLHIHDDGLTDLTIRDLPSLLRPGDILVANDTRVFPAQLQAMRGEARIGITLDRPRADGAWKALARNARRVHPGDTLTIEGGGELTARVVDKAPDGSIGLAFNLEGDALMAAFEQAGVLALPPYIHRPDGPTPDDASDYQTVFAQRQGAVAAPTAGLHFTPALLDTLDAMGVRRVTVTLHVGIGTFLPVRVDRVTDHRMHAERGEISAATAEAINAAHCAGGRVVAVGTTSLRLLESAALPDGTVEPFVGETALFILPGYRFKVVDRLVTNFHLPRSTLLMLVSAFRGRDRMLAAYRHAVEAGYRFHSYGDACLLERQPQT

SEQ ID NO: 62621 - protein, 341 aa, Acetobacterium bakii
  misc_feature (1)..(341): tr|A0A0L6U4X2|A0A0L6U4X2_9FIRM S-adenosylmethionine:tRN A ribosyltransferase-isomerase OS=Acetobacterium bakii OX=52689 GN=queA PE=3 SV=1
MNKTDFHFDLPEDRIAQCPLEKRDDSRLMVLNRNKNTIEDRHFSDITDYLRPGDLLVMNNTKVLPGRLFGHREDTGGKVEILLLRHLSKTDWEIMVKPGKRARVGARIVFSADLKGEITGTREGGLRAISFEYTGIFEEIIHEIGLMPVPPYIHETLKDNNRYQTVYAKHEGSSAAPTAGLHFTPDLIEKIEAMGVETAEVTLHVGIGTFRPVKCDVIEDHHMHEEYYEISEATAKAIKRTKANGGRVIAVGTTSVRTLESNARLHGGEIKAYAGVTDIFIYPGYTWAVVDALITNFHLPESTLLMLVSAFYNREAVMGAYETAIDWGYRFFSFGDAMYIE

SEQ ID NO: 62622 - protein, 341 aa, Acetobacterium sp.
  misc_feature (1)..(341): tr|A0A2Z4IBB0|A0A2Z4IBB0_9FIRM S-adenosylmethionine:tRN A ribosyltransferase-isomerase OS=Acetobacterium sp. KB -1 OX=2184575 GN=queA PE=3 SV=1
MDKTDFYYDLPDELIAQSPLEKRDNSRLMVINREKNTIADQNFFEVTNYLRPGDLLVMNNTKVLPGRLFGTREDTGGKVEILLLRHLSQKDWEIMVKPGKRARVGARIVFSPELKGEITGTTQGGLRIISFEYLGVFEEIIDEIGLMPVPPYIHETLKDNNRYQTVYAKHDGSSAAPTAGLHFTPDLLQKIEAMGVEIAEVTLHVGIGTFRPVKCDVIEEHHMHEEYYEVPEETAKAIKRTRERGGRVIAVGTTSVRTLESNAKLHDGVVTAYTGVTDIFIYPGYQWEVVDALITNFHLPESTLLMLVSAFYNREAIMKAYQSAIDWKYRFFSFGDAMLIE

SEQ ID NO: 62623 - protein, 341 aa, Acetobacterium sp.
  misc_feature (1)..(341): tr|A0A231NU66|A0A231NU66_9FIRM S-adenosylmethionine:tRN A ribosyltransferase-isomerase OS=Acetobacterium sp. ME S1 OX=1899015 GN=queA PE=3 SV=1
MNKTDFYYDLPDELIAQCPLEKRDNSRLMVINREKNTIEDHKFFEITNYLRPGDLLVMNNTKVLPGRLFGTREDTGGKVEILLLRHLSQKDWEIMVKPGKRARVGARIVFGPELKGEITGTTQGGLRIISFEYSGVFEEIIDEIGLMPVPPYIHETLTDNNRYQTVYAKREGSSAAPTAGLHFTPDLLSKIEAMGVEIAEVTLHVGIGTFRPVKCDVIEEHHMHEEYYEVPEETARAVKRTRERGGRVIAVGTTSVRTLESNAKLHDGVVTPYTGVTDIFIYPGYEWEVVDALITNFHLPESTLLMLVSAFYNREAIMKAYQTAIDWKYRFFSFGDALFIE

SEQ ID NO: 62624 - protein, 341 aa, Acetobacterium wieringae; identical to SEQ ID NO: 62623
  misc_feature (1)..(341): tr|A0A1F2PIU1|A0A1F2PIU1_9FIRM S-adenosylmethionine:tRN A ribosyltransferase-isomerase OS=Acetobacterium wierin gae OX=52694 GN=queA PE=3 SV=1

SEQ ID NO: 62625 - protein, 341 aa, Acetobacterium woodii
  misc_feature (1)..(341): tr|H6LEI3|H6LEI3_ACEWD S-adenosylmethionine:tRNA ribosy ltransferase-isomerase OS=Acetobacterium woodii (strain ATCC 29683 / DSM 1030 / JCM 2381 / KCTC 1655 / WB1) OX =931626 GN=queA PE=3 SV=1
MNKADFYYDLPDELIAQCPLEKRDNSRLMVINRERQSIEDRNFYDIVDYLKPGDLMVMNNTKVLPGRLFGTREDTGGKVEILLLRHLSEKDWEIMVKPGKRAKVGARIVFSEALKGEITGTTEGGLRIISFEYQGVFEEIIDAIGLMPVPPYIHETLKDNNRYQTVYAKREGSAAAPTAGLHFTPDLIEKIENMGVEIVEVTLHVGIGTFRPVKCEVIEEHHMHEEYYEVSEKTAKAIMRTKANGGRVIAVGTTSVRTLESNAKLHDGVVRAYTGMTDIFIYPGYEWEIVDAMITNFHLPESTLLMLVAAFYNRDAIMAAYQTAIDWKYRFFSFGDALFIE

SEQ ID NO: 62626 - protein, 404 aa, Acetobacteroides hydrogenigenes
  misc_feature (1)..(404): tr|A0A4R2E8W3|A0A4R2E8W3_9BACT S-adenosylmethionine:tRN A ribosyltransferase-isomerase OS=Acetobacteroides hydr ogenigenes OX=979970 GN=queA PE=3 SV=1
MTPHAQHIAIGDFNYDLPDERIAKYPLEERDLSKLLFFNGNNIDDKQFKELPTLLQDSDLLVFNNTKVIQARMEFFRSTGARVEIFCLEPADSSDYESVFQAKGSITWKCIVGNLKKWKESTLEKKLDLKGTAVTLTAQKLEKPNDNVLIMFSWDGDFTFSEILEASGTIPIPPYLNRDTEDIDLNRYQTVYSKHKGSVAAPTAGLHFTPSIIETLKSNGVDTAEVTLHVGAGTFKPVKTEDVADHEMHTEHFSVTLESLKKLRKHLGNVISVGTTSMRTLESLYWYGVRAIRSGNPNFEKPIEQWEPYQHTEVHSAEESMNALISYLERTEKNELHAATQIIIVSGYKVRMIKGLVTNFHQPQSTLLLLVSALVGERWKDIYNHALANNYRFLSYGDSSLLMR

SEQ ID NO: 62627 - protein, 349 aa, Acetobacteroides hydrogenigenes
  misc_feature (1)..(349): tr|A0A4R2EX61|A0A4R2EX61_9BACT S-adenosylmethionine:tRN A ribosyltransferase-isomerase OS=Acetobacteroides hydr ogenigenes OX=979970 GN=queA PE=3 SV=1
MKLSQYKFDLPADLIAKFPTPNRDESRLMVLNRKEKTIEHKVFKDLVDYFDDGDVMVFNNTKVFPARLYGNKEKTGAQIEVFLLRELNREQRLWDVLVDPARKIRIGNKLYFGDDDLLVAEVIDNTTSRGRTLRFLFDGNYEEFKDVLYKLGETPLPKWVRKEVVPEDADRYQTIFAKHEGAVAAPTAGLHFSRELMKRMEIKGIDFAEITLHVGLGNFRTVDVEDLTKHKMDSEQIIIPEEAVGIINRAKDARKNVCAVGTTVLRTLESSVATNGHLKPYDGWTNKFIFPPYDFSVPTSMVTNFHLPLSTLLMMVSAFAGYDFLFEAYEIALKEKYRFGTYGDAMLIL

SEQ ID NO: 62628 - protein, 341 aa, Acetohalobium arabaticum
  misc_feature (1)..(341): tr|D9QVI6|D9QVI6_ACEAZ S-adenosylmethionine:tRNA ribosy ltransferase-isomerase OS=Acetohalobium arabaticum (str ain ATCC 49924 / DSM 5501 / Z-7288) OX=574087 GN=queA P E=3 SV=1
MKVSDFDYDLPEELIAQQPAEPRDESQLMVLDRKTGEIKERIFKKIIDLIEPGDTLVLNNTEVIPARLYGKKEKTGGKVEFLLLTETELDTWEVLVRPGRKVKIGTRVVFGDNDLIAEVKDRTDFGGRVVEFEYKGVFAEVLDKLGEMPLPPYITKELEERNQYQTVYAQKKGAAAAPTAGLHFTEEVLEQLEEKGVNIAAITLHVGLGTFRPVRADEVEEHDMHAEYYEVTDKAADTINQTKESGGRIIAVGTTVTRTLETVGNKEGYVEADKGWTDIFIYPGYEFKVIDGLLTNFHLPESTLIMMVTAFAGYDKVMAAYQEAIDKEYRFYSFGDAMLII

SEQ ID NO: 62629 - protein, 313 aa, Acetomicrobium hydrogeniformans
  misc_feature (1)..(313): tr|A0A0T5XCE7|A0A0T5XCE7_9BACT S-adenosylmethionine:tRN A ribosyltransferase-isomerase OS=Acetomicrobium hydrog eniformans ATCC BAA-1850 OX=592015 GN=queA PE=3 SV=1
MVLNRRERCLEHACFYEIIKYLKRGDVLVFNDTKVIPARFLGQKPSGAKVEVLLVKPKDSAWEHWEAMVRPGKRLKSGDEVVIDDEASILVLDRVSGGMRLVRIKGKDTPYNIIEKKGKVPLPPYIRGNGRASKHYQTVYARVDGSVAAPTAGFHFTEELLDKLRSCGIELAYVTLHVGPGTFRPVKVDDVRKHEMHCEDYNISSDTAERINKAKKEGRRIIAVGTTVVRCLESSSDEEGFVLFGKGSTDLFIFPGYKFKVVDGMVTNFHLPKSTLLMLVSAFAGYDFVMEAYKVAIERRYRFYSFGDAMLII

SEQ ID NO: 62630 - protein, 354 aa, Acetomicrobium mobile
  misc_feature (1)..(354): tr|I4BVP9|I4BVP9_ACEMN S-adenosylmethionine:tRNA ribosy ltransferase-isomerase OS=Acetomicrobium mobile (strain ATCC BAA-54 / DSM 13181 / JCM 12221 / NGA) OX=891968 G N=queA PE=3 SV=1
MLQRHGCTTVDIYDISAYDYELPEELIAQYPVEPRDRSRLLVVDRKTGNLEHRVFYEIPDYLKAGDVLVLNDTKVIPARFLGRKNQNGGKAEVLLVKPLDDGFSCWEALVRPGKRLNAGDSVIIDSETSILILDRLDQGMRKVQIIGNDSPYNVIAKKGKVPLPPYVSENDKALKSYQTVYARVDGSVAAPTAGFHFTESLLKRLASAGIELVYITLHVGPGTFRPVKVKNIKEHAMHREDYHISSSAADSINRAKYEGRRIIAVGTTVVRCLESAAVDKDIISPGKGSTELFIFPGYEFKVIDGLITNFHLPKSTLLMLVSAMAGYDLTMKAYREAVKERYRFYSFGDAMLII

SEQ ID NO: 62631 - protein, 313 aa, Acetomicrobium thermoterrenum
  misc_feature (1)..(313): tr|A0A1H3DSC2|A0A1H3DSC2_9BACT S-adenosylmethionine:tRN A ribosyltransferase-isomerase OS=Acetomicrobium thermo terrenum DSM 13490 OX=1120987 GN=queA PE=3 SV=1
MVLNRRERSLEHACFHEVIKYLKRGDVLVFNDTKVIPARFLGQKPTGAKVEVLLVKPKDSAWEYWEAMVRPGKRFKSGDEVVIDDETSISVLDRLSGGMRLVRIKGEDTPYNIIEKKGKVPLPPYIRGNGRASKHYQTVYARVDGSVAAPTAGFHFTEELLDKLRSCGIELAYVTLHVGPGTFRPVKVDDVRKHEMHCEDYHISSDTAERINKAKKEGRRIIAVGTTVVRCLESSSDEEGFVLFGKGNTDLFIFPGYKFKVVDGMVTNFHLPKSTLLMLVSAFAGYDFVMEAYKVAIERRYRFYSFGDAMLII

SEQ ID NO: 62632 - protein, 339 aa, Acetonema longum
  misc_feature (1)..(339): tr|F7NQ93|F7NQ93_9FIRM S-adenosylmethionine:tRNA ribosy ltransferase-isomerase OS=Acetonema longum DSM 6540 OX= 1009370 GN=queA PE=3 SV=1
MLLSDFDYYLPQQLIAQTPIYPRNYSRLLVMDRQTGELTHRHFYDLFDYVTEGDTLVFNDTRVIPARLIGCKRDTGAKIEVFLLTQLNDREWEVLVKPGKKAKIGVKIDFGPEISCEVLRHTDFGGRVVRFDYEGVFFAILDRLGTTPLPPYIKEQLNDAERYQTVYAKEKGSAAAPTAGLHFTREMMEELQKRGVNTVFITLHVGLGTFRPVSETEITNHKMHREYYSIPGETARIINEAKERGKRVIAVGTTAIRTLETVGRENRIQAGTGWTGIFIYPGYRFQVIDGMITNFHLPQSTLLMLVSAFAGREHVLQAYEEAVRSEYRFFSFGDAMLIL

SEQ ID NO: 62633 - protein, 340 aa, Acholeplasma axanthum
  misc_feature (1)..(340): tr|A0A449BEA5|A0A449BEA5_ACHAX S-adenosylmethionine:tRN A ribosyltransferase-isomerase OS=Acholeplasma axanthum OX=29552 GN=queA PE=3 SV=1
MKVEDFNFELPVELIAQSPMEKRDYSKLLVMDKKTGDIEHKHFYDIVDYLNEGDVLVLNETKVLPARLFGSKKDTNAHIEILLLKEISKDKWETLVKPAKRIKVGDEVTFGDKLIAKCIGYEGEGIRIFELIYNDILIEILEELGTMPLPPYITERLNDKDRYQTVYAKELGSAAAPTAGLHFTKEILEKIKVKGIKIIPVTLHVGLGTFRPVSVDAIEDHKMHSETYHITSDSAKALNEAVDNKKKIIAVGTTSIRTLESNYNNGFHAGVFDTSIFIYPGYKFKVVDELITNFHLPKSSLIMLVSALSSKENIMNAYHEAIKNKYRFFSFGDAMYIKMK

SEQ ID NO: 62634 - protein, 339 aa, Acholeplasma brassicae
  misc_feature (1)..(339): tr|U4KNK2|U4KNK2_9MOLU S-adenosylmethionine:tRNA ribosy ltransferase-isomerase OS=Acholeplasma brassicae OX=616 35 GN=queA PE=3 SV=1
MKTNDFDFNLPEELIAQHPLENRDTSRLLIVDRENQSFSHKHFYDILEELSSNDVLVINNTKVMPARLIGEKEDTNAVIELLLLEQKESLWDALVKPGRRVKVGTVISFGRGMLKAKCVGEKEDGIKTFQMIYEGIFYEILEQLGQMPLPPYIHEKLEDKDRYQTVYAKEIGSAAAPTAGLHFTKDLLDKIKEKQIEIIEVTLHVGLGTFRPTSTETIEDHHMHKESYLISEDAANRLNLAMQNKKRIVAVGTTSVRTLESNYDGTSFKPGLYETDIFIYPGYKFLTIGALITNFHLPKSTLVMLVSALSCRELILKAYKEAIKEKYRFFSFGDAMFIK

SEQ ID NO: 62635 - protein, 339 aa, Acholeplasma hippikon
  misc_feature (1)..(339): tr|A0A449BJI5|A0A449BJI5_9MOLU S-adenosylmethionine:tRN A ribosyltransferase-isomerase OS=Acholeplasma hippikon OX=264636 GN=queA PE=3 SV=1
MKIELFDFNLPDELIAQHPMEKRDHSRLFVIDRKTDERRHKHFYDIVDELTENDVLVMNNTKVIPARLIGEKEDTKAGIEVLLLKEIKPGVWEALTKPAKRIKVGTVVSFGNGLLKMQCIEEREEGIRVYQAIYEGIFLEVLDKLGTMPLPPYITEKLTDQSRYQTVYAANPGSAAAPTAGLHFTKELLQKIKEKGVEIIEVTLHVGLGTFRPVQVDDTNQHHMHNESYEITEYAAERLNLAVKNKKNIVAVGTTSVRTLESNYHNGFTAGHFDTAIFIHPGYKFKAVGSIITNFHLPKSTLIMLISAFYDREKILDCYREAIEKNYRFFSFGDSMFLK

SEQ ID NO: 62636 - protein, 282 aa, Acholeplasma laidlawii
  misc_feature (1)..(282): tr|A9NF63|A9NF63_ACHLI S-adenosylmethionine:tRNA ribosy ltransferase-isomerase OS=Acholeplasma laidlawii (strai n PG-8A) OX=441768 GN=queA PE=3 SV=1
MNNTKVIPARLIGEKIDTHAVIEVLLLKELEKNTWEALTKPAKKIKIGTVVSFGDGALKMECIGIKDEGIRIFKAIYEGIFLEVLDALGTMPLPPYITEKLEDKSRYQTVYAKYAGSAAAPTAGLHFTKELLEKIKAKGVQVLEITLHVGLGTFRPVQVDDVLEHQMHYESYEINEETARLLNQYKKEGKRIIAVGTTTVRTLESNYNDGFHAGNYSTNIFIYPGYQFKIIGAIITNFHLPKSTLIMLISAFYNREKVLEVYEDAVKKNYRFFSFGDSMFIK

SEQ ID NO: 62637 - protein, 339 aa, Acholeplasma laidlawii
  misc_feature (1)..(339): tr|A0A553IJ02|A0A553IJ02_ACHLA S-adenosylmethionine:tRN A ribosyltransferase-isomerase OS=Acholeplasma laidlawi i OX=2148 GN=queA PE=3 SV=1
MKLELFDYDLPKSHIAQHPKDKRDHSKLLVVDREKQTTKDCLFYDILDELSSNDVLVMNNTKVIPARLIGEKIDTHAVIEVLLLKELEKNTWEALTKPAKKIKIGTVVSFGDGALKMECIGIKDEGIRIFKAIYEGIFLEVLDALGTMPLPPYITEKLEDKSRYQTVYAKYAGSAAAPTAGLHFTKELLEKIKAKGVQVLEITLHVGLGTFRPVQVDDVLEHQMHYESYEINEETARLLNQYKKEGKRIIAVGTTTVRTLESNYNDGFHAGNYSTNIFIYPGYQFKIIGAIITNFHLPKSTLIMLISAFYNREKVLEVYEDAVKKNYRFFSFGDSMFIK

SEQ ID NO: 62638 - protein, 339 aa, Acholeplasma oculi
  misc_feature (1)..(339): tr|A0A061ACJ7|A0A061ACJ7_9MOLU S-adenosylmethionine:tRN A ribosyltransferase-isomerase OS=Acholeplasma oculi OX =35623 GN=queA PE=3 SV=1
MKIELFDYHLPKENIAQHPEDKRDHSKLLVIDRKNDLTHDKHFYDILDEFTENDVLVMNNTRVIPARLLGHREGLQGVMEVLLLNQTSKDEWEALTKPAKKVKLGTIIVFGDGSLKLKCVGIKDEGIRVYEAIYEGIFLEVLDKLGTMPLPPYITEQLSDKERYQTVYAKYPGSAAAPTAGLHFTKELLENIKKKGVEIVEVTLHVGLGTFRPVQVDDVLSHHMHSEAYEISKEAAERLNTYKKLGKRIIAVGTTSVRTLESNYKNGFHHGHYSTDIFIYPGYQFKVVDAIITNFHLPKSTLIMLVSAFYNREKVLEIYNEAVKKNYRFFSFGDSMFLK

SEQ ID NO: 62639 - protein, 339 aa, Acholeplasma palmae
  misc_feature (1)..(339): tr|U4KKF2|U4KKF2_ACHPJ S-adenosylmethionine:tRNA ribosy ltransferase-isomerase OS=Acholeplasma palmae (strain A TCC 49389 / J233) OX=1318466 GN=queA PE=3 SV=1
MNTNDFDFNLPEHLIAQHPSEKRDNSRLMVLNRKDETIEHKHFYDIIDYLDENSCLVINDTKVLPARLLGIKKDTHAAIEVLLLKELEKDVWEALTKPAKRVKVGTLVTFGDGLLELECIDVKEDGIRHFKLHYKGILIEVLEKLGTMPLPPYIVEKLDDQSRYQTVYADVLGSSAAPTAGLHFTKELLEKIKQKGIEIIPVTLHVGLGTFRPVSVENVLEHHMHEETYILTEEVTEKLNQAVLNKKTIVAVGTTSVRTLESNFDGKFHAGKFDTKIFIYPGYKFKVVNQLITNFHLPKSTLMMLISAFATKEYIKKAYSNAIDHEYRFFSFGDSMFIK

SEQ ID NO: 62640 - protein, 337 aa, Acholeplasma sp.
  misc_feature (1)..(337): tr|R5HEV6|R5HEV6_9MOLU S-adenosylmethionine:tRNA ribosy ltransferase-isomerase OS=Acholeplasma sp. CAG:878 OX=1 262686 GN=queA PE=3 SV=1
MKTSEFDYELPLELIAQTPLEKRDESRLLVLDKKTGSIKHEVFKNIINYLNEDDILVVNDTKVIPARLYGEKEETKALIEVLLLKEISNNKWECLTKPAKRIKVGTVVNFGDLLKMKCVEVKEEGIRIFELKNEGILYEILDKLGTMPLPPYIHEQLESKNRYQTVYAKNSGSAAAPTAGLHFTEELLEKIKEKGVKIVPITLHVGLGTFRPVNVEDVKSHHMHQEFYQMSSDTADILNNAKGRIISVGTTSTRTLETIKNLYGKFIECSGWTDIFIYPGYEFKAIDALITNFHLPKSTLMMLVSALAGKENIMNAYKIAVEEKYRFFSFGDSMFIK

SEQ ID NO: 62641 - protein, 371 aa, Acholeplasma sp.
  misc_feature (1)..(371): tr|A0A3A6NLD5|A0A3A6NLD5_9MOLU S-adenosylmethionine:tRN A ribosyltransferase-isomerase OS=Acholeplasma sp. OX=3 3015 GN=queA PE=3 SV=1
MKLSDFDFHLPKDRIAQHPSDKRDHSRLLILDKTSKTMKHQMFYDIYDELSEDDVLVINDTKVIPARLLGIKEKTDATIEVLLLKETSPHHWEAMTKPARRVKIGTKIHFSDLLVAECVEEKEEGLRIFKMHYEGLFIEVLERLGSMPLPPYITEKLFEKDRYQTVYAKDPGSAAAPTAGLHFTKELLIKIQTKGVEIIPITLHVGLGTFKPVQTENILEHPMHEETYTISKESADRLNQAMFHGKKIVCVGTTSIRTLESNYQNGFHPGTFETSIFIYPGYIFKVVDKLITNFHLPKSTLIMLVSALAGREFILDAYKIAVDKGYRFFSFGDAMFIKWLKNEEKIIIMIVEENNDLSFDKYIYLLSHNRS

SEQ ID NO: 62642 - protein, 339 aa, Acholeplasmataceae bacterium
  misc_feature (1)..(339): tr|A0A357WFI7|A0A357WFI7_9MOLU S-adenosylmethionine:tRN A ribosyltransferase-isomerase OS=Acholeplasmataceae ba cterium OX=1898209 GN=queA PE=3 SV=1
MKTNDFDFNLPEELIAQHPLENRDRSRLLIVDRENQSFSHKHFYDILEELSSNDVLVINNTKVMPARLIGEKEDTNAVIELLLLEQKESLWDALVKPGRRVKEGTVVSFGSGMLKAKCVGEKEDGIKTFQMLYEGIFYEILEQLGQMPLPPYIHEKLEDKGRYQTVYAKEIGSAAAPTAGLHFTKDLLEKIKDKQIEIIEVTLHVGLGTFRPTSTETIEDHHMHKESYLISEDAANRLNAAMNNKKRIVAVGTTSVRTLESNYDGTSFTPGLYETDIFIYPGYKFQTIGALITNFHLPKSTLVMLVSALSSRELILKAYEEAIEEKYRFFSFGDAMFIK

SEQ ID NO: 62643 - protein, 338 aa, Acholeplasmataceae bacterium
  misc_feature (1)..(338): tr|A0A353PJP9|A0A353PJP9_9MOLU S-adenosylmethionine:tRN A ribosyltransferase-isomerase OS=Acholeplasmataceae ba cterium OX=1898209 GN=queA PE=3 SV=1
MKVSDFDFYLPKSAIAQHPSEKRDHSRLMIVDKVKQTISHHHFYDILDELTPDDVLVLNDTKVIPARLIGIKEDTDASIEVLLLKEVSKDTWEAMTKPAKRVKIGTKIHFTDILTAECVEILDEGLRIFKLHYEGLLIELLERLGSMPLPPYITEKLEEKDRYQTVYARLSGSAAAPTAGLHFTKELLEKIREKGIEIIPVTLHVGLGTFKPVSVENILDHHMHEETYTLSEESANRLNLAIKNKKRIVCVGTTSIRTIESNYSNGFHPGTFETKIFIYPGYQFKAVSRLITNFHLPKSTLIMLVSALAGTELIKKAYLEAVETNYRFFSFGDAMFIK

SEQ ID NO: 62644 - protein, 237 aa, Acholeplasmatales bacterium
  misc_feature (1)..(237): tr|A0A348NIM0|A0A348NIM0_9MOLU S-adenosylmethionine:tRN A ribosyltransferase-isomerase (Fragment) OS=Acholeplas matales bacterium OX=2053494 GN=DCR44_03115 PE=3 SV=1
WFGDGLLKATCTAEGEDGIRQFTFAYEGLFLELLDRLGEMPLPPYIHEKLVDRDRYQTVYSKVVGSAAAPTAGLHFTPELLDRLRAKGVIVVSITLHVGLGTFRPVSVEDVTTHKMHSEFYRVSAAAAATLSAAKAEGRRIIAVGTTTTRTLESVMAKFGQFAEASGWTDIFIYPGFVYRAIDGLITNFHLPKSTLIMLVSAFASKAIILNAYAAAIAEKYRFFSFGDAMLLLPSKR

SEQ ID NO: 62645 - protein, 339 aa, Acholeplasmatales bacterium
  misc_feature (1)..(339): tr|A0A3D4MLA3|A0A3D4MLA3_9MOLU S-adenosylmethionine:tRN A ribosyltransferase-isomerase OS=Acholeplasmatales bac terium OX=2053494 GN=queA PE=3 SV=1
MNTEEFDYYLPEELIAQTPLKDRSASRLMVLDRKTGQIEHRIFKDIVNYLDENDVLVLNDTKVIPARLFGVKEDTKAHIELLMLKEMGDDVWQTLCKPARRVKVGTIVTFGDGLLKAECIKEEEDGIRYFKMIYEGIFLEILDKLGEMPLPPYIHEHLEDKDRYQTVYAKNPGSAAAPTAGLHFTKEILDALKAKGVTICYITLHVGLGTFRPVSVTDVTKHKMHSEFYHISQEVADILNNAKKSGKRIVSVGTTSTRTLESAYDNGFKETSGWTDIFIYPGYEFKAIDAQITNFHLPKSTLIMLVSAFAGKENIMNAYNEAVKEKYRFFSFGDSMFIK

SEQ ID NO: 62646 - protein, 352 aa, Achromatium sp.
  misc_feature (1)..(352): tr|A0A0M1JFX1|A0A0M1JFX1_9GAMM S-adenosylmethionine:tRN A ribosyltransferase-isomerase OS=Achromatium sp. WMS3 OX=1604836 GN=queA PE=3 SV=1
MSSNRSNHQLSDFDFRLPEKLIAQYPNSQRSNSRLLYLHNNKIQDRIFHDLPDILQPNDLLIINNTKVLKARLYGQKLTGAKVEILVERIAATNPYQALAQIRANRPCKPKTIITIENTINNAIDPIELKVINRINDLFQLQSPIPFAELMEQYGHIPLPPYVHRHADFRDIKRYQTIYAEQEGAIAAPTAGLHFDVALFSELKKRGIRIANITLHIGAGTFQPVRTEYLDEHIMHSEWCEVTEAVCQQIHATKSQGGRIVAVGTTSVRSLETAAADGILKSYTGETSLFIRPGYRFKVIDMLITNFHLPRSTLLMLVCAFGGKDAVLNAYRYAIMHNYRFFSYGDAMLLVK

SEQ ID NO: 62647 - protein, 352 aa, Achromobacter agilis
  misc_feature (1)..(352): tr|A0A446CY76|A0A446CY76_9BURK S-adenosylmethionine:tRN A ribosyltransferase-isomerase OS=Achromobacter agilis OX=1353888 GN=queA PE=3 SV=1
MTQSLTVSDFNYDLPPELIAQTPAAERTGSRLLHLDRAGQLHDRQFADLATLVRPQDLLVFNDTRVIKARLNGHKITGGKVEVLVERITEPDRVLAHVRASKSPGAGMVLRLADAFEATVLGREGELFDIRFPGPVLDLLDAHGATPLPPYITHQADAGDDERYQTVYAREPGAVAAPTAGLHFDQPTLERLDAQGVARAFVTLHVGAGTFQPVRVDNLADHVMHAEWFTVPQATVDAIAAARRQGGRVIAVGTTSVRALESAAAQTEGRTAPGLPLAAAQGDTRLFITPGYRYRVIDALVTNFHLPQSTLLMLVSALAGVEPIRRAYAHAVAERYRFFSYGDAMFIESPAL

SEQ ID NO: 62648 - protein, 372 aa, Achromobacter aloeverae
  misc_feature (1)..(372): tr|A0A4Q1HDR8|A0A4Q1HDR8_9BURK S-adenosylmethionine:tRN A ribosyltransferase-isomerase OS=Achromobacter aloever ae OX=1750518 GN=queA PE=3 SV=1
MSSPLTVADFDYALPPELIAQHPSPERGGSRLLHLDAQGRLHDRVFADLAGLLRPNDLLVFNDTRVIKARLTGHKASGGKVEVLIERIVEPDRALAHVRASKSPGPGTVLRLADCFDATVLGRAGALFDLRFPGDVLDLLQAHGATPLPPYITHAAGSEDDERYQTVYARAPGAVAAPTAGLHFDEAMLGRLEEAGIARAFVTLHVGAGTFKPVQVEKVSDHVMHAEWYTVPQATADAVARARAAGGRVIAVGTTSARALESAAAQASPLRATQGDTQLFITPGYRFQVLDGLITNFHLPQSTLLMMISALAGMEPIRRAYAHAVAERYRFFSYGDAMLIESPLPPASAAPASSTPPSPASPHSAASGPAAA

SEQ ID NO: 62649 - protein, 364 aa, Achromobacter arsenitoxydans
  misc_feature (1)..(364): tr|H0F7G6|H0F7G6_9BURK S-adenosylmethionine:tRNA ribosy ltransferase-isomerase OS=Achromobacter arsenitoxydans SY8 OX=477184 GN=queA PE=3 SV=1
MQGPIPLIPDTRVTQSFTVSDFDYDLPPELIAQTPAAERTGSRLLHLDDASQLHDRQFADLTALLRPHDLLVFNDTRVIKARLAGHKITGGKIEVLVERITEPDRVLAHVRASKSPGAGMVLRLADAFEATVLGREGELFDIRFPGPVLELLDAHGATPLPPYITHAADAGDDDRYQTVYAREPGAVAAPTAGLHFDQPTLDRLSELGVARAFVTLHVGAGTFQPVRVDNLADHIMHAEWFTVPQATVDAIAAARAQGGRVIAVGTTSVRALESAAAQTEGRTAPGAPLAPAQGDTRLFITPGYQYRVVDALVTNFHLPQSTLLMLVSALAGVEPIRRAYAHAVAQRYRFFSYGDAMFIETPAP

SEQ ID NO: 62650 - protein, 352 aa, Achromobacter denitrificans
  misc_feature (1)..(352): tr|A0A3R9HPC9|A0A3R9HPC9_ACHDE S-adenosylmethionine:tRN A ribosyltransferase-isomerase OS=Achromobacter denitri ficans OX=32002 GN=queA PE=3 SV=1
MTQSLTVSDFNYELPPELIAQTPAAERTGSRLLHLDRAGALHDRQFADLAALLRPHDLLVFNDTRVIKARLTGHKITGGKVEVLVERITEPDRVLAHVRASKSPGAGMVLRLADAFEATVLGRDGELFDIRFPGPVLALLDAHGATPLPPYITHQADAGDDERYQTVYAREPGAVAAPTAGLHFDQPTLDRLDALGVTRAFVTLHVGAGTFQPVRVDNLADHVMHAEWFTVPQATVDAIAAARSRGGRVVAVGTTSVRALESAAAQTEGRTAPGLPLAAAQGDTRLFITPGYQYRVIDALVTNFHLPQSTLLMLVSALAGVEPIRRAYAHAVAERYRFFSYGDAMFIESPAP

SEQ ID NO: 62651 - protein, 352 aa, Achromobacter insolitus
  misc_feature (1)..(352): tr|A0A448JPW9|A0A448JPW9_9BURK S-adenosylmethionine:tRN A ribosyltransferase-isomerase OS=Achromobacter insolit us OX=217204 GN=queA PE=3 SV=1
MTQSLTVSDFNYELPPELIAQAPAAERTGSRLLHLDGAGHLHDRQFADLASLLRPQDLLIFNDTRVIKARLNGHKITGGKIEVLVERITEPDRVLAHVRASKSPGPGMVLRLADAFDATVLGREGELFDIRFPGPVLELLDAHGATPLPPYITHEADTGDDERYQTVYAREPGAVAAPTAGLHFDQPTLDRLAAMGVERAFVTLHVGAGTFQPVRVDNLADHVMHAEWFTVPQATVDAIAVARSRGGRVIAVGTTSVRALESAAAQTEGRTAPGLPLASAQGDTRLFITPGYRYRVIDALVTNFHLPQSTLLMLVSALAGVEPIRRAYAHAVAERYRFFSYGDAMFIESPAP

SEQ ID NO: 62652 - protein, 352 aa, Achromobacter insolitus
  misc_feature (1)..(352): tr|A0A5C0YQ87|A0A5C0YQ87_9BURK S-adenosylmethionine:tRN A ribosyltransferase-isomerase OS=Achromobacter insolit us OX=217204 GN=queA PE=3 SV=1
MTQSLTVSDFNYELPPELIAQAPAAERTGSRLLHLDGAGHLHDRQFADLASLLRPQDLLIFNDTRVIKARLNGHKITGGKIEVLVERITEPDRVLAHVRASKSPGPGMVLRLADAFDATVLGREGELFDIRFPGPVLELLDAHGATPLPPYITHEADTGDDERYQTVYAREPGAVAAPTAGLHFDQPTLDRLAAMGVERAFVTLHVGAGTFQPVRVDNLADHVMHAEWFTVPQATVDAIAAARSRGGRVIAVGTTSVRALESAAAQTEGRTASGLPLASAQGDTRLFITPGYRYRVIDALVTNFHLPQSTLLMLVSALAGVEPIRRAYAHAVAERYRFFSYGDAMFIESPAP

SEQ ID NO: 62653 - protein, 351 aa, Achromobacter insuavis
  misc_feature (1)..(351): tr|F7SVZ3|F7SVZ3_9BURK S-adenosylmethionine:tRNA ribosy ltransferase-isomerase OS=Achromobacter insuavis AXX-A OX=1003200 GN=queA PE=3 SV=1
MQPLTVSDFDYELPPELIAQTPAAQRTGSRLLHLDGASQLHDRQFADLEGLLRPGDLLVFNDTRVIKARLAGHKITGGKVEVLVERITDTDRALAHVRASKSPGAGMVLRLADAFDATVLGREGELFDIRFPGPVLDLLDAHGATPLPPYITHAADAGDDDRYQTVYAREPGAVAAPTAGLHFDQPTLDRLAALGVERAFVTLHVGAGTFQPVRVDNLADHVMHAEWFTVPQATVDAIAAARARGGRVIAVGTTSVRALESAAAQTEGRTAPGLPLAAAQGDTRLFITPGYQYRVIDALVTNFHLPQSTLLMLVSALAGVEPIRRAYAHAVAQRYRFFSYGDAMFIESLAP

SEQ ID NO: 62654 - protein, 352 aa, Achromobacter marplatensis
  misc_feature (1)..(352): tr|A0A366FHR9|A0A366FHR9_9BURK S-adenosylmethionine:tRN A ribosyltransferase-isomerase OS=Achromobacter marplat ensis OX=470868 GN=queA PE=3 SV=1
MTQSLTVSDFNYELPPELIAQTPAAERTGSRLLHLDGASQLHDRQFADLAGLLRAGDLLIFNDTRVIKARLPGHKITGGKIEVLVERITETDRVLAHVRASKSPGPGMVLRLADAFDATVLGREGELFDIRFPGPVLDLLDAHGATPLPPYITHAADAGDDDRYQTVYAREPGAVAAPTAGLHFDQPTLDRLADLGVERAFVTLHVGAGTFQPVRVDNLADHIMHAEWFTVPQATVDAIAAARARGGRVIAVGTTSVRALESAAAQTEGRTAPGLPLAAAQGDTRLFITPGYQYRVVDALVTNFHLPQSTLLMLVSALAGVEPIRRAYAHAVAQRYRFFSYGDAMFIESPAS

SEQ ID NO: 62655 - protein, 352 aa, Achromobacter marplatensis
  misc_feature (1)..(352): tr|J4Z2B1|J4Z2B1_9BURK S-adenosylmethionine:tRNA ribosy ltransferase-isomerase OS=Achromobacter marplatensis OX =470868 GN=queA PE=3 SV=1
MTQSLTVSDFNYELPPELIAQTPAAERTGSRLLHLDGASQLHDRQFADLAGLLRAGDLLIFNDTRVIKARLPGHKITGGKIEVLVERITETDRVLAHVRASKSPGPGMVLRLADAFDATVLGREGDLFDIRFPGPVLDLLDAHGATPLPPYITHAADAGDDDRYQTVYAREPGAVAAPTAGLHFDQPTLDRLADLGVERAFVTLHVGAGTFQPVRVDNLADHIMHAEWFTVPQATVDAIAAARARGGRVIAVGTTSVRALESAAAQTEGRTAPGVPLAAAQGDTRLFITPGYQYRVVDALVTNFHLPQSTLLMLVSALAGVEPIRRAYAHAVAQRYRFFSYGDAMFIESPAS

SEQ ID NO: 62656 - protein, 352 aa, Achromobacter piechaudii
  misc_feature (1)..(352): tr|D4XHX4|D4XHX4_9BURK S-adenosylmethionine:tRNA ribosy ltransferase-isomerase OS=Achromobacter piechaudii ATCC 43553 OX=742159 GN=queA PE=3 SV=1
MTQSLTVSDFNYDLPPELIAQTPAATRTGSRLLHLDAASQLHDRQFADLIGLLRPDDLLVFNDTRVIKARLAGHKITGGKVEVLVERITESDRVLAHVRASKSPGPGMVLRLADAFEATVLGREGELFDIRFPGPVLDLLDAHGATPLPPYITHAADSGDDDRYQTVYAREPGAVAAPTAGLHFDQPTLDRLADLGIARAFVTLHVGAGTFQPVRVDNLADHVMHAEWFTVPQATVDAIAATRAKGGRVIAVGTTSVRALESAAAQTEGRTADGLPLAAAQGDTRLFITPGYRYRVVDALVTNFHLPQSTLLMLVSALAGVEPIRRAYAHAVAQRYRFFSYGDAMFIESLAP

SEQ ID NO: 62657 - protein, 352 aa, Achromobacter piechaudii
  misc_feature (1)..(352): tr|A0A0L6HSN4|A0A0L6HSN4_9BURK S-adenosylmethionine:tRN A ribosyltransferase-isomerase OS=Achromobacter piechau dii OX=72556 GN=queA PE=3 SV=1
MTQSLTVSDFNYDLPPELIAQTPAATRTGSRLLHLDAASHLHDRQFADLIDLLRPDDLLVFNDTRVIKARLAGHKITGGKVEVLVERITESDRVLAHVRASKSPGPGMVLRLADAFEATVLGREGELFDIRFPGPVLDLLDAHGATPLPPYITHAADAGDDDRYQTVYAREPGAVAAPTAGLHFDQPTLDRLADRGIARAFVTLHVGAGTFQPVRVDNLADHVMHAEWFTVPQATVDAIAATRAKGGRVIAVGTTSVRALESAAAQTEGRTADGLPLAAAQGDTRLFITPGYRYRVVDALVTNFHLPQSTLLMLVSALAGVEPIRRAYAHAVAQRYRFFSYGDAMFIESLAP

SEQ ID NO: 62658 - protein, 352 aa, Achromobacter pulmonis
  misc_feature (1)..(352): tr|A0A2N8KGN0|A0A2N8KGN0_9BURK S-adenosylmethionine:tRN A ribosyltransferase-isomerase OS=Achromobacter pulmoni s OX=1389932 GN=queA PE=3 SV=1
MTQSLTVSDFDYDLPPELIAQTPAAERTGSRLLHLDRAGQLHDRQFADLAALLRPGDLLVFNDTRVIKARLTGHKITGGKVEVLVERITEPDRVLAHVRASKSPGAGMVLRLAEAFDATVLGRDGELFDIRFPGPVLELLDAHGATPLPPYITHQADAGDDERYQTVYAREPGAVAAPTAGLHFDQPTLDRLQALGVARAFVTLHVGAGTFQPVRVDNLADHVMHAEWYTVPQATVDAIAAARGRGGRVIAVGTTSVRALESAAAQTEGRAAPGLPLAPAQGDTRLFITPGYQYRVIDALVTNFHLPQSTLLMLVSALAGVEPIRRAYAHAVAERYRFFSYGDAMFIESPAP

SEQ ID NO: 62659 - protein, 351 aa, Achromobacter ruhlandii
  misc_feature (1)..(351): tr|A0A1D8IEM5|A0A1D8IEM5_9BURK S-adenosylmethionine:tRN A ribosyltransferase-isomerase OS=Achromobacter ruhland ii OX=72557 GN=queA PE=3 SV=1
MQALTVSDFDYELPPELIAQTPAAQRTGSRLLHLYGASQLHDRQFADLEKLLRPGDLLVFNDTRVIKARLAGHKITGGKVEVLVERIIDTDRALAHVRASKSPGAGMVLRLADAFDATVLGREGELFDIRFPGPVLELLDAHGATPLPPYITHAADAGDDDRYQTVYAREPGAVAAPTAGLHFDQPTLDRLAALGVERAFVTLHVGAGTFQPVRVDNLADHVMHAEWFTVPQATVDAIAATRARGGRVIAVGTTSVRALESAAAQTEGRTAPGLPLAAAQGDTRLFITPGYQYRVIDALVTNFHLPQSTLLMLVSALAGVEPIRRAYAHAVAQRYRFFSYGDAMFIESPAP

SEQ ID NO: 62660 - protein, 351 aa, Achromobacter ruhlandii
  misc_feature (1)..(351): tr|A0A2M9GVJ5|A0A2M9GVJ5_9BURK S-adenosylmethionine:tRN A ribosyltransferase-isomerase OS=Achromobacter ruhland ii OX=72557 GN=queA PE=3 SV=1
MQALTVSDFDYELPPELIAQTPAAQRTGSRLLHLDGASQLHDRQFADLEKLLRPGDLLVFNDTRVIKARLAGHKITGGKVEVLVERIIDTDRALAHVRASKSPGAGMVLRLADAFDATVLGREGELFDIRFPGPVLELLDAHGATPLPPYITHAADAGDDDRYQTVYAREPGAVAAPTAGLHFDQPILDRLAALGVERAFVTLHVGAGTFQPVRVDNLADHIMHAEWFTVPQATVDAIAAARARGGRVIAVGTTSVRALESAAAQTEGRTAPGLPLAAAQGDTRLFITPGYQYRVIDALVTNFHLPQSTLLMLVSALAGVEPIRRAYAHAVAQRYRFFSYGDAMFIESPAP

SEQ ID NO: 62661 - protein, 356 aa, Achromobacter sp.
  misc_feature (1)..(356): tr|A0A0M9J3R5|A0A0M9J3R5_9BURK S-adenosylmethionine:tRN A ribosyltransferase-isomerase OS=Achromobacter sp. ATC C35328 OX=1806490 GN=queA PE=3 SV=1
MRVTDFSFELPESLIAHYPMPERSSCRLLSLDGPTGALTHGTFTDLLDKLNPGDLLVFNNTRVIPARLFGRKASGGKIEVLVERMLDDKRILAHIRASKAPKPGAELLLGDDESINATMTARHGALFEVEFNDERSVLDILNSIGHMPLPPYIDRPDEDADRELYQTVYSEKPGAVAAPTAGLHFDEPLLEKLRAKGVEMAFVTLHVGAGTFQPVRVDTIEDHIMHSEYAEVPQDVVDAVLAAKARGNRVIAVGTTSVRSLESAAQAAKNDLIEPFFDDTQIFIYPGFQYKVVDALVTNFHLPESTLIMLVSAFAGYQHTMNAYKAAVEEKYRFFSYGDAMFITYNPQAINERVGE

SEQ ID NO: 62662 - protein, 80 aa, Achromobacter sp.
  misc_feature (1)..(80): tr|A0A226YA01|A0A226YA01_9BURK S-adenosylmethionine:tRN A ribosyltransferase-isomerase (Fragment) OS=Achromobac ter sp. KAs 3-5 OX=1915388 GN=BMR85_002450 PE=3 SV=1
PGVPLATAQGDTRLFITPGYAYRVVDALVTNFHLPQSTLLMLVSALAGVEPIRRAYAHAVAARYRFFSYGDAMFIETPAS

SEQ ID NO: 62663 - protein, 352 aa, Achromobacter spanius
  misc_feature (1)..(352): tr|A0A2S5GJM3|A0A2S5GJM3_9BURK S-adenosylmethionine:tRN A ribosyltransferase-isomerase OS=Achromobacter spanius OX=217203 GN=queA PE=3 SV=1
MTQSLTVSDFNYELPPELIAQTPAAQRTGSRLLHLDAASQLHDRQFADLVGLLRPNDLLVFNDTRVIKARLAGHKITGGKIEVLVERITESDRVLAHVRASKSPGPGMVLRLADAFDATVLGREGELFDIRFPGPVLDLLDAHGATPLPPYITHAADAGDDDRYQTVYAREPGAVAAPTAGLHFDQPTLDRLADLGIARAFVTLHVGAGTFQPVRVDNLADHIMHAEWFTVPQATVDAIAATRAEGGRVIAVGTTSVRALESAAAQTEGRTAPGLPLAAAQGDTRLFITPGYRYRVVDALVTNFHLPQSTLLMLVSALAGVEPIRRAYAHAVAQRYRFFSYGDAMFIESPAP

SEQ ID NO: 62664 - protein, 358 aa, Achromobacter spanius
  misc_feature (1)..(358): tr|A0A2S0IGI9|A0A2S0IGI9_9BURK S-adenosylmethionine:tRN A ribosyltransferase-isomerase OS=Achromobacter spanius OX=217203 GN=queA PE=3 SV=1
MAPDTRVTQSFTVSDFDYELPPELIAQTPAAERTGSRLLHLDAASQLHDRQFADLTSLLRPNDLLVFNDTRVIKARLPGHKITGGKIEVLVERITEPDRVLAHVRASKSPGAGMVLRLADAFEATVLGREGELFDIRFPGPVLDLLDAHGATPLPPYITHAADAGDDDRYQTVYAREPGAVAAPTAGLHFDQPTLERLAGLGVARAFVTLHVGAGTFQPVRVDNLADHVMHAEWFTVPQATVDAIAAARAQGGRVIAVGTTSVRALESAAAQTEGRTAPGVPLAPAQGDTRLFITPGYQYRVVDALVTNFHLPQSTLLMLVSALAGVEPIRRAYAHAVAARYRFFSYGDAMFIETPAS

SEQ ID NO: 62665 - protein, 352 aa, Achromobacter xylosoxidans
  misc_feature (1)..(352): tr|E3HRH0|E3HRH0_ACHXA S-adenosylmethionine:tRNA ribosy ltransferase-isomerase OS=Achromobacter xylosoxidans (s train A8) OX=762376 GN=queA PE=3 SV=1
MTQSLTVADFNYELPPELIAQAPAAERTGSRLLHLDGAGQLHDRQFADLAALLRPQDLLIFNDTRVIKARLNGHKITGGKIEVLVERITEPDRVLAHVRASKSPGPGMVLRLADAFDATVLGREGELFDIRFPGPVLDLLDAHGATPLPPYITHEADTGDDERYQTVYAREPGAVAAPTAGLHFDQPTLDRLAAMGVERAFVTLHVGAGTFQPVRVDNLADHVMHAEWFTVPQATVDAIAAARSRGGRVIAVGTTSVRALESAAAQTEGRTAPGLPLAAAQGDTRLFITPGYRYRVIDALVTNFHLPQSTLLMLVSALAGVEPIRRAYAHAVAERYRFFSYGDAMFIESPAP

SEQ ID NO: 62666 - protein, 340 aa, Acidaminobacter hydrogenoformans
  misc_feature (1)..(340): tr|A0A1G5RX76|A0A1G5RX76_9FIRM S-adenosylmethionine:tRN A ribosyltransferase-isomerase OS=Acidaminobacter hydro genoformans DSM 2784 OX=1120920 GN=queA PE=3 SV=1
MKTSDFYFNLPEELIAQTPLKDRAASRLLCLDKETGQTHHESFRDLLKHLKVGDCLVINDTRVLPARLFGRRSSGAAVEFLLLKRVEGDVWQTLVKPGKKARPGDTFEFGDGSLRAVVEGLSEEGTRLVRFAYEGIFEEVLDRLGTMPLPPYIRETLEDSERYQTVYSNKYGSAAAPTAGLHFDDALLDAIEKKGIEIARITLHVGLGTFRPVKAESLQDHVMHAEYFEIGPEAVQKIQRAKQGGGRVIAVGTTSVRTLESAAGRHETLQACSGWTDIFIYPGYAFKVVDGLVTNFHLPESTLIMLVSALAGRDNVLAAYKEAVSQRYRFFSFGDAMLIL

SEQ ID NO: 62667 - protein, 343 aa, Acidaminococcaceae bacterium
  misc_feature (1)..(343): tr|A0A349RGE9|A0A349RGE9_9FIRM S-adenosylmethionine:tRN A ribosyltransferase-isomerase OS=Acidaminococcaceae ba cterium OX=2049052 GN=queA PE=3 SV=1
MKVTDFDYELPKELIAQHPAEPRDHSRLLVVDKNTGKTEHRHFYDLPKYLHPGDLLVFNDTRVIPARLYGYKDTGAHVEVFLLTRLNNTDWEVLVRPGKKLQVGAHIKFAEELAGTIIDHTDFGGRIIRFEFDGVFEEILDRLGEVPLPPYITAELEDKERYQTVYNRDPGSAAAPTAGLHFTKELMQKIKDMGCEEVFVTLNVGLGTFRPVTEENIEDHPMHKEFYTVTPEAAAAINKAKAEGRRIVAVGTTAVRTLESAGADGEVKAGSSWTQIYIYPGFRWHIVDALVTNFHLPQSTLLMLVSSLSSRELMLQTYAEAVKEKYRFFSFGDAMFITTLDRM

SEQ ID NO: 62668 - protein, 343 aa, Acidaminococcaceae bacterium
  misc_feature (1)..(343): tr|A0A3D2QCJ0|A0A3D2QCJ0_9FIRM S-adenosylmethionine:tRN A ribosyltransferase-isomerase OS=Acidaminococcaceae ba cterium OX=2049052 GN=queA PE=3 SV=1
MKVTDFDYDLPKELIAQHPMEPRDHSRLLVVDKDTGEMEHRHFYDLPEYLRPGDLLVFNDTRVIPARLHGFKDTGAHVEVFLLTRMNNTDWEVLVRPGKRLQVGAHIRFSDDLACTIIDHTDFGGRIARFEFDGVFEEILDRLGEVPLPPYITAELEDKERYQTVYNRAPGSAAAPTAGLHFTKELLQKIQAMGCEEVFVTLNVGLGTFRPVNEENIEDHLMHREFYSITPEAAAAINKARAEGRRIVAVGTTAVRTLEAAGTAGTIKAGGNWTNIFIYPGFQWHFVDALVTNFHLPQSTLLMLVSALSTREIMLHTYAEAVKEKYRFFSFGDAMFITKLHQD

SEQ ID NO: 62669 - protein, 338 aa, Acidaminococcus fermentans
  misc_feature (1)..(338): tr|A0A1I5J6C3|A0A1I5J6C3_ACIFE S-adenosylmethionine:tRN A ribosyltransferase-isomerase OS=Acidaminococcus ferme ntans OX=905 GN=queA PE=3 SV=1
MEVTDFDYDLPQELIAQTPVEPRDSSRLLVMDKKTGELEHRHFFNLPEYLKPGDLLVFNDTRVIPARLHGFKTTGAHVEVFLLTRKNATDWEVLVKPGKKLQKGARIKFSDELSCEILDTTDFGGRIARFQYDGIFEEILDRLGETPLPPYIHEKLEDKERYQTVYNRERGSAAAPTAGLHFTRELLQKIRDMGVEEVFVTLHVGLGTFRPVNESRIEDHKMHREFYTVSQEAADAINKAKREGRRIIAVGTTSVRTLESAGASGEMKAGGNWTSIFIYPGYQFRFVDALVTNFHLPQSTLIMLVSALSTRENILHAYKVAVQEKYRFFSFGDAMFIH

SEQ ID NO: 62670 - protein, 338 aa, Acidaminococcus fermentans
  misc_feature (1)..(338): tr|D2RLD2|D2RLD2_ACIFV S-adenosylmethionine:tRNA ribosy ltransferase-isomerase OS=Acidaminococcus fermentans (s train ATCC 25085 / DSM 20731 / VR4) OX=591001 GN=queA P E=3 SV=1
MEVTDFDYDLPQELIAQTPVEPRDSSRLLVMDKKTGELEHRHFFNLPEYLKPGDLLVFNDTRVIPARLHGFKTTGAHVEVFLLNRKNATDWEVLVKPGKKLQKGARIKFSDELSCEILDTTDFGGRIARFQYDGIFEEILDRLGETPLPPYIHEKLEDKERYQTVYNRERGSAAAPTAGLHFTRELLQKIRDMGVEEVFVTLHVGLGTFRPVNESRIEDHKMHREFYTVSQEAADAINKAKREGRRIIAVGTTSVRTLESAGASGEMKAGGNWTSIFIYPGYQFRFVDALVTNFHLPQSTLIMLVSALSTRENILHAYKVAVQEKYRFFSFGDAMFIH

SEQ ID NO: 62671 - protein, 339 aa, Acidaminococcus intestini
  misc_feature (1)..(339): tr|C0WEF3|C0WEF3_9FIRM S-adenosylmethionine:tRNA ribosy ltransferase-isomerase OS=Acidaminococcus intestini OX= 187327 GN=queA PE=3 SV=1
MEVTDFDYDLPKELIAQTPIEPRDASRLLVMDKKTGALEHRHFYNLPEYLRPGDVLVFNDTRVMPARLHGTKTTGAHVEVFLLTRKNNTDWEVLVKPGKKLQEGAEIIFSDELSCTILEKTDFGGRIARFRFDGVFEEILDRLGETPLPPYIHEKLKDKERYQTVYNRELGSAAAPTAGLHFTKELMQKIKEMGVEEVFVTLNVGLGTFRPVSEERIEDHEMHSEFYTVSPEAAAALNRAKKEGRRIIAVGTTSVRTLESAGASGTMVPGGNWTKIFIYPGFKFHFVDALVTNFHLPQSTLIMLVSALSSRENILHAYGEAVKEKYRFFSFGDAMFIKD

SEQ ID NO: 62672 - protein, 339 aa, Acidaminococcus intestini; identical to SEQ ID NO: 62671
  misc_feature (1)..(339): tr|G4Q516|G4Q516_ACIIR S-adenosylmethionine:tRNA ribosy ltransferase-isomerase OS=Acidaminococcus intestini (st rain RyC-MR95) OX=568816 GN=queA PE=3 SV=1

SEQ ID NO: 62673 - protein, 338 aa, Acidaminococcus sp.
  misc_feature (1)..(338): tr|R7LY37|R7LY37_9FIRM S-adenosylmethionine:tRNA ribosy ltransferase-isomerase OS=Acidaminococcus sp. CAG:542 O X=1262687 GN=queA PE=3 SV=1
MEVTDFDYDLPQELIAQTPVEPRDSSRLLVMDKKTGELEHRHFFNLPEYLKPGDVLVFNDTRVIPARLHGFKTTGAHVEVFLLTRKNATDWEVLVKPGKKLQKGAQIKFSDELSCEILETTDFGGRIARFHYDGIFEEILDRLGETPLPPYIHEKLQDKERYQTVYNRERGSAAAPTAGLHFTKELLQKIRDMGVEEVFVTLHVGLGTFRPVNESRIEDHKMHREFYTVSQEAADAINKAKREGRRIIAVGTTSVRTLESAGASGEMKAGGNWTSIFIYPGYQFKFVDALVTNFHLPQSTLIMLVSALSTRENILHAYKVAVQEKYRFFSFGDAMFIH

SEQ ID NO: 62674 - protein, 338 aa, Acidaminococcus sp.
  misc_feature (1)..(338): tr|A0A415EKH0|A0A415EKH0_9FIRM S-adenosylmethionine:tRN A ribosyltransferase-isomerase OS=Acidaminococcus sp. A M05-11 OX=2291997 GN=queA PE=3 SV=1
MDVTDFDYELPQELIAQHPVEPRDSSRLLVMDKKTGELEHRHFYNLPEYLKPGDVLVFNDTRVIPARLHGVKTTGAHVEVFLLTRKNATDWEVLVRPGKKLQKGAQINFSEELSCEILETTDFGGRIARFHYDGVFEEILDRLGETPLPPYIHEPLADKERYQTVYSRERGSAAAPTAGLHFTKELLQKIKDMGVEEVFVTLHVGLGTFRPVSESRIEDHKMHSEFYSVTPEAAEAINRAKREGRRVIAVGTTSVRTLESAGADGIVKPGGSWTSIFIYPGYQYKIVDALVTNFHLPQSTLIMLVAALTSREMILNAYKVAVQEKYRFFSFGDAMFIR

SEQ ID NO: 62675 - protein, 346 aa, Acidibacillus ferrooxidans
  misc_feature (1)..(346): tr|A0A101XP46|A0A101XP46_9BACL S-adenosylmethionine:tRN A ribosyltransferase-isomerase OS=Acidibacillus ferroox idans OX=1765683 GN=queA PE=3 SV=1
MKTEDFDYELPAHLIAQTPLEKRSDSRLLVLNRKEQTLAHARFYELGNYLRAGDLLIFNDSRVIPARLFGEKEGTGGAVELLLLRPLQNPVHFEALVKPGRRIRSGQRLRFGGGALTGTVIGEGQDGVRHIAFDTDAKMWDALLETLGEMPLPPYIHERLEDRTRYQTVYAREKGSAAAPTAGLHFTDELLSSLAAQGVERAFVTLHVGLGTFRPVQVEDVEKHTMHAEWFRIPAETKQAIERAKAEGRRVICVGTTSVRTIESAWRNYGTVAEDGSIQGFTDIFIHPNEPLRVTEGLITNFHLPQSTLMMLVAALIGRERLLETYRIAVEHEYRFFSFGDAMLIL

SEQ ID NO: 62676 - protein, 346 aa, Acidibacillus ferrooxidans
  misc_feature (1)..(346): tr|A0A162TDJ2|A0A162TDJ2_9BACL S-adenosylmethionine:tRN A ribosyltransferase-isomerase OS=Acidibacillus ferroox idans OX=1765683 GN=queA PE=3 SV=1
MKTEDFDYQLPAHLIAQTPLMKRSDSRLLVLDRKEQALAHARFYELGNYLRAGDLLIFNDSRVIPARLFGEKEGTGGVVEILLLRPLDNPVHFEVLAKPGRRIKTGQRIRFGDGALTGTIIGEGEDGIRHIAFDTEPRMWDTLLETLGEMPLPPYIHEHLEDRTRYQTVYAREKGSAAAPTAGLHFTEELLASLAAQGVERAFVTLHVGLGTFRPVQVEDVENHTMHAEWFRVPAETKRAIEKAKAEGRRVICVGTTSVRTIESAWRDYGTVAEDGSIQGFTDIFIHPNEPLRVTEGLITNFHLPQSTLMMLVAALIGRERLLEAYRVAVAMEYRFFSFGDAMLIL

SEQ ID NO: 62677 - protein, 346 aa, Acidibacillus sulfuroxidans
  misc_feature (1)..(346): tr|A0A2U3DB55|A0A2U3DB55_9BACL S-adenosylmethionine:tRN A ribosyltransferase-isomerase OS=Acidibacillus sulfuro xidans OX=1765684 GN=queA PE=3 SV=1
MNTHEYKYNLPEELIAQSPEPHRSSSRLLVLDRKSDELKHAHFYDLPKFLRSGDLLIANDSRVIPARLFGRKRDTGAMIELLLLRPYAVAGQWEVLLRPAKRLAMGQQVVFGDGQLTATLIAHLPGDTRLVEFSASGTVFDALLDTLGQMPLPPYIKSKLEDPNRYQTVYAREKGSVAAPTAGLHFTPQLIQELEENGIQMHFITLHVGLGTFRPVQADRIEDHHMHEEWYRVPATVVDAIQAAKRSGRRVLCVGTTTVRALESAWRIRQQQTPSTEISGWTNIFIYPGFQFQVTDALITNFHLPESTLLMLVSALVGRERLLAAYEVAVQQKYRFYSFGDAMLIL

SEQ ID NO: 62678 - protein, 346 aa, Acidiferrobacter sp.
  misc_feature (1)..(346): tr|A0A2D7VN33|A0A2D7VN33_9GAMM S-adenosylmethionine:tRN A ribosyltransferase-isomerase OS=Acidiferrobacter sp. OX=1872107 GN=queA PE=3 SV=1
MKYSIDFDYDLPEDLIAQAPLAKRTDSRLLVVPAAHHTLIDTVFSDLEQRLRHGDLLVVNETKVLPARLYGQKSRTGGKVELLLERLLDEGTALVQLRASKPPGPGTELTTKGGAPLRVLGRDGMFFVVACSGGERFEELLYREGEAPLPPYIERPVKDTDRDRYQTVYARHPGAVAAPTAGLHFDERLFEKLAAKGVQLAKLTLHVGAGTFSPMKSEILDQHEMHAEEIVVSDELVEAVCQTRDRGGRVVAVGTTVVRALESAAQRGALAPMRGPTKLFIRPGFRFSVVDMLITNFHLPRSTLLVLVSAFAGVDRIREAYKHAVDRRYRFFSYGDAMLLESRRVQ

SEQ ID NO: 62679 - protein, 348 aa, Acidiferrobacter sp.
  misc_feature (1)..(348): tr|A0A2Z3R8V0|A0A2Z3R8V0_9GAMM S-adenosylmethionine:tRN A ribosyltransferase-isomerase OS=Acidiferrobacter sp. SPIII_3 OX=1281578 GN=queA PE=3 SV=1
MTPDAFDYDLPPELIAQAPVSPRSASRLMVVGADDEGVADRRFADLGEYLRAGDLLVFNDTRVVPARFYGRRATGGRVELLLERFLDDDGRAHVALRASKSPRAGEVLVLEGGLYATVLRRAGELTEVVFRGADDLMGLIERVGHVPLPPYITRPDNEDDRTRYQTVYARFPGAVAAPTAGLHFDEALLARLAGQGVETAFVTLHVGAGTFRPVRPEALAQGRLHPERIIVSEACVAAIAAAQARGGRVVAVGTTTARALEAAAASGTLKPHVGDTDLFIRPGFQFRATEGLITNFHLPRSTLLMLVCAFAGADRVMDAYHRAVMMRYRFFSYGDAMLLWRARPRENK

SEQ ID NO: 62680 - protein, 347 aa, Acidiferrobacter thiooxydans
  misc_feature (1)..(347): tr|A0A368HLN0|A0A368HLN0_9GAMM S-adenosylmethionine:tRN A ribosyltransferase-isomerase OS=Acidiferrobacter thio oxydans OX=163359 GN=queA PE=3 SV=1
MTSDLFDYDLPPELIAQTPVSPRSASRLMVVSADDGGLADRQFADLGEYLLAGDLLVFNDTRVVPARFYGRRPTGGRVELLLERFLDDGGRAHVALRASKSPRAGEVLTLEGGLYATVLGRTGELTEVMFSGADDLMGLIERVGHVPLPPYITRPDNENDRTRYQTVYARVPGAVAAPTAGLHFDEALLARLAGQGVETAFVTLHVGAGTFRPVRPETLAQGRLHPERIIVSEALVAAIAATKAHGGRVIAVGTTTARALEAAAASGTLRPYIGDTDLFIRPGFQFRVTEGLITNFHLPHSTLLMLVCAFAGADRVRDAYRRAVMMRYRFFSYGDAMLLWRAARENK

SEQ ID NO: 62681 - protein, 347 aa, Acidiferrobacter thiooxydans
  misc_feature (1)..(347): tr|A0A1C2FX33|A0A1C2FX33_9GAMM S-adenosylmethionine:tRN A ribosyltransferase-isomerase OS=Acidiferrobacter thio oxydans OX=163359 GN=queA PE=3 SV=1
MTPDVFDYDLPPELIAQTPVSPRSASRLMVVSADDGGLADRQFADLGEYLRAGDLLVFNDTRVVPARFYGRRPTGGRVELLLERFLDDGGRAHVALRASKSPRAGEVLTLEGGLYATVLGRTGELTEVMFSGADDLMGLIERVGHVPLPPYITRPDNENDRTRYQTVYARVPGAVAAPTAGLHFDEALLARLAGQGVETAFVTLHVGAGTFRPVRPETLAQGRLHPERIIVSEALVAAIAATKAHGGRVIAVGTTTARALEAAAASGTLRPYIGDTDLFIRPGFQFRVTEGLITNFHLPHSTLLMLVCAFAGADRVRDAYRRAVMMRYRFFSYGDAMLLWRAAREYK

SEQ ID NO: 62682 - protein, 207 aa, Acidiferrobacteraceae bacterium
  misc_feature (1)..(207): tr|A0A2E9IGN3|A0A2E9IGN3_9GAMM S-adenosylmethionine:tRN A ribosyltransferase-isomerase OS=Acidiferrobacteraceae bacterium OX=2024893 GN=CL393_10145 PE=3 SV=1
MEVLVNHGAVPLPPYIHREADDKDTERYQTVYASHPGAVAAPTAGLHFDQALLNQLENRGINIGRITLHVGAGTFLPVRSEEVADHRMHPEWMEVEASLCDEVRTTRERGGRVVAVGTTTVRALETASQGGGLSPFQGESEIFIFPGFAFSVVDALITNFHLPRTTLLMMISAFAGRQRVLEAYRHAVDNKFRFYSYGDAMYIERKQ

SEQ ID NO: 62683 - protein, 340 aa, Acidiferrobacteraceae bacterium
  misc_feature (1)..(340): tr|A0A2D6K818|A0A2D6K818_9GAMM S-adenosylmethionine:tRN A ribosyltransferase-isomerase OS=Acidiferrobacteraceae bacterium OX=2024893 GN=queA PE=3 SV=1
MKLSDFDYDLPPELIAQYPATSRSESRLLALTSSGALEERRFFSIGDFLRRGDLLVVNDTKVLPARLVARKPTGGRVEVLVERVLGDRELKVQMRASKTPKVGGELIFPGGESAHVIEREGDFYQLRFSQHSPMEVLVNHGAVPLPPYIHREADDQDTERYQTVYASHPGAVAAPTAGLHFDQALLNQLEDRGINIGRITLHVGAGTFLPVRNEEVADHRMHSEWMEVEASLCDEVRTTRERGGRVIAVGTTTVRALETASQGGGLSPFQGESEIFIFPGFAFSVVDALITNFHLPRTTLLMMISAFAGRQRVLEAYRHAVDNKFRFYSYGDAMYIERKQ

SEQ ID NO: 62684 - protein, 344 aa, Acidihalobacter ferrooxidans
  misc_feature (1)..(344): tr|A0A1P8ULC6|A0A1P8ULC6_9GAMM S-adenosylmethionine:tRN A ribosyltransferase-isomerase OS=Acidihalobacter ferro oxidans OX=1765967 GN=queA PE=3 SV=1
MRTSDFHFDLPAAQIAQHPLAERSASRLLVLDPVDDRLEDDQFSALVDRLSPDDLLVFNDTRVIPARLQGRKDTGGRIEVLIERLLDDRRVLAHVRASKSPRAGSALLLENALEVDVLERADELFVLAFRGETPVLELLERHGHVPLPPYIARGDEAGDRDRYQTVYANRPGAVAAPTAGLHFDAPLLERLRDRGVRMTHITLHVGAGTFQPVRVDDPDKHVMHAEYLEVSEEVCNAVAACRARAGRVIAVGTTSVRSLETAAQSGELQPYAGDTRLFIRPGYQYRVVDALVTNFHLPESTLLMLVAALGGYAPVMRAYRHAVKAGYRFYSYGDAMFVSRRHAF

SEQ ID NO: 62685 - protein, 341 aa, Acidihalobacter prosperus
  misc_feature (1)..(341): tr|A0A1D8K7E5|A0A1D8K7E5_9GAMM S-adenosylmethionine:tRN A ribosyltransferase-isomerase OS=Acidihalobacter prosp erus OX=160660 GN=queA PE=3 SV=1
MLTSDFYYELPEQLIAQVPLEPRSASRMLVLDAETGLSDRWIIALPDLLKPGDLLVFNDTRVIPARLNGHKATGGRVEVLIERIVGERRALAHIRASKSPASGSRLELEGGVSVEVQGREGELFILEFTGGASVLEQLEHHGHVPLPPYIQRGDTEADRERYQTIFANRAGAVAAPTAGLHFDEALMAGIRARGVETARVTLHVGAGTFQPVRVADPSQHHMHAEYAEVDETVCAAVTACRARGGRVVAVGTTCVRSLESAAASGELKPFAGDTQLFITPGYEFKVVDALLTNFHLPESTLLMLVCAFAGYAPVMAAYRHAVAESYRFFSYGDAMFLTRAS

SEQ ID NO: 62686 - protein, 341 aa, Acidihalobacter prosperus
  misc_feature (1)..(341): tr|A0A1D8IPC9|A0A1D8IPC9_9GAMM S-adenosylmethionine:tRN A ribosyltransferase-isomerase OS=Acidihalobacter prosp erus OX=160660 GN=queA PE=3 SV=1
MLTRDFHYDLPETLIAQAPQEPRSASRMLALDAGRGLVDSLVAELPTFLSAGDLLVFNDTRVIPARLFGQKETGGRVEVLVERITSECTALAHVRASKSPPAGSLLMLEGGLEVCVQGREGELFVLEFVGVPSVLDALERHGHMPLPPYIRRQDTDEDRARYQTIFAQRSGAVAAPTAGLHFDEGLLARIRERGVETARVTLHVGAGTFQPVRVSDPTQHHMHAEYAEVDEATCEAVRACRTRGGRVVAVGTTCVRSLESAAADGELRPFAGDTRLFITPGYRFHVVDALVTNFHLPESTLLMLVCAFAGYEPVMAAYRHAVSESYRFFSYGDAMFLTRTR

SEQ ID NO: 62687 - protein, 334 aa, Acidimicrobiaceae bacterium
  misc_feature (1)..(334): tr|A0A2D8GFZ8|A0A2D8GFZ8_9ACTN S-adenosylmethionine:tRN A ribosyltransferase-isomerase OS=Acidimicrobiaceae bac terium OX=2024894 GN=queA PE=3 SV=1
MTDRPETLADIDYDLPAERIAQEPIEPRDAARLLVDRGDRVEHRHVRDLPDLLHPGDLVVVNDTKVLPARIPVRRSTGGAAEILLLEERDDGSWEALAKPSKKLKPGDVVTAEGLAVEMGEDLGDGRRAVRLDPGDADLHDRLAKVGLPPLPPYIENQIDDPSRYQTVYADRPLSAAAPTAGLHFTPAVLEALRANGITMATVELAVGLDTFRPVMVDRLDDHVMHSEWYRVPDETVAAVEAAERVVAIGTTVVRSLESWKATGEQSGRSSLFIRRPYAWKAVDVLLTNFHLPQSTLLCLVDGFVGPRWRTLYETAVAEDYRFLSFGDAMLLER

SEQ ID NO: 62688 - protein, 333 aa, Acidimicrobiaceae bacterium
  misc_feature (1)..(333): tr|A0A1Z9KKU1|A0A1Z9KKU1_9ACTN S-adenosylmethionine:tRN A ribosyltransferase-isomerase OS=Acidimicrobiaceae bac terium TMED189 OX=1986618 GN=CBD49_02630 PE=3 SV=1
MNKTPTTDLEYDLKESSIAQVRYKNPGSSKLLIASTKQILTFEKYIKNLSNKSVFIFNKSSVQNVRIETNKLYTNGKVEFFILSLLSTNTAEVLIKTSSNLLPGDVVSTYIADVRIVEKNNSIFTVDFNTEVQLLIDEYGKVPLPPYIKDDVSKYEDYKNQFSDGGFSVASSTAGLHFSLRMISDLIKNNHKVFYVNLDINLGTFKQIDTSNVEDYKIHSEYYNMDESDFHEILSLKEDGYNIVTVGTTVLRTLETVAANSTYRGLTNLFITPGYKFKVSNTLITNFHAPRSSLLAIVQTIFGDNWKDLYSYAQSNHLKFLSFGDAVLFNIDE

SEQ ID NO: 62689 - protein, 339 aa, Acidimicrobiales bacterium
  misc_feature (1)..(339): tr|A0A2A5YUV0|A0A2A5YUV0_9ACTN S-adenosylmethionine:tRN A ribosyltransferase-isomerase OS=Acidimicrobiales bact erium MED-G01 OX=1986263 GN=queA PE=3 SV=1
MKEFDYELPAGAVAQKPAVPRDSAKLLVDAGLGRPPQHLTVTDLPDQLGPGDVVVVNETSVIPARLPLRKVTGGAVEVLLLEPVADGWAALVKPSRRVKSGTELRSERDKDLQVMVGDEIGEDGQRKVVVIHAGVAVSNPNESQRLSRAGESPLPPYITSKGHSPERYQTVYARTPGSVAAPTAGLHLTNELLQEIRDRGARIKKIDLVVGLDTFRPVTVDDPADHVMHSESYKVDESTWEACQKARRVVAIGTTTVRALESAARGTLSGRTELFLRRGSKFEVVDVLMTNFHMPRSTLLMMIDAFIGDRWKELYREALDNNYRFLSFGDAMLLHRAPS

SEQ ID NO: 62690 - protein, 342 aa, Acidimicrobiales bacterium
  misc_feature (1)..(342): tr|A0A2W6CB75|A0A2W6CB75_9ACTN S-adenosylmethionine:tRN A ribosyltransferase-isomerase OS=Acidimicrobiales bact erium OX=2201156 GN=queA PE=3 SV=1
MASFEYHLPPAAIAQEPAEPRTAARLLVATEPTGPVDHRRVADLPELLAPGDVVVVNDTRVLPARLRLRKATGARIEVLLLEPTGDGEWEGLVRPGRRAPPGTVLLHGTVAVAEVGPPAPMHGGCVWGRDGRRVVRILDPKLADEIGEVALPPYIDRPLADPERYQTVYARRPGSVAAPTAGLHLTTGLLDAVRAAGAQVASVDLAVGLDTFRPMTGDRPQDHVMHSEAYIVPVATWAACQAARRVLAVGTTTVRALESAAATGKLEGRTSLFIRGSHPWRVVDLLLTNFHLPRSSLLVMVEAFYGPGWRNLYDLALAEGYRFLSFGDAMLLARRANGQLER

SEQ ID NO: 62691 - protein, 349 aa, Acidimicrobiia bacterium
  misc_feature (1)..(349): tr|A0A431IE30|A0A431IE30_9ACTN S-adenosylmethionine:tRN A ribosyltransferase-isomerase OS=Acidimicrobiia bacter ium OX=2080302 GN=queA PE=3 SV=1
MRTDELDYDLPEGAIAQVPIEPRDAARLLVDRGPGRDPEHRTVAELPELVRPGDLLVLNDTRVLPARVPIERASGGTGEVLLLEERDDGWWEVLCRPARKLRPGDVVDATAGGLRFDIGPDVGDGRKLVRPHSDVPLLDALEHAGEMPLPPYIGERLTDAERYQTVFSARPASAAAPTAGLHLTDRLLAELTRRGVATAAVELVVGLDTFRPLSTERVEDHAIHTERYSVPAATWEAVERTRADGGRVVAVGTTSVRALESRATRGEPSGRTDLFITPGYRFAVVDAMVTNFHLPRTSLLALVQAFVGPRWRDLYATALADGYRFLSFGDAMLLARAEPPERADVGVVG

SEQ ID NO: 62692 - protein, 232 aa, Acidimicrobiia bacterium
  misc_feature (1)..(232): tr|A0A0R2QPI1|A0A0R2QPI1_9ACTN S-adenosylmethionine:tRN A ribosyltransferase-isomerase (Fragment) OS=Acidimicro biia bacterium BACL6 MAG-120910-bin40 OX=1655586 GN=ABR 78_01375 PE=3 SV=1
YSSDDTEFLQVGERTKAGDTFLVRLLGGNVVDQLTKYGSMPLPPYITEVLQDAERYQTVFSHDQKSSAAPTAGLHFTPELLQRIRDVGAAICEVELVVGLDTFKPISVDNPLDHLIHTESYRVPLSTMTACNDAHSSGARVIAIGTTATRALESAAKFGQLEGRTNLFITPGFEWKVVDMMMTNFHMPRTTLLLMIQSFIGTRWRELYEEAVAREYRMLSFGDAMLLARRTD

SEQ ID NO: 62693 - protein, 349 aa, Acidimicrobium ferrooxidans
  misc_feature (1)..(349): tr|C7LYS4|C7LYS4_ACIFD S-adenosylmethionine:tRNA ribosy ltransferase-isomerase OS=Acidimicrobium ferrooxidans ( strain DSM 10331 / JCM 15462 / NBRC 103882 / ICP) OX=52 5909 GN=queA PE=3 SV=1
MARGRGAREAWQVPALSVDAFDYDLPAEAIAHDPIEPRRAARLLVARRGAPVAHARVADLARLLEPGDLVVVNESAVVPARLHLQRSSGGAVEVLLLRQLPDGTAEALVRPNRRVRAGERLLADGVEVVEVGGALEAVEGMTIRAVRVLDPERVASIGVAPLPPYLGRQDIPLERYQTVFARRPGSVAAPTAGLHLDEVVLADLAARGIDVVRIVLHVGLGTFWPVTAATLAGHPMHAESYEVDPATWARIEGAKRVVAIGTTVVRTLETVALTGELAGESRLLIAPGFRLQVVDTVLTNFHQPRSTLIALVAAMVGDRWRELYSVALAEGYRFLSFGDAMLVDVEGRR

SEQ ID NO: 62694 - protein, 338 aa, Acidimicrobium sp.
  misc_feature (1)..(338): tr|A0A0R2QG09|A0A0R2QG09_9ACTN S-adenosylmethionine:tRN A ribosyltransferase-isomerase OS=Acidimicrobium sp. BA CL27 MAG-120823-bin4 OX=1655564 GN=queA PE=3 SV=1
MQIKDFDYNLPTELIAQTPVEPRDSARLLVDQGSGLALHRQVRDFIDFCRPGDVVVVNDTKVIPARLRLVRESGGAAEVLLLEQDSTAPFKWEALIRPAKRLKLGETLFASDNSEVVRIGDRTKAGDTFSVELVGEMCDDVEALLKKYGEMPLPPYIETRLEQADRYQTVYANRPASAAAPTAGLHFTPKLLTDLKSAGIKLLTVDLTVGLDTFAPVTSENPLEHPMHSEHYRVTQETLEECARAERVIAVGTTATRALESAATSGVLSGRTKMFISRGYEFKVVDLLLTNFHMPRTTLLMMIEAFVGPRWRDLYSVAIAERYRMLSFGDAMLLNRHL

SEQ ID NO: 62695 - protein, 347 aa, Acidimicrobium sp.
  misc_feature (1)..(347): tr|A0A0R2PGH1|A0A0R2PGH1_9ACTN S-adenosylmethionine:tRN A ribosyltransferase-isomerase OS=Acidimicrobium sp. BA CL17 MAG-120924-bin0 OX=1655565 GN=queA PE=3 SV=1
MCVDVNDIDYELPERLIAQTPCEPRDAARLLVNAPSGMIHRHVSDIDSLFHEGDVMVVNHTRVLPARLKLRRQTGGAVEVLLLEEKQDHAFRWEALVKPGGKLSARELLVDVAGGAVLHVVQRSEAGDTFYVEFVTPDHKSMMDRIIELGEMPLPPYITTRLDDANRYQTVFAHNQKSSAAPTAGLHFTNELLERIRSRGVRICEVELVVGLDTFKPISVDNPLDHQIHTESYRVPAETLTACQEAHSHGKRVIAIGTTATRALESATTFNSLSGRTNLFITPGYQWKIVDLMVTNFHMPRTTLLLMIEAFIGKQWREVYAEAIAREYRMLSFGDAMLLYRDTNVSG

SEQ ID NO: 62696 - protein, 345 aa, Acidiphilium cryptum
  misc_feature (1)..(345): sp|A5FY68|QUEA_ACICJ S-adenosylmethionine:tRNA ribosylt ransferase-isomerase OS=Acidiphilium cryptum (strain JF -5) OX=349163 GN=queA PE=3 SV=1
MNLADFDYHLPPERIAAEPARPRHAARLLHVRGDGLDDRTILDLPALLAPGDLLVVNDTRVIPAQLTGRRGDARIGITLDRPLADGTWRVLLRNARRARPGETIAIDGAGGIAAEVIDRAPDGSATLRFDCDAETFRAMLDRAASLALPPYIPRPAGISEQDRQDYQTMFAAEEGAVAAPTAGLHFTETVLAALAARGVGLATVTLHVGAGTFLPVREDQLERHKLHAERGLIGPETAALVNATRARGGRIVAVGTTSLRVLETAAGDDGTLAPWHGETELFITPGYRFKLVDRLMTNFHLPKSTLLMLVAAFAGVERMRAAYAHAIARGYRFYSYGDASLLERA

SEQ ID NO: 62697 - protein, 345 aa, Acidiphilium multivorum; identical to SEQ ID NO: 62696
  misc_feature (1)..(345): tr|F0IY73|F0IY73_ACIMA S-adenosylmethionine:tRNA ribosy ltransferase-isomerase OS=Acidiphilium multivorum (stra in DSM 11245 / JCM 8867 / NBRC 100883 / AIU301) OX=9265 70 GN=queA PE=3 SV=1

SEQ ID NO: 62698 - protein, 345 aa, Acidiphilium rubrum
  misc_feature (1)..(345): tr|A0A1N6RP62|A0A1N6RP62_ACIRU S-adenosylmethionine:tRN A ribosyltransferase-isomerase OS=Acidiphilium rubrum O X=526 GN=queA PE=3 SV=1
MNLADFDYALPAERIAAEPARPRDAARLLHVTQAELHDCRIADLPELLRRGDCLVVNDTRVIPAQLTGRRGDAVIGITLDRPMDDGTWRVLLRNARRARPGEIITIDRGEGLTATVVSRADDGAARLRFNAEGDAFRTALDAAGALALPPYIPRDASVTTQDQADYQTMFAAHEGAVAAPTAGLHFTPALLEALAAKGITTARVTLHVGAGTFLPVRTETLADHRMHAERCIITAATAATINAARTAGGRIVAVGTTSLRVLETAAAADGTIMPWSGETDLFILPGYRFRAVDRLLTNFHLPRSTLLMLVAAFAGHDRIKTAYQHAIAQHYRFYSYGDACLLEPA

SEQ ID NO: 62699 - protein, 63 aa, Acidiphilium sp.
  misc_feature (1)..(63): tr|F7S8Y7|F7S8Y7_9PROT S-adenosylmethionine:tRNA ribosy ltransferase-isomerase (Fragment) OS=Acidiphilium sp. P M OX=1043206 GN=APM_2788 PE=3 SV=1
MNLADFDYHLPPERIAAEPARPRHAARLLHVRGDGLDDRTILDLPALLAPGDLLVVNDTRVIP

SEQ ID NO: 62700 - protein, 345 aa, Acidiphilium sp.
  misc_feature (1)..(345): tr|A0A066PV07|A0A066PV07_9PROT S-adenosylmethionine:tRN A ribosyltransferase-isomerase OS=Acidiphilium sp. JA12 -A1 OX=1464546 GN=queA PE=3 SV=1
MNLADFDYHLPPERIAAEPARPRHAARLLHVRGDGLDDRTILDLPALLAPGDLLVVNDTRVIPAQLTGRRGDARIGITLDRPLADGTWRVLLRNARRARPGETIAIDGAGGIAAEVIDRAPDGSATLRFDCDAETFRAMLDRAASLALPPYIPRPAGISEQDRQDYQTMFAAEEGAVAAPTAGLHFTETVLAALAARGVGLATVTLHVGAGTFLPVREDQLERHKLHAERGLIGPETAALVNATRARGGRIVAVGTTSLRVLETAAAEDGTLAPWHGETELFITPGYRFRLVDRLMTNFHLPKSTLLMLVAAFAGLERMRAAYAHAIARGYRFYSYGDASLLERA

SEQ ID NO: 62701 - protein, 351 aa, Acidipila dinghuensis
  misc_feature (1)..(351): tr|A0A4Q1SEC3|A0A4Q1SEC3_9BACT S-adenosylmethionine:tRN A ribosyltransferase-isomerase OS=Acidipila dinghuensis OX=1560006 GN=queA PE=3 SV=1
MLVTDFDYELPEELIAQQPPSERSGARMLLVDRNTGHWQDSAFQHLPEQLREGDLLVLNNSRVIPARLYGRRVDTASGIEHTGRIEVFLTTQRSEWEWEVLVKPGRKVQPGTQLVFGAGDLHAEVLDRGEFGERTLRFQPVPDFFAALEALGRIPLPPYIHRGEKDADSDRERYQTVFAEDRGSVAAPTAGLHFTPEILDRIRQRGVEVAYVTLHVGLGTFQPVRVERLEDIHLHTERYTLPEATATALNAARREGRRIVAAGTTTVRTLEHCALLGEEFTPHAGSTNIFISPGFRFRAVNALLTNFHLPQSTLLMLVSAFAGQDHVLAAYRHAVAERYRFFSYGDCMFLS

SEQ ID NO: 62702 - protein, 362 aa, Acidipila rosea
  misc_feature (1)..(362): tr|A0A4R1L816|A0A4R1L816_9BACT S-adenosylmethionine:tRN A ribosyltransferase-isomerase OS=Acidipila rosea OX=76 8535 GN=queA PE=3 SV=1
MQKAESYFLWNDPMLVTDFDYELPEELIAQQPPQQRGGARMLVVGRESGALQDSMFAQFPGLLSDGDLLVLNNSRVIPARLFATREGSGAMQTPTGRIEVLLTEQLDEWEWKALVRPGRKVQIGEVLRFADAFSAEVVAHGEFGERTLRFRPVANFYAQLEMLGHMPLPPYIHRQDEMGDRERYQTVYAQTPGSVAAPTAGLHFTPETLARLRARGVRIAYVTLHVGLGTFQPVRVEKLEDIRLHRERYTLPEETAVEINAALREGRRVIAAGTTTVRTLEHCARIGPGGLQPHSGATEIFISPGFKFQVVQGLLTNFHLPQSTLLMLVSAFAGRERVLAAYRHAVKQRYHFFSYGDCMFVS

SEQ ID NO: 62703 - protein, 353 aa, Acidipila sp.
  misc_feature (1)..(353): tr|A0A372IQS4|A0A372IQS4_9BACT S-adenosylmethionine:tRN A ribosyltransferase-isomerase OS=Acidipila sp. 4G-K13 OX=2303751 GN=queA PE=3 SV=1
MLVSDFDFHLPEELIAQQPPEDRAGARMLRLDRATGAWQDGWFREFPDLLREGDLLVLNDSRVIPARLFAHRAGLHTQAGHQTSGRIQVLLTEQVSEWEWRVLARPGRKVLTGERLTFGENELQAEVTAHGEFGERTLRFEPTPDFFAILDRLGHMPLPPYIHRQDRAQDRERYQTVYARERGSVAAPTAGLHFTPEILERLRGRGVEVAYVTLHVGLGTFQPVRVETVEEIHLHAERYTLSEATAAAINAARRDGRRVIAAGTTTVRTLEHCAATMESGELAAHSGVTSIFISPGYKFRIVGGLLTNFHLPQSTLLMLVSAFGGREHVMAAYGHAVEAGYRFFSYGDCMFVS

SEQ ID NO: 62704 - protein, 370 aa, Acidipila sp.
  misc_feature (1)..(370): tr|A0A3P0XIA7|A0A3P0XIA7_9BACT S-adenosylmethionine:tRN A ribosyltransferase-isomerase OS=Acidipila sp. EB88 OX =2305226 GN=queA PE=3 SV=1
MRLDTEQPALVSDYDFALPPELIAQAPPAERSGARMLTLDRMTGSVADRQFTDLPQQLAPGDLLVLNNSRVLPARLFGRRLKGHAQSGQQPARIEVLLIAEQGPGEWTALVRPGRKVLRGERLVFPFEGAPVLEAEVLEHGEFGERVLRFAVSPGAGSDFYAALDTLGQMPLPPYIHREQSVTTAADRERYQTVYAAERGSVAAPTAGLHFTPEVLEQIRARGVEIVYVTLHVGLGTFQPVRVDRLDAIKLHSERYTLPAPTAQAINRTKQDGRRVVAAGTTTVRTLEHCARVADGAPLAAHAGATDIFLSPGHRFQIVDALLTNFHLPASTLLMLVCAFAGRKPVLAAYRHAVAERYRFFSYGDCMFLS

SEQ ID NO: 62705 - protein, 350 aa, Acidisarcina polymorpha
  misc_feature (1)..(350): tr|A0A2Z5FX32|A0A2Z5FX32_9BACT S-adenosylmethionine:tRN A ribosyltransferase-isomerase OS=Acidisarcina polymorp ha OX=2211140 GN=queA PE=3 SV=1
MLVSDFNFELPEELIAQQPPAERSGARMLVLDRQSGRWRDAWFSDFPDLLHPGDVLVLNDSRVIPARLLGHKASVAQSGKIEALLTQQVNEWEWTALVRPGRKVLLGDTLVFASDNGTSLTAEVVDRGEFGERLLRFHPVPNFFSQLEKVGHMPLPPYIRRQDTSGDRQRYQTVFAERPGSAAAPTAGLHFTPEVLERIRARGVTVVFITLHVGLGTFQPVRVDRVEDIRLHAEPYTLPAQTADAINAALAENRRVIAAGTTTVRTLEHCALAAKGRPLAAHAGTTSIFISPGYEFRIVSGLLTNFHLPQSTLLMLVSAFAGREAALAAYRHAIAERYRFFSYGDCMFLS

SEQ ID NO: 62706 - protein, 344 aa, Acidisphaera rubrifaciens
  misc_feature (1)..(344): tr|A0A0D6P7D1|A0A0D6P7D1_9PROT S-adenosylmethionine:tRN A ribosyltransferase-isomerase OS=Acidisphaera rubrifac iens HS-AP3 OX=1231350 GN=queA PE=3 SV=1
MKAADFDYALPPDRIAQHPARPRDAARLLHVAGDGLRDRTVRDLPSLLRPNDVLVVNDTRVIPAQLVARRGAARIGITLDRPLADGTWHALARNARRLRVGDVLSFDGDATLAAEVAARDPDGGVALRFHTDDLAASLRRAGALALPPYIDRPAGPTEDDGSDYQTVYAATEGAVAAPTAGLHFTPALLDALAARGIGRVHVTLHVGAGTFLPMRGEEVRDHRMHAERGMIGAAAVAAINEARAAGGRVVAVGTTTLRLLETAAADGTLRPWAGETDLFILPGFRFQAVDMLLTNFHLPRSTLFMLVCAFAGEARMRGAYSHAIAAGYRFYSYGDASLLERACD

SEQ ID NO: 62707 - protein, 342 aa, Acidithiobacillales bacterium
  misc_feature (1)..(342): tr|A0A0S8L5J0|A0A0S8L5J0_9PROT S-adenosylmethionine:tRN A ribosyltransferase-isomerase OS=Acidithiobacillales b acterium SM1_46 OX=1703384 GN=queA PE=3 SV=1
MLKSDFAYSLPPDLIAQKPLTFRSASRLLALDGPTGAIRDLRFTDLPGLLHAGDLMVFNDTRVIPARLLGTKDTGGQVEVLIERVLDARRALVLMRASKAPRAGQRLQLEGTVTARVLARRGEFYELEFESDRPVLALLDAIGHMPLPPYIARADVAADRERYQTIYAREAGAVAAPTAGLHFDAATLARLDALGVEQAFITLHVGAGTFQPLRVEEVSAHRMHREWVGVSSVTAERVNAARREGRRVVAVGTTVVRALEAAASEGEVQPFNGETDIFIYPGYRFRVVDALVTNFHLPESTLLMLVCALAGREQVLRAYQHAVTKRYRFFSYGDAMFVTRAA

SEQ ID NO: 62708 - protein, 342 aa, Acidithiobacillales bacterium
  misc_feature (1)..(342): tr|A0A0S8GKR5|A0A0S8GKR5_9PROT S-adenosylmethionine:tRN A ribosyltransferase-isomerase OS=Acidithiobacillales b acterium SM23_46 OX=1703385 GN=queA PE=3 SV=1
MLKSDFAYSLPPDLIAQKPLTFRSASRLLALDGPTGAIRDLRFTDLPGLLRAGDLMVFNDTRVIPARLLGTKDTGGQVEVLIERVLDARRALVLMRASKAPRAGQRLQLEGTVTARVLARRGEFYELEFESDRPVLALLDAIGHMPLPPYIARADVAADRERYQTIYAREAGAVAAPTAGLHFDAATLARLDALGVEQAFITLHVGAGTFQPLRVEEVSAHRMHREWVGVSSVTAERVNAARREGRRVVAVGTTVVRALEAAASEGEVQPFNGETDIFIYPGYRFRVVDALVTNFHLPESTLLMLVCALAGREQVLRAYQHAVTKRYRFFSYGDAMFVTRAA

SEQ ID NO: 62709 - protein, 346 aa, Acidithiobacillus caldus
  misc_feature (1)..(346): tr|F9ZS02|F9ZS02_ACICS S-adenosylmethionine:tRNA ribosy ltransferase-isomerase OS=Acidithiobacillus caldus (str ain SM-1) OX=990288 GN=queA PE=3 SV=1
MKKSDFYYHLPPERIAQEPLPERSASRLLVLDPRTGHLCDSSVRELPQFLRAGDLLVFNDTRVLPARLHARKPTGGAVELLLERLLAPDRARFLARSSKTLKPGARITLAGGEAVELLAREGRMVELGLPGGGNWLDILEAQGEVPLPPYIDRAPAAADRERYQTVYARNPGAVAAPTAGLHFDADLLARLDAAGMERAHITLHVGAGTFLPVEAEEVEEHRMHSERVTVPAATVEQVRRAQARGGRIFAIGTTACRALEGAARSGSLQAFAGETDIFLYPGRPFRVIDGLFTNFHLPESTLLMLVSALAGRERILAAYAHAVAQQYRFFSYGDAMLILPGGVGRA

SEQ ID NO: 62710 - protein, 346 aa, Acidithiobacillus caldus; identical to SEQ ID NO: 62709
  misc_feature (1)..(346): tr|A0A060A133|A0A060A133_ACICK S-adenosylmethionine:tRN A ribosyltransferase-isomerase OS=Acidithiobacillus cal dus (strain ATCC 51756 / DSM 8584 / KU) OX=637389 GN=qu eA PE=3 SV=1

SEQ ID NO: 62711 - protein, 345 aa, Acidithiobacillus ferridurans
  misc_feature (1)..(345): tr|A0A2Z6IFB3|A0A2Z6IFB3_9PROT S-adenosylmethionine:tRN A ribosyltransferase-isomerase OS=Acidithiobacillus fer ridurans OX=1232575 GN=queA PE=3 SV=1
MHKKDFHYELPDALIAQAPLSERSAARMLIVDGHQGTWEDARVRDLPGLLRPGDLLVLNDTRVLPARLQARKATGGAVELLLDRLLDARDGWFLAKSSKALRPGMSIHLPGGAVATVEEKDGMDVRLILPADVAWLPILEAEGSMPLPPYIRRAAEASDRERYQTVYAARPGAVAAPTAGLHFDTELLDALAARGVERTYVTLHVGAGTFLPVRSEDITEHPMHAETMEVSATTVAAVAAARARGGRVIAVGTTACRALETAAQDGTLRPFTGETRLFLYPGKTFQVTDGLLTNFHLPESTLLMLVCAFAGMECMLAAYRHAVAEGYRFFSYGDAMLISPQAGRR

SEQ ID NO: 62712 - protein, 345 aa, Acidithiobacillus ferrivorans
  misc_feature (1)..(345): tr|A0A257TBD5|A0A257TBD5_9PROT S-adenosylmethionine:tRN A ribosyltransferase-isomerase OS=Acidithiobacillus fer rivorans OX=160808 GN=queA PE=3 SV=1
MQKSDFYYELPDALIAQVPLAERGAARMLIVDGRQGSWEDARIRDLPNLLQPGDLLVLNDTRVLPARLQACKATGGTVELLLDRLLDVQEGWFLAKSSKALRPGMAIHLSGGAVAMVEEKDGMEVRLRLSADAQWLPILEAEGSVPLPPYIRRAPEACDRERYQTIYAAHPGAVAAPTAGLHFDAQLLDALAARGIERTFVTLHVGAGTFLPVRSDDITEHPMHAETMEVSAATVAAVAAAKARGKRVIAVGTTACRALETAAQDGTLRPYTGETRLFIYPGKTFQVIDGLLTNFHLPESTLLMLVCAFAGTECMLAAYRHAVAEGYRFFSYGDAMLISPQVGQR

SEQ ID NO: 62713 - protein, 345 aa, Acidithiobacillus ferrivorans
  misc_feature (1)..(345): tr|A0A060UV60|A0A060UV60_9PROT S-adenosylmethionine:tRN A ribosyltransferase-isomerase OS=Acidithiobacillus fer rivorans OX=160808 GN=queA PE=3 SV=1
MQKSDFYYELPDALIAQAPLAERSAARMLIVDGRQGTWQDARICDLPDLLQPGDLLVLNDTRVLPARLPARKATGGAVELLLDRLVDAREGWFLAKSSKALRPGMRLHLPGGAVATVEEKDGMEVRLSLTADAQWLPILEAEGSMPLPPYIRRAPEASDRERYQTIYAAHPGAVAAPTAGLHFDAQLLDALAARGVERTFVTLHVGAGTFLPVRSDDITEHPMHAETMEVSATTVAAVAAAKARGKRVIAVGTTACRALETAAQDGTLRPYTGETRLFIYPGKTFQVIDGLLTNFHLPESTLLMLVCAFAGMECMLAAYRHAVAEGYRFFSYGDAMLISPQVGQR

SEQ ID NO: 62714 - protein, 345 aa, Acidithiobacillus ferrooxidans
  misc_feature (1)..(345): tr|A0A179B6A0|A0A179B6A0_ACIFR S-adenosylmethionine:tRN A ribosyltransferase-isomerase OS=Acidithiobacillus fer rooxidans OX=920 GN=queA PE=3 SV=1
MQKSDFYYELPDALIAQVPLAERGAARMLIVDGRQGSWEDARIRDLPNLLQPGDLLVLNDTRVLPARLQACKATGGTVELLLDRLLDVQEGWFLAKSSKALRPGMAIHLSGGAVAMVEEKDGMEVRLRLSADAQWLPILETEGSVPLPPYIRRAPEACDRERYQTIYAAHPGAVAAPTAGLHFDVQLLDALAARGIERTFVTLHVGAGTFLPVRSDDITEHPMHAETMEVSAATVAAVAAAKARGKRVIAVGTTACRALETAAQDGTLRPYTGETRLFIYPGKTFQVIDGLLTNFHLPESTLLMLVCAFAGTECMLAAYRHAVAEGYRFFSYGDAMLISPQVGQR

SEQ ID NO: 62715 - protein, 345 aa, Acidithiobacillus ferrooxidans
  misc_feature (1)..(345): sp|B5EK09|QUEA_ACIF5 S-adenosylmethionine:tRNA ribosylt ransferase-isomerase OS=Acidithiobacillus ferrooxidans (strain ATCC 53993) OX=380394 GN=queA PE=3 SV=1
MHKKDFHYELPDALIAQAPLPERSAARMLIVDGHQGTWEDAWVRDLPGVLRPGDLLVLNDTRVLPARLQARKTTGGAVELLLDRLLDARDGWFLAKSSKALRPGMSIHLPGGAVATVEEKDGMDVRLSLPADVAWLPILEAGGSMPLPPYIRRAAEASDRERYQTVYAARPGAVAAPTAGLHFDTELLDALAARGVERTFVTLHVGAGTFLPVRSEDITEHPMHAETMEVSATTVAAVAAARARGGRVIAVGTTACRALETAAQGGTLRPFTGETRLFLYPGKTFQVTDGLLTNFHLPESTLLMLVCAFAGMECMLAAYRHAVAEGYRFFSYGDAMLISPQAGRR

SEQ ID NO: 62716 - protein, 345 aa, Acidithiobacillus sp.
  misc_feature (1)..(345): tr|A0A2I1DKV6|A0A2I1DKV6_9PROT S-adenosylmethionine:tRN A ribosyltransferase-isomerase OS=Acidithiobacillus sp. SH OX=187490 GN=queA PE=3 SV=1
MLKSDFTYELPPELIAQEPLAQRSASRMLVVDGQSGQWQDSWIRQLPEWLHPGDLLILNDTRVLPARLHAYKETGGAVELLLDRLLGEQDGWFLAKSSKALRPGMRLRLAHGDEAEVLEKEGMDVRLHLQQGSWLDILESEGSMPLPPYIHRAPEASDQERYQTIYADKPGAVAAPTAGLHFDEALLDALDARGVERRFVTLHVGAGTFLPVRSDHVQEHVMHAETLMVSQEAVDAIVATKARGGRVIAVGTTACRALETAGKDGVLRPYVGETRLFLYPGKKFQVIDALLTNFHLPESTLLMLVCAFAGTECMLAAYRHAVAARYRFFSYGDAMFITPADPEPV

SEQ ID NO: 62717 - protein, 260 aa, Acidithiobacillus sp.
  misc_feature (1)..(260): tr|A0A3M8R7Y1|A0A3M8R7Y1_9PROT S-adenosylmethionine:tRN A ribosyltransferase-isomerase (Fragment) OS=Acidithiob acillus sp. CJ-2 OX=1867749 GN=queA PE=3 SV=1
MQRKDFYYELPPERIAQAPLAERSGGRLLQVDGGNGTWTDGQIRDLPQILRPGDLLVLNDTRVLPARLQARKPSGGAVELLLDRIVSDAEAWFLARSSKPLRPGGTLLLGGGVEIHIHEKVDMRVRLGIPAGGGWLALLQAQGATPLPPYIHRTPSADDAERYQTVYSAKPGAVAAPTAGLHFDAPLLALLAERGVDTAFVTLHVGAGTFLPVRSERVEDHEMHAENMEVPAATVAAIAATRARGGRVVAVGTTACRALE

SEQ ID NO: 62718 - protein, 347 aa, Acidithiobacillus thiooxidans
  misc_feature (1)..(347): tr|A0A1C2IWK4|A0A1C2IWK4_ACITH S-adenosylmethionine:tRN A ribosyltransferase-isomerase OS=Acidithiobacillus thi ooxidans OX=930 GN=queA PE=3 SV=1
MLKSDFTYDLPPELIAQEPLAERSASRMLVLDGDSGHWQDSWIRALPEYLNPGDLLILNDTRVLPARLHAHKETGGAVELLLDRLLGEDEGWFLAKSSKALRPGMMLQLARGDCAEVLEKDGMDVRLRLHRASWLAVLESEGSMPLPPYIHRAPEARDQERYQTVYADKPGAVAAPTAGLHFDQGLLEALDARGVERRFVTLHVGAGTFLPVRSEQVQEHQMHAETLIVSPDTVAAITATKARGGRVIAVGTTACRALETAGQDGTLRPYVGETRLFLYPGKKFQVIDALLTNFHLPESTLLMLVCAFAGTECMLAAYQHAVAARYRFFSYGDAMFITPAALSRCLP

SEQ ID NO: 62719 - protein, 347 aa, Acidithiobacillus thiooxidans
  misc_feature (1)..(347): tr|A0A543Q403|A0A543Q403_ACITH S-adenosylmethionine:tRN A ribosyltransferase-isomerase OS=Acidithiobacillus thi ooxidans ATCC 19377 OX=637390 GN=queA PE=3 SV=1
MLKSDFTYDLPPELIAQEPLAERSASRMLVIDGDSGQWQDSWIRALPECLNPGDLLILNDTRVLPARLHAHKETGGAVELLLDRLLGEDEGWFLAKSSKALRPGMMLQLAQGDRAEVLEKDGMDVRLRLHQASWLAVLESEGSMPLPPYIHRAPEARDQERYQTVYADKPGAVAAPTAGLHFDQGLLEALDARGVERRFVTLHVGAGTFLPVRSEQVQEHQMHAETLIVSPDTVAAITATKARGGRVIAVGTTACRALETAGQDGTLRPYVGETRLFLYPGKKFQVIDALLTNFHLPESTLLMLVCAFAGTECMLAAYQHAVAARYRFFSYGDAMFITPAALSRCLP

SEQ ID NO: 62720 - protein, 353 aa, Acidithrix ferrooxidans
  misc_feature (1)..(353): tr|A0A0D8HEW8|A0A0D8HEW8_9ACTN S-adenosylmethionine:tRN A ribosyltransferase-isomerase OS=Acidithrix ferrooxida ns OX=1280514 GN=queA PE=3 SV=1
MNNDSKNVDPTAAVDEMALFDYDLPQSLIAQSPIEPRSSARLLDASGEKFVDRHVYDFPLLLKEGDVVVVNDTKVLPARVTLFKESGGAVELLFLEEVAPRFWLTLANPSRKLLFGVPLCDRQGVVVAVVKERREREGDAPVRLIVEVLEPELIEKSGEVPLPPYIKEPLKTPERYQTVYANRGSSAAAPTAGLHFDNDLLEAISRAGASLVKVELSVGLDTFLPIKTERIRDHKIHTESYSVSSEAWDQIRSAPRVIAIGTTVVRTIETVGTTGQLSGRTSIFIHQGYQFLVTDVLLTNFHIPRSSLLLLVDAFVGPRWREIYEHAKQERYRFLSFGDAMLLKRANSDSLER

SEQ ID NO: 62721 - protein, 241 aa, Acidobacteria bacterium
  misc_feature (1)..(241): tr|A0A1F2QIS4|A0A1F2QIS4_9BACT S-adenosylmethionine:tRN A ribosyltransferase-isomerase (Fragment) OS=Acidobacte ria bacterium RIFCSPHIGHO2_01_FULL_67_28 OX=1797175 GN= A2620_00320 PE=3 SV=1
MKLSEFDYTLPPERIAQRPLAERDASRLLLVDRRSGAWQDRRFRELASLVRGDEVIVLNNARVFPARLFGRRRGMHARPVGRRSRVRREHLSAPIEVLLLGRARVGRAGEEDCWEALVRPGRKVGTGEVLQFGEGELEAEVIGRGDYGRRTLRFRAAGDFRETVERLGHVPLPPYIHRADEPADRERYQTVFARQGAAVAAPTAGLHFTPEILDALRRRGCGIVEITLEVGYGTFQPVRTE

SEQ ID NO: 62722 - protein, 226 aa, Acidobacteria bacterium
  misc_feature (1)..(226): tr|A0A1Q7LDM1|A0A1Q7LDM1_9BACT S-adenosylmethionine:tRN A ribosyltransferase-isomerase (Fragment) OS=Acidobacte ria bacterium 13_1_40CM_4_58_4 OX=1803453 GN=AUH86_0466 5 PE=3 SV=1
GLRTLQLVSHDERSVSEHLERLGHVPLPPYIDRADETADRERYQTVFAKRPGAVAAPTAGLHFSMEIVEKIRKRGVELCEVTLDVGLGTFQPVHTETLEGHVMHSESYEIPTETADRINVAHAAGRPILAIGTTVVRALEDAGLRAAETGSTSIVAAGRAEAHLFIIPGFQFRVVDSLLTNFHLPRSTLLALVCAFAGRELVLTAYQHAVAAGYRFYSYGDCMLIR

SEQ ID NO: 62723 - protein, 364 aa, Acidobacteriales bacterium
  misc_feature (1)..(364): tr|A0A1Q6XG78|A0A1Q6XG78_9BACT S-adenosylmethionine:tRN A ribosyltransferase-isomerase OS=Acidobacteriales bact erium 13_2_20CM_55_8 OX=1803470 GN=queA PE=3 SV=1
MLVSDFHYQLPPDLIAQEPLADRAASRLLHVERASGKLCDRWFREFPDFLRPDDLVVFNNTRVFPARLYGRRSGEKAQPVSTQNPAAKDFLKGQIEVLLTRQISDEPNEWECLVRPGRKIGVGERLFFGDDEELQAEVLARGKFGERRIRFSPTPDFFGLIERLGHVPLPPYISREDRPGDRERYQTVYARERGSVAAPTAGLHFTPEILARMKELGIATTEITLHVGLGTFQPVRADRVEDHTLHRESYHISADAAATINHALDAERRIVAIGTTTVRTLEHAAHQSARGRVQAGSGEANLFIYPGYDFRVVGALLTNFHLAHSTLLMLVCAFGGTARVLDAYRHAVEQKYRFYSYGDCMFLE

SEQ ID NO: 62724 - protein, 355 aa, Acidobacteriales bacterium
  misc_feature (1)..(355): tr|A0A3N5LKF1|A0A3N5LKF1_9BACT S-adenosylmethionine:tRN A ribosyltransferase-isomerase OS=Acidobacteriales bact erium OX=2282142 GN=queA PE=3 SV=1
MQLSEFDYHLPEDRIAQRPLEDRAASRMLVLNRKEQRWEDRHFRELPLFLRPGDCLVLNDTRVFPSRLYGRRAGVAALPIGKNNPKREEYLSGEVEVFLLRPAAGDPGTWQALVHPGRKMRVGERVSFGGGLEAEVVARGAYGERTVRFNCGDDIYERLEQVGHVPLPPYIRRPDTPEDRLRYQTVFARETGSVAAPTAGLHFTPQVLEACRAAGAAAASVTLHVGLSTFQPIHGDVLEQHHLHSESFHITGDEARKMRAAVRLMPVGTTAVRTLETAMQRGGLEEVHGETGLFIYPGFQFQATGAMLTNFHLPRSSLLLLVCAFAGKELTLNAYRHAVEAGYRFYSYGDCMLII

SEQ ID NO: 62725 - protein, 364 aa, Acidobacteriia bacterium
  misc_feature (1)..(364): tr|A0A321LTY1|A0A321LTY1_9BACT S-adenosylmethionine:tRN A ribosyltransferase-isomerase OS=Acidobacteriia bacter ium AA117 OX=2169412 GN=queA PE=3 SV=1
MLISDFDFHLPGELIAQEPLPNRSASRMLHLSRATGEYQDRHFVEFPDLLRPDDLLVVNNSRVFPARLFGRRAGLHSQPVSPRNPASRDFLQGQVEVLLTRQLGQWEWQALVRPGRKIGVGERIYFGQEAMPELQAEVTGRGEFGERTLRFHPIDDFFAVVERIGHVPLPPYISRADRAEDRERYQTVYAQQQGSVAAPTAGLHFTPEILARIRQHGIDIAEITLHVGLGTFQPVRVENIEQHKIHRERFTISPETAGKINRALAENRRIVAVGTTTVRTLEYAASQDSAGRISPGSAEADIFIYPGFRFRVIGALLTNFHLPQSTLLMLVSAFAGRKTILKAYRYAVNSRYRFFSYGDCMFIE

SEQ ID NO: 62726 - protein, 353 aa, Acidobacterium capsulatum
  misc_feature (1)..(353): sp|C1F7K8|QUEA_ACIC5 S-adenosylmethionine:tRNA ribosylt ransferase-isomerase OS=Acidobacterium capsulatum (stra in ATCC 51196 / DSM 11244 / JCM 7670 / NBRC 15755 / NCI MB 13165 / 161) OX=240015 GN=queA PE=3 SV=1
MLVSEFDFHLPEDLIAQEPLADRAASRMLALDRSTGAWQDRMFADLPGFLRPGDLLVLNNTRVIPARLFGRRAGLRTQPGHEATGQVEVMLTEQISEWEWRALVRPGRKVPVGESIHFGNEGLQAEIIAHGEFGERTLRFTPIPDFFHVLERVGHIPLPPYIHREDRPEDRERYQTVYNQQPGSVAAPTAGLHFTPQMLAKLQELGVQTAYITLHVGLGTFQPVRVDKVEDIRLHRERYTLSPETAAAVNAALHENRRVIAVGTTTVRTLEHCATVADGKPLVPHAGETEIFISPGYKFRIVQGLLTNFHLPQSTLLMLVSAFAGREAVLAAYRHAVEQRYRFFSYGDCMFLA

SEQ ID NO: 62727 - protein, 353 aa, Acidobacterium sp.; identical to SEQ ID NO: 62726
  misc_feature (1)..(353): tr|A0A3D4VEU1|A0A3D4VEU1_9BACT S-adenosylmethionine:tRN A ribosyltransferase-isomerase OS=Acidobacterium sp. OX =1872119 GN=queA PE=3 SV=1

SEQ ID NO: 62728 - protein, 349 aa, Acidobacterium sp.
  misc_feature (1)..(349): tr|A0A2G4JIY9|A0A2G4JIY9_9BACT S-adenosylmethionine:tRN A ribosyltransferase-isomerase OS=Acidobacterium sp. OX =1872119 GN=queA PE=3 SV=1
MNVSDFDFDLPADLIAQDPPAQRGASRLLALKRSSGCVSHHQFADLPSLLRPGDLLVVNDTRVFPARLIGHRVPGGGAAECFLVRPTGVTDEWLALVHPGQRLREGAGMVFEAGALRLNAEVVGIHFHGRRTVRLWTDDGSSVREAIDAIGHIPLPPYIKRSDAPADRDRYQTVFARDRGSIAAPTAGLHFTTELLDALAERGIERAALTLHVGYGTFQPIRVERVEDHQMEAEHYEVSAATAAALSAARREHRRIITVGTTSTRTVESLASEADGEVQPARGATALFIHPGHQFRLVSGMVTNFHLPRSSLIMLVSALAGREQVLAAYEAAVKERYRFYSYGDAMVVL

SEQ ID NO: 62729 - protein, 343 aa, Acidocella aminolytica
  misc_feature (1)..(343): tr|A0A0D6PK06|A0A0D6PK06_9PROT S-adenosylmethionine:tRN A ribosyltransferase-isomerase OS=Acidocella aminolytic a 101 = DSM 11237 OX=1120923 GN=queA PE=3 SV=1
MQLSEFGYDLPPERIATAPARPRDAARLLHVEADGLHDQIVRDLPALLRPDDLLVVNDTKVIPAQLTARRGDAKIGITLDRRLDDGSWHVLLRNSKRVKQGDVLVIDPAFSAEVVELEAGGAAILRFTADDFHAALERSGALALPPYIARPEGITAQDKTDYQTLFAAHEGAVAAPTAGLHFTPTLLAALQARGVEMAKVTLHVGAGTFLPVRVERIEDHKMHAERGYITEATAARINAAKAAGRRIIPIGTTALRLLESAATDAGTLKPFDSETDIFIYPGYRFKIADALFTNFHLPHSTLLMLVSAFAGTKRIKAAYAHAIANGYRFYSYGDACLLERAAG

SEQ ID NO: 62730 - protein, 340 aa, Acidocella sp.
  misc_feature (1)..(340): tr|A0A257NR42|A0A257NR42_9PROT S-adenosylmethionine:tRN A ribosyltransferase-isomerase OS=Acidocella sp. 20-63- 7 OX=1970304 GN=queA PE=3 SV=1
MKLSDFGYTLPAERIATEPARPRDSARLLHVGAALRDYTVRYLPGLLRRGDLLVVNDTKVIPAQLSAMRGVARIGITLDRRLDDGRWRVLLRNAKRVHAGDVLVIDPEFSAEVSEILEGGAALLRFVADDFYAALDRSGALALPPYIARPEGVTQRDASDYQTMFAAHEGAVAAPTAGLHFTPQLLEALQEAGIEIVRVTLHVGAGTFLPVRVENLAEHKMHAERGHVSAEAAARINAARAAGGRIVPVGTTALRVIESAANDEGAVKAFDGETDIFILPGYRFKVADLLFTNFHLPHSTLLMLVSAFAGVERIRDAYAYAIGQKYRFYSYGDACLLERV

SEQ ID NO: 62731 - protein, 343 aa, Acidocella sp.
  misc_feature (1)..(343): tr|A0A258LDL3|A0A258LDL3_9PROT S-adenosylmethionine:tRN A ribosyltransferase-isomerase OS=Acidocella sp. 35-58- 6 OX=1970306 GN=queA PE=3 SV=1
MRLEDFGYELPASHIATEPTRPRESAKLLHVKPDALGDYTVRDLPRLLREGDLLVVNDTKVIPAQLTAMRGAARIGITLDKPNAAGDWLVLLRNARRVHVGDVLQIDEAFSAEVMAVHEGGTAALRFNVSDAAFLAALQRSGALALPPYIARPGGITEQDKADYQTMFAEHDGAVAAPTAGLHFTPALLEALAAKGVETVRVTLHVGAGTFLPVRVEDVTTHKMHAERGIVSAAAAARINDVKARGGRVIPVGTTALRLIESAAGNDGTVRPFVGETDIFILPGYRFKVADVLFTNFHLPHSTLLMLVSAFAGMARIKSAYEHAIAHDYRFYSYGDACLLERL

SEQ ID NO: 62732 - protein, 351 aa, Acidomonas methanolica
  misc_feature (1)..(351): tr|A0A023D6T1|A0A023D6T1_ACIMT S-adenosylmethionine:tRN A ribosyltransferase-isomerase OS=Acidomonas methanolic a NBRC 104435 OX=1231351 GN=queA PE=3 SV=1
MTDLPDLPLAAFDFDLPPDRIAREPARPRDSARLLRVTPGAPPSETTVRALPSLLRAGDLLIVNDTAVIPAQLAAQRGEAAIGVTLDRLLPDGDWHALARNARKLHKGDTLRFGDDPVTAIVTENEGDGAIRLRFSAEGAAFDAFLQRAAALALPPYIERPDGPTEQDAEDYRTIFSRHRGAVAAPTAGLHFTPDLLAALDSAGIARRTLTLHVGAGTFLPVRDSIATHRMHAEWGRIDAETADTINATRARGGRVVAVGTTSLRLLESAADERGVIRPWQGETSIFIRPGYQFRAVDLLMTNFHLPKSTLFMLVSAFSGVETMRAAYAHAVAAGFRFYSYGDACLLERAP

SEQ ID NO: 62733 - protein, 366 aa, Acidovorax anthurii
  misc_feature (1)..(366): tr|A0A328YHW4|A0A328YHW4_9BURK S-adenosylmethionine:tRN A ribosyltransferase-isomerase OS=Acidovorax anthurii O X=78229 GN=queA PE=3 SV=1
MSASQPPRAFTLSDFDFSLPPELIAQHPAPERSASRLLDGRAEAPVDRIFRELPGLLQPGDLLVFNDTRVVKARVFGEKESGGKVELLIERVLVGGSGNEVVAHMKVSKKPAVGATLQMAGGPARGGFGATLLGRWPDEDGPLFRFALSSPDGAAPHALMERHGHMPLPPYIERHQDGGDDPDAAEDAERYQTVFARAPGAVAAPTAALHFDDAVLAALAERGVERASVTLHVGAGTFQPVKTESLAEHRMHSEWYEVPLATLAALERCRQRGGRVVAVGTTTVRTLESWARSGQATGDTDIFITPGFAFQVVDLLVTNFHLPKSTLMMLISAFAGYEHAMALYRHAIAQHYRFFSYGDAMLLARR

SEQ ID NO: 62734 - protein, 369 aa, Acidovorax avenae
  misc_feature (1)..(369): tr|F0Q654|F0Q654_ACIAP S-adenosylmethionine:tRNA ribosy ltransferase-isomerase OS=Acidovorax avenae (strain ATC C 19860 / DSM 7227 / JCM 20985 / NCPPB 1011) OX=643561 GN=queA PE=3 SV=1
MSASQPPRAFTLSDFDFSLPPELIAQHPAPERSASRLLDGRADVPVDRIFRELPDLLQPGDLLVFNDTRVVKARVFGEKASGGKVELLIERVLVGPNGEAGNEVVAHMKVSKKPAVGAMLHMAGGPAGGGFGATLLGRWPDEDGPLFRFALSSPDGEGPHALMERHGHMPLPPYIERHQDGGGDPDAAEDAERYQTVFARAPGAVAAPTAALHFDEGVLASLAARGVERASVTLHVGAGTFQPVKTESLADHRMHSEWYEVPLATLAALERCRQRGGRVVAVGTTTVRTLESWARSGQATGDTDIFITPGFAFQVVDLLVTNFHLPKSTLMMLISAFTGYDHAMDLYRHAIAQRYRFFSYGDAMLLARR

SEQ ID NO: 62735 - protein, 369 aa, Acidovorax avenae
  misc_feature (1)..(369): tr|A0A2R4E494|A0A2R4E494_9BURK S-adenosylmethionine:tRN A ribosyltransferase-isomerase OS=Acidovorax avenae sub sp. avenae OX=80870 GN=queA PE=3 SV=1
MSASQPPRAFTLSDFDFSLPPELIAQHPAPERSASRLLDGRAEAPVDRIFRDLPDLLQPDDLLVFNDTRVVKARVFGEKASGGKVELLIERVLVGPDGEAGNEVVAHMKVSKKPAVGATLHMAGGPMGGGFGATLLGRWPDEDGPLFRFALSSPDGAGPHALMERHGHMPLPPYIERHQEGGGDPDAAEDAERYQTVFARAPGAVAAPTAALHFDEGVLAALAACGVERASVTLHVGAGTFQPVKTESLADHRMHSEWYEVPLATLAALERCRQRGGRVVAVGTTTVRTLESWARSGQATGDTDIFITPGFAFRVVDLLVTNFHLPKSTLMMLISAFTGYDHAMGLYRHAIAQRYRFFSYGDAMLLARR

SEQ ID NO: 62736 - protein, 365 aa, Acidovorax caeni
  misc_feature (1)..(365): tr|A0A1I7H9L3|A0A1I7H9L3_9BURK S-adenosylmethionine:tRN A ribosyltransferase-isomerase OS=Acidovorax caeni OX=3 43013 GN=queA PE=3 SV=1
MHTLSDFDFVLPEQLIAQHPAPERSGSRLLDGRAPTPVDRIFRELPALLQPGDLLVFNDTRVVKARVFGEKASGGKLELLIERVLTGNDVVAHMKVSKKPLPGATVHMAGGAAHGGFDATLLSRWPDADGPLFRFALHGPAGETPWELMERHGHLPLPPYIERQQNSSHDPDEAEDNERYQTVFARAPGAVAAPTAALHFDEGVLAALAAHGVERASVTLHVGAGTFQPVKTENLAEHRMHSEWYEVPPDTLAALERCRQRGGRVVAVGTTTVRTLESWARCGQTTGETDIFITPGFRFQVVELLVTNFHLPKSTLMMLVSAFAGYTHIMDLYRHAIAQRYRFFSYGDAMLLQRATPTAPAAPAD

SEQ ID NO: 62737 - protein, 385 aa, Acidovorax carolinensis
  misc_feature (1)..(385): tr|A0A240UGY5|A0A240UGY5_9BURK S-adenosylmethionine:tRN A ribosyltransferase-isomerase OS=Acidovorax carolinens is OX=553814 GN=queA PE=3 SV=1
MTDLSSGAASAPFTPSAIPTPRVFTLSDFDFSLPPERIAQHPAPERSASRLLDGRAMQPVDRIFRDLPGLLRAGDLLVFNDTRVVKARIFGEKASGGKLELLIERVLPAEAGNPGNEVVAHMKVSKKPLPGSVVHMAGGRKAGGFDAQLLGRWPTEDGPLFRFALHGPANESPWELMDRHGHLPLPPYIERQQNTGHDPDEAEDSQRYQTVFARNPGAVAAPTAALHFDEAVLADLAARGIERASVTLHVGAGTFQPVKTENLAEHQMHSEWYEVPLATLAALERCRQRGGRVVAVGTTTVRTLESWAKSGQATGDTNIFITPGFAFQVVDLLITNFHLPKSTLMMLVSAFAGYAHVMGLYRHAIAQEYRFFSYGDAMLLERFAG

SEQ ID NO: 62738 - protein, 385 aa, Acidovorax carolinensis
  misc_feature (1)..(385): tr|A0A240TVF2|A0A240TVF2_9BURK S-adenosylmethionine:tRN A ribosyltransferase-isomerase OS=Acidovorax carolinens is OX=553814 GN=queA PE=3 SV=1
MTDLSSGAASAPFTPSAIPTPRVFTLSDFDFSLPPERIAQHPAPERSASRLLDGRAMQPVDRIFRDLPGLLRAGDLLVFNDTRVVKARIFGEKASGGKLELLIERVLPAEAGGTGNEVVAHMKVSKKPLPGSVVHMAGGRKAGGFDAQLLGRWPTEDGPLFRFALHGPANESPWELMDRHGHLPLPPYIERQQNTGHDPDEAEDSQRYQTVFARNPGAVAAPTAALHFDEAVLADLAERGIERASVTLHVGAGTFQPVKTENLAEHQMHSEWYEVPLATLAALERCRQRGGRVVAVGTTTVRTLESWAKTGRATGDTNIFITPGFAFQVVDLLITNFHLPKSTLMMLVSAFAGYAHVMGLYRHAIAQEYRFFSYGDAMLLERFAG

SEQ ID NO: 62739 - protein, 369 aa, Acidovorax cattleyae
  misc_feature (1)..(369): tr|A0A1H0QH59|A0A1H0QH59_9BURK S-adenosylmethionine:tRN A ribosyltransferase-isomerase OS=Acidovorax cattleyae OX=80868 GN=queA PE=3 SV=1
MSASQPPRAFTLSDFDFSLPPELIAQHPAPERSASRLLDGRADAPVDRIFRELPDLLQAGDLLVFNDTRVVKARVFGEKASGGKVELLIERVLVGPEGEAGNEVVAHMKVSKKPAVGATLHMAGGPAGGGFGATLLGRWPDENGPLFRFALSSPDGAGPHALMERHGHMPLPPYIERHQDGEDDPDAAEDAERYQTVFARAPGAVAAPTAALHFDEGVLAALAARGVERASVTLHVGAGTFQPVKTESLADHRMHSEWYEVPLATLAALERCRQRGGRVVAVGTTTVRTLESWARSGQATGDTDIFITPGFSFRVVDLLVTNFHLPKSTLMMLISAFTGYDHAMELYRHAIAQRYRFFSYGDAMLLARR

SEQ ID NO: 62740 - protein, 91 aa, Acidovorax cavernicola
  misc_feature (1)..(91): tr|A0A3A1VUT8|A0A3A1VUT8_9BURK S-adenosylmethionine:tRN A ribosyltransferase-isomerase (Fragment) OS=Acidovorax cavernicola OX=1675792 GN=D3H34_33375 PE=3 SV=1
IAVGTTTVRTLESWAKSGNIQGDTNIFITPGFQFEVVDMLVTNFHLPKSTLMMLVSALAGYEQVMSLYQQAIAHHYRFFSYGDSMLLERQR

SEQ ID NO: 62741 - protein, 347 aa, Acidovorax cavernicola
  misc_feature (1)..(347): tr|A0A3A1WEC7|A0A3A1WEC7_9BURK S-adenosylmethionine:tRN A ribosyltransferase-isomerase OS=Acidovorax cavernicol a OX=1675792 GN=queA PE=3 SV=1
MRAFTLSDFDFHLPPELVAQHPATERTASRLLDGTGAAPADRIFKELPSLLRAGDLLVFNDTRVVKARLFGEKPTGGKLELLVERVLQGQEVVAHMKVSKKPPVGTTLEMVGGFRATLLGRWPEEDGALFRFAFESDTGENPYMLMERCGHVPLPPYITHTDSADDESRYQTVFARVPGAVAAPTAALHFDEGLLAELDARGVQRANVTLHVGAGTFQPVKTENIAEHTMHAERYEVPEATQRAIAECKARGGRVVAVGTTTVRTLESWAKSGEATGDTRIFITPGFAFAHVDVLVTNFHLPKSTLMMLVSAFAGYERVMALYAHAIANGYRFFSYGDAMLLQRQQD

SEQ ID NO: 62742 - protein, 369 aa, Acidovorax citrulli
  misc_feature (1)..(369): tr|A1TJQ6|A1TJQ6_ACIAC S-adenosylmethionine:tRNA ribosy ltransferase-isomerase OS=Acidovorax citrulli (strain A AC00-1) OX=397945 GN=queA PE=3 SV=1
MSASQPPRAFTLSDFDFSLPPELIAQHPAPERSASRLLDGRADVPVDRIFRELPGLLQPGDLLVFNDTRVVKARVFGEKASGGKVELLIERVLVGTGGEAGNEVVAHMKVSKKPAVGAMLHMAGGPAGGGFGATLLGRWPDEDGPLFRFALSSPDGAGPHALMERHGHIPLPPYIERHQEGGGDPDAAEDAERYQTVFARAPGAVAAPTAALHFDEGVLASLAARGVERASVTLHVGAGTFQPVKTESLADHRMHSEWYEVPLATLAALERCRQRGGRVVAVGTTTVRTLESWARSGQGTGDTDIFITPGFAFQVVDLLVTNFHLPKSTLMMLISAFTGYEHAMDLYRHAIAQRYRFFSYGDAMLLARR

SEQ ID NO: 62743 - protein, 387 aa, Acidovorax delafieldii
  misc_feature (1)..(387): tr|A0A561XBY9|A0A561XBY9_ACIDE S-adenosylmethionine:tRN A ribosyltransferase-isomerase OS=Acidovorax delafieldi i OX=47920 GN=queA PE=3 SV=1
MTDLSSGATSAPLASGGPSTPRVFTLSDFDFSLPPELIAQHPAPERSASRLLDGRAMQPVDRIFRELPGLLREGDLLVFNDTRVVKARIFGEKASGGKLELLIERVLPAEAGNPGNEVVAHMKVSKKPLPGSVVHMAGGRKAGGFDAQLLGRWPTEDGPLFRFALHGPAGESPWELMDRHGHLPLPPYIERQQNTDHDPDEAEDSQRYQTVFARNPGAVAAPTAALHFDEGVLADLAARGIERASVTLHVGAGTFQPCKTENLAEHQMHSEWYEIPLATLAALERCRQRGGRVVAVGTTTVRTLESWAKTGQASGDTNIFITPGFAFQVVDVLITNFHLPKSTLMMLVSAFAGYAHIMGLYRHAIAHQYRFFSYGDAMLLERARGTP

SEQ ID NO: 62744 - protein, 406 aa, Acidovorax delafieldii
  misc_feature (1)..(406): tr|C5TB82|C5TB82_ACIDE S-adenosylmethionine:tRNA ribosy ltransferase-isomerase OS=Acidovorax delafieldii 2AN OX =573060 GN=queA PE=3 SV=1
MAQRGRGRIAPFLFLERARPALKPMTDTTASAPRAFTLSDFDFALPPALIAQHPASERSASRLLDGRQLPPTDRIFRELPGLLRAGDLLVFNDTRVVKARIFGEKASGGKLELLIERVLPAEARENAAGTAGGTGNEVVAHMKVSKKPLPGSTVHMAGGRHAGGFDATLLSRWPTEDGPLFRFALHGPAGESPWELMERHGHLPLPPYIERQQHTGNDPDAAEDSQRYQTVFARAPGAVAAPTAALHFDESVLAEMAARGIERASVTLHVGAGTFQPVKTENLAEHQMHSEWYEVPLATLAALERCRQRGGRVVAVGTTTVRTLESWARSGQASGDTAIFITPGFAFQVVDVLLTNFHLPKSTLMMLVSAFAGYEHVMALYRHAIAQEYRFFSYGDAMLLERRKMA

SEQ ID NO: 62745 - protein, 366 aa, Acidovorax ebreus
  misc_feature (1)..(366): tr|B9MBS9|B9MBS9_ACIET S-adenosylmethionine:tRNA ribosy ltransferase-isomerase OS=Acidovorax ebreus (strain TPS Y) OX=535289 GN=queA PE=3 SV=1
MSSASTAPRTFTLSDFDFELPELLIAQHPAPQRSGSRLLDGRTAPPTDRIFRELPDLLQPGDLLVFNDTRVVKARVFGEKASGGKLELLIERVLTGNEVVAHMKVSKKPLPGATLHLAGGAAAGGFDATLLGRYPDADGPLFRLALRGPAGESPWELMERHGHLPLPPYIERQQAGGNDPHAGEDSERYQTVFARAPGAVAAPTAALHFDDAVLARLAERGIERASVTLHVGAGTFQPVKTENLAEHRMHSEWYEVPLATLAALERCRQRGGRVVAVGTTTVRTLESWAASGQAAGDTSIFITPGFQFQVVDLLLTNFHLPKSTLMMLVSAFAGYEHIMQLYRHAVAQRYRFFSYGDCMLLERPRA

SEQ ID NO: 62746 - protein, 381 aa, Acidovorax kalamii
  misc_feature (1)..(381): tr|A0A235EM06|A0A235EM06_9BURK S-adenosylmethionine:tRN A ribosyltransferase-isomerase OS=Acidovorax kalamii OX =2004485 GN=queA PE=3 SV=1
MTDFSPGAASAPHASRVFTLSDFDFSLPPELIAQHPAPERSASRLLDGRAMQPVDRIFRELPGLLREGDLLVFNDTRVVKARIFGEKASGGKLELLIERVLPAEAGNPGNEVVAHMKVSKKPLPGSVVHMAGGRKAGGFDAQLLGRWPTEDGPLFRFALHGPAGESPWELMDRHGHLPLPPYIERQQNADHDPDEAEDSQRYQTVFARNPGAVAAPTAALHFDEGVLADLAARGIERASVTLHVGAGTFQPCKTENLAEHQMHSEWYEIPLATLAALERCRQRGGRVVAVGTTTVRTLESWAKTGQASGDTNIFITPGFAFQVVDVLVTNFHLPKSTLMMLVSAFAGYAHIMGLYRHSIAQQYRFFSYGDAMLLERARSSP

SEQ ID NO: 62747 - protein, 371 aa, Acidovorax konjaci
  misc_feature (1)..(371): tr|A0A1I1V682|A0A1I1V682_9BURK S-adenosylmethionine:tRN A ribosyltransferase-isomerase OS=Acidovorax konjaci OX =32040 GN=queA PE=3 SV=1
MPDSQPHRTFTLSDFDFSLPPDLIAQHPAPERSASRLLDGRAGAPVDRIFRELPGLLQPGDLLVFNDTRVVKARVFGEKESGGKVELLIERVLVADGDGKAAGNEVVAHMKVSKKPAVGATLQMAGGPARGGFGATLLGRWPDENGPLFRFALSSPDGAGPHALMERHGHMPLPPYIERHQDGADDPDAAEDAERYQTVFARAPGAVAAPTAALHFDDAVLAALAAHGVERASVTLHVGAGTFQPVKTESLADHRMHSEWYEVPLATLAALERCRQRGGRVVAVGTTTVRTLESWARSGQATGDTDIFITPGFAFQVVDLLVTNFHLPKSTLMMLISAFTGYEHAMALYRHAIGQRYRFFSYGDAMLLARR

SEQ ID NO: 62748 - protein, 373 aa, Acidovorax radicis
  misc_feature (1)..(373): tr|A0A561CAD3|A0A561CAD3_9BURK S-adenosylmethionine:tRN A ribosyltransferase-isomerase OS=Acidovorax radicis OX =758826 GN=queA PE=3 SV=1
MTVSSTPPAPRHFTLSDFDFSLPPELIAQHPATQRSASRLLDGRAASPVDRIFHELPGLLQPGDLLVFNDTRVVKARIFGEKASGGKLELLIERVLLGNEVVAHMKVSKKPLPGAVVHMAGGLHGGGFNATLLSRWPGEEGPLFRFALDGPAGETPHDLMERHGHLPLPPYIERQQNADHDPDAAEDAQRYQTVFARAPGAVAAPTAALHFDEGVLAALADRGVERASVTLHVGAGTFQPVKTENLAEHQMHSEWYEVPLATLAALERCRQRGGRVVAVGTTTVRTLESWARSGQASGDTNIFITPGFAFQVVDLLLTNFHLPKSTLMMLVSAFAGYERIQAIYRHAIAQQYRFFSYGDSMLLERERTPLSNS

SEQ ID NO: 62749 - protein, 368 aa, Acidovorax soli
  misc_feature (1)..(368): tr|A0A1H4AFV5|A0A1H4AFV5_9BURK S-adenosylmethionine:tRN A ribosyltransferase-isomerase OS=Acidovorax soli OX=59 2050 GN=queA PE=3 SV=1
MIDHPGGSARTFTLSDFDFSLPPALIAQHPAPERSASRLLDGRAMQPVDRIFRELPGLLREGDLLVFNDTRVVKARIFGEKASGGKLELLIERVLTGHEVVAHMKVSKKPQSGSTVHMAGGRQGGGFDATLLGRWPHEDGPLFRFALHGPAGESPWELMERHGHLPLPPYIERNQNTDHDPDAAEDSQRYQTVFARAPGAVAAPTAALHFDDAVLADLAARGIERASVTLHVGAGTFQPVKTENLAEHQMHSEWYEVPLATLAALERCRQRGGRVVAVGTTTVRTLESWARSGQASGDTNIFITPGFRFQVVDLLLTNFHLPKSTLMMLVSAFAGYAHIMGLYRHAIAQEYRFFSYGDAMLLERQDLK

SEQ ID NO: 62750 - protein, 256 aa, Acidovorax sp.
  misc_feature (1)..(256): tr|A0A1E3Y1F3|A0A1E3Y1F3_9BURK S-adenosylmethionine:tRN A ribosyltransferase-isomerase (Fragment) OS=Acidovorax sp. SCN 65-108 OX=1660085 GN=ABS37_22100 PE=3 SV=1
SVVHMAGGRKAGGFDAQLLGRWPTEDGPLFRFALHGPAGESPWELMDRHGHLPLPPYIERHQNSDHDPDEAEDSQRYQTVFARNPGAVAAPTAALHFDEGVLADLAARGIERASVTLHVGAGTFQPCKTENLAEHQMHSEWYEVPLATLAALERCRQRGGRVVAVGTTTVRTLESWAKTGQASGDTNIFITPGFAFQVVDVLITNFHLPKSTLMMLVSAFAGYAHIMGLYRHAIAQQYRFFSYGDAMLLERARSTP

SEQ ID NO: 62751 - protein, 389 aa, Acidovorax sp.
  misc_feature (1)..(389): tr|A0A2G6T1Z3|A0A2G6T1Z3_9BURK S-adenosylmethionine:tRN A ribosyltransferase-isomerase OS=Acidovorax sp. 56 OX= 2035205 GN=queA PE=3 SV=1
MTDITPAAPGAPRAYTLSDFDFSLPPELIAQHPAPERSASRLLDGRAMQPVDRIFRDLPGLLREGDLLVFNDTRVVKARIFGEKASGGKLELLIERVLPAEAGNQGNEVVAHMKVSKKPLPGSLVHMAGGRKGGGFDALLLGRWPTEDGPLFRFALLGPAGESPWELMDRHGHLPLPPYIERHQNTDHDPDEAEDSQRYQTVFASAPGAVAAPTAALHFDEGVLADLAARGIERASVTLHVGAGTFQPCKTENLAEHQMHSEWYEVPLATLAALERCRQRGGRVVAVGTTTVRTLESWARTGLATGDTNIFITPGFSFQVVDVLITNFHLPKSTLMMLVSAFAGYAHVMGLYRHAIAQGYRFFSYGDAMLLERSAQASKEAPQTSPTAR

SEQ ID NO: 62752 - protein, 381 aa, Acidovorax temperans
  misc_feature (1)..(381): tr|A0A543L7M4|A0A543L7M4_9BURK S-adenosylmethionine:tRN A ribosyltransferase-isomerase OS=Acidovorax temperans OX=80878 GN=queA PE=3 SV=1
MTDLSLSAPGAPLAPHAYTLSDFDFSLPPELIAQHPAPERSASRLLDGRAMAPADRIFRELPGLLREGDLLVFNDTRVVKARIFGEKASGGKLELLIERVLPAEAGSAGNEVVAHMKVSKKPLPGSTVHMAGGRHAGGFDARLLGRWPTEDGPLFRFALQGPAGETPWELMDRHGHLPLPPYIERQQNTDHDPDEAEDSQRYQTVFARNPGAVAAPTAALHFDEGVLAELQSRGIERASVTLHVGAGTFQPVKTENLAEHQMHSEWYEVPLATLAALERCRQRGGRVVAVGTTTVRTLESWAQSGKTTGDTNIFITPGFSFKVVDVLITNFHLPKSTLMMLVSAFAGYAHIMGLYRHAIAQRYRFFSYGDAMLLERAKAAN

SEQ ID NO: 62753 - protein, 369 aa, Acidovorax temperans
  misc_feature (1)..(369): tr|A0A0D7KC62|A0A0D7KC62_9BURK S-adenosylmethionine:tRN A ribosyltransferase-isomerase OS=Acidovorax temperans OX=80878 GN=queA PE=3 SV=1
MAPHAYTLSDFDFSLPPELIAQHPAPERSASRLLDGRAMAPADRIFRELPGLLREGDLLVFNDTRVVKARIFGEKASGGKLELLIERVLPAEAGSTGNEVVAHMKVSKKPLPGSTVHMAGGRHAGGFDAKLLGRWPTEDGPLFRFALQGPAGETPWELMDRHGHLPLPPYIERQQNTDHDPDEAEDSQRYQTVFARNPGAVAAPTAALHFDEGVLAELQSRGIERASVTLHVGAGTFQPVKTENLAEHQMHSEWYEVPLATLAALERCRQRGGRVVAVGTTTVRTLESWAQSGKTTGDTNIFITPGFTFKVVDVLITNFHLPKSTLMMLVSAFAGYAHIMGLYRHAIAQRYRFFSYGDAMLLERAKAAN

SEQ ID NO: 62754 - protein, 365 aa, Acidovorax valerianellae
  misc_feature (1)..(365): tr|A0A1G6Z8N0|A0A1G6Z8N0_9BURK S-adenosylmethionine:tRN A ribosyltransferase-isomerase OS=Acidovorax valerianel lae OX=187868 GN=queA PE=3 SV=1
MSPSPRAFTLSDFDFTLPPQLIAQHPAPERSASRLLDGRSTEPADRVFRDLPGLLRAGDLLVFNDTRVVKARVFGEKASGGKLELLIERVLTGNEVVAHMKVSKKPLPGAVVHLAGGLTGGGFDATLLSRWPEDGGPLFRFALRGPAGETPYDLMERHGHLPLPPYIERQQQEGNDPDAAEDAQRYQTVFARAPGAVAAPTAALHFDAGVLADLEARGVERASVTLHVGAGTFQPVKTENLAEHQMHSEWYEVPLATLAALERCRQRGGRVVAVGTTTVRTLESWALSGQATGDTQIFITPGFGFRVVDVLVTNFHLPKSTLMMLVSAFAGYEHVMGLYRHAIAQGYRFFSYGDAMLLQRPQPVQ

SEQ ID NO: 62755 - protein, 384 aa, Acidovorax wautersii
  misc_feature (1)..(384): tr|A0A1I2GJX7|A0A1I2GJX7_9BURK S-adenosylmethionine:tRN A ribosyltransferase-isomerase OS=Acidovorax wautersii OX=1177982 GN=queA PE=3 SV=1
MQTPLSSPSNSSSPSAEAPAAPARTFTLSDFDFALPPELIAQHPAPERSGSRLLDGRSREPADRIFRELPGLLREGDLLVFNDTRVVKARLFGEKASGGKLELLIERVLTGNEVVAHMKVSKKPLPGSTVLMAGGRAAGGFDATLLGRWPDDNGPLFRFALHGPAGESPWELMERHGHLPLPPYIERQQNAEHDPDEAEDSQRYQTVFARAPGAVAAPTAALHFDEAVLADLAARGIERASVTLHVGAGTFQPVKTENLAEHRMHSEWYEVPLATLAALERCRQRGGRVVAVGTTTVRTLESWARSGQATGDTDIFITPGFGFRVVDLLITNFHLPKSTLMMLVSAFAGYAQVMGLYRHAIAQRYRFFSYGDSMLLERSGPRVA

SEQ ID NO: 62756 - protein, 345 aa, Acinetobacter albensis
  misc_feature (1)..(345): tr|A0A1C4GXX4|A0A1C4GXX4_9GAMM S-adenosylmethionine:tRN A ribosyltransferase-isomerase OS=Acinetobacter albensi s OX=1673609 GN=queA PE=3 SV=1
MQLSDFNFVLPDALIARYPLNTRSASRLLHLDAQGQYHDGYFTDILNLLDAGDLLILNDTKVMKARLKGKRATGGAVEVLVERIQDKFIAHCHIKASNSPKTGAELFVGEDEIKVTIQGRHENLFIVEFSQPILDVLDQYGALPIPPYFNREAEEIDTERYQTVFNDPTKLASVAAPTASLHFDQNLLAKLEAKGIQKTFVTLHVGAGTFLPVRSSDIANHIMHSEWCDVPEHTVDLIRQTKARGNKVISVGTTATRAVESAAQAHGGKLAAWTGDTQIFIYPGYQFKVIDRLITNFHLPESTLLMLVSALSNRDAILNAYQHAVEAQYRFFSYGDAMLIDQIHP

SEQ ID NO: 62757 - protein, 355 aa, Acinetobacter apis
  misc_feature (1)..(355): tr|A0A217EHD7|A0A217EHD7_9GAMM S-adenosylmethionine:tRN A ribosyltransferase-isomerase OS=Acinetobacter apis OX =1229165 GN=queA PE=3 SV=1
MQLSDFNFDLPDELIARYPLNERSASRLLHLDASGAYHDRVFTDILDLLHPGDLLVLNDTKVMKARLKGKRETGGAIEILVERMQDRFIAHCHIKSSNSPKAGAKLYIGDADVQVTVQGRQDNLYIVEFSAPILDVLDQYGQLPIPPYFNREAEDIDTERYQTVFNDPSKLASVAAPTASLHFDQKLLDQLAEKGIQTTFVTLHVGAGTFLPVRTDDIAHHIMHSEWCDVPESTVQRILHTKATGNQVISVGTTATRAVESAAQAHGGELKAWTGDTQIFIYPGYTFCVVDRLITNFHLPESTLLMLVSAVSDRQSILSAYEHAVKEKYRFFSYGDAMLIDQKRASTECSTTGSI

SEQ ID NO: 62758 - protein, 345 aa, Acinetobacter baumannii
  misc_feature (1)..(345): tr|A0A454ASD6|A0A454ASD6_ACIBA S-adenosylmethionine:tRN A ribosyltransferase-isomerase OS=Acinetobacter baumann ii MDR-TJ OX=889738 GN=queA PE=3 SV=1
MQLSDFSFELPDELIARYPLETRSASRLLHLDAKGQYHDHMFTDIIDLFEEGDLLVLNDTKVMKARLKGKRATGGAIEILVERMLNHTTAYCHIKASNSPKAGAELFVGEDNIPVIVRGRHENLFVVEFSQPILPVLEQYGQLPIPPYFNREAEEIDTERYQTVFHNPEKIASVAAPTASLHFDEELLAKLDQKGVKKTFVTLHVGAGTFMPVRTDDITNHVMHSEWCDVPQETIDLILATKARGNKVIAVGTTATRALESAAQAHGGKIAAWTGDTQIFIYPGYEFCIVDRLITNFHLPESTLLMLVSALSNRENILAAYEHAVKDRYRFFSYGDAMLIDKLEV

SEQ ID NO: 62759 - protein, 345 aa, Acinetobacter baumannii
  misc_feature (1)..(345): sp|B7GWL7|QUEA_ACIB3 S-adenosylmethionine:tRNA ribosylt ransferase-isomerase OS=Acinetobacter baumannii (strain AB307-0294) OX=557600 GN=queA PE=3 SV=1
MQLSDFSFELPDELIARYPLETRSASRLLHLDAKGQYHDHMFTDIIDLFEEGDLLVLNDTKVMKARLKGKRATGGAIEILVERMLNHTTAYCHIKASNSPKAGAELFVGADNIPVIVRGRHENLFVVEFSQPILPVLEQYGQLPIPPYFNREAEEIDTERYQTVFHNPEKIASVAAPTASLHFDEELLAELDQKGVKKTFVTLHVGAGTFMPVRTDDITNHVMHSEWCDVPQETIDLILATKARGNKVIAVGTTATRALESAAQAHGGKIAAWTGDTQIFIYPGYEFCIVDRLITNFHLPESTLLMLVSALSNRENILAAYEHAVKDRYRFFSYGDAMLIDKLEV

SEQ ID NO: 62760 - protein, 344 aa, Acinetobacter baylyi
  misc_feature (1)..(344): sp|Q6FEJ3|QUEA_ACIAD S-adenosylmethionine:tRNA ribosylt ransferase-isomerase OS=Acinetobacter baylyi (strain AT CC 33305 / BD413 / ADP1) OX=62977 GN=queA PE=3 SV=1
MQLSDFNFDLPDELIARYPLDTRSASRLLHLDAHGHYHDHAFTDILDLINDGDLLVLNDTKVMKARLKGKRASGGAIEILVERMLDNQIAHCHIKASNTPKAGAELFVGENGIKVTVQGRHENLFVVEFSEPILSVLDRYGQLPIPPYFNREAEEIDTERYQTVFHDPQKIASVAAPTASLHFDQDLLEKLAAKNIQKTFVTLHVGAGTFMPVRTDDIKNHIMHSEWCDVPESTAELIRQTKARGNKVIAVGTTATRALESAAQANGGKIDAWTGDTQIFIYPGYQFCVVDRLITNFHLPESTLLMLVSALSNRNNILSAYEHAVQSKYRFFSYGDAMLIDQAV

SEQ ID NO: 62761 - protein, 345 aa, Acinetobacter beijerinckii
  misc_feature (1)..(345): tr|N9FKR6|N9FKR6_9GAMM S-adenosylmethionine:tRNA ribosy ltransferase-isomerase OS=Acinetobacter beijerinckii CI P 110307 OX=1217648 GN=queA PE=3 SV=1
MQLSDFSFDLPDELIARYPLESRSASRLLHIDAQGQYHDHAFTDILNLLEDGDLLVLNDTKVMKARLKGKRATGGAIEVLVERMLDSHIAHCHIKSSNSPKAGAELYVGEDSIPVTVQGRHENLFVVKFSQPILSVLDQYGQLPIPPYFNREAEEIDTERYQTVFHDPEKIASVAAPTASLHFDQDLLEKLAAKGVKKTFVTLHVGAGTFMPVRTTDISNHIMHSEWCDVPQTTIDLILETKARGNKVIAVGTTATRALESAAQANQGETAAWTGDTQIFIYPGYQFCIVDRLITNFHLPESTLLMLVSALSNRDNILAAYTHAVEQRYRFFSYGDAMLIDKLEA

SEQ ID NO: 62762 - protein, 345 aa, Acinetobacter beijerinckii
  misc_feature (1)..(345): tr|N9DX61|N9DX61_9GAMM S-adenosylmethionine:tRNA ribosy ltransferase-isomerase OS=Acinetobacter beijerinckii AN C 3835 OX=1217649 GN=queA PE=3 SV=1
MQLSDFSFDLPDELIARYPLESRSASRLLHIDAQGQHHDHAFTDILDLLEDGDLLVLNDTKVMKARLKGKRATGGAIEVLVERMLDSHIAHCHIKSSNSPKAGAELYVGEDSIPVTVQGRHENLFVVKFSQPILYVLDQYGQLPIPPYFNREAEEIDTERYQTVFHDPEKIASVAAPTASLHFDQDLLEKLAAKGVKKTFVTLHVGAGTFMPVRTTDISNHIMHSEWCDVPQTTIDLILETKARGNKVIAVGTTATRALESAAQANQGKIAAWTGDTQIFIYPGYQFCIVDRLITNFHLPESTLLMLVSALSNRDNILAAYTHAVEQRYRFFSYGDAMLIDKLIV

SEQ ID NO: 62763 - protein, 352 aa, Acinetobacter bereziniae
  misc_feature (1)..(352): tr|N8YVS0|N8YVS0_ACIBZ S-adenosylmethionine:tRNA ribosy ltransferase-isomerase OS=Acinetobacter bereziniae NIPH 3 OX=1217651 GN=queA PE=3 SV=1
MMQLSDFSFELPDELIARYPLETRSASRLLHLNADGSYQDHSFTDILDLFDEGDLMVLNDTKVMKARLKGKRASGGAVEVLVERIFDQTIAHCHIKASNSPKAGAELFIGVDGVKATVQGRHENLFIVEFSQPILQVLDLYGQLPIPPYFNREAEAIDTERYQTVFNDPTKLASVAAPTASLHFDQSLLEKLKQKGIQQAFVTLHVGAGTFLPVRTDNIENHIMHSEWCDVPEATAKLIQETKARGNKVIAVGTTATRALESAAQASGGKIAAWTGDTQIFIYPGYQFCVVDRLITNFHLPESTLLMLVAALSNRDNILNAYRHAVEQKYRFFSYGDAMLIENANTEQMTAE

SEQ ID NO: 62764 - protein, 352 aa, Acinetobacter bereziniae
  misc_feature (1)..(352): tr|A0A0A8TP55|A0A0A8TP55_ACIBZ S-adenosylmethionine:tRN A ribosyltransferase-isomerase OS=Acinetobacter berezin iae OX=106648 GN=queA PE=3 SV=1
MMQLSDFSFELPDELIARYPLETRSASRLLHLNADGSYQDHSFTDILDLFDEGDLMVLNDTKVMKARLKGKRASGGAVEVLVERIFDQTIAHCHIKASNSPKAGAELFIGVDGVKATVQGRHENLFIVEFSQPILQVLDLYGQLPIPPYFNREAEAIDTERYQTVFNDPTKLASVAAPTASLHFDQSLLEKLKQKGIQQAFVTLHVGAGTFLPVRTDNIENHIMHSEWCDVPEATAKLIQETKARGNKVIAVGTTATRALESAAQASGGKIAAWTGDTQIFIYPGYLFCVVDRLITNFHLPESTLLMLVAALSNRDNILNAYRHAVEQKYRFFSYGDAMLIENANIEQTTTE

SEQ ID NO: 62765 - protein, 345 aa, Acinetobacter bohemicus
  misc_feature (1)..(345): tr|A0A1I6ULV7|A0A1I6ULV7_9GAMM S-adenosylmethionine:tRN A ribosyltransferase-isomerase OS=Acinetobacter bohemic us OX=1435036 GN=queA PE=3 SV=1
MQLSDFNFDLPDELIARYPLDTRSASRLLHLDQQGQYHDCHFTDIFDLLDAGDLLILNDTKVMKARLKGKRATGGAVEVLVERMQDKFIAHCHIKASNSPKAGAELFIGADEVKVTVQGRHENLFIVEFSQPILDVLDQYGALPIPPYFNREAEAIDTERYQTVFNDPTKLASVAAPTASLHFDQGLLEKLEAKGIQKAFVTLHVGAGTFLPVRTTDIQNHIMHSEWCDIPEQTVELIRQTKARGNKVISVGTTATRAVESAAQAHGGTLAAWTGDTQIFIYPGYDFKVVDRLITNFHLPESTLLMLVSALSNRDNILNAYHHAVEAKYRFFSYGDAMLVDKITA

SEQ ID NO: 62766 - protein, 345 aa, Acinetobacter bohemicus
  misc_feature (1)..(345): tr|N8QHJ4|N8QHJ4_9GAMM S-adenosylmethionine:tRNA ribosy ltransferase-isomerase OS=Acinetobacter bohemicus ANC 3 994 OX=1217715 GN=queA PE=3 SV=1
MQLSDFNFDLPDELIARYPLDTRSASRLLHLDQQGQYHDCHFTDIFDLLNAGDLLILNDTKVMKARLKGKRATGGAVEVLVERMQDKFIAHCHIKASNSPKAGAELFIGDDEIKVTVQGRHENLFIVEFSQPILNVLDQYGALPIPPYFNREAEAIDTERYQTVFNDPTKLASVAAPTASLHFDQGLLEKLEAKGIQKAFVTLHVGAGTFLPVRTTDIQNHIMHSEWCDVPEQTVELIRQTKARGNKVISVGTTATRAVESAAQAHGGTLAAWTGDTQIFIYPGYDFKVVDRLITNFHLPESTLLMLVSALSNRDNILDAYHHAVEAKYRFFSYGDAMLVDKITA

SEQ ID NO: 62767 - protein, 346 aa, Acinetobacter boissieri
  misc_feature (1)..(346): tr|A0A1G6GGB3|A0A1G6GGB3_9GAMM S-adenosylmethionine:tRN A ribosyltransferase-isomerase OS=Acinetobacter boissie ri OX=1219383 GN=queA PE=3 SV=1
MQLSDFNFDLPDELIARYPLPERSASRLLHIDATGQHHDHQFTDIIDLLNEGDLLVLNDTKVMKARLKGKRATGGAIEILVERMQDRHIAHCHIKSSNSPKAGASLFVGEDNVEVTVQGRHENLYIVEFSQPILDVLDRYGKLPIPPYFNREAEDIDTERYQTVFNDPTKLASVAAPTASLHFDEQLLENLKQKGITTAFVTLHVGAGTFLPVRTDHIENHIMHSEWCDVPQSTVEQIRTVKARGNQVISVGTTATRAIESAAQAHQGQLAAWTGDTQIFIYPGYQFCVIDRLITNFHLPESTLLMLVSALSSKDHILNAYQHAVAEKYRFFSYGDAMLIDQYQAV

SEQ ID NO: 62768 - protein, 346 aa, Acinetobacter bouvetii
  misc_feature (1)..(346): tr|A0A4Q7AVI8|A0A4Q7AVI8_9GAMM S-adenosylmethionine:tRN A ribosyltransferase-isomerase OS=Acinetobacter bouveti i OX=202951 GN=queA PE=3 SV=1
MQLSDFSFDLPDELIARYPLETRSASRLLHLDVQGQYHDYHFTDILDLLQPGDLLVLNDTKVMKARLKGKRATGGAVEVLVERMMDKFVAHCHIKASNSPKEGAELFIGPDEVKVTVKGRHENLFIVEFSQSILDVLDKYGALPIPPYFNREAESIDTERYQTVFNDPAKLASVAAPTASLHFDEALLQKLEAKGINKTFVTLHVGAGTFLPVRTTDIENHIMHSEWCDVSDDSMALIRETKARGNKVIAVGTTATRATESAAQANGGELKGWTGDTQIFIYPGYEFKVVDRLITNFHLPESTLLMLVSALSNRDNILNAYHHAVDSQYRFFSYGDAMLIDNLNVK

SEQ ID NO: 62769 - protein, 346 aa, Acinetobacter bouvetii
  misc_feature (1)..(346): tr|N9C857|N9C857_9GAMM S-adenosylmethionine:tRNA ribosy ltransferase-isomerase OS=Acinetobacter bouvetii DSM 14 964 = CIP 107468 OX=1120925 GN=queA PE=3 SV=1
MQLSDFSFDLPDELIARYPLETRSASRLLHLDVQGQYHDYHFTDILDLLQPGDLLLLNDTKVMKARLKGKRATGGAVEVLVERMMDKFVAHCHIKASNSPKEGAELFIGPDEVKVTVKGRHENLFIVEFSQSILDVLDKYGALPIPPYFNREAESIDTERYQTVFNDPTKLASVAAPTASLHFDEALLKKLEAKGINKTFVTLHVGAGTFLPVRTTDIENHIMHSEWCDVSDESMALIRETKARGNKVIAVGTTATRATESAAQANGGELKGWTGDTQIFIYPGYEFKVVDRLITNFHLPESTLLMLVSALSNRDNILNAYHHAVDSQYRFFSYGDAMLIDNLNVK

SEQ ID NO: 62770 - protein, 343 aa, Acinetobacter brisouii
  misc_feature (1)..(343): tr|V2UNK0|V2UNK0_9GAMM S-adenosylmethionine:tRNA ribosy ltransferase-isomerase OS=Acinetobacter brisouii CIP 11 0357 OX=1341683 GN=queA PE=3 SV=1
MQLSDFNFELPDHLIARYPLQSRTSSRLLHLHADGKYQDHCFTDILELFNPGDLMILNDTKVMKARLKGKRATGGAVEVLVERMQDQFIAHCHIKASNSPKAGAELFIGADEVKVTVQGRHENLFIVEFSQPILAVLDRYGQLPIPPYFNREAEAIDTERYQTVFHDPNKLASVAAPTASLHFDQQLLVELEQKGIQKSFVTLHVGAGTFLPVRTDNIENHIMHSEWCDVPQHTVDLIRETQARGNKVIAVGTTATRALESAAQAHGGKIGAWTGDTQIFIYPGYEFCVVDRLITNFHLPESTLLMLVSALSNQENILNAYRHAVKQQYRFFSYGDAMLIDRA

SEQ ID NO: 62771 - protein, 345 aa, Acinetobacter calcoaceticus; identical to SEQ ID NO: 62759
  misc_feature (1)..(345): tr|A0A380VJQ8|A0A380VJQ8_ACICA S-adenosylmethionine:tRN A ribosyltransferase-isomerase OS=Acinetobacter calcoac eticus OX=471 GN=queA PE=3 SV=1

SEQ ID NO: 62772 - protein, 345 aa, Acinetobacter calcoaceticus
  misc_feature (1)..(345): tr|N9EN63|N9EN63_ACICA S-adenosylmethionine:tRNA ribosy ltransferase-isomerase OS=Acinetobacter calcoaceticus A NC 3680 OX=1217653 GN=queA PE=3 SV=1
MQLSDFSFELPDELIARYPLESRSASRLLHLDSKGQYHDHMFTDIIDLFEEGDLLVLNDTKVMKARLKGKRSTGGAIEILVERMLNHTTAYCHIKSSNSPKAGAELFVGADNIPVIVRGRHENLFVVEFSQPILPALEQYGQLPIPPYFNREAEEIDTERYQTVFHNPEKIASVAAPTASLHFDEELLAKLEQKNVQKTFVTLHVGAGTFMPVRTDDITNHIMHSEWCDVPQETIDLILATKARGNKVIAIGTTATRALESAAQAHSGKIAAWTGDTQIFIYPGYEFCIVDRLITNFHLPESTLLMLVSALSNRDNILAAYEHAVKSRYRFFSYGDAMLIDKVEV

SEQ ID NO: 62773 - protein, 345 aa, Acinetobacter calcoaceticus
  misc_feature (1)..(345): tr|A0A2S4SYP5|A0A2S4SYP5_9GAMM S-adenosylmethionine:tRN A ribosyltransferase-isomerase OS=Acinetobacter calcoac eticus/baumannii complex sp. ABNIH27 OX=2080673 GN=queA PE=3 SV=1
MQLSDFSFELPDELIARYPLETRSASRLLHLDAKGQYHDHMFTDIIDLFEEGDLLVLNDTKVMKARLKGKRATGGAIEILVERMLNHTTAYCHIKASNSPKAGAELFVGAGNIPVIVRGRHENLFVVEFSQPILPVLEQYGQLPIPPYFNREAEAIDTERYQTVFHNPEKIASVAAPTASLHFDEELLAKLDQKGVKKTFVTLHVGAGTFMPVRTDDITNHVMHSEWCDVPQETIDLILATKARGNKVIAVGTTATRALESAAQAHGGKIAAWTGDTQIFIYPGYEFCIVDRLITNFHLPESTLLMLVSALSNRENILAAYEHAVKDRYRFFSYGDAMLIDKLEV

SEQ ID NO: 62774 - protein, 346 aa, Acinetobacter celticus
  misc_feature (1)..(346): tr|A0A1C3CUM2|A0A1C3CUM2_9GAMM S-adenosylmethionine:tRN A ribosyltransferase-isomerase OS=Acinetobacter celticu s OX=1891224 GN=queA PE=3 SV=1
MQLSDFNFNLPDELIARYPLETRSASRLLHLDTQGQYHDHHFTDILDLLNEGDLLVLNDTKVMKARLKGKRATGGAVEVLVERMMDKFTAHCHIKASNSPKEGAELFIGPDEVKVTVKGRHENLFIVEFSQPILNVLDLYGALPIPPYFNREAEAIDTERYQTVFNDPTKLASVAAPTASLHFDEDLLKKLEAKGIQKTFVTLHVGAGTFLPVRTTDIQNHIMHSEWCDVSDEAMAIIKATKARGNKVIAVGTTATRATESAAQANGGELKAWTGDTQIFIYPGYEFKVIDRLITNFHLPESTLLMLVSAMSNRDNILNAYNHAVDKQYRFFSYGDAMLIDNLNVK

SEQ ID NO: 62775 - protein, 345 aa, Acinetobacter colistiniresistens
  misc_feature (1)..(345): tr|N9PTD2|N9PTD2_9GAMM S-adenosylmethionine:tRNA ribosy ltransferase-isomerase OS=Acinetobacter colistiniresist ens OX=280145 GN=queA PE=3 SV=1
MQLSDFSFDLPDELIARYPLDSRSASRLLHIDAQGQYHDHAFTDILDLLEDGDLLVLNDTKVMKARLKGKRATGGAIEVLVERMLDTHTAHCHIKSSNSPKAGAELYIGEDAVPVTVQGRHENLFVVKFSQPILSVLDQYGQLPIPPYFNREAEEIDTERYQTVFHDPEKIASVAAPTASLHFDQGLLEKLEAKGVQKTFVTLHVGAGTFMPVRTTDITNHIMHSEWCDVPQATIDLILATKARGNKVIAVGTTATRALESAAQANQGKIAAWTGDTQIFIYPGYQFCIVDRLITNFHLPESTLLMLVSALSNRDNILAAYTHAVEQRYRFFSYGDAMLVDKLDA

SEQ ID NO: 62776 - protein, 345 aa, Acinetobacter colistiniresistens
  misc_feature (1)..(345): tr|S3SZP4|S3SZP4_9GAMM S-adenosylmethionine:tRNA ribosy ltransferase-isomerase OS=Acinetobacter colistiniresist ens OX=280145 GN=queA PE=3 SV=1
MQLSDFSFDLPDELIARYPLDSRSASRLLHIDAQGQYHDHAFTDILDLLEDGDLLVLNDTKVMKARLKGKRATGGAIEVLVERMLDTHTAHCHIKSSNSPKAGAELYIGEDAVPVTVQGRHENLFVVKFSQPILSVLDQYGQLPIPPYFNREAEEIDTERYQTVFHDPEKIASVAAPTASLHFDQGLLEKLAAKGVQKTFVTLHVGAGTFMPVRTTDITNHIMHSEWCDVPQATIDLILATKARGNKVIAVGTTATRALESAAQANQGQIAAWTGDTQIFIYPGYQFCIVDRLITNFHLPESTLLMLVSALSNRDNILAAYKHAVEQRYRFFSYGDAMLVDELDA

SEQ ID NO: 62777 - protein, 346 aa, Acinetobacter cumulans
  misc_feature (1)..(346): tr|A0A3A8G4S4|A0A3A8G4S4_9GAMM S-adenosylmethionine:tRN A ribosyltransferase-isomerase OS=Acinetobacter cumulan s OX=2136182 GN=queA PE=3 SV=1
MQLSDFSFDLPDELIARYPLENRTSSRLLHLDTTGQYHDHCFTDILDLLNEGDLLVLNDTKVMKARLKGKRATGGAIEVLVERILDPQTAHCHIKASNTPKEGAELFIGPDEVKVTVKGRHENLFVVEFSQPILQVLDLYGALPIPPYFNREAEAIDTERYQTVFNDPTKLASVAAPTASLHFDKALLAKLKAKGVQTTFVTLHVGAGTFLPVRTTDIENHIMHSEWCDVSDESMALIRETKARGNKVIAVGTTATRATESAAQANGGELKGWTGDTQIFIYPGYEFKVVDRLITNFHLPESTLLMLVSALSNRDNILNAYNHAVASKYRFFSYGDAMLIDNINLK

SEQ ID NO: 62778 - protein, 346 aa, Acinetobacter cumulans
  misc_feature (1)..(346): tr|A0A498D6P0|A0A498D6P0_9GAMM S-adenosylmethionine:tRN A ribosyltransferase-isomerase OS=Acinetobacter cumulan s OX=2136182 GN=queA PE=3 SV=1
MQLSDFSFDLPDELIARYPLENRTASRLLHLDTTGQYHDHCFTDILDLLNEGDLLVLNDTKVMKARLKGKRATGGAIEVLVERILDPQTAHCHIKASNTPKEGAELFIGPDEVKVTVKGRHENLFVVEFSQPILQVLDLYGALPIPPYFNREAEAIDTERYQTVFNDPTKLASVAAPTASLHFDEALLAKLKAKGVQTTFVTLHVGAGTFLPVRTTDIENHIMHSEWCDVSDESMALIRETKARGNKVIAVGTTATRATESAAQANGGELKGWTGDTQIFIYPGYEFKVVDRLITNFHLPESTLLMLVSALSNRDNILNAYNHAVASKYRFFSYGDAMLIDNINLK

SEQ ID NO: 62779 - protein, 345 aa, Acinetobacter defluvii
  misc_feature (1)..(345): tr|A0A2S2FAU0|A0A2S2FAU0_9GAMM S-adenosylmethionine:tRN A ribosyltransferase-isomerase OS=Acinetobacter defluvi i OX=1871111 GN=queA PE=3 SV=1
MQLSDFNFDLPDELIARYPLEARSASRLLHLNADGSYQDHHFTDILDLFEAGDLMVLNDTKVMKARLKGKRATGGAVEVLVERIFDQTIAHCHIKASNSPKAGAELFMGSDEVKVTVTGRHENLFVVEFSQPILQVLDAYGQLPIPPYFNREAEAIDTERYQTVFNDPTKLASVAAPTASLHFDEDLLAKLAQKGVNKTFVTLHVGAGTFLPVRTTDIENHIMHSEWCEVSETAAQMIQETQAHGNKVIAIGTTATRAVESAAQACGGKIGAWTGDTQIFIYPGYPFCVVDRLITNFHLPESTLLMLVSALSSKENILKAYQHAVENKYRFFSYGDAMLIEKTSV

SEQ ID NO: 62780 - protein, 345 aa, Acinetobacter equi
  misc_feature (1)..(345): tr|A0A0N9VDJ2|A0A0N9VDJ2_9GAMM S-adenosylmethionine:tRN A ribosyltransferase-isomerase OS=Acinetobacter equi OX =1324350 GN=queA PE=3 SV=1
MQLSDFNFDLPDELIARYPLKTRSASRLLHLDANGTYHDHQFTDILDLLSPGDLLVLNDTKVMKARLKGKRATGGAVEVLVERMQDKFIAHCHIKASNSPKPGAELFIGEDQVKVTVQGRHENLFIVEFSQPILDVLDQYGSLPIPPYFNREAEDIDTERYQTVFNDPTKLASVAAPTASLHFDEVLLKKLEEKGINKTFVTLHVGAGTFLPVRTNDIENHIMHSEWCDVSDASMQLIKETKARGNRVIAVGTTATRATESAAQANGGELKGWTGDTQIFIYPGYEFKVVDRLITNFHLPESTLLMLVSALSNRDNILNAYNHAVTEKYRFFSYGDAMLIDNQAK

SEQ ID NO: 62781 - protein, 346 aa, Acinetobacter gandensis
  misc_feature (1)..(346): tr|A0A1A7R7G0|A0A1A7R7G0_9GAMM S-adenosylmethionine:tRN A ribosyltransferase-isomerase OS=Acinetobacter gandens is OX=1443941 GN=queA PE=3 SV=1
MQLSDFNFNLPDELIARYPLETRSASRLLHLDRQGQYHDQHFTDILDLLEPGDLLVLNDTKVMKARLKGKRATGGAIEVLVERILDPQTAHCHIKASNTPKEGAELFIGPDEVKVTVKGRHENLFVVEFSQPILQVLDLYGALPIPPYFNREAESIDTERYQTVFNDPTKLASVAAPTASLHFDEALLEKLAAKGINKTFVTLHVGAGTFLPVRTNDIENHIMHSEWCDVSEDSMALIRETKARGNKVIAVGTTATRATESAAQANGGELKAWTGDTQIFIYPGYEFKVVDRLITNFHLPESTLLMLVSALSNRDNILNAYHHAVESKYRFFSYGDAMLIDNINVK

SEQ ID NO: 62782 - protein, 345 aa, Acinetobacter genomosp.
  misc_feature (1)..(345): tr|A0A1V2V5K0|A0A1V2V5K0_9GAMM S-adenosylmethionine:tRN A ribosyltransferase-isomerase OS=Acinetobacter genomos p. 33YU OX=1675530 GN=queA PE=3 SV=1
MQLSDFSFELPDELIARYPLESRSASRLLHLDSKGQYHDHMFTDIIDLFEEGDLLVLNDTKVMKARLKGKRSTGGAIEILVERMLNHTTAYCHIKSSNSPKAGAELYVGADNIPVIVRGRHENLFVVEFSQPILPVLEQYGQLPIPPYFNREAEEIDTERYQTVFHNPEKIASVAAPTASLHFDEELLAKLEQKNVQKSFVTLHVGAGTFMPVRTDDITNHVMHSEWCDVPQETIDLILATKARGNKVIAVGTTATRALESAAQAHGGKIAAWNGDTQIFIYPGYEFCIVDRLITNFHLPESTLLMLVSALSNRDNILAAYEHAVKSRYRFFSYGDAMLIDKLEV

SEQ ID NO: 62783 - protein, 345 aa, Acinetobacter genomosp.
  misc_feature (1)..(345): tr|A0A1V2UP04|A0A1V2UP04_9GAMM S-adenosylmethionine:tRN A ribosyltransferase-isomerase OS=Acinetobacter genomos p. 33YU OX=1675530 GN=queA PE=3 SV=1
MQLSDFSFELPDELIARYPLESRSASRLLHLDSKGQYHDHMFTDIIDLFEEGDLLVLNDTKVMKARLKGKRSTGGAIEILVERMLNHTTAYCHIKSSNSPKAGAELYVGTDNIPVIVRGRHENLFVVEFSQPILPVLEQYGQLPIPPYFNREAEEIDTERYQTVFHNPEKIASVAAPTASLHFDEELLAKLERKNVQKSFVTLHVGAGTFMTVRTDDITNHVMHSEWCDVPQETIDLILATKARGNKVIAVGTTATRALESAAQAHGGKIAAWNGDTQIFIYPGYEFCIVDRLITNFHLPESTLLMLVSALSNRDNILAAYEHAVKDRYRFFSYGDAMLIDKLEV

SEQ ID NO: 62784 - protein, 344 aa, Acinetobacter gerneri
  misc_feature (1)..(344): tr|N8ZKW2|N8ZKW2_9GAMM S-adenosylmethionine:tRNA ribosy ltransferase-isomerase OS=Acinetobacter gerneri DSM 149 67 = CIP 107464 OX=1120926 GN=queA PE=3 SV=1
MQLSDFNFDLPDELIARYPLETRSASRLLHLKADGQYQDHHFTDILDIFEPGDLLVLNDTKVMKARLKGKRATGGAVEVLVERIFDQTIAHCHIKASNAPKAGAELFIGPDEVKVTVTGRHENLFVVEFSQPILNVLDQYGQLPIPPYFNREAEAIDTERYQTVFNDPTKLASVAAPTASLHFDQDLLQKLEQKGVQKTFVTLHVGAGTFLPVRTTDIENHIMHSEWCEVSEQAAQLIAETKARGNKVIAVGTTATRATESAAQACGGKIGAWTGDTQIFIYPGYQFCVVDRLITNFHLPESTLLMLVSALSNRDNILNAYHHAVASKYRFFSYGDAMLIDKAL

SEQ ID NO: 62785 - protein, 346 aa, Acinetobacter guillouiae
  misc_feature (1)..(346): tr|N8X1H7|N8X1H7_ACIGI S-adenosylmethionine:tRNA ribosy ltransferase-isomerase OS=Acinetobacter guillouiae NIPH 991 OX=1217656 GN=queA PE=3 SV=1
MMQLSDFNFELPDELIARYPLETRSASRLLHLNADGSYQDLHFTDVFDLFNEGDLLVLNDTKVMKARLKGKRASGGAIEVLVERIFDQTIAHCHIKASNSPKAGAELFIGKDEVKVTVTGRHENLFVVEFSQPILQVLDLYGQLPIPPYFNREAEAIDTERYQTVFNDPTKLASVAAPTASLHFDQALLEKLEQKGVNKAFVTLHVGAGTFLPVRIDQIENHIMHSEWCDVPEATAKLIQETKARGNKVIAVGTTATRALESAAQASGGKIAAWTGDTQIFIYPGYQFCVVDRLITNFHLPESTLLMLVSALSNRDNIMNAYQHAVASKYRFFSYGDAMLIENANG

SEQ ID NO: 62786 - protein, 346 aa, Acinetobacter guillouiae
  misc_feature (1)..(346): tr|N8S6Z8|N8S6Z8_ACIGI S-adenosylmethionine:tRNA ribosy ltransferase-isomerase OS=Acinetobacter guillouiae CIP 63.46 OX=1217655 GN=queA PE=3 SV=1
MMQLSDFNFELPDELIARYPLETRSASRLLHLNADGSYQDLHFTDVFDLFNEGDLLVLNDTKVMKARLKGKRASGGAIEVLVERIFDQTIAHCHIKASNSPKAGAELFIGKDEVKVTVTGRHENLFVVEFSQPILQVLDLYGQLPIPPYFNREAEAIDTERYQTVFNDPTKLASVAAPTASLHFDQALLEKLEQKGVNKAFVTLHVGAGTFLPVRTDQIENHIMHSEWCDVPEATAKLIQETKARGNKVIAVGTTATRALESAAQASGGKIATWTGDTQIFIYPGYQFCVVDRLITNFHLPESTLLMLVSALSNRDNIMNAYQHAVASKYRFFSYGDAMLIENANG

SEQ ID NO: 62787 - protein, 345 aa, Acinetobacter gyllenbergii
  misc_feature (1)..(345): tr|V2TFY6|V2TFY6_9GAMM S-adenosylmethionine:tRNA ribosy ltransferase-isomerase OS=Acinetobacter gyllenbergii NI PH 230 OX=1217658 GN=queA PE=3 SV=1
MQLSDFSFDLPDELIARYPLDSRSASRLLHIDAQGQYHDHAFTDILDLLEDGDLLVLNDTKVMKARLKGKRATGGAIEVLVERMLDTHTAHCHIKSSNSPKAGAELYIGEDAVPVTVQGRHENLFVVKFSQPILSVLDQYGQLPIPPYFNREAEEIDTERYQTVFHDPEKIASVAAPTASLHFDQGLLEKLAAKGVQKTFVTLHVGAGTFMPVRTTDITNHIMHSEWCDVPQATIDLILATKARGNKVIAVGTTATRALESAAQANQGQIAAWTGDTQIFIYPGYQFCIVDRLITNFHLPESTLLMLVSALSNRDNILAAYTHAVEQRYRFFSYGDAMLVDKLDA

SEQ ID NO: 62788 - protein, 345 aa, Acinetobacter gyllenbergii
  misc_feature (1)..(345): tr|A0A1B8U948|A0A1B8U948_9GAMM S-adenosylmethionine:tRN A ribosyltransferase-isomerase OS=Acinetobacter gyllenb ergii OX=134534 GN=queA PE=3 SV=1
MQLSDFSFDLPDELIARYPLDSRSASRLLHIDAQGQYHDHAFTDILDLLEDGDLLVLNDTKVMKARLKGKRATGGAIEVLVERMLDTHNAHCHIKSSNSPKAGAELYIGEDAVPVTVQGRHENLFVVKFSQPILSVLDQYGQLPIPPYFNREAEEIDTERYQTVFHDPEKIASVAAPTASLHFDQGLLEKLAAKGVQKTFVTLHVGAGTFMPVRTTDITNHIMHSEWCDVPQATIDLILATKVRGNKVIAVGTTATRALESAAQANQGQIAAWTGDTQIFIYPGYQFCIVDRLITNFHLPESTLLMLVSALSNRDNILAAYTHAVEQRYRFFSYGDAMLVDKLDA

SEQ ID NO: 62789 - protein, 349 aa, Acinetobacter haemolyticus
  misc_feature (1)..(349): tr|D4XTF4|D4XTF4_ACIHA S-adenosylmethionine:tRNA ribosy ltransferase-isomerase OS=Acinetobacter haemolyticus AT CC 19194 OX=707232 GN=queA PE=3 SV=1
MVKKNMQLSDFSFDLPDELIAPYPLESRSASRLLHIDAQGHYHDHAFTDILDLLEEGDLLVLNDTKVMKARLKGKRATGGAIEVLVERILDTHTAHCHIKSSNSPKAGAELYIGEDAVPVTVQGRHENLFVVKFSQPILSVLDQYGQLPIPPYFNREAEEIDTERYQTVFHDPEKIASVAAPTASLHFDQSLLEKLATKGVQKTFVTLHVGAGTFMPVRTTDITNHIMHSEWCDVPQATIDLILATKARGNKVIAVGTTATRALESAAQANQGQIAAWTGDTQIFIYPGYQFCIVDRLITNFHLPESTLLMLVSALSNRDNILAAYKHAVEQRYRFFSYGDAMLIDKLA

SEQ ID NO: 62790 - protein, 344 aa, Acinetobacter haemolyticus
  misc_feature (1)..(344): tr|N9FFM0|N9FFM0_ACIHA S-adenosylmethionine:tRNA ribosy ltransferase-isomerase OS=Acinetobacter haemolyticus NI PH 261 OX=1217986 GN=queA PE=3 SV=1
MQLSDFSFDLPDELIARYPLESRSASRLLHIDAQGQYYDHAFTDILDLLEEGDLLVLNDTKVMKARLKGKRATGGAIEILVERMLDTHTAHCHIKSSNSPKAGAELYVGEDAVPVTVQGRHENLFVVEFSQPILSALDQYGQLPIPPYFNREAEEIDTERYQTVFHNPEKIASVAAPTASLHFDQDLLEKLAAKGIQKTFVTLHVGAGTFMPVRTTDITNHIMHSEWCDVPQATIDLILETKARGNKVIAVGTTATRALESAAQANDGKIAAWTGDTQIFIYPGYQFCIVDRLITNFHLPESTLLMLVSALSNRDNILAAYKHAVEQRYRFFSYGDAMLIDKLA

SEQ ID NO: 62791 - protein, 344 aa, Acinetobacter halotolerans
  misc_feature (1)..(344): tr|A0A4Q6X9L5|A0A4Q6X9L5_9GAMM S-adenosylmethionine:tRN A ribosyltransferase-isomerase OS=Acinetobacter halotol erans OX=1752076 GN=queA PE=3 SV=1
MQLSDFSFDLPDELIARYPLESRSASRLLHIDAQGQYHDHAFTDILDLLEDGDLLVLNDTKVMKARLKGKRATGGAIEVLVERMLDTHTAHCHIKSSNSPKAGAELYIGEDAVPVTVQGRHENLFVVKFSQPILSVLDQYGQLPIPPYFNREAEEIDTERYQTVFHDPEKIASVAAPTASLHFDQDLLAKLAAKGIQKTFVTLHVGAGTFMPVRTTDISNHIMHSEWCDVPQATIDLILATKARGNKVISVGTTATRALESAAQANGGKIAAWTGDTQIFIYPGYQFCMVDRLITNFHLPESTLLMLVSALSNRNNILAAYQHAVEQRYRFFSYGDAMLIDQLA

SEQ ID NO: 62792 - protein, 344 aa, Acinetobacter idrijaensis
  misc_feature (1)..(344): tr|A0A098YIJ2|A0A098YIJ2_9GAMM S-adenosylmethionine:tRN A ribosyltransferase-isomerase OS=Acinetobacter idrijae nsis OX=1507807 GN=queA PE=3 SV=1
MQLSDFNFDLPDELIARYPLETRSASRLLHLDAQGQYHDHQFTDILDLLEDGDLLVLNDTKVMKARLKGKRASGGAVEVLVERMQDRFIAYCHIKASNTPKAGAELFIGPDAVKVTVQGRHENLFIVEFSQPILDVLDQYGALPIPPYFNREAEEIDTERYQTVFNDPTKLASVAAPTASLHFDADLLAKLEAKGIQKTFVTLHVGAGTFLPVRTDDIQNHIMHSEWCDVPETAVEMIRQTKARGNKVISVGTTATRAVESAAQAHNGELAAWTGDTQIFIYPGYQFKVVDRLITNFHLPESTLLMLVSALSNRDNILNAYKHAVDSQYRFFSYGDAMLIDQAK

SEQ ID NO: 62793 - protein, 345 aa, Acinetobacter indicus
  misc_feature (1)..(345): tr|V2UAT4|V2UAT4_9GAMM S-adenosylmethionine:tRNA ribosy ltransferase-isomerase OS=Acinetobacter indicus CIP 110 367 OX=1341679 GN=queA PE=3 SV=1
MQLSDFNFDLPDELIARYPLEQRSASRLLHVNAEGQYQDHQFTDLVDLLEAGDVLVLNDTKVMKARLKGKRATGGAVEVLVERMQDQFIAHCHIKASNSPKAGAELFIGPDEVKVTVQGRHENLFIVEFSQPILEVLDRYGALPIPPYFNREAEAIDTERYQTVFNDPTKLASVAAPTASLHFDAELLAKLEAKGIQKTFVTLHVGAGTFLPVRTTDIENHIMHSEWCDVPTAAVEMIQQAKARGNKVISVGTTATRAVESAAQAHGGTLAAWTGDTQIFIYPGYKFKVVDRLITNFHLPESTLLMLVSALSSRENIMRAYQHAVAQRYRFFSYGDAMLIDQAHS

SEQ ID NO: 62794 - protein, 345 aa, Acinetobacter indicus
  misc_feature (1)..(345): tr|A0A437J036|A0A437J036_9GAMM S-adenosylmethionine:tRN A ribosyltransferase-isomerase OS=Acinetobacter indicus OX=756892 GN=queA PE=3 SV=1
MQLSDFNFDLPDELIARYPLEQRSASRLLHVNAEGQYQDHQFTDIVNLLEAGDVLVLNDTKVMKARLKGKRATGGAVEVLVERMQDQFIAHCHIKASNSPKAGAELFIGPDEVKVTVQGRHENLFIVEFSQPILEVLDRYGALPIPPYFNREAEAIDTERYQTVFNDPNKLASVAAPTASLHFDAELLAKLEAKGIQKTFVTLHVGAGTFLPVRTTDIENHIMHSEWCDVPAAAVEMIQQAKARGNKVISVGTTATRAVESAAQAHGGTLAAWTGDTQIFIYPGYKFKVVDRLITNFHLPESTLLMLVSALSSRENIMRAYQHAVAQRYRFFSYGDAMLIDQAHS

SEQ ID NO: 62795 - protein, 346 aa, Acinetobacter johnsonii
  misc_feature (1)..(346): tr|A0A0U3SL70|A0A0U3SL70_ACIJO S-adenosylmethionine:tRN A ribosyltransferase-isomerase OS=Acinetobacter johnson ii XBB1 OX=1242245 GN=queA PE=3 SV=1
MQLSDFNFDLPDELIARYPLDTRSASRLLHLDAQGQHHDFQFTDILDLLNAGDLLVLNDTKVMKARLKGKRASGGAIEVLVERMQDAFIAHCHIKASNTPKAGAELFIGPDAVKITILGRHENLFIVEFSQPILTVLELYGQLPIPPYFNREAEAIDTERYQTVFNDPTKLASVAAPTASLHFDQKLLDQLEAKGIQKTFVTLHVGAGTFLPVRTDDIANHIMHSEWCDVPEHSVELIRQTKARGNKVISVGTTATRAVESAAQAHDGELKAWTGDTQIFIYPGYEFKVVDRLITNFHLPESTLLMLVSALSNRDNILMAYQHAVANQYRFFSYGDAMLVDQLQPK

SEQ ID NO: 62796 - protein, 346 aa, Acinetobacter johnsonii
  misc_feature (1)..(346): tr|N9CTH7|N9CTH7_ACIJO S-adenosylmethionine:tRNA ribosy ltransferase-isomerase OS=Acinetobacter johnsonii ANC 3 681 OX=1217662 GN=queA PE=3 SV=1
MQLSDFNFDLPDELIARYPLDTRSASRLLHLDAQGQHHDFQFTDILDLLDAGDLLVLNDTKVMKARLKGKRASGGAVEVLVERMQDAFIAHCHIKASNTPKAGAELFIGPDAVKVTVLGRHENLFIVEFSQPILTVLDLYGQLPIPPYFNREAEAIDTERYQTVFNDPTKLASVAAPTASLHFDQKLLDQLEAKGIQKTFVTLHVGAGTFLPVRTDDIANHIMHSEWCDVPEHAVELIRQTKARGNKVISVGTTATRAVESAAQAHQGELKAWTGDTQIFIYPGYEFKVVDRLITNFHLPESTLLMLVSALSNRDNILAAYQHAVANQYRFFSYGDAMLVDQLQPK

SEQ ID NO: 62797 - protein, 345 aa, Acinetobacter junii
  misc_feature (1)..(345): tr|D0SL65|D0SL65_ACIJU S-adenosylmethionine:tRNA ribosy ltransferase-isomerase OS=Acinetobacter junii SH205 OX= 575587 GN=queA PE=3 SV=1
MQLSDFSFDLPDELIARYPLESRSASRLLHIDDQGHYHDHSFTDILDLLNEGDLLVLNDTKVMKARLKGKRATGGAIEVLVERMLDTHTAHCHIKSSNSPKAGAELYIGEDSVPVTVQGRHENLFVVEFSQPILSILDQYGQLPIPPYFNREAEEIDTERYQTVFHDPEKIASVAAPTASLHFDQDLLEKLAAKGVQKTFVTLHVGAGTFMPVRTTDITNHIMHSEWCDVPQSTIDLILETKARGNKVIAVGTTATRALESAAQANDGKIAAWTGDTQIFIYPGYQFCIVDRLITNFHLPESTLLMLVSALSNRDNILSAYEHAVKERYRFFSYGDAMLIDKLIV

SEQ ID NO: 62798 - protein, 345 aa, Acinetobacter junii
  misc_feature (1)..(345): tr|A0A365PK99|A0A365PK99_ACIJU S-adenosylmethionine:tRN A ribosyltransferase-isomerase OS=Acinetobacter junii O X=40215 GN=queA PE=3 SV=1
MQLSDFSFDLPDELIARYPLESRSASRLLHIDDQGHYHDHSFTDILDLLNEGDLLVLNDTKVMKARLKGKRATGGAIEVLVERMLDTHTAHCHIKSSNSPKAGAELYIGEDSVPVTVKGRHENLFVVEFSQPILSILDQYGQLPIPPYFNREAEEIDTERYQTVFHDPEKIASVAAPTASLHFDQDLLEKLAAKGVQKTFVTLHVGAGTFMPVRTTDITNHIMHSEWCDVPQSTIDLILETKARGNKVIAVGTTATRALESAAQANDGKIAAWTGDTQIFIYPGYQFCIVDRLITNFHLPESTLLMLVSALSNRDNILSAYEHAVKERYRFFSYGDAMLIDKLIV

SEQ ID NO: 62799 - protein, 345 aa, Acinetobacter kookii
  misc_feature (1)..(345): tr|A0A1G6N1S0|A0A1G6N1S0_9GAMM S-adenosylmethionine:tRN A ribosyltransferase-isomerase OS=Acinetobacter kookii OX=1226327 GN=queA PE=3 SV=1
MQLSDFNFDLPDELIARYPLETRSASRLLHLDAQGQYHDHQFTDILNLLNEGDLLVLNDTKVMKARLKGKRATGGAVEVLVERMLDKFIAHCHIKASNSPKEAAELFIGPDEVKVTVKGRHENLFIVEFSQPILNVLDLYGALPIPPYFNREAESIDTERYQTVFNDPTKLASVAAPTASLHFDEALLKKLEEKGIQKTFVTLHVGAGTFLPVRTNDIENHIMHSEWCDVSEESMALIRETKARGNKVIAVGTTATRATESAAQANGGELKGWTGDTQIFIYPGYEFKVVDRLITNFHLPESTLLMLVSALSNRDNILNAYHHAVEAKYRFFSYGDAMLVDKITP

SEQ ID NO: 62800 - protein, 345 aa, Acinetobacter kyonggiensis
  misc_feature (1)..(345): tr|A0A1H3JY53|A0A1H3JY53_9GAMM S-adenosylmethionine:tRN A ribosyltransferase-isomerase OS=Acinetobacter kyonggi ensis OX=595670 GN=queA PE=3 SV=1
MQLSDFNFDLPDELIARYPLDTRSASRLLHLDQQGQYHDCHFTDIFDLLDAGDLLILNDTKVMKARLKGKRATGGAVEVLVERMQDKFIAHCHIKASNSPKAGAELFIGDDEVKVTVQGRHENLFIVEFSQPILDVLDQYGALPIPPYFNREAEAIDTERYQTVFNDPTKLASVAAPTASLHFDQDLLEKLTAKGIQKSFVTLHVGAGTFLPVRTTDIQNHIMHSEWCDVPEQTVELIRQTKARGNKVITVGTTATRAIESAAQAHGGTLAAWTGDTQIFIYPGYDFKVVDRLITNFHLPESTLLMLVSALSNRDNILQAYHHAVEAKYRFFSYGDAMLVDKIKP

SEQ ID NO: 62801 - protein, 345 aa, Acinetobacter lactucae
  misc_feature (1)..(345): tr|A0A1V0K7Z2|A0A1V0K7Z2_9GAMM S-adenosylmethionine:tRN A ribosyltransferase-isomerase OS=Acinetobacter lactuca e OX=1785128 GN=queA PE=3 SV=1
MQLSDFSFELPDELIARYPLETRSASRLLHLDSKGQYHDHMFTDIIDLFEEGDLLVLNDTKVMKARLKGKRSTGGAIEILVERMLNHTTAYCHIKSSNSPKAGAELFVGADNIPVIVRGRHENLFVVEFSQPILPVLEQYGQLPIPPYFNREAEEIDTERYQTVFHNPEKIASVAAPTASLHFDEELLAKLEQKNVQKSFVTLHVGAGTFMPVRTDDITNHVMHSEWCDVPQETIELILETKARGNKVIAVGTTATRALESAAQAHGGKIAAWTGDTQIFIYPGYEFCIVDRLITNFHLPESTLLMLVSALSNRDNILAAYKHAVKDRYRFFSYGDAMLIDKLEV

SEQ ID NO: 62802 - protein, 345 aa, Acinetobacter lactucae
  misc_feature (1)..(345): tr|A0A3R9Q8D7|A0A3R9Q8D7_9GAMM S-adenosylmethionine:tRN A ribosyltransferase-isomerase OS=Acinetobacter lactuca e OX=1785128 GN=queA PE=3 SV=1
MQLSDFSFELPDELIARYPLESRSASRLLHLDSKGQYHDHMFTDIIDLFEEGDLLVLNDTKVMKARLKGKRSTGGAIEILVERMLNHTTAYCHIKSSNSPKAGAELFVGADNIPVIVRGRHENLFVVEFSQPILPVLEQYGQLPIPPYFNREAEEIDTERYQTVFHNPEKIASVAAPTASLHFDEELLAKLERKNVQKSFVTLHVGAGTFMPVRTDDITNHVMHSEWCDVPQETIDLILATKARGNKVIAVGTTATRALESAAQAHGGKIAAWTGDTQIFIYPSYEFCIVDRLITNFHLPESTLLMLVSALSNRDNILAAYEHAVKSHYRFFSYGDAMLIDKLEV

SEQ ID NO: 62803 - protein, 346 aa, Acinetobacter larvae
  misc_feature (1)..(346): tr|A0A1B2LXF5|A0A1B2LXF5_9GAMM S-adenosylmethionine:tRN A ribosyltransferase-isomerase OS=Acinetobacter larvae OX=1789224 GN=queA PE=3 SV=1
MQLSDFNFDLPDELIARYPLEQRSASKLLYLKADGQYEDHLFTDILDLLEPGDLLILNDTKVMKARLKGKRASGGQIEVLVERLLDAQHAHCHIKASNAPKAGAAIFLGEGEIPATVTGRHENLFVVEFSEPILSVLERYGQLPIPPYFNREAEDIDNVRYQTVFHDPNKLASVAAPTASLHFDETLMAKLAAKNIQHSFVTLHVGAGTFLPVRSQDIEHHVMHSEWCDVPVETVQRIQETQARGHKVIAVGTTATRALESAAQAHGGNIAAWSGDTQIFIYPGYQFCVVDRLITNFHLPESTLLLLVSALSSREHILKCYQHAIEQHYRFFSYGDAMLIDAKFST

SEQ ID NO: 62804 - protein, 344 aa, Acinetobacter lwoffii
  misc_feature (1)..(344): tr|N9GBF3|N9GBF3_ACILW S-adenosylmethionine:tRNA ribosy ltransferase-isomerase OS=Acinetobacter lwoffii ATCC 99 57 = CIP 70.31 OX=1311804 GN=queA PE=3 SV=1
MQLSDFNFDLPDELIARYPLETRSASRLLHLDTQGQYHDHQFTDILDLLEDGDLLILNDTKVMKARLKGKRASGGAVEVLVERMQDRFIAYCHIKASNTPKAGAELFIGPDAVKVIVQGRHENLFIVKFSQPILDVLDQYGALPIPPYFNREAEEIDTERYQTVFNDPTKLASVAAPTASLHFDADLLAKLEAKGIQKTFVTLHVGAGTFLPVRTDDIQNHIMHSEWCDVPETAVEMIRQTKARGNKVISVGTTATRAVESAAQAHNGELAAWTGDTQIFIYPGYQFKVVDRLITNFHLPESTLLMLVSALSNRDNILNAYKHAVDSKYRFFSYGDAMLIDQAK

SEQ ID NO: 62805 - protein, 344 aa, Acinetobacter lwoffii; identical to SEQ ID NO: 62804
  misc_feature (1)..(344): tr|D0SZ66|D0SZ66_ACILW S-adenosylmethionine:tRNA ribosy ltransferase-isomerase OS=Acinetobacter lwoffii SH145 O X=575588 GN=queA PE=3 SV=1

SEQ ID NO: 62806 - protein, 349 aa, Acinetobacter marinus
  misc_feature (1)..(349): tr|A0A1G6KVG1|A0A1G6KVG1_9GAMM S-adenosylmethionine:tRN A ribosyltransferase-isomerase OS=Acinetobacter marinus OX=281375 GN=queA PE=3 SV=1
MQLSDFSYHLPEELIAHYPLAQRSDSRLLHLDQHGQYHDHQFTDILDLLDAGDVLILNDTKVMKARLKGKRASGGAIEVLVERLIDPTTAYCHIKASNTPKAGVEIFISEAGIPATVQGRHENLFIVAFSQPILPILEQHGQLPIPPYFNREAEAVDNERYQTVFHDPAKLASVAAPTASLHFDKDMLAKLKAKGIDYHFVTLHVGAGTFLPVRVEKVETHVMHAEWCEVPASTVEKIQAAKARGNKVIAVGTTATRALESAAVAHDGELQAWSGDTQIFIYPGFEFKVVDRLITNFHLPESTLLMLVSALSRREAILTAYQHAVSEKYRFFSYGDAMLIDEFCDIVPL

SEQ ID NO: 62807 - protein, 348 aa, Acinetobacter nectaris
  misc_feature (1)..(348): tr|V2UWD0|V2UWD0_9GAMM S-adenosylmethionine:tRNA ribosy ltransferase-isomerase OS=Acinetobacter nectaris CIP 11 0549 OX=1392540 GN=queA PE=3 SV=1
MMTMQLSDFNFDLPDELIARYPLEQRSASRLLHIDATGAYHDHQFTDIVDLLNEGDLLVLNDTKVMKARLKGKRESGGAVEVLVERMQDQFIAYCHIKASNSPKPETTLFIGKDAVPVTVKGRHENLYIVEFSQPILTVLDLYGQLPIPPYFNREAEDIDTERYQTVFNDPTKLASVAAPTASLHFDDALLKKLEQKGIQKTFVTLHVGAGTFLPVRTTDIENHIMHSEWCHVPSETVDLIQATKARGNKVISVGTTATRAVESAAQAHQGKLQAWTGDTQIFIYPGYKFCVVDRLITNFHLPESTLLMLVSALSNRENILKAYQHAVAEKYRFFSYGDAMLIDQAAV

SEQ ID NO: 62808 - protein, 345 aa, Acinetobacter nosocomialis
  misc_feature (1)..(345): tr|A0A1Y5NUI6|A0A1Y5NUI6_ACINO S-adenosylmethionine:tRN A ribosyltransferase-isomerase OS=Acinetobacter nosocom ialis P020 OX=1285584 GN=queA PE=3 SV=1
MQLSDFSFELPDELIARYPLESRSASRLLHLDAKGQYHDHMFTDIIDLFEEGDLLVLNDTKVMKARLKGKRATGGAIEILVERMLNHTTAYCHIKASNSPKAGAELFVGADNIPVIVRGRHENLFVVEFSQPILPVLEQYGQLPIPPYFNREAEEIDTERYQTVFHNPEKIASVAAPTASLHFDEELLAKLDQKGVKKTFVTLHVGAGTFMPVRTDDITNHVMHSEWCDVPQETIDLILATKARGNKVIAVGTTATRALESAAQAHGGKIAAWTGDTQIFIYPGYEFCMVDRLITNFHLPESTLLMLVSALSNRDNILAAYEHAVKERYRFFSYGDAMLIDKLEV

SEQ ID NO: 62809 - protein, 345 aa, Acinetobacter nosocomialis
  misc_feature (1)..(345): tr|A0A2L1VCW1|A0A2L1VCW1_ACINO S-adenosylmethionine:tRN A ribosyltransferase-isomerase OS=Acinetobacter nosocom ialis OX=106654 GN=queA PE=3 SV=1
MQLSDFSFELPDELIARYPLESRSASRLLHLDAKGQYHDHMFTDIIDLFEEGDLLVLNDTKVMKARLKGKRATGGAIEILVERMLNHTTAYCHIKASNSPKAGAELFVGADNIPVIVRGRHENLFVVEFSQPILPVLEQYGQLPIPPYFNREAEEIDTERYQTVFHNPEKIASVAAPTASLHFDEDLLAKLDQKGVKKTFVTLHVGAGTFMPVRTDDITNHVMHSEWCDVPQETIDLILATKARGNKVIAVGTTATRALESAAQAHGGKIAAWTGDTQIFIYPGYEFCMVDRLITNFHLPESTLLMLVSALSNRDNILAAYEHAVKDRYRFFSYGDAMLIDKLEV

SEQ ID NO: 62810 - protein, 345 aa, Acinetobacter oleivorans
  misc_feature (1)..(345): tr|A0A0B2UC28|A0A0B2UC28_9GAMM S-adenosylmethionine:tRN A ribosyltransferase-isomerase OS=Acinetobacter oleivor ans OX=1148157 GN=queA PE=3 SV=1
MQLSDFSFELPDELIARYPLESRSASRLLHLDSKGQYHDHMFTDIIDLFEDGDLLVLNDTKVMKARLKGKRSTGGAIEILVERMLNHTTAYCHIKSSNSPKAGAELYVGADNIPVIVRGRHENLFVVEFSQPILPVLEQYGQLPIPPYFNREAEEIDTERYQTVFHNPEKIASVAAPTASLHFDEALLEKLEQKNVQKTFVTLHVGAGTFMPVRTDDITNHIMHSEWCDVPQETIDLILATKARGNKVIAIGTTATRALESAAQAHSGKIAAWTGDTQIFIYPGYQFCIVDRLITNFHLPESTLLMLVSALSNRDNILAAYEHAVKNRYRFFSYGDAMLIDKLEG

SEQ ID NO: 62811 - protein, 345 aa, Acinetobacter oleivorans
  misc_feature (1)..(345): tr|D8JNP1|D8JNP1_ACISD S-adenosylmethionine:tRNA ribosy ltransferase-isomerase OS=Acinetobacter oleivorans (str ain JCM 16667 / KCTC 23045 / DR1) OX=436717 GN=queA PE= 3 SV=1
MQLSDFSFELPDELIARYPLESRSASRLLHLDSKGKYHDHMFTDIIDLFEEGDLLVLNDTKVMKARLKGKRSTGGAIEILVERMLNHTTAYCHIKSSNSPKAGAELYVGADNIPVIVRGRHENLFVVEFSQAILPVLEQYGQLPIPPYFNREAEEIDTERYQTVFHNPEKIASVAAPTASLHFDETLLEKLEQKNVQKTFVTLHVGAGTFMPVRTDDITNHIMHSEWCDVPQETIDLILATKARGNKVIAVGTTATRALESAAQAHGGKIAAWTGDTQIFIYPGYEFCIVDRLITNFHLPESTLLMLVSALSNRDNILAAYEHAVKSRYRFFSYGDAMLVDKLDV

SEQ ID NO: 62812 - protein, 345 aa, Acinetobacter parvus
  misc_feature (1)..(345): tr|N8Q132|N8Q132_9GAMM S-adenosylmethionine:tRNA ribosy ltransferase-isomerase OS=Acinetobacter parvus NIPH 110 3 OX=1217671 GN=queA PE=3 SV=1
MQLSDFSFDLPDELIARYPLESRSASRLLHIDPQGHYHDHVFTDILNLLEDGDLLVLNDTKVMKARLKGKRATGGAIEVLVERMLDTHTAHCHIKSSNSPKAGAELYIGEDAIPVTVQGRHENLFIVEFAQPILSVLDQYGQLPIPPYFNREAEEIDTERYQTVFHDPEKIASVAAPTASLHFDQDLLEKLAAKGVQKTFVTLHVGAGTFMPVRTTDISNHIMHSEWCDVPQATIDLILETKARGNKVIAVGTTATRALESAAQANQGQIAAWTGDTQIFIYPGYQFCIVDRLITNFHLPESTLLMLVSALSNRENILAAYQHAVEQRYRFFSYGDAMLVDKLEI

SEQ ID NO: 62813 - protein, 345 aa, Acinetobacter parvus
  misc_feature (1)..(345): tr|N8RMY5|N8RMY5_9GAMM S-adenosylmethionine:tRNA ribosy ltransferase-isomerase OS=Acinetobacter parvus DSM 1661 7 = CIP 108168 OX=981333 GN=queA PE=3 SV=1
MQLSDFSFDLPDELIARYPLESRSASRLLHIDPQGHYHDHVFTDILNLLEDGDLLVLNDTKVMKARLKGKRATGGAIEVLVERMLDTHTAHCHIKSSNSPKAGAELYIGEDAIPVTVQGRHENLFIVEFAQPILSVLDQYGQLPIPPYFNREAEEIDTERYQTVFHDPEKIASVAAPTASLHFDQDLLEKLAAKGVQKTFVTLHVGAGTFMPVRTTDITNHIMHSEWCDVPQATIDLILETKARGNKVIAVGTTATRALESAAQANQGQIAAWTGDTQIFIYPGYQFCIVDRLITNFHLPESTLLMLVSALSNRENILAAYQHAVEQRYRFFSYGDAMLVDKLEI

SEQ ID NO: 62814 - protein, 345 aa, Acinetobacter piscicola
  misc_feature (1)..(345): tr|A0A4Q4GVB1|A0A4Q4GVB1_9GAMM S-adenosylmethionine:tRN A ribosyltransferase-isomerase OS=Acinetobacter piscico la OX=2006115 GN=queA PE=3 SV=1
MQLSDFNFDLPDELIARYPLDTRSASRLLHLNADGSYQDHHFTDILDLFEEGDLMVLNDTKVMKARLKGKRATGGAVEVLVERIFDQTIAHCHIKASNSPKAGAELFIGEDGVKVTVTGRHENLFVVEFSQPILQVLEVYGQLPIPPYFNREAEAIDTERYQTVFNDPTKLASVAAPTASLHFDEDLLAKLAQKGVNKTFVTLHVGAGTFLPVRTTDIENHIMHSEWCEVSESAAKMIQDTQARGNKVIAIGTTATRAVESAAQACGGKIGAWTGDTQIFIYPGYQFCVVDRLITNFHLPESTLLMLVSALSNKENILNAYQHAVASKYRFFSYGDAMLIEKSSV

SEQ ID NO: 62815 - protein, 345 aa, Acinetobacter pittii
  misc_feature (1)..(345): tr|R8YG08|R8YG08_ACIPI S-adenosylmethionine:tRNA ribosy ltransferase-isomerase OS=Acinetobacter pittii ANC 4050 OX=1217691 GN=queA PE=3 SV=1
MQLSDFSFELPDELIARYPLESRSASRLLHLDSKGQYHDHMFTDIIDLFEEGDLLVLNDTKVMKARLKGKRSTGGAIEILVERMLNHTTAYCHIKSSNSPKAGAELFVGADNIPVIVRGRHENLFVVEFSQPILPVLEQYGQLPIPPYFNREAEEIDTERYQTVFHNPEKIASVAAPTASLHFDEELLAKLEQKNVQKSFVTLHVGAGTFMPVRTDDITNHVMHSEWCDVPQETIDLILATKARGNKVIAVGTTATRALESAAQAHGGKIAAWTGDTQIFIYPGYEFCIVDRLITNFHLPESTLLMLVSALSNRDNILAAYKHAVKDRYRFFSYGDAMLIDKFEV

SEQ ID NO: 62816 - protein, 345 aa, Acinetobacter pittii
  misc_feature (1)..(345): tr|A0A1C2WML4|A0A1C2WML4_ACIPI S-adenosylmethionine:tRN A ribosyltransferase-isomerase OS=Acinetobacter pittii OX=48296 GN=queA PE=3 SV=1
MQLSDFSFELPDELIARYPLESRSASRLLQLDSKGQYHDHMFTDIIDLFEEGDLLVLNDTKVMKARLKGKRSTGGAIEILVERMLNHTTAYCHIKSSNSPKAGAELFVGADNIPVIVRGRHENLFVVEFSQPILPVLEQYGQLPIPPYFNREAEEIDTERYQTVFHNPEKIASVAAPTASLHFDEELLAKLEQKNVQKSFVTLHVGAGTFMPVRTDDITNHVMHSEWCDVPQETIDLILATKARGNKVIAIGTTATRALESAAQAHGGKIAAWTGDTQIFIYPGYEFCIVDRLITNFHLPESTLLMLVSALSNRDNILAAYEHAVKSRYRFFSYGDAMLIDKLKV

SEQ ID NO: 62817 - protein, 346 aa, Acinetobacter populi
  misc_feature (1)..(346): tr|A0A1Z9Z2T5|A0A1Z9Z2T5_9GAMM S-adenosylmethionine:tRN A ribosyltransferase-isomerase OS=Acinetobacter populi OX=1582270 GN=queA PE=3 SV=1
MQLSDFSYHLPEELIAHYPLAERSASRLLHLDAQGQFHDQHFTDLLDLLDTGDVLILNDTKVMKARLKGKRASGGAIEVLVERLTSPNTAYCHIKASNAPKAGVEIFIGPDLIPAKVQGRHENLFIVEFSQPVLEVLEQYGQLPIPPYFNREAEAIDTERYQTVFHDPNKLASVAAPTASLHFDQKLLKQLQDKGIQEHFVTLHVGAGTFLPVRVDNIENHVMHSEWCEVPASTVDAILAAKSRGNKVIAVGTTATRALESAAQAHGGKLAAWSGDTQIFIYPGYDFKVVDRLITNFHLPESTLLMLVSALSNRDNILNAYQHAVAQRYRFFSYGDAMLIDRLQHA

SEQ ID NO: 62818 - protein, 346 aa, Acinetobacter pragensis
  misc_feature (1)..(346): tr|A0A151Y0N4|A0A151Y0N4_9GAMM S-adenosylmethionine:tRN A ribosyltransferase-isomerase OS=Acinetobacter pragens is OX=1806892 GN=queA PE=3 SV=1
MQLSDFSFDLPDELIARYPLATRSASRLLHLDTQGQYHDYHFTDILDLLQPGDLLVLNDTKVMKARLKGKRATGGAIEVLVERMMDKFVAHCHIKASNSPKEGAELFIGPDEVKVTVKGRHENLFIVEFSQSILDVLDKYGALPIPPYFNREAEAIDTERYQTVFNDPSKLASVAAPTASLHFDEALLKKLEEKGISKTFVTLHVGAGTFLPVRTTDIENHIMHSEWCDVSDESMALIKATKERGNKVIAVGTTATRATESAAQSNGGELKGWTGDTQIFIYPGYEFKVVDRLITNFHLPESTLLMLVSALSNQDNILNAYQHAVDSQYRFFSYGDAMLIDNINVK

SEQ ID NO: 62819 - protein, 345 aa, Acinetobacter proteolyticus
  misc_feature (1)..(345): tr|A0A1E7R4P4|A0A1E7R4P4_9GAMM S-adenosylmethionine:tRN A ribosyltransferase-isomerase OS=Acinetobacter proteol yticus OX=1776741 GN=queA PE=3 SV=1
MQLSDFSFDLPDELIARYPLDSRSASRLLHIDAQGQYHDHAFTDILDLLEDGDLLVLNDTKVMKARLKGKRATGGAIEVLVERMLDTHTAHCHIKSSNSPKAGAELYIGEDAVPVTVQGRHENLFVVKFSQSILSVLDQYGQLPIPPYFNREAEEIDTERYQTVFHDPEKIASVAAPTASLHFDHGLLEKLEAKGVQKTFVTLHVGAGTFMPVRTTDITNHIMHSEWCDVPQATIDLILATKARSNKVIAVGTTATRALESAAQANQGKIAAWTGDTQIFIYPGYQFCIVDRLITNFHLPESTLLMLVSALSNRDNILAAYTHAVEQRYRFFSYGDAMLVDKLDA

SEQ ID NO: 62820 - protein, 345 aa, Acinetobacter proteolyticus
  misc_feature (1)..(345): tr|A0A2N0WIT4|A0A2N0WIT4_9GAMM S-adenosylmethionine:tRN A ribosyltransferase-isomerase OS=Acinetobacter proteol yticus OX=1776741 GN=queA PE=3 SV=1
MQLSDFSFDLPDELIARYPLDSRSASRLLHIDAQGQYHDHAFTDILDLLEDGDLLVLNDTKVMKARLKGKRATGGAIEVLVERMLDTHTAHCHIKSSNSPKAGAELYIGEDAVPVTVQGRHENLFVVKFSQPILSVLDQYGQLPIPPYFNREAEEIDTERYQTVFHDPEKIASVAAPTASLHFDHGLLEKLEAKGVQKTFVTLHVGAGTFMPVRTTDITNHIMHSEWCDVPQATIDLILATKARGNKVIAVGTTATRALESAAQANQGKIAAWTGDTQIFIYPGYQFCIVDRLITNFHLPESTLLMLVSALSNRDNILAAYTHAVEQRYRFFSYGDAMLVDKLDA

SEQ ID NO: 62821 - protein, 346 aa, Acinetobacter puyangensis
  misc_feature (1)..(346): tr|A0A240E3U8|A0A240E3U8_9GAMM S-adenosylmethionine:tRN A ribosyltransferase-isomerase OS=Acinetobacter puyange nsis OX=1096779 GN=queA PE=3 SV=1
MQLSDFSYHLPEELIAHYPLAERSASRLLHLDAQGQFHDQHFTDLLDLLDAGDVLILNDTKVMKARLKGKRASGGAIEVLVERLTSPSTAYCHIKASNAPKAGTEIFIGPELIPAKVQGRHENLFIVEFSQSVLEVLEQYGQLPIPPYFNREAEAIDTERYQTVFHDPNKLASVAAPTASLHFDQKLLKQLQDKGICEHFVTLHVGAGTFLPVRVDNIENHVMHSEWCEVPASTVDAILAAKSRGNKVIAVGTTATRALESAAKAHNGKLAAWSGDTQIFIYPGYDFKVVDHLITNFHLPESTLLMLVSALSNRDNILNAYQHAVAQRYRFFSYGDAMLIDRLQRA

SEQ ID NO: 62822 - protein, 345 aa, Acinetobacter qingfengensis
  misc_feature (1)..(345): tr|A0A1E7R2U4|A0A1E7R2U4_9GAMM S-adenosylmethionine:tRN A ribosyltransferase-isomerase OS=Acinetobacter qingfen gensis OX=1262585 GN=queA PE=3 SV=1
MQLSDFSYHLPEELIAHYPLASRSASRLLHLDAQGQYHDRLFKEIVDLLSPGDLLILNDTKVMKARLKGKRASGGAIEVLVERLISSTTAYCHIKASNSPKAGAEIFLGEDEIPASVQGRHENLFIVEFSQSVLDILEQYGQLPIPPYFNRAAEAIDTERYQTVFHNPEKLASVAAPTASLHFDEDILAALTSKGIEQHFVTLHVGAGTFLPVRVDNIENHVMHSEWCEVPLSTVMAIQSAKARGNKIIAVGTTATRALESAASAHQGELQAWSGDTQIFIYPGFKFNVIDRLITNFHLPESTLLMLVSALSSREKILAAYEHAVAAKYRFFSYGDAMLIDLSST

SEQ ID NO: 62823 - protein, 346 aa, Acinetobacter radioresistens
  misc_feature (1)..(346): tr|A0A3F3GTI9|A0A3F3GTI9_ACIRA S-adenosylmethionine:tRN A ribosyltransferase-isomerase OS=Acinetobacter radiore sistens NIPH 2130 OX=1217674 GN=queA PE=3 SV=1
MQLSDFSFNLPDELIARYPLAQRSASRLLHLNSEGQYSDRHFTDILELFEPGDLLVLNDTKVMKARLKGRRATGGAVEILVERIFDQTIAHCHIKASNSPKAGAELFIGADEVKVTVQGRHENLFVVEFSQPILQVLDQHGQLPIPPYFNREAEAIDSERYQTVFHDPEKIASVAAPTASLHFDEVLLNKLSEKGVQQAFVTLHVGAGTFLPVRSIDIENHIMHSEWCEVPENTVELIKQVQTRGNKVIAVGTTATRALESAAQAHNGKIEAWTGDTQIFIYPGYQFCVVDRLITNFHLPESTLLMLVSALSTRDHILAAYEHAVRKHYRFFSYGDAMLIDKTVNR

SEQ ID NO: 62824 - protein, 346 aa, Acinetobacter radioresistens; identical to SEQ ID NO: 62823
  misc_feature (1)..(346): tr|A0A3D3FXE3|A0A3D3FXE3_ACIRA S-adenosylmethionine:tRN A ribosyltransferase-isomerase OS=Acinetobacter radiore sistens OX=40216 GN=queA PE=3 SV=1

SEQ ID NO: 62825 - protein, 347 aa, Acinetobacter rudis
  misc_feature (1)..(347): tr|S3PLP3|S3PLP3_9GAMM S-adenosylmethionine:tRNA ribosy ltransferase-isomerase OS=Acinetobacter rudis CIP 11030 5 OX=421052 GN=queA PE=3 SV=1
MQLSDFSFDLPDELIARYPLDNRSASRLLHLGADGRHHDLHFVDILELFEAGDLLVLNDTKVMKARLKGKRATGGSVELLVERIFNQTTAHCHIKASNSPKAGAELFIGPDQVPVTVTGRHENLFIVEFSQPILQVLDQYGQLPIPPYFNREAEEIDTVRYQTVFNNPEKLASVAAPTASLHFDQALLEALAAKGVNTVFVTLHVGAGTFLPVRTTDIENHIMHSEWCEVTEETALKIQETQARGNKVIAVGTTATRALESAAQACHGKIGAWTGDTQIFIYPGYQFCVVDRLITNFHLPESTLLMLVSALTSRDHVLNAYKHAVAQQYRFFSYGDAMLVDRANNAQ

SEQ ID NO: 62826 - protein, 344 aa, Acinetobacter schindleri
  misc_feature (1)..(344): tr|N9AGG5|N9AGG5_9GAMM S-adenosylmethionine:tRNA ribosy ltransferase-isomerase OS=Acinetobacter schindleri CIP 107287 OX=1217988 GN=queA PE=3 SV=1
MQLSDFSFDLPDELIARYPLEQRSASRLLHLDAEGQYHDHQFTDILDLLNEGDLLVLNDTKVMKARLKGKRASGGAVEVLVERVMDQFIAHCHIKASNTPKAGAELFIGPNAVKVTVQGRHENLFVVEFSQPILDVLDQYGALPIPPYFNREAEEIDTLRYQTVFNDPTKIASVAAPTASLHFDEDLLKKLEEKGIQKTFVTLHVGAGTFLPVRTSDIENHIMHSEWCQVSDASMALIKATKERGNKVIAVGTTATRATESAAQANGGELKGWTGDTQIFIYPGYEFKVVDRLITNFHLPESTLLMLVSALSNRDNILNAYKHAVESRYRFFSYGDAMLIDQAK

SEQ ID NO: 62827 - protein, 344 aa, Acinetobacter schindleri
  misc_feature (1)..(344): tr|A0A2S1FBD3|A0A2S1FBD3_9GAMM S-adenosylmethionine:tRN A ribosyltransferase-isomerase OS=Acinetobacter schindl eri OX=108981 GN=queA PE=3 SV=1
MQLSDFSFDLPDELIARYPLEQRSASRLLHLDAEGQYHDHQFTDILDLLNEGDLLVLNDTKVMKARLKGKRASGGAVEVLVERMMDQFIAHCHIKASNTPKAGAELFIGPDAVKVTVQGRHENLFVVEFSQPILDVLDQYGALPIPPYFNREAEAIDTERYQTVFNDPTKIASVAAPTASLHFDEDLLKKLEEKGIQKTFVTLHVGAGTFLPVRTSDIENHIMHSEWCQVSDASMALIKATKERGNKVIAVGTTATRATESAAQANGGELKGWTGDTQIFIYPGYEFKVVDRLITNFHLPESTLLMLVSALSNRDNILNAYKYAVESKYRFFSYGDAMLIDQAK

SEQ ID NO: 62828 - protein, 345 aa, Acinetobacter seifertii
  misc_feature (1)..(345): tr|A0A2T5R0R1|A0A2T5R0R1_9GAMM S-adenosylmethionine:tRN A ribosyltransferase-isomerase OS=Acinetobacter seifert ii OX=1530123 GN=queA PE=3 SV=1
MQLSDFSFELPDELIARYPLESRSASRLLHLDSKGQYHDHMFIDIIDLFEEGDLLVLNDTKVMKARLKGKRSTGGAIEILVERMLNHTTAYCHIKSSNSPKAGAELYVGADNIPVIVRGRHENLFVVEFSQPILPVLEQYGQLPIPPYFNREAEEIDTERYQTVFHNPEKIASVAAPTASLHFDEELLAKLEQKNVQKSFVTLHVGAGTFMPVRTDDITNHVMHSEWCDVPQETIDLILATKARGNKVIAIGTTATRALESAAQAHGGKIAAWNGDTQIFIYPGYEFCIVDRLITNFHLPESTLLMLVSALSNRDNILAAYEHAVKSRYRFFSYGDAMLIDKLEV

SEQ ID NO: 62829 - protein, 345 aa, Acinetobacter seifertii
  misc_feature (1)..(345): tr|A0A5E9PG97|A0A5E9PG97_9GAMM S-adenosylmethionine:tRN A ribosyltransferase-isomerase OS=Acinetobacter seifert ii OX=1530123 GN=queA PE=3 SV=1
MQLSDFSFELPDELIARYPLESRSASRLLHLDSKGQYHDHMFTDIIDLFEEGDLLVLNDTKVMKARLKGKRSTGGAIEILVERMLNHTTAYCHIKSSNSPKAGAELYVGTDNIAVIVRGRHENLFVVEFSQPILPVLEQYGQLPIPPYFNREAEEIDTERYQTVFHNPEKIASVAAPTASLHFDEELLAKLEQKNVQKSFVTLHVGAGTFMPVRTDDITNHVMHSEWCDVPQETIDLILTTKARGNKVIAVGTTATRALESAAQAHGGKIAAWNGDTQIFIYPGYEFCIVDRLITNFHLPESTLLMLVSALSNRDNILAAYEHAVKSRYRFFSYGDAMLIDKLEV

SEQ ID NO: 62830 - protein, 348 aa, Acinetobacter soli
  misc_feature (1)..(348): tr|A0A427M235|A0A427M235_9GAMM S-adenosylmethionine:tRN A ribosyltransferase-isomerase OS=Acinetobacter soli OX =487316 GN=queA PE=3 SV=1
MQLSDFNFDLPDELIARYPLETRSASRLLHLDAQGQYHDHAFTDILELLDEGDLLVLNDTKVMKARLKGKRASGGAVEVLVERMLDNRIAHCHIKSSNSPKAGAELFIGEDQVSVTVQGRHENLYVVEFSQPILSVLDRYGQLPIPPYFNREAEAIDTERYQTVFHNPDKIASVAAPTASLHFDETLLAKLEAKGIQKTFVTLHVGAGTFLPVRTDDIKNHIMHSEWCDVPEHTAELIRQVQARGNKVIAVGTTATRALESAAQANGGKIGAWTGDTQIFIYPGYQFCAVDRLITNFHLPESTLLMLVSALSNRDNILNAYAHAVEAKYRFFSYGDAMLIDRAATQVN

SEQ ID NO: 62831 - protein, 348 aa, Acinetobacter soli
  misc_feature (1)..(348): tr|N9BY69|N9BY69_9GAMM S-adenosylmethionine:tRNA ribosy ltransferase-isomerase OS=Acinetobacter soli NIPH 2899 OX=1217677 GN=queA PE=3 SV=1
MQLSDFNFDLPDELIARYPLETRSASRLLHLDAQGQYHDHAFTDILELLDEGDLLVLNDTKVMKARLKGKRASGGAVEVLVERMLDNRIAHCHIKSSNSPKAGAELFIGEDQVSVTVQGRHENLYVVEFSQPILSVLDRYGQLPIPPYFNREAEAIDTERYQTVFHNPDKIASVAAPTASLHFDETLLAKLEAKGIQKTFVTLHVGAGTFLPVRTDDIKNHIMHSEWCDVPEHTAELIRQVQARGNKVIAVGTTATRALESAAQANGGKIDAWTGDTQIFIYPGYQFCAVDRLITNFHLPESTLLMLVSALSNRDNILNAYAHAVEAQYRFFSYGDAMLIDRAATQVN

SEQ ID NO: 62832 - protein, 345 aa, Acinetobacter sp.
  misc_feature (1)..(345): tr|A0A178FVS5|A0A178FVS5_9GAMM S-adenosylmethionine:tRN A ribosyltransferase-isomerase OS=Acinetobacter sp. SFB OX=1805634 GN=queA PE=3 SV=1
MQLSDFKFDLPDQLIARYPLNTRSASRLLHLDHQGQYHDCHFTDILDLLDAGDLLILNDTKVMKARLKGKRASGGAVEVLVERMQDKFIAHCHIKASNSPKAGAELFMGEDAVKVTVQGRHENLFIVEFSQPILDVLDQYGALPIPPYFNREAEAIDTERYQTVFNDPTKLASVAAPTASLHFDQDLLEKLEAKGIQKAFVTLHVGAGTFLPVRTDDIQNHIMHSEWCDVPQHTVELILQTKARGNKVISVGTTATRAVESAAQAHGGTLNAWTGDTQIFIYPGYDFKVVDRLITNFHLPESTLLMLVSALSNRDNILNAYHHAVEEKYRFFSYGDAMLIDKITS

SEQ ID NO: 62833 - protein, 344 aa, Acinetobacter sp.
  misc_feature (1)..(344): tr|A0A1E3GM48|A0A1E3GM48_9GAMM S-adenosylmethionine:tRN A ribosyltransferase-isomerase OS=Acinetobacter sp. 51m OX=1856846 GN=queA PE=3 SV=1
MQLSDFNFDLPDELIARYPLETRSASRLLHLDAQGQYHDHQFTDILDLLEDGDLLVLNDTKVMKARLKGKRASGGAVEVLVERMQDRFIAYCHIKASNTPKAGAELFIGPDAVKVTVQGRHENLFIVEFSQPILDVLDQYGALPIPPYFNREAEEIDTERYQTVFNDPTKLASVAAPTASLHFDADLLAKLEAKGIQKTFVTLHVGAGTFLPVRTDDIQNHIMHSEWCDVPETAVEMIRQTKARGNKVISVGTTATRAVESAAQAHNGELAAWTGDTQIFIYPGYQFKVVDRLITNFHLPESTLLMLVSALSNRDNILNAYKHAVDSKYRFFSYGDAMLVDQAQ

SEQ ID NO: 62834 - protein, 345 aa, Acinetobacter tandoii
  misc_feature (1)..(345): tr|A0A515BCB1|A0A515BCB1_9GAMM S-adenosylmethionine:tRN A ribosyltransferase-isomerase OS=Acinetobacter tandoii OX=202954 GN=queA PE=3 SV=1
MQLSDFNFDLPDELIARYPLDTRSASRLLHLDAQGQYHDHQFTDILDLLNDGDLLVLNDTKVMKARLKGKRATGGAVEVLVERLQDTHIAHCHIKASNSPKAGAELFIGTEEIKVTVQGRHENLFIVEFSQPILEVLDRCGQLPIPPYFNREAEAIDTERYQTVFNDPTKLASVAAPTASLHFDQTLLEKLEAKGISKAFVTLHVGAGTFLPVRTDDIANHIMHSEWCDVPAATVELIRQTKARGNKVIAVGTTATRAVESAAQAHSGVLDAWVGDTQIFIYPGYDFKVVDRLITNFHLPESTLLMLVSALSNRDNILNAYQHAVAAQYRFFSYGDAMLIDRYTG

SEQ ID NO: 62835 - protein, 345 aa, Acinetobacter tandoii
  misc_feature (1)..(345): tr|R9BAI7|R9BAI7_9GAMM S-adenosylmethionine:tRNA ribosy ltransferase-isomerase OS=Acinetobacter tandoii DSM 149 70 = CIP 107469 OX=1120927 GN=queA PE=3 SV=1
MQLSDFNFDLPDELIARYPLDTRSSSRLLHLDAQGQYHDHQFTDILDLLNDGDLLILNDTKVMKARLKGKRATGGAVEVLVERLQDAHIAHCHIKASNSPKAGAELFIGTEEIKVTVQGRHENLFIVEFSQPILDVLDRCGQLPIPPYFNREAEAIDTERYQTVFNDPSKLASVAAPTASLHFDQALLEKLEAKGIHKAFVTLHVGAGTFLPVRTDDIANHVMHSEWCDVPAHTVELIRETKARGNKVIAVGTTATRAVESAAQAHNSVLDAWVGDTQIFIYPGYDFKVVDRLITNFHLPESTLLMLVSALSNRDNILNAYQHAVATQYRFFSYGDAMLIDRFTG

SEQ ID NO: 62836 - protein, 345 aa, Acinetobacter tjernbergiae
  misc_feature (1)..(345): tr|V2V729|V2V729_9GAMM S-adenosylmethionine:tRNA ribosy ltransferase-isomerase OS=Acinetobacter tjernbergiae DS M 14971 = CIP 107465 OX=1120928 GN=queA PE=3 SV=1
MQLSDFSFDLPDELIARYPLDSRSASRLLHIDAQGQYHDHAFTDILDLLEDGDLLVLNDTKVMKARLKGKRATGGAIEVLVERMLDTHTAHCHIKSSNSPKAGAELYIGADAIPVTVQGRHENLFVVEFSQPILSVLDQYGQLPIPPYFNREAEEIDTERYQTVFHDPEKIASVAAPTASLHFDQNLLEKLAAKGVQKTFVTLHVGAGTFMPVRTTDISNHIMHSEWCDVPQATIDLILATKALGNKVIAVGTTATRALESAAQANQGQIAAWTGDTQIFIYPGYQFCIVDRLITNFHLPESTLLMLVSALSNRDHILAAYQHAVEQRYRFFSYGDAMLVDQLNA

SEQ ID NO: 62837 - protein, 345 aa, Acinetobacter towneri
  misc_feature (1)..(345): tr|N9CLT0|N9CLT0_9GAMM S-adenosylmethionine:tRNA ribosy ltransferase-isomerase OS=Acinetobacter towneri DSM 149 62 = CIP 107472 OX=1120929 GN=queA PE=3 SV=1
MQLSDFNFNLPDELIARYPLASRSASRLLHLDAQGQYHDHQFTDLLNLLEAGDLLVLNDTKVMKARLKGKRATGGAVEVLVERLQDQFIAHCHIKASNSPKAGAELFIGPDAVKVTVQGRHENLFIVEFSQPILDVLDAYGQLPIPPYFNREAEAIDTERYQTVFNDPTKLASVAAPTASLHFDEALLQQLADKGIQKTFVTLHVGAGTFLPVRTDDIANHIMHSEWCEVSEAAVALIRETKARGNKVISVGTTATRAVESAAQAHAGKLAAWSGDTQIFIYPGYQFKVVDRLITNFHLPESTLLMLVSALSSRESVMQAYQHAVAERYRFFSYGDAMLIDQAQT

SEQ ID NO: 62838 - protein, 345 aa, Acinetobacter towneri
  misc_feature (1)..(345): tr|A0A1E8E4P1|A0A1E8E4P1_9GAMM S-adenosylmethionine:tRN A ribosyltransferase-isomerase OS=Acinetobacter towneri OX=202956 GN=queA PE=3 SV=1
MQLSDFNFNLPDELIARYPLASRSASRLLHLDAQGQYHDHQFTDLLNLLEAGDLLILNDTKVMKARLKGKRATGGAVEVLVERLQDQFIAHCHIKASNSPKAGAELFIGPDAVKVTIQGRHENLFIVEFSQPILDVLDAYGQLPIPPYFNREAEAIDTERYQTVFNDPTKLASVAAPTASLHFDEALLQQLEAKGIQKTFVTLHVGAGTFLPVRTEDIANHIMHSEWCEVSEAAVALIRETKARGNKVISVGTTATRAVESAAQAHAGELAAWSGDTQIFIYPGYQFKVVDRLITNFHLPESTLLMLVSALSSRENVMRAYQHAVAERYRFFSYGDAMLIDQAQS

SEQ ID NO: 62839 - protein, 348 aa, Acinetobacter ursingii
  misc_feature (1)..(348): tr|N9DHP8|N9DHP8_9GAMM S-adenosylmethionine:tRNA ribosy ltransferase-isomerase OS=Acinetobacter ursingii ANC 36 49 OX=1257043 GN=queA PE=3 SV=1
MSRIMQLSDFNFDLPDELIARYPLESRSASRLLHLDAQGQYHDRMFTEIVDLLNEGDLLVLNDTKVMKARLKGKRVSGGAVEVLVERMLDQTIAHCHIKASNTPKAGAELFMGEDGVKVVVQGRHENLFVVEFSQPILSVLDRYGQLPIPPYFNREAEAIDTERYQTVFHDPEKIASVAAPTASLHFDETLLEQLAQKGIQKTFVTLHVGAGTFMPVRTDDIKNHIMHSEWCDVPEATVELIRQTKARGNKVIAVGTTATRALESAAQAHQGQIAAWTGDTQIFIYPGYQFCVVDRLITNFHLPESTLLMLVSALSNRDNILKAYAHAVESKYRFFSYGDAMLIDQAQ

SEQ ID NO: 62840 - protein, 348 aa, Acinetobacter ursingii
  misc_feature (1)..(348): tr|N9S6A5|N9S6A5_9GAMM S-adenosylmethionine:tRNA ribosy ltransferase-isomerase OS=Acinetobacter ursingii NIPH 7 06 OX=1217716 GN=queA PE=3 SV=1
MSRIMQLSDFNFDLPDELIARYPLESRSASRLLHLDAQGQYHDRMFTEIVDLLNEGDLLVLNDTKVMKARLKGKRASGGAVEVLVERMLDQTIAHCHIKASNTPKAGAELFMGEDGVRVVVQGRHENLFVVEFSQPILSVLDRYGQLPIPPYFNREAEAIDTERYQTVFHDPEKIASVAAPTASLHFDEDLLKKLEQKGIQKTFVTLHVGAGTFMPVRTDDITNHTMHSEWCDVPDATVKLIRQTKARGNKIIAVGTTATRALESAAQAHQGQIAAWTGDTQIFIYPGYQFCMVDRLITNFHLPESTLLMLVSALSNRDNILKAYAHAVESKYRFFSYGDAMLIDQAQ

SEQ ID NO: 62841 - protein, 344 aa, Acinetobacter variabilis
  misc_feature (1)..(344): tr|N9MNU9|N9MNU9_9GAMM S-adenosylmethionine:tRNA ribosy ltransferase-isomerase OS=Acinetobacter variabilis OX=7 0346 GN=queA PE=3 SV=1
MQLSDFSFDLPDELIARYPLEQRSASLLLHLDAQGQYHDHQFTDILDLLNEGDLLVLNDTKVMKARLKGKRASGGAVELLVERMMDQFIAHCHIKASNTPKAGAELFIGPDEVKVTVQGRHENLFIVEFSQPILDVLDKYGALPIPPYFNREAEEIDTVRYQTVFNDPTKLASVAAPTASLHFDEELLKKLEEKGIQKTFVTLHVGAGTFLPVRTNDIENHIMHSEWCQVSDESMELIKATKARGNKVIAVGTTATRATESAAQANGGELKGWTGDTQIFIYPGYEFKVVDRLITNFHLPESTLLMLVSALSNRENILNAYKHAVESKYRFFSYGDAMLIDQAQ

SEQ ID NO: 62842 - protein, 344 aa, Acinetobacter variabilis
  misc_feature (1)..(344): tr|A0A427M688|A0A427M688_9GAMM S-adenosylmethionine:tRN A ribosyltransferase-isomerase OS=Acinetobacter variabi lis OX=70346 GN=queA PE=3 SV=1
MQLSDFSFDLPDELIARYPLEQRSASRLLHLDAQGQYHDHQFTDILDLLNEGDLLVLNDTKVMKARLKGKRASGGAVEVLVERMMDQFIAHCHIKASNTPKTGAELFIGPDEVKVTVQGRHENLFIVEFSQPILDVLDQYGALPIPPYFNREAEEIDTVRYQTVFNDPTKLASVAAPTASLHFDEELLKKLEEKGIQKTFVTLHVGAGTFLPVRTNDIENHIMHSEWCQVSDESMELIKATKARGNKVIAVGTTATRATESAAQANGGELKGWTGDTQIFIYPGYEFKVVDRLITNFHLPESTLLMLVSALSNRENILNAYKHAVESKYRFFSYGDAMLIDQAQ

SEQ ID NO: 62843 - protein, 345 aa, Acinetobacter venetianus
  misc_feature (1)..(345): tr|N8YP72|N8YP72_ACIVR S-adenosylmethionine:tRNA ribosy ltransferase-isomerase OS=Acinetobacter venetianus (str ain ATCC 31012 / CIP 110063 / RAG-1) OX=1191460 GN=queA PE=3 SV=1
MQLSDFSFDLPDELIARYPLDSRSASRLLHIDANGQFHDHAFTDILDLLKDGDLLVLNDTKVMKARLKGKRATGGAIEVLVERMLDTHTAHCHIKSSNSPKAGAELYIGEDAVPVTVQGRHENLFVVKFSQPILSVLDQYGQLPIPPYFNREAEDIDTERYQTVFHDPEKIASVAAPTASLHFDQDLLEKLAAKGVQKTFVTLHVGAGTFMPVRTTDITNHIMHSEWCDVPQATIDLILETKARGNKVIAVGTTATRALESAAQANQGQIAAWTGDTQIFIYPGYQFCIVDRLITNFHLPESTLLMLVSALSNRDNILAAYKHAVEQRYRFFSYGDAMLVDQAKF

SEQ ID NO: 62844 - protein, 345 aa, Acinetobacter venetianus
  misc_feature (1)..(345): tr|A0A150I0X8|A0A150I0X8_9GAMM S-adenosylmethionine:tRN A ribosyltransferase-isomerase OS=Acinetobacter venetia nus OX=52133 GN=queA PE=3 SV=1
MQLSDFSFDLPDELIARYPLDSRSASRLLHIDADGQYHDHAFTDILDLLEDGDLLVLNDTKVMKARLKGKRATGGAIEVLVERMLDTHTAHCHIKSSNSPKAGAELYIGEDAVPVTVQGRHENLFVVKFSQPILSVLDQYGQLPIPPYFNREAEDIDTERYQTVFHDPEKIASVAAPTASLHFDQDLLEKLAAKGVQKTFVTLHVGAGTFMPVRTTDITNHIMHSEWCDVPQATIDLILETKARGNKVIAVGTTATRALESAAQANQGQIAAWTGDTQIFIYPGYQFCIVDRLITNFHLPESTLLMLVSALSNRDNILAAYKHAVEQRYRFFSYGDAMLVDKLDA

SEQ ID NO: 62845 - protein, 344 aa, Acinetobacter wuhouensis
  misc_feature (1)..(344): tr|A0A3G2T8X1|A0A3G2T8X1_9GAMM S-adenosylmethionine:tRN A ribosyltransferase-isomerase OS=Acinetobacter wuhouen sis OX=1879050 GN=queA PE=3 SV=1
MQLTDFNFELPDELIARYPLETRSASRLLHLNADGTYKDLHFTDILDLFQEGDLMVLNDTKVMKARLKGKRASGGAIEVLVERIFDQTIAHCHIKASNSPKAGAELFIGSDEVKVTVTGRHENLYIVEFSQPILQVLDAYGQLPIPPYFNREAEAVDTERYQTVFNDPTKLASVAAPTASLHFDADLLQKLEQKGVKKTFVTLHVGAGTFLPVRTDNIENHIMHSEWCEVTEEAAQLIAETKARGNKVIAVGTTATRATESAAQACGGKIGAWTGDTQIFIYPGYEFCVVDRLITNFHLPESTLLMLVSALSSRDNILNAYQHAVESKYRFFSYGDAMLIEKAN

SEQ ID NO: 62846 - protein, 344 aa, Acinetobacter wuhouensis
  misc_feature (1)..(344): tr|A0A385C936|A0A385C936_9GAMM S-adenosylmethionine:tRN A ribosyltransferase-isomerase OS=Acinetobacter wuhouen sis OX=1879050 GN=queA PE=3 SV=1
MQLTDFNFELPDELIARYPLETRSASRLLHLNADGTYQDLHFTDILDLFQEGDLMVLNDTKVMKARLKGKRASGGAIEVLVERIFDQTTAHCHIKASNSPKAGAELFIGSDEVKVTVTGRHENLYIVEFSQPILQVLDAYGQLPIPPYFNREAEAVDTERYQTVFNDPTKLASVAAPTASLHFDEDLLKKLEQKGVKKTFVTLHVGAGTFLPVRTDNIENHIMHSEWCEVTEEAAQLIAETKARGNKVIAVGTTATRATESAAQACGGKIGAWTGDTQIFIYPGYEFCVVDRLITNFHLPESTLLMLVSALSSRDNILNAYQHAVESKYRFFSYGDAMLIEKAN

SEQ ID NO: 62847 - protein, 349 aa, Actibacterium atlanticum
  misc_feature (1)..(349): tr|A0A058ZP91|A0A058ZP91_9RHOB S-adenosylmethionine:tRN A ribosyltransferase-isomerase OS=Actibacterium atlanti cum OX=1461693 GN=queA PE=3 SV=1
MKLSDFDFDLPEALIATRPVKPRPSAKMLVAQGTRTEDLHVYDLPDLLCAGDRLILNNTKVIPARLFGRRLRETEQGLVEAKVEITLLEPTAQGGWRALAKPLRKLKAAEEIVFSDDLSARVQALGQGEVTLDFNLSGDDFDAALAQAGAMPLPPYIAAKRPADAQDKDDYQTVFARHSGAVAAPTASLHFDADLLDKLRARGVQFTEVTLHVGAGTFLPVKVDDIATHKMHAEWGEVTAQAAAEMNQTRAAGGRVIPVGTTALRLIESAAQNDGTMLAWQGETDIFITPGYQFKITDALMTNFHLPKSTLLMLVSALMGMDRMRQVYDHAVRNNYRFFSYGDASLLIP

SEQ ID NO: 62848 - protein, 351 aa, Actibacterium mucosum
  misc_feature (1)..(351): tr|A0A037ZDD2|A0A037ZDD2_9RHOB S-adenosylmethionine:tRN A ribosyltransferase-isomerase OS=Actibacterium mucosum KCTC 23349 OX=1454373 GN=queA PE=3 SV=1
MKLSDFDFDLPDSLIATRPVHPRPSARLLFAKGQEPLQDLQVYDLPNLLQPGDRMILNNTKVLPARLFGTRARQTAQGLVTAKVEVTLLEPMDNAGLWRALAKPLRKIKPGEVVEFGAGLRARVEAVADGEAHFRFDLQGDAFEDALGQAGTMPLPPYIAAKRPADAQDNEDYQTVFAREPGAVAAPTASLHFDDALLQSLRDKGVDFTEVTLHVGAGTFLPVKVDDVTTHRMHAERGEVTAAAAAEINQTRARGGRIIAVGTTALRLIETAAAPDGTMHPWQGDTDIFIYPGYDFRVTDGLMTNFHLPKSTLLMLVSALLGADRIRQIYDHAVAREYRFFSYGDASLLLP

SEQ ID NO: 62849 - protein, 338 aa, Actinoallomurus bryophytorum
  misc_feature (1)..(338): tr|A0A543CKD6|A0A543CKD6_9ACTN S-adenosylmethionine:tRN A ribosyltransferase-isomerase OS=Actinoallomurus bryop hytorum OX=1490222 GN=FB559_2937 PE=3 SV=1
MREFTLPSTLEAHEPPARRDAVRLLAGTRDGVTHRPFAGLPELLRPGDLLVVNTSPTLPAAVRLDRIALHFSGPLPPSAPHASGEGAWLVELRLRTGEATVPYDGGRCGEWFPLPGGATLTLLGRQTPRLWRARLDTAVVPYLRRYGVPIRYAYVGRDWPLSAYQTIFGTPGLDGGSAEMPSAGRPFTPELVTRLVTHGVQIAPITLHTGVASPEKDEPPYAERYDVPAPTATLVNHVRWEGGRVIAVGTTVVRALETAVADDGFVRASRGWTSHVVTPEEGVRAVDGLLTGLHEPRSSHLRMLTAVAGEDLLEEVYDEALAREYKWHEFGDVNLLIR

SEQ ID NO: 62850 - protein, 358 aa, Actinobacillus delphinicola
  misc_feature (1)..(358): tr|A0A448TUG4|A0A448TUG4_9PAST S-adenosylmethionine:tRN A ribosyltransferase-isomerase OS=Actinobacillus delphi nicola OX=51161 GN=queA PE=3 SV=1
MRVSDFYFDLPDELIARYPVPDRKSCRLLTLNGTTGELSHGHFSDVLDCIEEGDLVIFNNTRVIPARMFGKKTSGGKIEVLVERILDDKRCLAHVRASKAPKEGTVLILGEDKLGEGNGFEMEMVARHDALFELKLLNTTETLLERLQEAGHIPLPPYIDRPDEDADKELYQTVYSKVPGAVAAPTAGLHFDDELLAQLKAKGVNFAFVTLHVGAGTFQPVRVERIEDHVMHSEYAEVPQDVVDLILETKARGKRVIAVGTTSVRSIESAALRAEENHAQQIIEPFFSDTSIFIYPGKKFRVVDAMITNFHLPESTLIMLVSAFAGFDHTMQAYKEAVENKYRFFSYGDAMFITKNQA

SEQ ID NO: 62851 - protein, 62 aa, Actinobacillus equuli
  misc_feature (1)..(62): tr|A0A448QQ95|A0A448QQ95_ACTEU S-adenosylmethionine:tRN A ribosyltransferase-isomerase OS=Actinobacillus equuli OX=718 GN=queA_3 PE=3 SV=1
MLVSDFHFDLPDELIARYPTAERTASRLLQLTGETGEFADKQFSDLLAQIEEGDLLISITHV

SEQ ID NO: 62852 - protein, 361 aa, Actinobacillus equuli
  misc_feature (1)..(361): tr|A0A0A7MEG6|A0A0A7MEG6_ACTEU S-adenosylmethionine:tRN A ribosyltransferase-isomerase OS=Actinobacillus equuli subsp. equuli OX=202947 GN=queA PE=3 SV=1
MLVSDFHFDLPDELIARYPTAERTASRLLQLTGETGEFADKQFSDLLAQIEEGDLLIFNNTRVIPARLYGRKASGGKLEVLVERVLDEHRCLAHVRASKAPKEGAELVLGEDKLGEGNGFKAIMAARHEALFELHFNEEQPLFDLLQQAGHMPLPPYIDRPDEDADQERYQTVYSKVLGAVAAPTAGLHFDTPTLEKLKAKGVNIAFVTLHVGAGTFQPVRVDNILDHKMHAEYAEVSQEVVDQILATKAAGKRVIAVGTTSVRSIESAAQAAEQEGKLIAPFFSDTSIFLYPGKTFRIVDALVTNFHLPESTLIMLVSAFAGYRNTMKAYQHAVEAKYRFFSYGDAMFISKNPNALNDVP

SEQ ID NO: 62853 - protein, 364 aa, Actinobacillus indolicus
  misc_feature (1)..(364): tr|A0A4P7CHC7|A0A4P7CHC7_9PAST S-adenosylmethionine:tRN A ribosyltransferase-isomerase OS=Actinobacillus indoli cus OX=51049 GN=queA PE=3 SV=1
MRVTDFHFDLPDELIARYPTAERSASRLLYLNGNTGEYQDQQFNDLLEHIHSGDLLIFNNTRVIPARLYGRKASGGKLEVLVERVLDEHRCLAHIRSSKAPKENAEIFLGEDKLGEGNGFKAIMVARHDALFELKFEEAQPLFDLLQQAGHMPLPPYIDRPDEDADQERYQTVYSKVLGAVAAPTAGLHFDHQMLQKLQEKGVQTAFVTLHVGAGTFQPVRVETIEEHKMHAEYAEVSQDVVDKILATKAQGKRVICVGTTSVRSIESAAQAAEKEGKLITPFYSDTAIFLYPGKTFRIVDALVTNFHLPESTLIMLVSAFAGFKNCMNAYQHAVESQYRFFSYGDAMFITKNENALGDVPALS

SEQ ID NO: 62854 - protein, 364 aa, Actinobacillus indolicus
  misc_feature (1)..(364): tr|A0A4V0IA66|A0A4V0IA66_9PAST S-adenosylmethionine:tRN A ribosyltransferase-isomerase OS=Actinobacillus indoli cus OX=51049 GN=queA PE=3 SV=1
MRVTDFHFDLPDELIARYPTAERSASRLLYLNGNTGEYQDQQFNDLLEHIHSGDLLIFNNTRVIPARLYGRKASGGKLEVLVERVLDEHRCLAHIRSSKAPKENAEIFLGEDKLGEGNGFKAIMVARHDALFELKFEEAQPLFDLLQQAGHMPLPPYIDRPDEDADQERYQTVYSKVLGAVAAPTAGLHFDHQMLQKLQEKGVQTAFVTLHVGAGTFQPVRVETIEEHKMHAEYAEVSQDVVDKILATKAQGKRVICVGTTSVRSIESAAQAAEKEGKLIAPFYSDTAIFLYPGKTFRIVDALVTNFHLPESTLIMLVSAFAGFKNCMNAYQHAVENQYRFFSYGDAMFITKNENALGDVPALS

SEQ ID NO: 62855 - protein, 361 aa, Actinobacillus lignieresii
  misc_feature (1)..(361): tr|A0A380TT98|A0A380TT98_ACTLI S-adenosylmethionine:tRN A ribosyltransferase-isomerase OS=Actinobacillus lignie resii OX=720 GN=queA PE=3 SV=1
MLVSDFHFDLPDELIARYPTEERTASRLLHLNGETGHFEDKQFFDLLDQINEGDLLIFNNTRVIPARLYGRKASGGKLEVLVERVLDEHRCLAHVRASKAPKEGAELVLGEDKLGEGNGFKAIMTARHDALFELHFNEEQPLFDLLQQAGHMPLPPYIDRPDEDADQERYQTVYSKVLGAVAAPTAGLHFDKPTLEKLKAKGVNIAFVTLHVGAGTFQPVRVDNILDHKMHAEYAEVSQAVVDQILATKAAGKRVIAVGTTSVRSIESAAQAAEKEGKLIAPFFSDTSIFLYPGKTFRVVDALVTNFHLPESTLIMLVSAFAGYRNTMKAYQHAVEAKYRFFSYGDAMFINKNPNALNDLP

SEQ ID NO: 62856 - protein, 363 aa, Actinobacillus minor
  misc_feature (1)..(363): tr|C5S393|C5S393_9PAST S-adenosylmethionine:tRNA ribosy ltransferase-isomerase OS=Actinobacillus minor NM305 OX =637911 GN=queA PE=3 SV=1
MLVSDFHFDLPDNLIARYPMPDRSASRLLYLNGETGEFADQHFTDLLEHLHEGDLLVFNNTRVIPARLYGRKISGGKVEALIERVLDEHRCLAHVRASKAPKEGTQLIFGEDKLGEGNGLVATMAARHDTLFELHFESQNNLFDLLQSAGHMPLPPYIDRPDEDADQERYQTVYSKVLGAVAAPTAGLHFDNTMLEKLKEKGVNTAFVTLHVGAGTFQPVRVENILDHKMHAEYAEVSQDVVDKILETKAKGKRVIAVGTTSVRSIESAAQAVKNSDTLIEPFFSDTSIFIYPGKTFKVVDALVTNFHLPESTLIMLVSAFAGYKNTMNAYQHAVESQYRFFSYGDAMFIQKNPRATEDLPTS

SEQ ID NO: 62857 - protein, 361 aa, Actinobacillus pleuropneumoniae
  misc_feature (1)..(361): sp|A3N0C7|QUEA_ACTP2 S-adenosylmethionine:tRNA ribosylt ransferase-isomerase OS=Actinobacillus pleuropneumoniae serotype 5b (strain L20) OX=416269 GN=queA PE=3 SV=1
MLVSDFHFDLPDELIARYPTEERTASRLLHLNGETGHFEDKQFFDLLDQINEGDLLIFNNTRVIPARLYGRKASGGKLEILVERVLDEHRCLAHVRASKAPKEGAELVLGEDKLGEGNGFKAIMTARHDALFELHFNEEQPLFDLLQQAGHMPLPPYIDRPDEDADQERYQTVYSKVLGAVAAPTAGLHFDNPTLEKLKAKGVNIAFVTLHVGAGTFQPVRVDNILDHKMHAEYAEVSQAVVDQILATKATGKRVIAVGTTSVRSIESAAQAAEKEGKLITPFFSDTSIFLYPGKTFRIVDALVTNFHLPESTLIMLVSAFAGYRNTMKAYQHAVEAKYRFFSYGDAMFINKNPNALNDLP

SEQ ID NO: 62858 - protein, 361 aa, Actinobacillus pleuropneumoniae
  misc_feature (1)..(361): sp|B3GXL9|QUEA_ACTP7 S-adenosylmethionine:tRNA ribosylt ransferase-isomerase OS=Actinobacillus pleuropneumoniae serotype 7 (strain AP76) OX=537457 GN=queA PE=3 SV=1
MLVSDFHFDLPDELIARYPTEERTASRLLHLNGETGHFEDKQFFDLLDQINEGDLLIFNNTRVIPARLYGRKASGGKLEVLVERVLDEHRCLAHVRASKAPKEGAELVLGEDKLGEGNGFKAIMTARHDALFELHFNEEQPVFDLLQQAGHMPLPPYIDRPDEDADQERYQTVYSKVLGAVAAPTAGLHFDNPTLEKLKAKGVNIAFVTLHVGAGTFQPVRVDNILDHKMHAEYAEVSQAVVDQILATKATGKRVIAVGTTSVRSIESAAQAAEKEGKLIAPFFSDTSIFLYPGKTFRIVDALVTNFHLPESTLIMLVSAFAGYRNTMKAYQHAVEAKYRFFSYGDAMFINKNPNALNDLP

SEQ ID NO: 62859 - protein, 359 aa, Actinobacillus porcinus
  misc_feature (1)..(359): tr|A0A4V0IC95|A0A4V0IC95_9PAST S-adenosylmethionine:tRN A ribosyltransferase-isomerase OS=Actinobacillus porcin us OX=51048 GN=queA PE=3 SV=1
MKVSDFHFDLPDELIARYPKPERTASRLLQLNGENGEIFHRTFSDVLDLIQEGDLLVFNNTRVIPARMFGHKASGGKIEVLVERVLSETTFLAHVRSSKAPKAGAELILGEDKLGEGNGVRVNMLGRQDALFELEIADKSTALLDVLQQIGHMPLPPYIDRPDEDADQERYQTVYNKVPGAVAAPTAGLHFDDELLAKLNAKGVNFAFVTLHVGAGTFQPVRVENIEDHHMHAEYVEVSQEVCDAILATKAAGKRVIAVGTTSVRSIESAALAAEEKGSAQLIEPFFSDTAIFIYPGKKFRVIDCLITNFHLPESTLIMLVSAFAGYAHTMNAYKSAVENRYRFFSYGDSMFITKNTQL

SEQ ID NO: 62860 - protein, 363 aa, Actinobacillus porcitonsillarum
  misc_feature (1)..(363): tr|A0A2U8FKW7|A0A2U8FKW7_9PAST S-adenosylmethionine:tRN A ribosyltransferase-isomerase OS=Actinobacillus porcit onsillarum OX=189834 GN=queA PE=3 SV=1
MLVSDFHFDLPDNLIARYPMPDRTASRLLYLNGETGVFADQHFTDLLDHLHEGDLLVFNNTRVIPARLYGRKISGGKVEALIERVLDKHRCLAHVRASKAPKEGTQLIFGEDKLGEGNGLVATMVARHDTLFELHFESQTNLFDLLQSAGHMPLPPYIDRPDEDADQERYQTVYSKVLGAVAAPTAGLHFDNVMLEKLKEKGVNTAFVTLHVGAGTFQPVRVENILDHKMHAEYAEVSQDVVDKILETKANGKRVIAVGTTSVRSIESAAQAVKNSDALIEPFFSDTSIFIYPGKTFKVVDALVTNFHLPESTLIMLVSAFAGYKNTMNAYQHAVESQYRFFSYGDAMFIQKNPHATEDLPTS

SEQ ID NO: 62861 - protein, 363 aa, Actinobacillus seminis
  misc_feature (1)..(363): tr|A0A263HGT9|A0A263HGT9_9PAST S-adenosylmethionine:tRN A ribosyltransferase-isomerase OS=Actinobacillus semini s OX=722 GN=queA PE=3 SV=1
MHLSNFYFDLPDELIARYPKVERTSSRLLQLNGQNGELFHRTFSDIADLINEGDLLIFNNTRVIPARIFGSKASGGKIEVLIERILTENRFLAHIRASKSPKEGAELILGEDKLGEGKGIKARMVSRHEALFEVEIAEKNTALLEILPQIGHMPLPPYIDRPDEEADKERYQTVYNKVPGAVAAPTAGLHFDQPLLEKLKAKGVSFAFVTLHVGAGTFQPVRVERIEDHKMHAEYVEVPQEAVEAILATKANGKRVIAVGTTSVRSIESAALFAEENQLNTLIAPFFSDTSIFIYPGKKFRVTDALITNFHLPESTLIMLVSAFAGYQHTMNAYKSAVENRYRFFSYGDAMFISKNPNVKELE

SEQ ID NO: 62862 - protein, 380 aa, Actinobacillus succinogenes
  misc_feature (1)..(380): tr|A6VN76|A6VN76_ACTSZ S-adenosylmethionine:tRNA ribosy ltransferase-isomerase OS=Actinobacillus succinogenes ( strain ATCC 55618 / DSM 22257 / 130Z) OX=339671 GN=queA PE=3 SV=1
MCPPFLLSPCGRFHPRLHQIDMLVSDFHFDLPDELIARYPKPERTSSRLLQLNGENGEIFHRTFSDVYGLINEGDLLVFNNTRVIPARMYGRKISGGKVEVLAERILTETSFLAHVRSSKAPKAGAELILGEDKLGEGNGVRMKMLGRQGALFELEISEKPTALLDVLQKIGHMPLPPYIDRPDEEADQERYQTVYNKVPGAVAAPTAGLHFDDELLAKLKAKGVNFAFVTLHVGAGTFQPVRVDKIEDHHMHAEYAEVPQEVVNAVLATKAAGKRVIAVGTTSVRSLESAALAAEEKGSSQLIEPFFSDTSIFIYPGKKFRVVDCLITNFHLPESTLIMLVSAFAGYKNIMQAYKSAVENRYRFFSYGDAMFLTKKISS

SEQ ID NO: 62863 - protein, 361 aa, Actinobacillus suis
  misc_feature (1)..(361): tr|K0GAR6|K0GAR6_ACTSU S-adenosylmethionine:tRNA ribosy ltransferase-isomerase OS=Actinobacillus suis H91-0380 OX=696748 GN=queA PE=3 SV=1
MLVSDFHFDLPDELIARYPTAERTASRLLQLTGETGEFADKQFSDLLTQIEAGDLLIFNNTRVIPARLYGRKASGGKLEVLVERVLDEHRCLAHVRASKAPKEGAELVLGEDKLGEGNGFKAIMAARHEALFELHFNEEQPLFDLLQQAGHMPLPPYIDRPDEDADQERYQTVYSKVLGAVAAPTAGLHFDTPTLEKLKAKGVNIAFVTLHVGAGTFQPVRVDNILDHKMHAEYAEVSQDVVDQILATKAAGKRVIAVGTTSVRSIESAAQAAEQEGKLIAPFFSDTSIFLYPGKTFRIVDALVTNFHLPESTLIMLVSAFAGYRNTMNAYKHAVEAKYRFFSYGDAMFISKNPNALHDVP

SEQ ID NO: 62864 - protein, 361 aa, Actinobacillus ureae
  misc_feature (1)..(361): tr|E8KH49|E8KH49_9PAST S-adenosylmethionine:tRNA ribosy ltransferase-isomerase OS=Actinobacillus ureae ATCC 259 76 OX=887324 GN=queA PE=3 SV=1
MLVSDFHFNLPDELTARYPTSERTASRLLHLNGETGEFADKQFSDLLTHIEEGDLLIFNNTRVIPARLYGRKASGGKLEVLVERVLDEQRCLAHVRASKAPKEGAELVLGEDKLGEGNGFKAIMATRHEALFELHFNEEQPLFDLLQQAGHIPLPPYIDRPDEDADQERYQTVYSKVLGAVAAPTAGLHFDTPTLEKLKAKGVNIAFVTLHVGAGTFQPVRVDNILDHKMHAEYAEVSQDVVDQILATKAAGKRVIAVGTTSVRSIESAAQAAEQEGKLIAPFFSDTSIFLYPGKTFRIVDALVTNFHLPESTLIMLVSAFAGYRNTMNAYKHAVEAKYRFFSYGDAMFISKNPNALNDVP

SEQ ID NO: 62865 - protein, 351 aa, Actinobacteria bacterium
  misc_feature (1)..(351): tr|A0A1F2WFP3|A0A1F2WFP3_9ACTN S-adenosylmethionine:tRN A ribosyltransferase-isomerase OS=Actinobacteria bacter ium RBG_13_55_18 OX=1797197 GN=queA PE=3 SV=1
MQTDLFDYHLPPQLIAQKPLERRRDSLLLAVNCEKRTFEHTLFRDLRLYLQEGDCLVLNSSRVRRARIHGFKEGGGAEIEILLLNKDDNGKWNALARPARRLRPGVRLKFAGGEMEAEVIETHERGEVSIRLSGRAGRSVEAIIEEIGEIPLPPYIKAEPDDPERYQTVFASQLGSAAAPTAGLHFEQEELRALEETGVKPAFLRLDIGLDTFRPIETELLEDHRIHMENYAIDESACNLINSTREEGGRIVAVGTTVVRALESCASGGEAKAFSGDTDLFIYPGFRFQLVDCLLTNFHMPKSSLLALVCAFAGTGLVMEAYQAAVMSGYRFLSLGDACFFNFPNGRDTFK

SEQ ID NO: 62866 - protein, 336 aa, Actinobacteria bacterium
  misc_feature (1)..(336): tr|A0A1F2XCV1|A0A1F2XCV1_9ACTN S-adenosylmethionine:tRN A ribosyltransferase-isomerase OS=Actinobacteria bacter ium RBG_16_68_21 OX=1797204 GN=queA PE=3 SV=1
MKTAEFFYDLPETAIAQAAIEPRDASRLLDTRTMTDHRFSDLPGLLREGDVVVVNHTRVRPARLIGEKDRSGGRVEALLLRPRGDGSWEALVRPARRIRSGTRLRFGDALVVVTDAPTSGRVTLRAEEGDIAAAAEDIGEVPLPPYFRGTLSDPERYQTVYARQPGSAAAPTAGLHFTAGVLEGLAARGIAVVGIDLEIGLDTFRPIGAEDIADHVMHAENATVGTEAAAAIAAARGAGGRVVAIGTTVVRTLETAAAASGEVEAFAGETRLFITPGYRFRAVDLVVTNFHVPGSTLVVLIAAFVGPRWRQIYDTVLARGYRFLSFGDAMLAECAR

SEQ ID NO: 62867 - protein, 333 aa, Unknown
  misc_feature (1)..(333): tr|A0A094PLC4|A0A094PLC4_9ACTN S-adenosylmethionine:tRN A ribosyltransferase-isomerase OS=actinobacterium acAci di OX=1504320 GN=queA PE=3 SV=1
MNLSDIDYELPEKLIAQHPVEPRDSARLLVATHPSQIEHKHVTDLVDFLEAGDVVVVNDTRVLPARLALHRKTGGAAEVLLLEQRSSDFRLWEALVKPASKLKPDEVLEYFGKRVVRVGPRTEAGDTFVVEILDENPMELLQRIGAMPLPPYIRSSLTDLERYQTVYARRMASAAAPTAGLHFTPELMARIVEKGVVVETVELVVGLDTFKPISTDDPLDHLIHSEFYSVEQRVMDACEQAKRVIAIGTTATRALESVAASGQLTGRTSLFITPGFQWKVVDMMLTNFHLPKTSLLLMIESFIGTRWRDIYAEAISEQYRFLSFGDAMLLARS

SEQ ID NO: 62868 - protein, 342 aa, Unknown
  misc_feature (1)..(342): tr|A0A094PIE8|A0A094PIE8_9ACTN S-adenosylmethionine:tRN A ribosyltransferase-isomerase OS=actinobacterium acAci di OX=1504320 GN=queA PE=3 SV=1
MQLSDIDYVLPVDLIAQTPIEPRDSARLLVDQGTRRPLHQHVRDLCSFLNPNDVLVLNHTRVLPARLRARRSTGGAVEILLLNQTSDDSVSWEAMIKPGGKLRNGELLTINDSGMNVEIGDRTIHGDTFAIKLIGPNVLTELLRIGEVPLPPYITQTLQDAERYQTVFSHDQRSAAAPTAGLHFTLELLERIRNMGVRVLEVELVVGLDTFKPISDEDPLKHLIHSEAYSVSQEVLDGCNIARNNGGRVIAVGTTATRALESAATSGLLSGNTTLFITPGYQWKMVDVMMTNFHMPKTTLLLMIESFVGKRWRILYQHAIDEKYRMLSFGDAMLLQRQTDTV

SEQ ID NO: 62869 - protein, 328 aa, Actinocrispum wychmicini
  misc_feature (1)..(328): tr|A0A4R2K7C9|A0A4R2K7C9_9PSEU S-adenosylmethionine:tRN A ribosyltransferase-isomerase OS=Actinocrispum wychmic ini OX=1213861 GN=EV192_1011668 PE=3 SV=1
MITSAIEPPEAHGVARDEVRMLVATPRGVTHARFADLPRFLEPGDLVVVNNSGTLAAAVTGHRDGSELTVHFSTRLDDGSWVVELRPPGPATGPVSDTRAGQKVDLPDGVLVLVEEYVLGRLWRAAVSVDVPAMLARYGRPIKYAYVPGDWPIEDYQTVFARHPGSAEMPSAGRPFSAELVTDLVSAGVSVAPITLHTGVSSIEEGKAPLPERFHVPESTARMVNLTRDAGRRVVAVGTTVTRALESVACNGIVRPGAGWTDLVLGPDRPARVVTGLITGWHEPGASHLLLLRAVAGDRLVADAYRAAAAGGYLWHEFGDSCLLLPGD

SEQ ID NO: 62870 - protein, 340 aa, Actinokineospora auranticolor
  misc_feature (1)..(340): tr|A0A2S6GCI9|A0A2S6GCI9_9PSEU S-adenosylmethionine:tRN A ribosyltransferase-isomerase OS=Actinokineospora aura nticolor OX=155976 GN=CLV40_13542 PE=3 SV=1
MKTLQFRVTGDLEAHEPPEARGLTRSGVRLLVGDGAEVSHRRFEELPDILRPGDVLVVNTSATMPAAVPVVGADLALHFSTESPGGLWLVELRAVAEKATKPYTGGVVGLRLALPGGGAATLVQPYSRGRLWVASIYPGRFGSVLEYLEVFGAPIRYGYVSRPWPLRYYQTVFGTEPGSAEMPSASRPFTDRVVTRLVSAGVQFAPVLLHTGVASPEAHERPYPERFQVADTTARVVNTARAAGGRVVAVGTTAVRALESAADEDGVVRAASGWTDLIVTPERGVLAVDGLLTGFHEPEASHVDMLVAVAGEELLAQCYQEALAERYLWHEFGDVNLLLR

SEQ ID NO: 62871 - protein, 334 aa, Actinokineospora cianjurensis
  misc_feature (1)..(334): tr|A0A421B006|A0A421B006_9PSEU S-adenosylmethionine:tRN A ribosyltransferase-isomerase OS=Actinokineospora cian jurensis OX=585224 GN=CLV68_4890 PE=3 SV=1
MTTDLTLPAGLDAHEPPEARGLTRDGIRLLVSDGGELSHHRFSDLPSVLRAGDVLVVNTSGTLPASVAVVGGSLRVHLSTENADGSWLLELRSGTQPYPFGAAGDRLPLVGGASVLLRGRYSRNRLWEATIDPGRFATVQAYLAAVGEPIRYGYVPHSWPLRYYQTVFGVDPGSAEMPSAGRPFTDRLVTRLVAAGVQFAPVLLHTGVASPEAHERPYPEWFRVSAETARTVNAARADGRRVIAVGTTAVRAVESAVRDGVVQEVSGWTELVVTPERGVAVVDGLLTGFHEAAASHVDMLVAVAGRGVVERCYAAAVGGGYLWHEFGDVNLLMR

SEQ ID NO: 62872 - protein, 334 aa, Actinokineospora terrae
  misc_feature (1)..(334): tr|A0A1H9QHU0|A0A1H9QHU0_9PSEU S-adenosylmethionine:tRN A ribosyltransferase-isomerase OS=Actinokineospora terr ae OX=155974 GN=SAMN04487818_104278 PE=3 SV=1
MTTDLTLPAGLDAHEPPEARGLARDGVRLLVSDGGELSHHRFSDLPSVLRAGDVLVVNTSGTLPASVAVVGGSLRVHLSTENADGTWLLELRSGTQPYPFGAAGDRLPLVGGASVLLRGRYSRNRLWEATIDPGPFATVQAYLAAVGEPIRYGYVPHSWPLRYYQTVFGVDPGSAEMPSAGRPFTDRLVTRLVAAGVQFAPVLLHTGVASPEAHERPYPEWFRVSAETARMVNAAKADGRRVIAVGTTAVRAVESAVRDGVVREACGWTELVVTPERGVAVVDGLLTGFHEASASHVDMLVAVAGRGVVERCYAEAVGGGYLWHEFGDVNLLVR

SEQ ID NO: 62873 - protein, 338 aa, Actinomadura bangladeshensis
  misc_feature (1)..(338): tr|A0A4R4NLR5|A0A4R4NLR5_9ACTN S-adenosylmethionine:tRN A ribosyltransferase-isomerase OS=Actinomadura banglade shensis OX=453573 GN=E1284_28465 PE=3 SV=1
MTVEFTLPASLEAHEPPEARGRSRDGVRLLVSRRATGTVSHHAFGDLPTLLDPGDLLVVNTSATLPAAVRLDRISVHFSTPVPGGDDRLWLVELRRLAGKASRPYRGGSPGEWIPLPGGATLTLVGRRTERLWEARLSTDVIPFLLSHGVPIRYGYVRRDWPAAAYQTAFAYDSSTGSAEMPSAARPFTPGLVTSLVSRGVLIAPITLHTGVASPEAHEPPYAERYRVPPPTAALVEHVRSEGHRVIAVGTTAVRALETAVNASGRVTASSGWTEHIVTPEKGVRAVDGLLTGLHEPKSSHLMMLTAIAGTDLLTATYDAALAERYLWHEFGDLNLIL

SEQ ID NO: 62874 - protein, 342 aa, Actinomadura chibensis
  misc_feature (1)..(342): tr|A0A5D0NYC5|A0A5D0NYC5_9ACTN S-adenosylmethionine:tRN A ribosyltransferase-isomerase OS=Actinomadura chibensi s OX=392828 GN=FXF69_08460 PE=3 SV=1
MTVEFTLPPALEAHEPPEARGRSRDGVRLLVSRRATGEVSHHGFRDLPALLDPGDLLVVNTSATLPAAVRLDRIGVHFSTPVPPAEDDDRLWLVELRRLTGKASKPYSGGCPGEWIPLPGGATLTLVGRRTRRLWEARLSTDVVPYLRRYGVPIRYGYVRRDWPTAAYQTAFAYDRSSGGAEMPSAARPFTPELVTRLVSGGVHIAPITLHTGVASPEAGEPPYAERYEVPEPTAALVGHVRKRGGRVIAVGTTAVRALETSVDGSGNVRAAKGWTEHVVTAEGGVRAVDGLLTGLHEPRSSHLLMLTAIAGQDLLAATYAAALSEGYLWHEFGDANLIVAR

SEQ ID NO: 62875 - protein, 345 aa, Actinomadura darangshiensis
  misc_feature (1)..(345): tr|A0A4R5AJK4|A0A4R5AJK4_9ACTN S-adenosylmethionine:tRN A ribosyltransferase-isomerase OS=Actinomadura darangsh iensis OX=705336 GN=E1293_32305 PE=3 SV=1
MTVEFTLPAALEAHEPPEERGSGTGARTRDGVRLLVSRRATGEVSHHGFRDLPSLLDPGDLLVVNTSATLPAAVRLDRISVHFSTPVPGADDRLWMVELRRRTGKASRPYSGGCPGEWIPLPGGATLTLVGRGTDRLWQARLSTDVVPYLRRHGVPIRYGYVRRDWPAAAYQTVFAHDRSTGSAEMPSAARPFTAELVTRLVSGGVLLAPITLHTGVASPEAHEPPYAERYAVPEPTAALVEHVRSQGRRVIAVGTTAVRALETSVDASGHVQASSGWTEHIVTPSKGVRAVDGLLTGLHEPKSSHLMMLTAIAGHDLLTATYEAALAEGYLWHEFGDLNLLMNR

SEQ ID NO: 62876 - protein, 335 aa, Actinomadura echinospora
  misc_feature (1)..(335): tr|A0A1H6CEG4|A0A1H6CEG4_9ACTN S-adenosylmethionine:tRN A ribosyltransferase-isomerase OS=Actinomadura echinosp ora OX=1992 GN=SAMN04489712_109257 PE=3 SV=1
MIDFALPPALEAHEPPEAHGRTRDGVRLLVARGDGIGHHAFTELPDLLNPGDLLVVNTSATLPAAVRLDKLAVHFSTPYAEDSDLWLVELRRRVGKTSRPYRGGSPGEWIPMPGGATLALVRRQTERLWQARLSTDVVPYLRRYGVPIRYGYVRRDWPATAYQTAFALDRREGSAEMPSAGRPFTPELVTRLVSRGVLMSPLSLHTGVASPEAHEPPYAERYDVPAVTADLVGHVRARGGRVIAVGTTVVRALETAAEPSGGVRPSRGWTRHVVTPETGVRVVDGLLTGLHEPKSSHLRMLTAIAGPRLLERAYEAALAESYLWHEFGDLNLLLP

SEQ ID NO: 62877 - protein, 350 aa, Actinomadura hallensis
  misc_feature (1)..(350): tr|A0A543ING2|A0A543ING2_9ACTN S-adenosylmethionine:tRN A ribosyltransferase-isomerase OS=Actinomadura hallensi s OX=337895 GN=FHX41_5875 PE=3 SV=1
MTVEFTLPPALEAHEPPEARGRTRDGVRLLVSRRATGEISHHAFRDLPSLLDPGDVLVVNTSSTLPAAVRLDRISVHFSTPVPGGDDKLWTVELRRLTGKTSSPYSGGRSGEWIPMPGGVTLTLVERHASGEPGHRRVSDRLWRARLSTDVVPYLRRHGTPIRYGYVRRDWPAAAYQTVFAHDRAAGSAEMPSAARPFTPELVTRLVSRGVHIAPITLHTGVASPEAHEPPYAERYEVPGPTAALVEHVRSRGGRVIAVGTTSVRALETSVDGSGRVRASAGWTDHVVTPERGVQAVDGLLTGLHEPRSSHLMMLTALAGPDLLAATYEAALAERYLWHEFGDVNLLLPG

SEQ ID NO: 62878 - protein, 346 aa, Actinomadura madurae
  misc_feature (1)..(346): tr|A0A1I5V6C7|A0A1I5V6C7_9ACTN S-adenosylmethionine:tRN A ribosyltransferase-isomerase OS=Actinomadura madurae OX=1993 GN=SAMN04489713_1219 PE=3 SV=1
MTVEFTLPPALEAHEPPEARGRTRDGVRLLVGRRATGEVAHHEFRDLPALLDPGDLLVVNTSATLPAAVRLDRISVHFSTPVPGADDRLWIVELRRLAGKSSRPYSGGCPGEWIPMPGGATLTLVGRHAAGSRESDRLWQARLSTDVVPYLRRYGTPIRYGYVRRDWPVSAYQTAFAHDRSTGSAEMPSAARPFTPELVTRLVSRGVLFAPLTLHTGVASPEAHEPPYAERYEVPESTAALVEHVRSRGRRVIAVGTTAVRALETSADAFGRVQPSSGWTEHVVTPESGVRAVDGLLTGLHEPRSSHLMMLTAIAGRELLAATYESALAEGYLWHEFGDLNLIVAG

SEQ ID NO: 62879 - protein, 347 aa, Actinomadura mexicana
  misc_feature (1)..(347): tr|A0A238VTX6|A0A238VTX6_9ACTN S-adenosylmethionine:tRN A ribosyltransferase-isomerase OS=Actinomadura mexicana OX=134959 GN=SAMN06265355_102370 PE=3 SV=1
MTVDFTLPAALEAHEPPEARGRTRDGVRLLVSRRAAGEVSHHAFRDLPGLLDPGDLLVVNTSATLPAAVRLDRISVHFSTPVPGADDRLWLVELRRLAGKTSRPYAGGSPGEWIPMPGGATLTLVGRHGHRARGESDRLWQARLSTDVGPYLRRHGTPIRYGYVHRDWPASAYQTVFAHDRSSGGAEMPSAARPFTPELVTRLVSRGVLIAPITLHTGVASPEAHEPPYAERYTVPEPTAALVGHVRAQGRRVIAVGTTAVRALETAVDAAGGVRASSGWTEHVVTPEGGVRAVDGLLTGLHEPRSSHLMMLTAIAGRDLLTATYEAALAERYLWHEFGDLNLILPG

SEQ ID NO: 62880 - protein, 345 aa, Actinomadura meyerae
  misc_feature (1)..(345): tr|A0A239NIV6|A0A239NIV6_9ACTN S-adenosylmethionine:tRN A ribosyltransferase-isomerase OS=Actinomadura meyerae OX=240840 GN=SAMN05443665_104218 PE=3 SV=1
MTVDFTLPPALEAHEPPEARGRTRDGVRLLVSRRATGAVSHHAFRDLPALLDPGDLLVVNTSATLPAAVRLDRISVHFSTPLPGDSTPLPDDDDRLWLVELRRLAGKGSLPYAGGCPGEWIPLPGGATLTLVERHTPRLWRARLSTDVVPYLRRHGTPIRYGYVRGDWPTAAYQTAFAHDRSTGSAEMPSAGRPFTPELVTELVSRGVLVAPITLHTGVASPEAHEPPYAERYRVPEPTAALVEHVRARGRRVIAVGTTAVRALETAVDGSGRVRPSSGWTEHVVTPEGGVRAVDGLLTGLHEPESSHLMMLTALAGRDLLAATYAAALAERYLWHEFGDLNLIL

SEQ ID NO: 62881 - protein, 335 aa, Actinomadura parvosata
  misc_feature (1)..(335): tr|A0A2P9IHP6|A0A2P9IHP6_9ACTN S-adenosylmethionine:tRN A ribosyltransferase-isomerase OS=Actinomadura parvosat a subsp. kistnae OX=1955414 GN=KIS93_07007 PE=3 SV=1
MTAALDFSLPPGLSAAEPPEAKGMRRDGVRLMLSRGAAEPSHHHFSDLPELLEPGDLIVVNNSATLPAAVRLDRLAVHFSTVRPDGTWLVELRRRTANGSEPYGGGEPGEWLPMPGRATLRLVGRETPRLWRAVLDRDVEAYLRVHGVPIRYSYVERDWPIEAYQTVFATVPGSAEMPSAARPFTVELVTALVARGVGIAPITLHTGVASTEKDEPPYAERYEVPASTARLVNLTRENGGRVVAAGTTVVRALETAAGADGRVTAAAGWTEHVVTPESGVRAVTGLITGLHEPRSSHLLMLTAIAGEAALARAYEEALRKGYLWHEFGDTHLILK

SEQ ID NO: 62882 - protein, 354 aa, Actinomadura pelletieri
  misc_feature (1)..(354): tr|A0A495QY82|A0A495QY82_9ACTN S-adenosylmethionine:tRN A ribosyltransferase-isomerase OS=Actinomadura pelletie ri DSM 43383 OX=1120940 GN=BZB76_0593 PE=3 SV=1
MTVDFTLPTALEAHEPPEARGRTRDGVRLLVSRRATGEIAHHEFRELPDLLDPGDLLVVNTSATLPAAVRLDRISVHFSTPVPGADDRLWIVELRRNTGKTSKPYTGGCAGEWIPLPGGATLTLVGRHGGGPGECGRSSPHGGSERLWEARLSTDVVPYLRRHGAPIRYGYVRRDWPTTAYQTVFARDRSTGSAEMPSAGRPFTPELVTRLVSRGVLMAPITLHTGVASPEAHEPPYAERYEVPEATAALVEHVRSRGGRVIAVGTTAVRALETAVDASGHVRPSTGWTEHVVTPDHGVRAVNGLLTGLHEPKSSHLMMLTAIAGPDLLTATYDAALAEGYLWHEFGDINLVLG

SEQ ID NO: 62883 - protein, 351 aa, Actinomadura sp.
  misc_feature (1)..(351): tr|A0A4R4M144|A0A4R4M144_9ACTN S-adenosylmethionine:tRN A ribosyltransferase-isomerase OS=Actinomadura sp. 7K53 4 OX=2530366 GN=E1266_30790 PE=3 SV=1
MTVEFALPAALEAHEPPEARGRARDGVRLLVSRRATGEVSHHGFRDLPSLLEPGDLLVVNTSATLPAAVRLDRISVHFSTPVPGGDDRLWIVELRRRAGKADRPYSGGRCGEWIPMPGGATLTLVRRHASGRDGPSPRESDRLWEARLSTDVVPYLRGHGTPIRYGYVRQDWPVAAYQTAFAHDRAAGGAEMPSAGRPFTPELVTRLVSGGVLIAPITLHTGVASPEAHEPPYAERYEVPEATAALVGHVRSRGGRVIAVGTTAVRALETSVDASGRVRASAGWTEHVVTPERGVRAVDGLLTGLHEPKSSHLMMLTAIAGPGLLAATYESALAERYLWHEFGDANLILPG

SEQ ID NO: 62884 - protein, 339 aa, Actinomadura sp.
  misc_feature (1)..(339): tr|A0A4R4X884|A0A4R4X884_9ACTN S-adenosylmethionine:tRN A ribosyltransferase-isomerase OS=Actinomadura sp. KC06 OX=2530369 GN=E1287_36165 PE=3 SV=1
MTVEFTLPSALEAHEPPEARGRARDGVRLLVSRRATGEVSHHEFRDLPALLTPGDLLVVNTSATLPAAVRLDRISVHFSTPVPGADERLWITELRRLTGKSSHPYTGGCPGEWIPLPGGATLTLVGRHTDRLWQARLSTDVVPYLRRHGVPIRYGYVRRDWPTASYQTVFANDRSTGSAEMPSAGRPFTPELVTRLVSRGVLIAPITLHTGVASPEAHEPPYAERYEVPEPTAALVEHVRSRGGRVIAVGTTAVRALETSVDASGRVQPSEGWTEHIVTPERGVQAVDGLITGLHEPKSSHLMMLTAIAGSELLTATYEAALAERYLWHEFGDTNLILP

SEQ ID NO: 62885 - protein, 341 aa, Actinomadura syzygii
  misc_feature (1)..(341): tr|A0A5D0UAZ3|A0A5D0UAZ3_9ACTN S-adenosylmethionine:tRN A ribosyltransferase-isomerase OS=Actinomadura syzygii OX=1427538 GN=FXF65_14045 PE=3 SV=1
MTVEFTLPPALEAHEPPESRGRSRDGVRLLVSRRATGEVSHYGFRDLPALLDPGDLLVVNTSATLPAAVRLDRIGVHFSTPVPSADDDRLWLVELRRLTGKASAPYSGGSPGEWIPLPGGATLTLVGRRTRRLWEARLSTEVVPYLRRHGVPIRYGYVRRDWPTAAYQTAFAYDRSSGGAEMPSAARPFTPELVTRLVSGGVHIAPITLHTGVASPEAGEPPYAERYEVPEATAALVGHVRKRGGRVIAVGTTAVRALETSVDGSGNVRAAKGWTEHVVTPKSGVRAVDGLLTGLHEPKSSHLLMLTAIAGQDLLAATYAAALSEGYLWHEFGDVNLIVAR

SEQ ID NO: 62886 - protein, 338 aa, Actinomadura umbrina
  misc_feature (1)..(338): tr|A0A3D9SNK0|A0A3D9SNK0_9ACTN S-adenosylmethionine:tRN A ribosyltransferase-isomerase OS=Actinomadura umbrina OX=111806 GN=DFJ69_3005 PE=3 SV=1
MIDFVLPSALEAHEPPEARGRARDGVRLLVSRDDGVSHHAFTDLPELLSPGDLLVVNTSATLPAAVRLDRLWVHFSTPYAEGDDTWLVELRRRVGKAGRPYGGGNPGEWIPMPGGVTLTLVRRRTERLWQARLSTDVLPYLRRHGMPIRYGYVQRDWPTGAYQTAFALDGREGSAEMPSAGRPFTPELVTRLVSRGVLMSPLTLHTGVASPEAHEPPYPERYEVPEVTAALVGHVRSQGGRVIAVGTTVVRALETAVAASGEVVASQGWTEHVVTPEKGVRAVDGLLTGLHEPRSSHLQMLTAIAGARLLEESYEAALAEGYLWHEFGDLNLLLPRPR

SEQ ID NO: 62887 - protein, 340 aa, Actinomadura viridilutea
  misc_feature (1)..(340): tr|A0A2P6UGK3|A0A2P6UGK3_9ACTN S-adenosylmethionine:tRN A ribosyltransferase-isomerase OS=Actinomadura viridilu tea OX=58112 GN=CLV66_105225 PE=3 SV=1
MTTPPGVALPAAPAAREPPEERGLARDAVRLLVGRRSTGEIAHHRFRDLPGLLDPGDLLVVNTSATLPAAVRLDRLAVHFSTPLPGDDGLWLVELRRRTATASVPYGGGSPGEWIPMPGGATLVLVRRHTERLWAARLDRTVVPYLHRHGVPIRYGYVRRDWPIAAYQTVFARDRDSGGAEMPSATRPFTTDLVTALVSRGILLAPLTLHTGLSSPEAHEPPSAERYEVPEPTAALIEHVRAHGGRVIAVGTTVVRALETAVDADGQVRPSHGWTEHVVTPDSGVRAVDGLLTGLHDPRSSHMTVLTAIAGPGLVAASYRAAVDHGYLGHEFGDAHLVLP

SEQ ID NO: 62888 - protein, 254 aa, Actinomyces sp.
  misc_feature (1)..(254): tr|A0A3M2GHQ6|A0A3M2GHQ6_ACTSX S-adenosylmethionine:tRN A ribosyltransferase-isomerase (Fragment) OS=Actinomyce s sp. OX=29317 GN=D6683_09375 PE=3 SV=1
LVRPSRRIAPGTVVTCGPLRVEVGEDLGEGRRLVRPDPGGRDLAAVLDEVGEMPLPPYLHARLDDPERYQTVFARRPASAAAPTAGLHLTHEILEALRRRGARLARVELVVGLDTFRPVTAARLDEHRIHTEAYTVPDATLEAVAGARRVVAVGTTVVRALETWARTGRPRGRSDLFIRRPFDWRVVDVLMTNFHLPRSTLLCLVDAFVGPRWRDLYRLALDEGYRFLSFGDACWLTRAGDPAPGGGTDGGTDR

SEQ ID NO: 62889 - protein, 348 aa, Actinomycetospora cinnamomea
  misc_feature (1)..(348): tr|A0A2U1FFS7|A0A2U1FFS7_9PSEU S-adenosylmethionine:tRN A ribosyltransferase-isomerase OS=Actinomycetospora cin namomea OX=663609 GN=C8D89_104279 PE=3 SV=1
MSVVPATRFVLPAGAEAHEPPEHRGLARDEVRLLVARPGGVAHRRFLDLADVLEPGDLLVVNTSATLAAALDARHADGRAMTVHVATALDDGTWVVEPRRPDGPERDVAAGDRLELPGVALTLVAPYPDEDAPRRLWRARPWPPVGLVGYLARYGRPIAYGHLGGRFPLADHQTVYATLPGSAEMPSAGRPLSERLLVRLVARGVTVAPLVLHAGVSSPEKHEPPTPERFSVPSATARLVNSARDAGARVVAVGTTVVRALETVATPDGTVSPGHGWTDLVLGTHRPARTVTGLVSGLHEPEASHLALLEAVAGPELVGRTYEAAVREGYLWHEFGDSTLLLPTEVSR

SEQ ID NO: 62890 - protein, 343 aa, Actinomycetospora succinea
  misc_feature (1)..(343): tr|A0A4R6VI96|A0A4R6VI96_9PSEU S-adenosylmethionine:tRN A ribosyltransferase-isomerase OS=Actinomycetospora suc cinea OX=663603 GN=EV188_103717 PE=3 SV=1
MTVVPMTSFLLPPGAEAHEPPEHRGLARDGVRLLVARPGLVEHRRFDELADVLDPGDLLVVNTSATLPAALDVRHHDGRAMTLHVATALDDGDWVVEPRRPDGPETDVAPGDRLGPPGLVLTLVAPYPDEDAPRRLWRARPWPPVGLAGYLATYGRPIAYGHLAGRFPLSDHHTVYAAVPGSAEMPSAGRPLSERLLVRLMARGVTVAPLVLHAGVSSPEKHEPPSPEPFAVPAVTARLVNSAREAGSRVVAVGTTVVRALETVAAPDGTVSPGHGWTDLVLGAHRPARTITGLVSGLHEPEASHLALLEAVAGPALVGETYEAAVAARYLWHEFGDSTLLLP

SEQ ID NO: 62891 - protein, 326 aa, Actinophytocola oryzae
  misc_feature (1)..(326): tr|A0A4V3FU66|A0A4V3FU66_9PSEU S-adenosylmethionine:tRN A ribosyltransferase-isomerase OS=Actinophytocola oryza e OX=502181 GN=CLV71_104560 PE=3 SV=1
MTVEFTLPAALEAHVPPEARGLGRDGVRLLVSSSEGVEHHRFTDLPSQLRAGDVLVVNTSATVPAAVPVPDSGLVAHISTEQPDGRWLVELRQATGPFRDGTAGTRYPLFGGGSVTLRRPFSAGRLWESDVDTDGLGVLAYLAAFGSPIRYSYVGDAWPISCYQTVFGVTPGSAEMPSASRPFTERLVTRLVARGVQFAPVLLHTGVASPEAHERPYPERFAVPRTSRDVVARARAEGRRVIAVGTTAVRAIESDADGGWTDVIITPERGVRHVDGLLTGFHEPMASHLDMLAAIAGPGLLNETYRQAIEGGYLWHEFGDVNLLLP

SEQ ID NO: 62892 - protein, 336 aa, Actinoplanes atraurantiacus
  misc_feature (1)..(336): tr|A0A285KFI8|A0A285KFI8_9ACTN S-adenosylmethionine:tRN A ribosyltransferase-isomerase OS=Actinoplanes atrauran tiacus OX=1036182 GN=SAMN05421748_13736 PE=3 SV=1
MTTATLDFELPADLEAREPAEARGRRREDVRLLVSRGAAVSHHRFPELPRILEAGDLLVVNNSATVPAAIDTEDGLVVHVSTEHADGSWLVELRRSAGGSTAPFAPGTGPARAGLRLPVPEGAVTLLHPYTSRLWTAKADVPGTRVDYLARHGRPIRYDYTDRDWPLATYQNAYATEPGSAEMPSAGRPLTGAVLAELAGRGILVAPITLHTGVASAEVDEPPYPEWYAVPRPTTRLIEHVRAGGGRVIAVGTTVVRALETAWDGPASGWTDLVIGPERPVRSVDGLLTGLHEPRASHLRMLSAVTGPAALRAAYDEALRGRYRWHEFGDVHLLLP

SEQ ID NO: 62893 - protein, 317 aa, Actinoplanes brasiliensis
  misc_feature (1)..(317): tr|A0A4R6J7G0|A0A4R6J7G0_9ACTN S-adenosylmethionine:tRN A ribosyltransferase-isomerase OS=Actinoplanes brasilie nsis OX=52695 GN=C8E87_6873 PE=3 SV=1
MTTFTVPPVLEARAPAEARGVARDGVRLMVSRGTAVSHHRFTDLPGLLDPGDLLVVNNSATLPAAIETIDGVRVHVSTEQPDGTWLVEPRDFDAARPGLRLRVPSGSLTLLRPFTSRLWVAAADVPGGRVEYLTRHGRPIRYSYTDRDWPISTYQNAYATVPGSAEMPSAGRPLTGAVLSALAGRGVLVAPLTLHTGVASAEVDEPPYPEWFRVPSSTASLIGHVRRSGGRVIAVGTTVVRALETGTPEGWTDVVIGPDHPIRYVDGLLTGLHEPRASHLKMLTAVAGEEALRASYESALRERYLWHEFGDVHLLLR

SEQ ID NO: 62894 - protein, 331 aa, Actinoplanes friuliensis
  misc_feature (1)..(331): tr|U5VXE5|U5VXE5_9ACTN S-adenosylmethionine:tRNA ribosy ltransferase-isomerase OS=Actinoplanes friuliensis DSM 7358 OX=1246995 GN=AFR_16775 PE=3 SV=1
MIDFALPPALEADRPPPARDGVRMLVGERSSGRVTHHRFTDLPDLLRPGDVLVVNTSATLPAAVPVTDSPLTVHFSTECDDGSWLVELRRNRGKATEPFPEGSSGRRYPLPGGGAVVLGEPWSAGRLWRAEVVTGGARSVQAFLYAHGRPIRYGYVRRRWPLAAYQTVFGVSPGSAEMPSAGRPFTDVLVTRLVTAGVLFAPVLLHTGVASPEAHERPYPERFVVPPASRRLVARARADGGRIIAVGTTAVRALETAWDGPAQGWTELVITPDRGLRAVDGLLTGFHEPRASHLDMLAAVAGTPLLERCYAEALDARYLWHEFGDVNLLLP

SEQ ID NO: 62895 - protein, 376 aa, Actinopolymorpha cephalotaxi
  misc_feature (1)..(376): tr|A0A1I2R0I1|A0A1I2R0I1_9ACTN S-adenosylmethionine:tRN A ribosyltransferase-isomerase OS=Actinopolymorpha ceph alotaxi OX=504797 GN=SAMN05421678_10588 PE=3 SV=1
MSSSTKTGVQATRTAPTILPAPRVDFVLPPELEAHEPPEARGLSRDGVRLLLGRGDGSGDGPANEVAHHSFVDLPRLLEPGDVVVVNRSGTRPAAVDLPPGPDGTGTGERRSVHFSTLAADGSWLVELRRGDGPDPGGRPGQRVDLPGDRQGGAALVLRERHRSGRLWHAVPILPSGVPDVPAYLARHGRPIRYGYVGREWPLHAYQTAFATTPGSAEMPSAGRPFTPEVVTELVARGILVVPITLHTGVASAEFHEPPYAEWFEVPAATAAVVNDANRRGARVVAVGTTVVRALESAAHGPWVRGASGWTELVITAERGVAVVSGLLTGFHEPQASHLLMLEAIAGPDLVRQCYSAAVDGGYLWHEFGDVNLLLP

SEQ ID NO: 62896 - protein, 384 aa, Actinopolymorpha singaporensis
  misc_feature (1)..(384): tr|A0A1H1XJ38|A0A1H1XJ38_9ACTN S-adenosylmethionine:tRN A ribosyltransferase-isomerase OS=Actinopolymorpha sing aporensis OX=117157 GN=SAMN04489717_4987 PE=3 SV=1
MSAGTTTAVQAAGTAPNVLPAPRVDFVLPPELEAHEPPEARGLTRDGVRLLLGRGDGSGDGPANEVAHHRFVDLPHLLEPGDVVVVNRSGTRPAAVDLPTHPEDTDSTDSTDSTGTTGEGERRSVHFSTLAADGSWLVELRRGDGPDPGGRPGRRIDLPGGASLVLRERHRSGRLWHAVPIVPPAVPDVPAYLARYGRPIRYGYVGRDWPLHAYQTAFATTPGSAEMPSAGRPFTPEVVTELVARGILVVPITLHTGVASAEFHEPPYAEWFEVPAATAAVVNDANERGARVVAVGTTVVRALESAAHGSWVRAASGWTELVVTAERGVAVVSGLLTGFHEPQASHLLMLEAIAGPELVRRCYAAAVEEGYLWHEFGDVNLLLP

SEQ ID NO: 62897 - protein, 346 aa, Acutalibacter muris
  misc_feature (1)..(346): tr|A0A1Z2XRC0|A0A1Z2XRC0_9FIRM S-adenosylmethionine:tRN A ribosyltransferase-isomerase OS=Acutalibacter muris O X=1796620 GN=queA PE=3 SV=1
METTPIKTSDFFFDLPQELIAQTPIEPRDASRLMILDKRTGEVEHRHFYEIAELLGPKDCLILNDSRVLPARIYGVKEGTGAHVEFLLLENKGNDTWEVLCKPGKRAKEGSRFIFGDGLFTGEVVRVKEDGGRLVRFTYEGVFFTLLDKIGQMPLPPYIKERLENKERYQTVYSKEVGSAAAPTAGLHFTPELLQRLRNKGIELGYVTLHVGLGTFRPVSAEFITGHKMHAEHYYMPAAAAELINRTKQRGGRVIAVGTTSCRTIESVAQREGCFKESSGWTDIFIYPGYEFRGVDALITNFHLPESTLIMLVSALAGREKVLRAYKEAVEERYRFFSFGDAMYIG

SEQ ID NO: 62898 - protein, 344 aa, Acutalibacter sp.
  misc_feature (1)..(344): tr|A0A3A9ENA9|A0A3A9ENA9_9FIRM S-adenosylmethionine:tRN A ribosyltransferase-isomerase OS=Acutalibacter sp. 1XD 8-33 OX=2320081 GN=queA PE=3 SV=1
MKTSDFYYDLPQELIAQTPIEPRDASRLMVLDKSSGRISHRRFTDIVDLLRPEDCLILNDSRVMPARIYGVKEGTGAHVEFLLLENKGGDTWEALCKPGKRAREGARFDFGEGLMKGEIIGVKEDGNRLVRFQYEGVFFSLLDRIGQMPLPPYIKAKLEDKERYQTIYSRETGSAAAPTAGLHFTPQLLDRLREKGIETGFVTLHVGLGTFRPVSAERIADHKMHAEHYYMPTETAELINRTRARGGRVIAVGTTSCRTIESAPCPGGKFRECAGWTDIFIYPGYTFQGVDGLITNFHLPESTLIMLVSALAGRENVLRAYQEAVKERYRFFSFGDAMFIGDLK

SEQ ID NO: 62899 - protein, 409 aa, Adhaeribacter aerolatus
  misc_feature (1)..(409): tr|A0A512AUS6|A0A512AUS6_9BACT S-adenosylmethionine:tRN A ribosyltransferase-isomerase OS=Adhaeribacter aerolat us OX=670289 GN=queA_1 PE=3 SV=1
MATDPKALKIKDFIYPLPEDRIAKFPLADRAASKLLFYQKGNIQDKSFTALPDLLPPDALLVFNNTKVVQARLFFKRPSGATIEIFCLEPVAPVTDMQLAMQQTGACTWKCLVGNAKRWKEESLELEITLPEQSTGRLKVTKCEKLEDSYFIHFTWEPVGLTFADILATAGNLPLPPYLNRLATEQDKQTYQTVYARQEGAVAAPTAGLHFTQEIFEALAARQIKTLQVTLHVGAGTFKPVKAEEMAQHNMHGEEIFVSAAAINQIRNHLPRPVIPVGTTSLRTLESLYWLGVMLIQEPELSLPDLCVPQWLPYETLNIPEPAEALSALTDYLQKNQLEYLSANTQIIIAPGYSFKLVRGLVTNFHQPESTLLLLVSALIGEDWRRIYDHGLANNYRFLSYGDSSLLLP

SEQ ID NO: 62900 - protein, 348 aa, Adhaeribacter aerolatus
  misc_feature (1)..(348): tr|A0A512B0W9|A0A512B0W9_9BACT S-adenosylmethionine:tRN A ribosyltransferase-isomerase OS=Adhaeribacter aerolat us OX=670289 GN=queA_2 PE=3 SV=1
MKLSEFRFDLPANLMATHPPKIRDEARMMVVHRSTGKIEHKVFKDILEYFDDGDVMVINDTKVFPARLYGNKEKTGAKIEVFLLRELNKENHLWDVLVDPARKIRVGNKLYFGDSDLVAEVIDNTTSRGRTIKFLYDGSDEDFYKTINDLGETPLPKYLKRAAEPEDRDRYQTVYAKHVGAVAAPTAGLHFTREVLKRLELNGVDVVPVTLHVGLGTFRPVDVEDLTKHKMDSEHFIIPEETAQVVNRALENKKRVCAVGTTTMRGMESSVSANARLKPTEGWTDKFIFPPHDFKIPNSLITNFHMPESTLLMMTCAFGGYDLIMDAYKVAVKEKYNFFSYGDVMLIL

SEQ ID NO: 62901 - protein, 403 aa, Adhaeribacter sp.
  misc_feature (1)..(403): tr|A0A2T2YAL8|A0A2T2YAL8_9BACT S-adenosylmethionine:tRN A ribosyltransferase-isomerase OS=Adhaeribacter sp. HMF 7605 OX=2072846 GN=queA PE=3 SV=1
MTDNPKNLTIQDFRYHLPDAAIAQYPLVNRDESKLLVYHQGALSDHIFWEIPDLLPSHSLLVFNDTKVVQARLLFTKPTGGTIEIFCLEPVFPHTEMQQAMLQTGFCTWQCLVGNAKRWKSGTLQLRLPEVTLQAELQERVADAYLIKFSWQPQNLTFAEILEKVGKIPLPPYVNRTAEETDKNRYQTIYAVSAGAVAAPTAGLHFTEEVLSALTQRQIAQVKVTLHVGAGTFKPVKASAMADHQMHAEEIYVSADSIHQIQTHLAAPVIPVGTTSLRTLESLYWLGVLVAQNPETENLHVPQWLPYEAGATLPTPTAALQALSNYVQATQRDYLRATTQLLIAPGYSFKICSGLITNFHQPESTLLLLISALIGEKWRVVYEHALQHQYRFLSYGDSSLLLP

SEQ ID NO: 62902 - protein, 348 aa, Adhaeribacter sp.
  misc_feature (1)..(348): tr|A0A369QFS1|A0A369QFS1_9BACT S-adenosylmethionine:tRN A ribosyltransferase-isomerase OS=Adhaeribacter sp. HMF 7616 OX=2072847 GN=queA PE=3 SV=1
MKLSEFKFDLPANLLAMHPAKERDEARMMVVHRDNGKIEHKIFKEILNYFDDGDTMVINDTKVFPARMYGNKEKTGAKIEVFLLRELNKDIHLWDVLVDPARKIRVGNKLYFGESDLVAEVIDNTTSRGRTIKFLFDGTDEEFYKTINELGETPLPKYIKREAQPEDRERYQTVYAKHVGAVAAPTAGLHFTKEVLKRLEFKGINVTPVTLHVGLGTFRPVDVEDLTKHKMDSESFIVPEETTILVNQALDNKKRVCAIGTTTLRALESSVSANGRLKPNQGWTDKFIFPPHDFRIANALLTNFHMPESTLLMMAAAFGGYDLIMEAYNAAVKEKYNFFSYGDAMLII

SEQ ID NO: 62903 - protein, 365 aa, Adlercreutzia equolifaciens
  misc_feature (1)..(365): tr|A0A3E2ER85|A0A3E2ER85_9ACTN S-adenosylmethionine:tRN A ribosyltransferase-isomerase OS=Adlercreutzia equolif aciens OX=446660 GN=queA PE=3 SV=1
MRTDDFDYNLPEELIAQEPAAVRDECRLLVMDRVSGEVEDRIFKDIIDYLQPGDLLVANETRVMPARLLGTKRGTGGAAEVFLLRECGGPEPRTNRVAFWEVLVRPGKRLKPGSGAVVDFTNAAGDVVLSAEIIDWARDGQRGERVARLSTPLPSLDEALHAVGHTPLPPYIRDYAGDEELYQTVYSRRESSAAAPTAGLHFTPELIERLRERGIGWATVELEVGLDTFRVVDEDDPEKHHIHTEFYTVPQATVDAVNATHAAGGRVIAVGTTSVRSLESAWDPEADGGRGALVARDREATSLYILPGYEFHVVDALITNFHVPRSTLMMLVSAFSTRENILAAYQHAIDERYRLLSFGDAMFLH

SEQ ID NO: 62904 - protein, 352 aa, Advenella incenata
  misc_feature (1)..(352): tr|A0A4Q7VSP3|A0A4Q7VSP3_9BURK S-adenosylmethionine:tRN A ribosyltransferase-isomerase OS=Advenella incenata OX =267800 GN=queA PE=3 SV=1
MLPIDPSLSIADFDYELPEDLIAQVPPATRTDSRLLLVQNDGALQDLNFSALPDLLLPGDLLIFNDTKVIKARLYGQKDSGGRVEALIERIIEPTRALAHVRASKSPRPGTNLIFDGAITCSVVARHDDLFELQFDTDILPVLDKHGNLPLPPYIKHSADQQDETRYQTVYARHPGAVAAPTAGLHFDATLLQRLQDKGIDSAWVTLHVGAGTFQPVRVEKISEHIMHAEWYTVPETTVAAIAAARERGGRVIAVGTTSVRALESAAQQGGTLNNLRCPVAHSADTQLFITPGYTFRVIDGLITNFHLPQSTLLMLVSALTGRERMQQAYRHAIEQRYRFFSYGDAMFIAPG

SEQ ID NO: 62905 - protein, 349 aa, Advenella kashmirensis
  misc_feature (1)..(349): tr|V8QQB3|V8QQB3_9BURK S-adenosylmethionine:tRNA ribosy ltransferase-isomerase OS=Advenella kashmirensis W13003 OX=1424334 GN=queA PE=3 SV=1
MDPSLSIADFDYELPEELIAQTPPATRTDSRLLLLEADGGLQDLRFSALPDLLQPGDLLIFNDTKVIKARLYGQKDSGGRVEALIERILEPTRALAHVRASKSPRPGTTLIFDGEVRCQVTARHEDLFELQFEADILPLLDRHGNLPLPPYIKHNADQEDETRYQTVYARHPGAVAAPTAGLHFDQALMQHLQDKRIDTAWVTLHVGAGTFQPVRVDKISEHIMHAEWYTVPQETVDAIAAARSRGARVIAVGTTSVRALESAAQQAGTVDDLRCPRAHSADTQLFITPGYEFRVIDGLITNFHLPQSTLLMLVSALTGRERMHRAYRHAIEQRYRFFSYGDAMFITPR

SEQ ID NO: 62906 - protein, 352 aa, Advenella kashmirensis
  misc_feature (1)..(352): tr|A0A356LEM1|A0A356LEM1_9BURK S-adenosylmethionine:tRN A ribosyltransferase-isomerase OS=Advenella kashmirensi s OX=310575 GN=queA PE=3 SV=1
MLPIDPSLSIADFDYELPEDLIAQTPPATRTDSRLLRVQNNGALQDLNFSALPDLLLPGDLLIFNDTKVIKARLYGQKDSGGRVEALIERIIEPTRALAHVRASKSPRPGTTLVFDGAVTCTVVARHDDLFQLQFDTDILPVLDKHGNLPLPPYIKHSADQQDETRYQTVYARHPGAVAAPTAGLHFDATLLQRLQDKGINTAWVTLHVGAGTFQPVRVEKISEHIMHAEWYTVPETTVAAIAAARERGGRVIAVGTTSVRALESAAQQGGTLDNLRCPVAHSADTQLFITPGYTFRVIDGLITNFHLPQSTLLMLVSALTGRERMQQAYRHAIEQRYRFFSYGDAMFIAPA

SEQ ID NO: 62907 - protein, 352 aa, Advenella mimigardefordensis
  misc_feature (1)..(352): tr|W0PGN1|W0PGN1_9BURK S-adenosylmethionine:tRNA ribosy ltransferase-isomerase OS=Advenella mimigardefordensis DPN7 OX=1247726 GN=queA PE=3 SV=1
MLPIDPSLSIADFDYDLPEDLIAQAPPATRTDSRLLLMQHNGQLQDLNFSALPDLLQPNDLLIFNDTKVIKARLYGQKDSGGRVEALIERILEPTRALAHVRASKSPRPGTTLIFDDAVACTVIARHDDLFELQFDTDILPVLDKHGNLPLPPYIKHSADQQDETRYQTVYARHPGAVAAPTAGLHFDAALLQRLQDKGIQTAWVTLHVGAGTFQPVRVEKISEHIMHAEWYTVSENTVAAIAATRERGGRVIAVGTTSVRALESAAQQGGTLGELRCPVAHSADTQLFITPGYTFRVIDGLITNFHLPQSTLLMLVSALTGRERMREAYRHAIEARYRFFSYGDAMFIAPG

SEQ ID NO: 62908 - protein, 355 aa, Advenella sp.
  misc_feature (1)..(355): tr|A0A2M9TZY2|A0A2M9TZY2_9BURK S-adenosylmethionine:tRN A ribosyltransferase-isomerase OS=Advenella sp. S44 OX= 1982755 GN=queA PE=3 SV=1
MLPIDPSLSIADFDYELPEDLIAQTPPATRTESRLLLLQDDGGLQDLNFATLPDLLLPGDLLVFNDTKVIKARLYGQKDSGGRIEALIERILEPTRALAHVRASKSPRPGTTLIFDGDIVCTVAARHDDLFELHFETDILPALDKHGNLPLPPYIKHSADQQDEARYQTVYARHPGAVAAPTAGLHFDAPLLQRLQDKGIDTAWVTLHVGAGTFQPVRVDKISDHIMHAEWYTVPEKTVSAIAAARKRGARIIAVGTTSVRALESAAQQGGTLDALRCPIAHSADTRLFITPGYTFRVVDGLITNFHLPQSTLLMLVSALTGRERMQLAYRHAIEKRYRFFSYGDAMFIAPRHNP

SEQ ID NO: 62909 - protein, 349 aa, Aequorivita antarctica
  misc_feature (1)..(349): tr|A0A5C6YZU4|A0A5C6YZU4_9FLAO S-adenosylmethionine:tRN A ribosyltransferase-isomerase OS=Aequorivita antarctic a OX=153266 GN=queA PE=3 SV=1
MKLSNFSFNLPEELLAEYPAPNRDESRLMVLNRKDKTIEHKMFKDIIDYFEEDDVLITNNTKVFPARLFGNKEKTGARIEVFLLRELNPETRLWDVLVDPARKIRIGNKLYFGDDETLVAEVIDNTTSRGRTLRFLFDGSYEEFRNKLTELGETPLPKYIKREVEPEDAERYQTIFAKNEGAVAAPTAGLHFSKHLLKRLEIKGINIAEVTLHVGLGTFSSVEVEDLSKHKMDSEEMSILQDSVDIINTGIKRKKRVCAVGTTAMRAVESSVSSNHTLNAYTGWTNKFIFPPYDFSIANAMITNFHTPKSTLLMMVSAFAGHDFIKEAYAEAIKEKYRFYTYGDAMLII

SEQ ID NO: 62910 - protein, 349 aa, Aequorivita lipolytica
  misc_feature (1)..(349): tr|A0A5C6YVN5|A0A5C6YVN5_9FLAO S-adenosylmethionine:tRN A ribosyltransferase-isomerase OS=Aequorivita lipolytic a OX=153267 GN=queA PE=3 SV=1
MKLSNFSFNLPEELLAEYPAPNRDESRLMVLDRKTKTIEHKMFKDLIDYFDEDDVLVTNNTKVFPARLFGNKEKTGARIEVFLLRELNPETRLWDVLVDPARKIRIGNKLYFGDDETLVAEVIDNTTSRGRTLRFLFDGSYEEFRGKLTELGETPLPKYIKREVEPEDAERYQTIFAKIEGAVAAPTAGLHFSKHLLKRLEIKGVNIAEVTLHVGLGTFSSVEVEDLSKHKMDSEEMEIKEDAVGVINTGIKKKKRVCAVGTTAMRALESSVSSNHTLNAYKGWTNKFIFPPYDFSIANAMITNFHTPKSTLLMMAAAFAGHEFMKEAYAEAIKEKYRFYTYGDAMLII

SEQ ID NO: 62911 - protein, 349 aa, Aequorivita soesokkakensis
  misc_feature (1)..(349): tr|A0A1A9LA82|A0A1A9LA82_9FLAO S-adenosylmethionine:tRN A ribosyltransferase-isomerase OS=Aequorivita soesokkak ensis OX=1385699 GN=queA PE=3 SV=1
MKLSNFNFNLPEELLAEYPAPNRDESRLMVLNRKTKTIEHKMFKDLIDYFEEDDVLVTNNTKVFPARLFGNKEKTGARIEVFLLRELNSETRLWDVLVDPARKIRIGNKLYFGDDETLVAEVIDNTTSRGRTLRFLFDGSYEEFRNKLTELGETPLPKYIKREVEPEDAERYQTIFAKNEGAVAAPTAGLHFSKHLLKRLEIKGVNVAEVTLHVGLGTFSSVEVEDLSKHKMDSEEMSILQDAVDIINTGIKKKKRVCAVGTTAMRALESSVSSNHTLNSYSGWTNKFIFPPYDFSIANAMVTNFHTPKSTLLMMVSAFAGHDFIKQAYAEAIKEKYRFYTYGDAMLII

SEQ ID NO: 62912 - protein, 351 aa, Aequorivita sp.
  misc_feature (1)..(351): tr|A0A330MQ49|A0A330MQ49_9FLAO S-adenosylmethionine:tRN A ribosyltransferase-isomerase OS=Aequorivita sp. CIP11 1184 OX=2211356 GN=queA PE=3 SV=1
MGMKLSNFSFNLPEELLAEYPAPNRDESRLMVLNRKTKTIEHKMFKDLIDYFEEDDVLVTNNTKVFPARLFGNKEKTGARIEVFLLRELNSETRLWDVLVDPARKIRIGNKLYFGDDETLVAEVIDNTTSRGRTLRFLFDGSYEEFRNKLTELGETPLPKYIKREVEPEDADRYQTIFAKIEGAVAAPTAGLHFSKHLLKRLEIKGVNIAEVTLHVGLGTFSSVEVEDLSKHKMDSEEMSILQDSVDVINTGIKRKKRVCAVGTTAMRALESSVSSNHTLNAYTGWTNKFIFPPYDFSIANAMVTNFHTPKSTLLMMVSAFAGHDFIKEAYAEAIKEKYRFYTYGDAMLII

SEQ ID NO: 62913 - protein, 349 aa, Aequorivita sp.
  misc_feature (1)..(349): tr|A0A2E4RVZ8|A0A2E4RVZ8_9FLAO S-adenosylmethionine:tRN A ribosyltransferase-isomerase OS=Aequorivita sp. OX=18 72390 GN=queA PE=3 SV=1
MKLSNFNFNLPEELLAEYPAPNRDESRLMVLDRKNKTIEHKMFKDLIDYFEEDDVLVTNNTKVFPARLFGNKEKTGARIEVFLLRELNPETRLWDVLVDPARKIRIGNKLYFGDDETLVAEVIDNTTSRGRTLRFLFDGSYEEFRNKLTELGETPLPKYIKREVEPEDAERYQTIFAKNEGAVAAPTAGLHFSKHLLKRLEIKGVNVAEVTLHVGLGTFSSVEVEDLSKHKMDSEEMEIDQKAVSIINAGIQKKKRVCAVGTTAMRALESSVSSNHTLNPYKGWTNKFIFPPYDFSIANAMVTNFHTPKSTLLMMVSAFAGHDFIKEAYAEAIKEKYRFYTYGDAMLII

SEQ ID NO: 62914 - protein, 351 aa, Aequorivita sublithincola
  misc_feature (1)..(351): tr|I3YWG4|I3YWG4_AEQSU S-adenosylmethionine:tRNA ribosy ltransferase-isomerase OS=Aequorivita sublithincola (st rain DSM 14238 / LMG 21431 / ACAM 643 / 9-3) OX=746697 GN=queA PE=3 SV=1
MGMKLSNFSFNLPEELLAEYPAPNRDESRLMVLNRKDKTIEHKTFKDIIDYFEEDDVLITNNTKVFPARLFGNKEKTGARIEVFLLRELNPETRLWDVLVDPARKIRIGNKLYFGDDETLVAEVIDNTTSRGRTLRFLFDGSYEEFRNKLTELGETPLPKYIKREVEPEDAERYQTIFAKNEGAVAAPTAGLHFSKHLLKRLEIKGVNIAEVTLHVGLGTFSSVEVEDLSKHKMDSEEMAILQDAVDIINTGIKRKKRVCAVGTTAMRAVESSVSSNHTLNAYAGWTNKFIFPPYDFSIANAMITNFHTPKSTLLMMVSAFAGHDFIKEAYAEAIKEKYNFYTYGDAMLII

SEQ ID NO: 62915 - protein, 351 aa, Aequorivita viscosa
  misc_feature (1)..(351): tr|A0A1M6CQU1|A0A1M6CQU1_9FLAO S-adenosylmethionine:tRN A ribosyltransferase-isomerase OS=Aequorivita viscosa O X=797419 GN=queA PE=3 SV=1
MGRKLSNFNFDLPPELLAEHPAPNRDESRLMVLNRKDKTIEHKTFKDLIDYFEEDDVLITNNTKVFPARLFGNKEKTGARIEVFLLRELNSETRLWDVLVDPARKIRIGNKLYFGEDESLVAEVIDNTTSRGRTLRFLFDGSYEEFRNKLTELGETPLPKYIKRDVEPEDAERYQTIFAKNEGAVAAPTAGLHFSKHLLKRMEIKGVNIAEITLHVGLGTFSSVEVEDLSKHKMDSEEMMIDQVAADIINKGIENKRRVCAVGTTAMRAVESSVSSNHRLNPFSGWTNKFIFPPYDFSIANAMITNFHTPKSTLLMMTSAFAGHEFIKEAYEVAIKEKYNFYSYGDAMLII

SEQ ID NO: 62916 - protein, 342 aa, Aeribacillus composti
  misc_feature (1)..(342): tr|A0A559U9R7|A0A559U9R7_9BACI S-adenosylmethionine:tRN A ribosyltransferase-isomerase OS=Aeribacillus composti OX=1868734 GN=queA PE=3 SV=1
MNIELFDFELPEELIAQTPLKERDASRLMIVDKKSGDITHSRFKSLIEYVSPGDCLVLNDTRVMPARLYGVKEETGAKVEVLLLKEKEGNVWETLVKPSKRVKVGTTLNFGNGLLKGTCVGTLEHGGRIIEFQYEGIFLEILDQLGEMPLPPYIKEQLDNKERYQTVYSREIGSAAAPTAGLHFTDEILENIKNKGIHIAFITLHVGLGTFRPVSSTNITEHKMHAEFYQMTEGTARLLNEVREKGGRIIAVGTTSTRTLETIAGKHGGKFVEESGWTDIFIYPGYNFKGIDGLVTNFHLPKSSLIMLVSALAGRETILRAYEEAIKEKYRFFSFGDAMLII

SEQ ID NO: 62917 - protein, 342 aa, Aeribacillus pallidus; identical to SEQ ID NO: 62916
  misc_feature (1)..(342): tr|A0A165XN18|A0A165XN18_9BACI S-adenosylmethionine:tRN A ribosyltransferase-isomerase OS=Aeribacillus pallidus OX=33936 GN=queA PE=3 SV=1

SEQ ID NO: 62918 - protein, 344 aa, Aerococcaceae bacterium
  misc_feature (1)..(344): tr|A0A347WNT5|A0A347WNT5_9LACT S-adenosylmethionine:tRN A ribosyltransferase-isomerase OS=Aerococcaceae bacteri um ZY16052 OX=2036206 GN=queA PE=3 SV=1
MTYTTQDFNYELPDDLIAQTPLADRSASRLMVIDRETDKIKDTDFKHILDYLEAGDGLVVNHSRVIPARIFGVKPDTGGHLEILLLHNTQGNRWETLVKPAKRAKVGTKISFGDGELTAEVVESLEHGGRIIEFYYEGVFLEHLEKLGQMPLPPYIKERLEDPDRYQTVYAKENGSAAAPTAGLHFTEELLQAAKAKGVELIPLTLHVGLGTFRPVSVDRIEDHDMHAEFYHLSAESAERINRIKANGGKITAVGTTSVRTLETIAQENHGEVLPQSGWTKIFITPGFEYQVVDHLITNFHLPQSTLMMLVSAFYDRNHVLAAYAHAVEKRYRFFSFGDAMLLL

SEQ ID NO: 62919 - protein, 344 aa, Aerococcaceae bacterium
  misc_feature (1)..(344): tr|A0A3D0CGT6|A0A3D0CGT6_9LACT S-adenosylmethionine:tRN A ribosyltransferase-isomerase OS=Aerococcaceae bacteri um OX=2053495 GN=queA PE=3 SV=1
MLTTKDFDYELPEHLIAQTPLEDRSASRLLVLNREDDTLEDTDFKHILDYVNPGDALVVNETRVIPARIFGVKPDTGGHLEVLLLNNTQGNEWEVLVKHARRAKVGTVIEFGKEAQLRAVVKEELEHGGRIIEFEYEGVFLEILETLGQMPLPPYIKERLEDPERYQTVYAKENGSAAAPTAGLHFTNELFQQAKEKGIEIIPLTLHVGLGTFRPVSVENLEEHEMHSEFYNLSAQSAERINKIKDNGGKIVAVGTTSVRTLETIANDNNGEIKAGSGWTSIFITPGYEFKAVDHLITNFHLPQSTLVMLVSAFYNRERILQAYRHAVDNEYRFFSFGDAMLIL

SEQ ID NO: 62920 - protein, 357 aa, Aerococcus christensenii
  misc_feature (1)..(357): tr|A0A133XSW1|A0A133XSW1_9LACT S-adenosylmethionine:tRN A ribosyltransferase-isomerase OS=Aerococcus christense nii OX=87541 GN=queA PE=3 SV=1
MTLKTSDYDYDLPEELIAQTPTKDRLACRLLKLRATDGHYEDCQFEDVASEFEAGDVLVLNNTRVLPARLYGHRQGTGGHVEVLLLKNTTGDQWEVLVRPARKLHEGGVLEFGDGRLKATILKELNYGGGRLIEFSYDGIFLEILESLGEMPLPPYIKEKLDDPERYQTVYAKENGSAAAPTAGLHFTKDYLKKLEEKGVKIAYLTLHVGLGTFRPVNEEDIEDHEMHSEFYHLDEENAEIIRRAKEEGRQVVACGTTCIRTLETIGAKFDGKVQADSGWTSIFIYPGFKYRLVDSFITNFHLPKSTLVMLVAAFTGREHILAAYRHAVEEKYMFFSFGDAMFIRGPQNPKALEENH

SEQ ID NO: 62921 - protein, 352 aa, Aerococcus sanguinicola
  misc_feature (1)..(352): tr|A0A120I9H1|A0A120I9H1_9LACT S-adenosylmethionine:tRN A ribosyltransferase-isomerase OS=Aerococcus sanguinico la OX=119206 GN=queA PE=3 SV=1
MTLKTSDYDYDLPEELIAQTPTKDRLNCRLLTLDAQTGHYADHMFADLLDILEAGDVLVLNDTRVLPARLLGTKEETGGHAELLLLNNLEGDRWEVLAKPARRLKTGTIIQFGDGQLRAKVVKELDHGGREIEFLYEGIFMEVLEALGEMPLPPYIKEHLDDPDRYQTVYAKENGSAAAPTAGLHFTEDFLDQVQAKGVDLAYLTLHVGLGTFRPVSADDLTDHEMHSEFYRLDEENAQKIKTAKAAGKRVVAVGTTCIRTLETIAQKFDGQLQADSGWTSIFIYPGFDFKVVDAIITNFHLPKSTLVMLVSAFAGRQHVLAAYKHAVEASYRFFSFGDAMYIQGPQYREDD

SEQ ID NO: 62922 - protein, 373 aa, Aerococcus sp.
  misc_feature (1)..(373): tr|A0A3N4GIR6|A0A3N4GIR6_9LACT S-adenosylmethionine:tRN A ribosyltransferase-isomerase OS=Aerococcus sp. SJQ22 OX=2487350 GN=queA PE=3 SV=1
MTLTTNDFDFDLPEELIAQVPIEDRLASRLLKLDAPTGEFTDGHFPDVASELNAGDVLVLNNTRVLPARLHGVRPDTGGHVEVLLLNNISGDKWETLVKPARRIYVGTEIVFGDGQLKAVVTEVLEHGGRIVEFHYDGIFLEVLEALGEMPLPPYIKEKLDDPDRYQTVYAKENGSAAAPTAGLHFTQEFMAELAEKGVEIAYLTLHVGLGTFRPVSVNDIDEHKMHSEFYRLDEENAAKIRTAKANGNKIVAVGTTSIRTLETIGTKFKGDIQSDSGWTDIFIAPGYTFTVVDAFITNFHLPKSTLIMLVSAFAGRDHVLAAYQHAVEEKYRFFSFGDAMFLRGPQFNDPTLTDEDIAAAKHRNRQFFPEEG

SEQ ID NO: 62923 - protein, 373 aa, Aerococcus sp.
  misc_feature (1)..(373): tr|A0A1F2EJ03|A0A1F2EJ03_9LACT S-adenosylmethionine:tRN A ribosyltransferase-isomerase OS=Aerococcus sp. HMSC10 H05 OX=1581084 GN=queA PE=3 SV=1
MTLTTNDFDFNLPEQLIAQVPIQNRLASRLLKLDAQTGEYEDGHFPDIASELEPGDVLVLNNTRVLPARLHGIRPDTGGHVEVLLLNNTEGDRWETLVKPARRIRVGTEIAFGDGQLVAVVAEELDHGGRIVEFIYQGIFLEVLEALGEMPLPPYIKEKLDNPDRYQTVYAKENGSAAAPTAGLHFTQEFMADLEARGIDIAYLTLHVGLGTFRPVSVDDIDAHKMHSEFYSLDQENSDKIRRAQQGGHKVVAVGTTSIRTLETIGTKFDGEVKADSGWTDIFIAPGYQFTVVNSFITNFHLPKSTLIMLVSAFAGREHVLTAYQHAVAEEYRFFSFGDAMFLRGPQYQDPAISEEDIEAAKRRNSQFFTQKD

SEQ ID NO: 62924 - protein, 371 aa, Aerococcus suis
  misc_feature (1)..(371): tr|A0A1W1YLS7|A0A1W1YLS7_9LACT S-adenosylmethionine:tRN A ribosyltransferase-isomerase OS=Aerococcus suis OX=37 1602 GN=queA PE=3 SV=1
MGLTTNDFDFELPEELIAQTPIPNRLGSKLLTLDAQTGDYQDGHFPDLADQLEAGDVLVLNNTRVLPARLYGVKEETGGHQEVLLLNNIEGDKWEVLMKPARRAKVGSTVTFGNGDLKATVTKELEHGGRIVEFSYDGIFLEILESLGEMPLPPYIKEKLDNPDRYQTVYAKENGSAAAPTAGLHFTTEFLEELKAKGVKIAYLTLHVGLGTFRPVTAEAIDDHHMHAEFYRFDEQAAQMINEAKANHHRVIAVGTTSIRTLETIGTKFNGEIKPDSGWTDIFIAPGYEFKVVDAFITNFHLPKSTLIMLVSAFAGRQHVLNAYSHAVDERYRFFSFGDAMFLKGPQFLDPELTDDDIAAAKQRNQSLLAK

SEQ ID NO: 62925 - protein, 352 aa, Aerococcus urinae
  misc_feature (1)..(352): tr|A0A329PY11|A0A329PY11_9LACT S-adenosylmethionine:tRN A ribosyltransferase-isomerase OS=Aerococcus urinae OX= 1376 GN=queA PE=3 SV=1
MTLKTTDYDYDLPEELIAQSPTKDRLNCRLLCLNARDGHYQDKMFSAIEEEFEAGDVLVLNNTRVLPARLYGEKEATGGHVEVLLLNNVEGDLWETLVKPGRRLKAGARLSFGDGRLKAEIKETLDYGGGRLLEFYYDGIFLEILESLGEMPLPPYIKNKLTDPDRYQTVYAKVNGSAAAPTAGLHFTEDYLKSLQEKGVKIAYLTLHVGLGTFRPVNEEDLSDHQMHSEFYRLDPENAEIISQAQANGHHVIACGTTCIRTLETIGQKFDGQVKADSGWTDIFIYPGFKFTVVDHFITNFHLPKSTLVMLVAAFAGRDHVLNAYRHAVEEKYQFFSFGDAMFVRGPQYTEK

SEQ ID NO: 62926 - protein, 352 aa, Aerococcus urinae
  misc_feature (1)..(352): tr|A0A0X8FDY8|A0A0X8FDY8_9LACT S-adenosylmethionine:tRN A ribosyltransferase-isomerase OS=Aerococcus urinae OX= 1376 GN=queA PE=3 SV=1
MTLKTTDYDYDLPEELIAQSPTKDRLNCRLLCLNAKDGHYQDKMFSAIKEEFEAGDVLVLNNTRVLPARLYGEKEETGGHVEVLLLNNVEGDLWETLVKPGRRLKAGTKLSFGDGRLKAEIKETLDYGGGRLLEFYYDGIFLEILESLGEMPLPPYIKNKLTDPDRYQTVYAKVNGSAAAPTAGLHFTEDYLKSLQEKGVKIAYLTLHVGLGTFRPVNEEDLSDHQMHSEFYRLDPENAEMISQAQANGHHVIACGTTCIRTLETIGQKFDGQVKADSGWTDIFIYPGFKFTVVDHFITNFHLPKSTLVMLVAAFAGRDHVLNAYRHAVEEKYQFFSFGDAMFVRGPQYIEK

SEQ ID NO: 62927 - protein, 374 aa, Aerococcus urinaeequi
  misc_feature (1)..(374): tr|A0A0U4WTM6|A0A0U4WTM6_9LACT S-adenosylmethionine:tRN A ribosyltransferase-isomerase OS=Aerococcus urinaeequi OX=51665 GN=queA PE=3 SV=1
MTLTTNDFDFDLPEELIAQVPIQDRLASRLLKLDAQTGDFQDGYFPDVASELEAGDVLVLNNTRVLPARLHGIRPDTGGHIEVLLLNNTEGDKWETLVKPARRIRVGTEIVFGDGQLVAVITEVLDHGGRIVEFKYNGIFLEVLEALGEMPLPPYIKEKLDNPDRYQTVYAKENGSAAAPTAGLHFTEEFMADLKDRGVEIAYLTLHVGLGTFRPVSVDDIDAHKMHSEFYRLDQENATKIRRAQEGGHKVIAVGTTSIRTLETIGTKFKGQVQADSGWTDIFIAPGYQFSVVEGFITNFHLPKSTLIMLVSAFAGRDHVLAAYQHAVEEKYRFFSFGDAMFLRGPQYADPAITAEDNEAAKQRNSQFFTNEDK

SEQ ID NO: 62928 - protein, 354 aa, Aerococcus urinaehominis
  misc_feature (1)..(354): tr|A0A109RH64|A0A109RH64_9LACT S-adenosylmethionine:tRN A ribosyltransferase-isomerase OS=Aerococcus urinaehomi nis OX=128944 GN=queA PE=3 SV=1
MTLTTKDFDFDLPEAQIAQKPTEDRLAARLLKLDAQTGDYQDSMFEDLLTELNAGDVLVLNDTKVLPARLYGQKAETGGHVEVLLLNNTEGDQWECLVKPARRIKTGTKISFGDGRLQAVVTDELDHGGRMVTFSYQGIFLEVLESLGEMPLPPYIHERLEDKDRYQTVYAKEAGSAAAPTAGLHFTVDFLDQIKAKGVAIAYLTLHVGLGTFRPVSVENLADHQMHSEFYALDEKNAAIINQARQAGGRVVAVGTTAIRTLESIGQKYAGQIKADSDWTDIFIAPGYRFKVVDAFVTNFHLPMSTLIMLVSAFAGRQQVLAAYRHAVKAGYLFFSFGDAMFVKGPQYSGNPEA

SEQ ID NO: 62929 - protein, 374 aa, Aerococcus viridans
  misc_feature (1)..(374): tr|D4YIK8|D4YIK8_9LACT S-adenosylmethionine:tRNA ribosy ltransferase-isomerase OS=Aerococcus viridans ATCC 1156 3 = CCUG 4311 OX=655812 GN=queA PE=3 SV=1
MTLTTNDFDFDLPEELIAQVPIQDRLASKLLKLDAQTGDFQDGHFPDVASELEAGDVLVLNNTRVLPARLQGIRPDTGGHIEVLLLNNTEGDKWETLVKPARRIRVGTEIVFGNGQLVAVVTEVLEHGGRIVEFKYNGIFLEVLEALGEMPLPPYIKEKLDNPDRYQTVYAKENGSAAAPTAGLHFTEEFMADLKDRGVEIAYLTLHVGLGTFRPVSVDDIDAHKMHSEFYRLDQENAAKIRRAQEGGHKVIAVGTTSIRTLETIGTKFKGQVQADSGWTDIFIAPGYQFSVVEGFITNFHLPKSTLIMLVSAFAGRDHVLAAYQHAVEEKYRFFSFGDAMFLRGPQYADPAITAEDIEAAKQRNSQFFTDEDK

SEQ ID NO: 62930 - protein, 373 aa, Aerococcus viridans
  misc_feature (1)..(373): tr|A0A2N6UEZ9|A0A2N6UEZ9_9LACT S-adenosylmethionine:tRN A ribosyltransferase-isomerase OS=Aerococcus viridans O X=1377 GN=queA PE=3 SV=1
MTLTTNDFDFNLPEQLIAQVPIQNRLASRLLKLDAQTGEYEDGHFPDIASELEPGDVLVLNNTRVLPARLHGIRPDTGGHVEVLLLNNTEGDRWETLVKPARRIRVGTEIAFGDGQLVAVVAEELDHGGRIVEFKYQGIFLEVLEALGEMPLPPYIKEKLDNPDRYQTVYAKENGSAAAPTAGLHFTQEFMADLEARGIDIAYLTLHVGLGTFRPVSVDDIDAHKMHSEFYSLDQENSDKIRRAQQGGHKVVAVGTTSIRTLETIGTKFDGEVKADSGWTDIFIAPGYQFTVVNSFITNFHLPKSTLIMLVSAFAGREHVLTAYQHAVAEEYRFFSFGDAMFLRGPQYQDPAISEEDIEAAKRRNSQFFTQKD

SEQ ID NO: 62931 - protein, 364 aa, Aeromicrobium sp.
  misc_feature (1)..(364): tr|A0A5C8NK46|A0A5C8NK46_9ACTN S-adenosylmethionine:tRN A ribosyltransferase-isomerase OS=Aeromicrobium sp. CC- CFT486 OX=2498846 GN=FHP06_07295 PE=3 SV=1
MIGIAPLTQFTPPGERTAPSPAEARGIARDDVRLLVAGASGIEHAHFADLADHLEPGDLVVVNASQTVAGQVDARSSDGEDVVVHVAMDLRDGTWVVELRTSPDATRAVLDASPGRTLRLRDAAATLTLVEPYPREGSSPTGTGNRLWRAVHDGDEPLRDVLDRIGRPISYGYLDRQYDLSDYQTIFGTTPGSAEMPSAARPFTPEVVTRLVSRGIGIAPVLLHTGISSQEAGEAPQPEWFEVGESTARLVNATRAGGGRVVAVGTTVTRALESAVDRSGSVLAVSGWTERIVTREHPPRVVDGLVTGWHDPQASHLLLVEAIAGPVLTQTAYDEAVSGGYRWHEFGDSALFLPERAEVRESAA

SEQ ID NO: 62932 - protein, 371 aa, Aeromicrobium sp.
  misc_feature (1)..(371): tr|A0A0Q6VM33|A0A0Q6VM33_9ACTN S-adenosylmethionine:tRN A ribosyltransferase-isomerase OS=Aeromicrobium sp. Roo t344 OX=1736521 GN=ASC61_00820 PE=3 SV=1
MTRIDIAPLTMFSPPGERTAPSPAEARGMRRDDVRLLVAHGDRVTHARFGDLADHLEPGDLVVVNASQTVAGELDAVLSGVGASTGDVVVHVATDLRDGTWVVEVRTAPDAAWAVLDAAAGQTLVLAAPGAELTLLEPYPRESSSPTGHGNRLWRASYAGQAALPDVLASLGRPIAYGYLDRRYPIEDYRTIFGTTPGSAEMPSAARPFTPDVVTRLVSRGIAIAPILLHTGVSSQEAGEAPQPEWFEVSEPAARLVNATRAGGGRVIAVGTTVTRALESAVRGAPGRAVVEASSGWTERVITRDAPPRVVDGLITGWHDPAASHLLLVEAVAGPRLTQRAYDAAVEAGYHWHEFGDSALLLPARAEALAA

SEQ ID NO: 62933 - protein, 355 aa, Aeromonas allosaccharophila
  misc_feature (1)..(355): tr|A0A1Q5VLK0|A0A1Q5VLK0_9GAMM S-adenosylmethionine:tRN A ribosyltransferase-isomerase OS=Aeromonas allosacchar ophila OX=656 GN=queA PE=3 SV=1
MQVSDFHFDLPDELIARYPMAERTASRLLQLDGQTGALRHGQFVDVLDQLNPGDLLVFNNTRVIPARMFGQKASGGKLEVLVERILDPHSVLAHVRASKAPKPGTRMIMDGGPDGVKVEAEMRARHDALFEIHFLDPRPVLEILEAIGHMPLPPYIDRPDEDADKERYQTVYNQKPGAVAAPTAGLHFDEPLLEKIRAKGVETAFVTLHVGAGTFQPVRVDKIEDHHMHSEYAEVPQEVVDAIAATRARGGRVIAVGTTSVRSLESAAKVTLAQGKPLAPFFSDTDIFIFPGYQFQIVDAMVTNFHLPESTLIMLVSAFAGYDNVMAAYQAAVVENYRFFSYGDAMFVTRRQAEA

SEQ ID NO: 62934 - protein, 350 aa, Aeromonas allosaccharophila
  misc_feature (1)..(350): tr|A0A0T6U0H7|A0A0T6U0H7_9GAMM S-adenosylmethionine:tRN A ribosyltransferase-isomerase OS=Aeromonas allosacchar ophila OX=656 GN=queA PE=3 SV=1
MQVSDFHFDLPDELIARYPMAERTASRLLQLDGQTGALRHGQFVDVLDQLNPGDLLVFNNTRVIPARMFGQKASGGKLEVLVERILDPHSVLAHVRASKAPKPGTRMILDGGVEAEMRARHDALFEIHFLDPRPVLEILEAIGHMPLPPYIDRPDEDADKERYQTVYNQKPGAVAAPTAGLHFDEPLLEKIRAKGVETAFVTLHVGAGTFQPVRVEKIEDHHMHSEYAEVPQEVVDAIAATRARGGRVIAVGTTSVRSLESAAKVTLAQGKPLAPFFSDTDIFIFPGYQFQIVDAMVTNFHLPESTLIMLVSAFAGYDNVMAAYQAAVAENYRFFSYGDAMFVTRRQAEA

SEQ ID NO: 62935 - protein, 355 aa, Aeromonas cavernicola
  misc_feature (1)..(355): tr|A0A2H9U5X8|A0A2H9U5X8_9GAMM S-adenosylmethionine:tRN A ribosyltransferase-isomerase OS=Aeromonas cavernicola OX=1006623 GN=queA PE=3 SV=1
MQVSDFHFDLPDALIARYPMAERTASRLLQLNGQTGALRHGQFVDVLDQLNPGDLLVFNNTRVIPARMFGQKASGGKLEVLVERILDEHSVLAHVRASKAPKPGTRLIMAAGPDGKSVEAEMRARHDALFEIHFLDPRPVLEILEAIGHMPLPPYIDRPDEDADKERYQTVYNQKPGAVAAPTAGLHFDTPLLEKIRAKGVETAFVTLHVGAGTFQPVRVEKIEDHHMHAEYAEVPQEVVAAIAATRARGGRVIAVGTTSVRSLESAAKVTLAQGKPLAPFFGDTDIFIFPGYEFQLVDAMVTNFHLPESTLIMLVSAFAGYDQVMAAYQAAVAEQYRFFSYGDAMFVTRRRGDA

SEQ ID NO: 62936 - protein, 355 aa, Aeromonas caviae
  misc_feature (1)..(355): tr|A0A3N6TUR0|A0A3N6TUR0_AERCA S-adenosylmethionine:tRN A ribosyltransferase-isomerase OS=Aeromonas caviae OX=6 48 GN=queA PE=3 SV=1
MQVSDFHFDLPDELIARYPMAERTASRLLQLDGQTGALRHGHFVDVLDQLNPGDLLVFNNTRVIPARMFGQKASGGKLEVLVERILDEHSVLAHVRSSKSPKPGTRLLLDGGADGVPVEAEMRARHDALFEIHFLDPRPVLTILDAIGHMPLPPYIDRPDEDADKERYQTVYNQKPGAVAAPTAGLHFDEPLLEQIRAKGVEMAFVTLHVGAGTFQPVRVDKIEDHHMHSEYAEVPQEVVDAIAATRARGGRVVAVGTTSVRSLESAAKATLAQGKPLAPFFNDTDIFIFPGYEFQVVDAMITNFHLPESTLIMLVSAFAGYDNVMAAYQAAVAGQYRFFSYGDAMFVTRRRVQG

SEQ ID NO: 62937 - protein, 355 aa, Aeromonas caviae
  misc_feature (1)..(355): tr|A0A2X4NMA6|A0A2X4NMA6_AERCA S-adenosylmethionine:tRN A ribosyltransferase-isomerase OS=Aeromonas caviae OX=6 48 GN=queA PE=3 SV=1
MQVSDFHFDLPDELIARYPMAERTASRLLQLDGQTGALRHGHFVDVLDQLNPGDLLVFNNTRVIPARMFGQKASGGKLEVLVERILDEHSVLAHVRSSKSPKPGTRLLLDGGADGVPVEAEMRARHDALFEIHFLDPRPVLTILDAIGHMPLPPYIDRPDEDADKERYQTVYNQKPGAVAAPTAGLHFDEPLLEQIRAKGVEMAFVTLHVGAGTFQPVRVDKIEDHHMHSEYAEVPQEVVDAIAATRARGGRVVAVGTTSVRSLESAAKATLAQGMPLAPFFSDTDIFIFPGYEFQVVDAMITNFHLPESTLIMLVSAFAGYDNVMAAYQAAVAGQYRFFSYGDAMFVTRRRVQG

SEQ ID NO: 62938 - protein, 355 aa, Aeromonas dhakensis
  misc_feature (1)..(355): tr|A0A433GBT7|A0A433GBT7_9GAMM S-adenosylmethionine:tRN A ribosyltransferase-isomerase OS=Aeromonas dhakensis O X=196024 GN=queA PE=3 SV=1
MQVSDFHFDLPDELIARYPMAERTASRLLQLDGQTGALRHGQFVDVLDQLNPGDLLVFNNTRVIPARMFGQKASGGKLEVLVERILDEHSVLAHVRSSKSPKPGTRLILDAGADGVPVEAEMRARHDALFEIHFLDPRPVLEILEAIGHMPLPPYIDRPDEDADKERYQTVYNQKPGAVAAPTAGLHFDEPLLEKIRAKGVETAFVTLHVGAGTFQPVRVDKIEDHHMHSEYAEVPQEVVDAIAATRARGGRVIAVGTTSVRSLESAAKVTLAQGKPLAPFFSDTDIFIFPGYQFQVVDAMVTNFHLPESTLIMLVSAFAGYDNVMAAYQAAVAEQYRFFSYGDAMFVTRRRAAA

SEQ ID NO: 62939 - protein, 355 aa, Aeromonas dhakensis
  misc_feature (1)..(355): tr|K1JDC0|K1JDC0_9GAMM S-adenosylmethionine:tRNA ribosy ltransferase-isomerase OS=Aeromonas dhakensis OX=196024 GN=queA PE=3 SV=1
MQVSDFHFDLPDELIARYPMAERTASRLLQLDGQTGALRHGQFVDVLDQLNSGDLLVFNNTRVIPARMFGQKASGGKLEVLVERILDEHSVLAHVRSSKSPKPGTRLILDAGADGVPVEAEMRARHDALFEIHFLDPRPVLEILEAIGHMPLPPYIDRPDEDADKERYQTVYNQKPGAVAAPTAGLHFDEPLLEKIRAKGVETAFVTLHVGAGTFQPVRVDKIEDHHMHSEYAEVPQEVVDAIAATRARGGRVIAVGTTSVRSLESAAKVTLAQGKPLAPFFSDTDIFIFPGYQFQVVDAMVTNFHLPESTLIMLVSAFAGYDNVMAAYQAAVAEQYRFFSYGDAMFVTRRRAAA

SEQ ID NO: 62940 - protein, 349 aa, Aeromonas diversa
  misc_feature (1)..(349): tr|N9V890|N9V890_9GAMM S-adenosylmethionine:tRNA ribosy ltransferase-isomerase OS=Aeromonas diversa CDC 2478-85 OX=1268237 GN=queA PE=3 SV=1
MQVSDFHFDLPDELIARYPTAERTASRLLQLDGESGARRHGQFVDVLNLLNPGDLLVFNNTRVIPARMFGQKASGGKLEVLVERILGEHAVLAHVRASKAPKPGTRLILDGGVEAEMRARHDALFEIHFLDPRPVLEILDAIGHMPLPPYIDRPDEDADKERYQTVYNAKPGAVAAPTAGLHFDESLLEAIRAKGIETAFVTLHVGAGTFQPVRVDKIEDHHMHSEYAEVPQEVVDAIAATRARGGRVIAVGTTSVRSLESAARVTLAQGQPLAPFFSDTDIFIYPGFEFQVVDAMVTNFHLPESTLIMLISAFAGYDNVMAAYREAVAEQYRFFSYGDAMFITRRRGR

SEQ ID NO: 62941 - protein, 355 aa, Aeromonas encheleia
  misc_feature (1)..(355): tr|A0A3S4TN77|A0A3S4TN77_9GAMM S-adenosylmethionine:tRN A ribosyltransferase-isomerase OS=Aeromonas encheleia O X=73010 GN=queA PE=3 SV=1
MQVSDFHFDLPDELIARYPMTERTASRLLQLDGQSGALRHGQFVDVLDRLNPGDLLVFNNTRVIPARMFGQKASGGKLEVLVERILDEHSVLAHVRSSKSPKPGTRLILDGGPDGEKVEAEMRARHDALFEIHFLDPRPVLEILEAIGHMPLPPYIDRPDEDADKERYQTVYNQKPGAVAAPTAGLHFDEPLLAKIRAKGVETAFVTLHVGAGTFQPVRVDRIEDHHMHSEYAEVPQEVVDAINATRARGGRVIAVGTTSVRSLESAAKVSLAQGKPLAPFFSDTDIFIFPGYEFQIVDAMVTNFHLPESTLIMLVSAFAGYDHVMAAYQAAVAEQYRFFSYGDAMFVTRRRAQA

SEQ ID NO: 62942 - protein, 355 aa, Aeromonas enteropelogenes
  misc_feature (1)..(355): tr|A0A175VKR7|A0A175VKR7_AEREN S-adenosylmethionine:tRN A ribosyltransferase-isomerase OS=Aeromonas enteropelog enes OX=29489 GN=queA PE=3 SV=1
MQVSDFHFDLPDELIARYPMAERTASRLLQLDGQTGALRHGQFVDVLDQLNPGDLLVFNNTRVIPARMFGQKASGGKLEVLVERILDEHSVLAHVRSSKSPKPGTRLILDGGPDGEKVEAEMRARHDALFEIHFLDARSVLEILEAIGHMPLPPYIDRPDEDADKERYQTVYNAKPGAVAAPTAGLHFDEPLLEKIRAKGVETAFVTLHVGAGTFQPVRVDKIEDHHMHSEYAEVPQEVVDAIAATRARGGRVIAVGTTSVRSLESAAKVTLAQGKPLAPFFSDTDIFIFPGYEFQVVDAMVTNFHLPESTLIMLVSAFAGYDNVMAAYQAAVAEQYRFFSYGDAMFVTRRRAQA

SEQ ID NO: 62943 - protein, 355 aa, Aeromonas hydrophila
  misc_feature (1)..(355): sp|A0KJ19|QUEA_AERHH S-adenosylmethionine:tRNA ribosylt ransferase-isomerase OS=Aeromonas hydrophila subsp. hyd rophila (strain ATCC 7966 / DSM 30187 / JCM 1027 / KCTC 2358 / NCIMB 9240) OX=380703 GN=queA PE=3 SV=1
MQVSDFHFDLPDELIARYPMTERTASRLLQLDGQTGALRHGQFVDVLDQLNPGDLLVFNNTRVIPARMFGQKASGGKLEVLVERMLDEHSVLAHVRSSKSPKPGTRLILDGGADGEKVEAEMRARHDALFEIHFLDPRPVLEILEAIGHMPLPPYIDRPDEDADKERYQTVYNQKPGAVAAPTAGLHFDEPLLEKIRAKGVETAFVTLHVGAGTFQPVRVDKIEDHHMHSEYAEVPQEVVDAIAATRARGGRVIAVGTTSVRSLESAAKVTLAQGKPLAPFFSDTDIFIFPGYQFQVVDAMVTNFHLPESTLIMLVSAFAGYDNVMSAYQAAVAEQYRFFSYGDAMFVTRRRAQA

SEQ ID NO: 62944 - protein, 355 aa, Aeromonas hydrophila
  misc_feature (1)..(355): tr|A0A1V2F319|A0A1V2F319_AERHY S-adenosylmethionine:tRN A ribosyltransferase-isomerase OS=Aeromonas hydrophila OX=644 GN=queA PE=3 SV=1
MQVSDFHFDLPDELIARYPMTERTASRLLQLDGQTGALRHGQFVDVLDQLNPGDLLVFNNTRVIPARMFGQKASGGKLEVLVERMLDEHSVLAHVRSSKSPKPGTRLILDGGADGEKVEAEMRARHDALFEIHFLDPRPVLEILEAIGHMPLPPYIDRPDEDADKERYQTVYNQKPGAVAAPTAGLHFDEPLLEKIRAKGVETAFVTLHVGAGTFQPVRVDKIEDHHMHSEYAEVPQEVVDAIAATRARGGRVIAVGTTSVRSLESAAKVTLAQGKPLAPFFSDTDIFIFPGYQFQVVDAMVTNFHLPESTLIMLVSAFAGYDNVMAAYQAAVAEQYRFFSYGDAMFVTRRRAQA

SEQ ID NO: 62945 - protein, 350 aa, Aeromonas jandaei
  misc_feature (1)..(350): tr|A0A3N6VL62|A0A3N6VL62_AERJA S-adenosylmethionine:tRN A ribosyltransferase-isomerase OS=Aeromonas jandaei OX= 650 GN=queA PE=3 SV=1
MQVSDFHFDLPDELIARYPMAERTASRLLQLDGQTGALRHGQFVDVLDQLNPGDLLVFNNTRVIPARMFGQKASGGKLEVLVERILDEHSVLAHVRASKAPKPGTRMIMDGGVEAEMRARHDALFEIHFLDARPVLEILEAIGHMPLPPYIDRPDEDADKERYQTVYNQKPGAVAAPTAGLHFDEPLLEKIRAKGVETAFVTLHVGAGTFQPVRVEKIEDHHMHSEYAEVPQEVVDAIAATRARGGRVIAVGTTSVRSLESAAKVTLAQGKPLAPFFGDTDIFIFPGYQFQIVDAMVTNFHLPESTLIMLVSAFAGYDNVMTAYQAAVAGQYRFFSYGDAMFVTRRRGEA

SEQ ID NO: 62946 - protein, 350 aa, Aeromonas jandaei
  misc_feature (1)..(350): tr|A0A2S5FFG6|A0A2S5FFG6_AERJA S-adenosylmethionine:tRN A ribosyltransferase-isomerase OS=Aeromonas jandaei OX= 650 GN=queA PE=3 SV=1
MQVSDFHFDLPDELIARYPMAERTASRLLQLDGQTGALRHGQFVDVLDQLNPGDLLVFNNTRVIPARMFGQKASGGKLEVLVERILDEHSVLAHVRASKAPKPGTRMIMDGGVEAEMRARHDALFEIHFRDARPVLEILEAIGHMPLPPYIDRPDEDADKERYQTVYNQKPGAVAAPTAGLHFDEPLLEKIRAKGVETAFVTLHVGAGTFQPVRVEKIEDHHMHSEYAEVPQEVVDAIAATRARGGRVIAVGTTSVRSLESAAKVTLAQGKPLAPFFGDTDIFIFPGYQFQIVDAMVTNFHLPESTLIMLVSAFAGYDNVMTAYQAAVAGQYRFFSYGDAMFVTRRRGEA

SEQ ID NO: 62947 - protein, 355 aa, Aeromonas lusitana
  misc_feature (1)..(355): tr|A0A2M8HC82|A0A2M8HC82_9GAMM S-adenosylmethionine:tRN A ribosyltransferase-isomerase OS=Aeromonas lusitana OX =931529 GN=queA PE=3 SV=1
MQVSDFHFDLPDELIARYPMTERTASRLLQLDGQSGALRHGQFVDVLDQLKPGDLLVFNNTRVIPARMFGQKASGGKLEVLVERILDEHSVLAHVRSSKSPKPGTRLILDGGPDGDKVDAEMRARHDALFEIHFLDPRPVLDILEAIGHMPLPPYIDRPDEDADKERYQTVYNQKPGAVAAPTAGLHFDEPLLERIKAKGVELAFVTLHVGAGTFQPVRVDKIEDHHMHSEYAEVPQEVVDAIAATRARGGRVIAVGTTSVRSLESAAKVTLAQGKPLAPFFSDTDIFIFPGYEFQIVDAMVTNFHLPESTLIMLISAFAGYDHVMAAYQAAVAERYRFFSYGDAMFITRRRAEA

SEQ ID NO: 62948 - protein, 355 aa, Aeromonas media
  misc_feature (1)..(355): tr|A0A023RL27|A0A023RL27_AERME S-adenosylmethionine:tRN A ribosyltransferase-isomerase OS=Aeromonas media WS OX =1208104 GN=queA PE=3 SV=1
MQVSDFHFDLPDELIARYPMAERTASRLLQLDGQSGALRHGQFVDVLDQLNPGDLLVFNNTRVIPARMFGQKASGGKLEVLVERILDEHSVLAHVRSSKSPKPGTRLILDGGPDGEKVEAEMRARHDALFEIHFLDPRPVLEILEAIGHMPLPPYIDRPDEDADKERYQTVYNQKPGAVAAPTAGLHFDEPLLEKIRAKGVETAFVTLHVGAGTFQPVRVEKIEDHHMHSEYAEVPQEVVDAIAATRARGGRVVAVGTTSVRSLESAAKVTLAQGKPLAPFFSDTDIFIFPGYQFQVVDAMVTNFHLPESTLIMLVSAFAGYDNVMAAYQAAVAEQYRFFSYGDAMFVTRRQVEA

SEQ ID NO: 62949 - protein, 350 aa, Aeromonas molluscorum
  misc_feature (1)..(350): tr|R1H3R9|R1H3R9_9GAMM S-adenosylmethionine:tRNA ribosy ltransferase-isomerase OS=Aeromonas molluscorum 848 OX= 1268236 GN=queA PE=3 SV=1
MQVSDFSFELPDELIARYPMSERTASRLLQLDGDSGALRHGQFVDVLDLLNPGDLLVFNNTRVIPARMFGQKASGGKLEVLVERILDEKSVLAHVRASKAPKPGTRLILDGGVEAEMRARHDALFEIHFLDPRPVLDILDAIGHMPLPPYIDRPDEDADKERYQTVYNQKPGAVAAPTAGLHFDEPLLERIRAKGVETAFVTLHVGAGTFQPVRVDKIEDHHMHSEYAEVPQEVVDAIAATRARGGRVIAVGTTSVRSLESAAKATLAQGQPLAPFFSDTDIFIFPGYQFQVVDAMVTNFHLPESTLIMLVSAFAGYDNVMAAYQAAVAEQYRFFSYGDAMFVTRRRAKV

SEQ ID NO: 62950 - protein, 350 aa, Aeromonas rivipollensis
  misc_feature (1)..(350): tr|A0A2P1PGH6|A0A2P1PGH6_9GAMM S-adenosylmethionine:tRN A ribosyltransferase-isomerase OS=Aeromonas rivipollens is OX=948519 GN=queA PE=3 SV=1
MQVSDFHFDLPDELIARYPMAERTASRLLQLDGQSGALRHGQFVDVLDQLNPGDLLVFNNTRVIPARMFGQKASGGKLEVLVERILDEHSVLAHVRSSKSPKPGTRLILDGGVEAEMRARHDALFEIHFLDPRPVLEILEAIGHMPLPPYIDRPDEDADKERYQTVYNQKPGAVAAPTAGLHFDEPLLAKIRAKGVETAFVTLHVGAGTFQPVRVEKIEDHHMHSEYAEVPQEVVDAIAATRARGGRVIAVGTTSVRSLESAAKVTLAQGKPLAPFFSDTDIFIFPGYEFQIVDAMVTNFHLPESTLIMLVSAFAGYDQVMAAYQAAVEEQYRFFSYGDAMFVTRRQVEA

SEQ ID NO: 62951 - protein, 355 aa, Aeromonas salmonicida
  misc_feature (1)..(355): sp|A4SP27|QUEA_AERS4 S-adenosylmethionine:tRNA ribosylt ransferase-isomerase OS=Aeromonas salmonicida (strain A 449) OX=382245 GN=queA PE=3 SV=1
MQVSDFHFDLPDELIARYPMAERTASRLLQLDGQSGALRHGQFVDVLDQLNPGDLLVFNNTRVIPARMFGQKASGGKLEVLVERILDEHSVLAHVRASKAPKPGTRLILDGGPDGEKVDAEMRARHDALFEIHFLDPRPVLEILEAIGHMPLPPYIDRPDEDADKERYQTVYNQKPGAVAAPTAGLHFDEPLLAKIRAKGVETAFVTLHVGAGTFQPVRVDKIEDHHMHSEYAEVPQEVVDAIAATRARGGRVIAVGTTSVRSLESAAKASLALSKPLAPFFSDTDIFIFPGYQFQVVDAMVTNFHLPESTLIMLVSAFAGYDHVMAAYQAAVAEQYRFFSYGDAMFVTRRRAVA

SEQ ID NO: 62952 - protein, 355 aa, Aeromonas salmonicida; identical to SEQ ID NO: 62951
  misc_feature (1)..(355): tr|A0A4Y4YBI4|A0A4Y4YBI4_AERSA S-adenosylmethionine:tRN A ribosyltransferase-isomerase OS=Aeromonas salmonicida OX=645 GN=queA PE=3 SV=1

SEQ ID NO: 62953 - protein, 349 aa, Aeromonas schubertii
  misc_feature (1)..(349): tr|A0A0S2SKC3|A0A0S2SKC3_9GAMM S-adenosylmethionine:tRN A ribosyltransferase-isomerase OS=Aeromonas schubertii OX=652 GN=queA PE=3 SV=1
MQVSDFHFDLPDELIARYPTAVRTASRLLQLDGESGERRHGQFVDVLDLLNPGDLLVFNNTRVIPARLFGQKASGGKLEVLVERIIGDHAVLAHVRASKAPKPGTRLILDGGVEAEMRARHDALFEIHFLDPRPVLAILEAIGHMPLPPYIDRPDEDADKERYQTVYNAKPGAVAAPTAGLHFDQALLEQIRAKGVETAFVTLHVGAGTFQPVRVDKIEDHHMHSEYAEVPQEVVDAIAATRARGGRVIAVGTTSVRSLESAARVTLAQSQPLAPFFSDTDIFIYPGFEFQVVDAMVTNFHLPESTLIMLISAFAGYDNVMTAYREAVAEQYRFFSYGDAMFITRRRSR

SEQ ID NO: 62954 - protein, 349 aa, Aeromonas schubertii
  misc_feature (1)..(349): tr|A0A0W7U259|A0A0W7U259_9GAMM S-adenosylmethionine:tRN A ribosyltransferase-isomerase OS=Aeromonas schubertii OX=652 GN=queA PE=3 SV=1
MQVSDFHFDLPDELIARYPTAVRTASRLLQLDGESGERRHGQFVDVLDLLNPGDLLVFNNTRVIPARLFGQKASGGKLEVLVERIIGDHAVLAHVRASKAPKPGTRLILDGGVEAEMRARHDALFEIHFLDPRPVLAILEAIGHMPLPPYIDRPDEDADKERYQTVYNAKPGAVAAPTAGLHFDQALLEQIRAKGVETAFVTLHVGAGTFQPVRVDKIEDHHMHSEYAEVPQEVVDSIAATRARGGRVIAVGTTSVRSLESAARVTLAQGQPLVPFFSDTDIFIYPGFEFQVVDAMVTNFHLPESTLIMLISAFAGYDNVMTAYREAVAEQYRFFSYGDAMFITRRRSR

SEQ ID NO: 62955 - protein, 349 aa, Aeromonas simiae
  misc_feature (1)..(349): tr|A0A5J6WWS7|A0A5J6WWS7_9GAMM tRNA preQ1(34) S-adenosy lmethionine ribosyltransferase-isomerase QueA OS=Aeromo nas simiae OX=218936 GN=queA PE=4 SV=1
MQVSDFHFDLPDELIARYPTAVRTASRLLQLDGECGERRHGQFVDILGLLNPGDLLVFNNTRVIPARLFGQKASGGKLEMLVERIIDEHSVLAHVRASKAPKPGTRLIFDGGIEAEMRARHDALFEIHFLDPRPVLEILEAVGHMPLPPYIDRPDEDADKERYQTVYNAKPGAVAAPTAGLHFDEALLAQIRAKGVETAFVTLHVGAGTFQPVRVDKIEDHHMHSEYAEVPQEVVDAINATRARGGRVIAVGTTSVRSLESAARVTLAEGKPLAPFFSDTDIFIFPGYEFQVVDAMITNFHLPESTLIMLVSAFAGYDNVMAAYREAVAEQYRFFSYGDAMFVTRRRSR

SEQ ID NO: 62956 - protein, 355 aa, Aeromonas sobria
  misc_feature (1)..(355): tr|A0A2N3J3D6|A0A2N3J3D6_AERSO S-adenosylmethionine:tRN A ribosyltransferase-isomerase OS=Aeromonas sobria OX=6 46 GN=queA PE=3 SV=1
MQVSDFHFDLPNELIARYPMAERTASRLLQLDGQTGALRHGQFVDVLDQLNPGDLLVFNNTRVIPARMFGQKASGGKLEVLVERILDEHSVLAHVRASKAPKPGTRLIMDAGQDGKSVEAEMRARHDALFEIHFLDPRPVLEILEAIGHMPLPPYIDRPDEDADKERYQTVYNQKPGAVAAPTAGLHFDQALLEKIRAKGVETAFVTLHVGAGTFQPVRVDKIEDHHMHSEYAEVPQEVVDAIAATRARGGRVIAVGTTSVRSLESAAKVTLAQGKPLAPFFSDTDIFIFPGYQFQIVDAMVTNFHLPESTLIMLVSAFAGYDNVMAAYQAAVAGQYRFFSYGDAMFVTRRQVEA

SEQ ID NO: 62957 - protein, 355 aa, Aeromonas sobria
  misc_feature (1)..(355): tr|A0A2N3IWC5|A0A2N3IWC5_AERSO S-adenosylmethionine:tRN A ribosyltransferase-isomerase OS=Aeromonas sobria OX=6 46 GN=queA PE=3 SV=1
MQVSDFHFDLPNELIARYPMAERTASRLLQLDGQTGALRHGQFVDVLDQLKPGDLLVFNNTRVIPARMFGQKASGGKLEVLVERILDEHSVLAHVRASKAPKPGTRLIMDAGQDGKSVEAEMRARHDALFEIHFLDPRPVLEILEAIGHMPLPPYIDRPDEDTDKERYQTVYNQKPGAVAAPTAGLHFDQALLEKIRAKGVETVFVTLHVGAGTFQPVRVDKIEDHHMHSEYAEVSQEVVDAIAATRARGGRVIAVGTTSVRSLESAAKVTLAQGKPLAPFFSDTDIFIFPGYQFQIVDAMVTNFHLPESTLIMLVSAFAGYDNVMAAYQAAVAGQYRFFSYGDAMFVTRRQVEA

SEQ ID NO: 62958 - protein, 355 aa, Aeromonas sp.
  misc_feature (1)..(355): tr|A0A291TIB9|A0A291TIB9_9GAMM S-adenosylmethionine:tRN A ribosyltransferase-isomerase OS=Aeromonas sp. CU5 OX= 2033033 GN=queA PE=3 SV=1
MQVSDFHFDLPNELIARYPMAERTASRLLQLDGQTGALRHGQFVDVLDQLNPGDLLVFNNTRVIPARMFGQKASGGKLEVLVERILDEHSVLAHVRASKAPKPGTRLIMDAGQDGKSVEAEMRARHDALFEIHFLDPRPVLEILEAIGHMPLPPYIDRPDEDADKERYQTVYNQKPGAVAAPTAGLHFDEALLEKIRAKGVETAFVTLHVGAGTFQPVRVDKIEDHHMHSEYAEVPQEVVDAIAATRARGGRVIAVGTTSVRSLESAAKVTLAQGKPLAPFFSDTDIFIFPGYQFQIVDAMVTNFHLPESTLIMLVSAFAGYDNVMAAYQAAVAGQYRFFSYGDAMFVTRRRGEA

SEQ ID NO: 62959 - protein, 355 aa, Aeromonas sp.; identical to SEQ ID NO: 62936
  misc_feature (1)..(355): tr|A0A369SU19|A0A369SU19_9GAMM S-adenosylmethionine:tRN A ribosyltransferase-isomerase OS=Aeromonas sp. ARM81 O X=1747384 GN=queA PE=3 SV=1

SEQ ID NO: 62960 - protein, 355 aa, Aeromonas taiwanensis
  misc_feature (1)..(355): tr|A0A5F0KDF0|A0A5F0KDF0_9GAMM S-adenosylmethionine:tRN A ribosyltransferase-isomerase OS=Aeromonas taiwanensis OX=633417 GN=queA PE=3 SV=1
MQVSDFHFDLPDELIARYPMAERTASRLLQLDGQTGALRHGHFVDVLDQLNPGDLLVFNNTRVIPARMFGQKASGGKLEVLVERILDEHSVLAHVRSSKSPKPGTRLILDAGADGVPVEAEMRARHDALFEIHFLDPRPVLEILEAIGHMPLPPYIDRPDEDADKERYQTVYNQKPGAVAAPTAGLHFDEPLLERIRAKGIETAFVTLHVGAGTFQPVRVDKIEDHHMHSEYAEVPQEVVDAIAATRARGGRVVAVGTTSVRSLESAAKVTLAQGKPLAPFFSDTDIFIFPGYEFQVVDAMITNFHLPESTLIMLVSAFAGYDNVMTAYQAAVTGQYRFFSYGDAMFVTRRRAQA

SEQ ID NO: 62961 - protein, 350 aa, Aeromonas veronii
  misc_feature (1)..(350): tr|A0A318DIL5|A0A318DIL5_9GAMM S-adenosylmethionine:tRN A ribosyltransferase-isomerase OS=Aeromonas veronii OX= 654 GN=queA PE=3 SV=1
MQVSDFHFDLPDELIARYPMAERTASRLLQLDGQTGALRHGQFVDVLDQLNPGDLLVFNNTRVIPARMFGQKASGGKLEVLVERILDEHSVLAHVRASKAPKPGTRMIMDGGVEAEMRARHDALFEIHFLDPRPVLEILEAIGHMPLPPYIDRPDEDADKERYQTVYNQKPGAVAAPTAGLHFDEPLLEKIRAKGVETAFVTLHVGAGTFQPVRVEKIEDHHMHSEYAEVPQEVVDAIAATRARGGRVIAVGTTSVRSLESAAKVTLALGKPLAPFFSDTDIFIFPGYKFQIVDAMVTNFHLPESTLIMLVSAFAGYDNVMAAYQAAVAGQYRFFSYGDAMFVTRRQVEA

SEQ ID NO: 62962 - protein, 350 aa, Aeromonas veronii
  misc_feature (1)..(350): tr|A0A4R8UAL1|A0A4R8UAL1_9GAMM S-adenosylmethionine:tRN A ribosyltransferase-isomerase OS=Aeromonas veronii OX= 654 GN=queA PE=3 SV=1
MQVSDFHFDLPDELIARYPMAERTASRLLQLDGQTGALRHGQFVDVLDQLNPGDLLVFNNTRVIPARMFGQKASGGKLEVLVERILDEHSVLAHVRASKAPKPGTRMIMDGGVEAEMRARHDALFEIHFLDPRPVLEILDAIGHMPLPPYIDRPDEDADKERYQTVYNQKPGAVAAPTAGLHFDEPLLEKIRAKGVETAFVTLHVGAGTFQPVRVEKIEDHHMHSEYAEVPQEVVDAIAATRARGGRVIAVGTTSVRSLESAAKVTLALGKPLAPFFSDTDIFIFPGYKFQIVDAMVTNFHLPESTLIMLVSAFAGYDNVMAAYQAAVAGQYRFFSYGDAMFVTRRQVEA

SEQ ID NO: 62963 - protein, 348 aa, Aestuariibacter sp.
  misc_feature (1)..(348): tr|A0A506RUU0|A0A506RUU0_9ALTE S-adenosylmethionine:tRN A ribosyltransferase-isomerase OS=Aestuariibacter sp. G S-14 OX=2590670 GN=queA PE=3 SV=1
MKLSDFSFTLPEHLIAKYPTPDRTASRLLHLNGNTGEVAHSQFQHMLDLVQPGDLLVFNNTRVIPARMLGQKASGGKVEVLIERILDDHNALAHVRASKAPKPGADLLLENAVSVTVTGRQDALFELRFNGDATVLEQLEQYGHMPLPPYIDRPDENSDKERYQTVYNQAPGAVAAPTAGLHFDQQLLEKLKAKGVKLAYVTLHVGAGTFQPVRVDNILEHKMHSEFAIVPQEVVDAVRATKAAGKRVIAVGTTSVRSLESSALAASKDEILQVYQSDTDIFIYPGFEFKVVDAMFTNFHLPESTLIMLISAFAGRDNVLYAYEQAIQQEYRFYSYGDSMFIEKATNA

SEQ ID NO: 62964 - protein, 351 aa, Aestuariispira insulae
  misc_feature (1)..(351): tr|A0A3D9HXK9|A0A3D9HXK9_9PROT S-adenosylmethionine:tRN A ribosyltransferase-isomerase OS=Aestuariispira insula e OX=1461337 GN=queA PE=3 SV=1
MHVDLFDFELPQETIAQHPASPRDSARMLDLTGNGFADRIVRDLPDVLQPGDLLVCNDTKVIPTRITGKRGDATVEVTLHKQEAPNKWWAFARPAKKLRVGETFTVTDGFHAEVQEKRDGGEVLLAFNLSGNELITELWSHGIMPLPPYIRRTKGGDAAEEAEDRNDYQTLFAKEEGAVAAPTAGLHFTDELRSRLEAKGISFQTITLHVGAGTFLPMKVEDTRHHVMHSEFGVITQEEADIINKAKAEGRRIVSVGTTSMRLLESAATAEGIIKPFEGETDIFITPGYRFKAVDLLMTNFHLPKSTLFMLVSAFSGLDQMQAAYKHAIETGYRFYSYGDCCLLKCEADHA

SEQ ID NO: 62965 - protein, 352 aa, Aestuariivirga litoralis
  misc_feature (1)..(352): tr|A0A2W2CA40|A0A2W2CA40_9RHIZ S-adenosylmethionine:tRN A ribosyltransferase-isomerase OS=Aestuariivirga litora lis OX=2650924 GN=queA PE=3 SV=1
MRVSDFDFDLPPERIALRPANPRDSSKLLVVRPDGLEDRIFRQLPDLLRAGDVLVFNNTRVIPAALSGHRMGRLGTTPKIEALLHMRLDGSRWKAFVKPAKKLEKGDRVRFGAEGKVCLLGTLYATVEEKGEAGEVTLAFDFHGPALDEAIAAVGEMPLPPYIAGKRGTDAQDRSDYQTIYAVKEGAVAAPTAGLHFTPQVMERLQVSGISQEFVTLHVGAGTFLPVKAEDTRDHRMHAEWGEVTAATCERLKAARARGGRIVAVGTTSLRLLESSGLEPFSGTTEIFITPGYRFRATDLLVTNFHLPKSTLFMLVSAFAGLKRMRSAYAHAIANDYRFYSYGDSSLLFPAP

SEQ ID NO: 62966 - protein, 366 aa, Afifella marina
  misc_feature (1)..(366): tr|A0A1G5NGD0|A0A1G5NGD0_AFIMA S-adenosylmethionine:tRN A ribosyltransferase-isomerase OS=Afifella marina DSM 2 698 OX=1120955 GN=queA PE=3 SV=1
MRIDAFDFELPEERIALRPARPRDSARLLVVPSEGAFRDLRVFDLPALLEPGDLLVLNDTAVIPARLAGRRLPRTQDGQAIRVEATLIERLDQSHWMALAKPGRKLKPGDILRFGGEGETCLAGTLDARVVEKGEAGAITLGFSLSGPVLDEAIHGQGSMPLPPYIASRRQADAADLEDYQTIYAAKEGAVAAPTAGLHFTDDLLAALADKGVERRLVTLHVGAGTFLPVKSEETDDHVMHEEWGEVSEETAEAVNETRRRGGRVVAIGTTALRILESAGDENGLLRPFSGKTGIFITPGYRFRIIDRLFTNFHLPRSTLFMLVSAFSGLDRMKASYAHAIEEQYRFYSYGDASLLEPATPSIRPK

SEQ ID NO: 62967 - protein, 360 aa, Afipia broomeae
  misc_feature (1)..(360): tr|K8PI79|K8PI79_9BRAD S-adenosylmethionine:tRNA ribosy ltransferase-isomerase OS=Afipia broomeae ATCC 49717 OX =883078 GN=queA PE=3 SV=1
MRTDLFDFELPEGNIALRPVSPRDAARMLVVKPGQPLTDSTVSDLPLFLQPGDQLVVNDTKVIPAQLTGRRIGRETEPKIEATLIKRLDGSRWQALVKPAKKLTAGDAIRFGNEGRVCLLGNLDAEVESKGENGEVTLAFSFHGPILDQAIADVGAPPLPPYIASRRTPDERDAADYQTMFAVSEGAVAAPTAGLHFTPALEAALRDRGIGLNRVTLHVGAGTFLPVKADDTAGHKMHSEWGTVSSETAAALNQARTRGGRIVAVGTTSLRLLESAAADDGTIQPFSDDTAIFITPGYRFKAVDILMTNFHLPRSTLFMLVSAFSGLETMQKAYAHAIETGYRFYSYGDASLLFRNQPDR

SEQ ID NO: 62968 - protein, 358 aa, Afipia broomeae
  misc_feature (1)..(358): tr|A0A2M8ZI10|A0A2M8ZI10_9BRAD S-adenosylmethionine:tRN A ribosyltransferase-isomerase OS=Afipia broomeae OX=56 946 GN=queA PE=3 SV=1
MRTDLFDFELPPDSIALRPASPRDSARMLIVQPEAVLRDRSVADLPQWLEPGDQLVVNDTKVIAAQLAGRRIGRDTEPKIEATLIKRLDGSRWQALVKPAKKLAQGDVVRFGNEGRVCLLGHLDAEVEHKGDSGEITLSFSFHGPTLDQAIADLGSPPLPPYIASKRTPDERDAEDYQTMFAAKEGAVAAPTAGLHFTPALEMALRDRGVGLHRITLHVGAGTFLPVKVEDTVGHKMHAEWGVITGDTAAALNEARARGGRIVAVGTTSLRLLESATAEDGTIEPFADDTSIFITPGYRFRAVDILLTNFHLPRSTLFMLVSAFSGLDTMKRAYAHAIASGYRFYSYGDACLLFRANE

SEQ ID NO: 62969 - protein, 373 aa, Afipia clevelandensis
  misc_feature (1)..(373): tr|K8PHX9|K8PHX9_9BRAD S-adenosylmethionine:tRNA ribosy ltransferase-isomerase OS=Afipia clevelandensis ATCC 49 720 OX=883079 GN=queA PE=3 SV=1
MDGRAYVPAIDILSIMRTDLFDFELPEANIALRPVSPRDAARMLVVKPDQPLIDAIVSDLPRFLQPGDQLVVNDTKVIPAQLTGRRIGRETEPKIEATLIKRFDGSRWQALVKPAKKLAQGDVIRFGNEGRVCLLGNLDAQVEHKGENGEVTLSFSFHGPILDQAIADVGAPPLPPYIASRRTPDERDNADYQTMFAVSEGAVAAPTAGLHFTPGLEAALRARGVGLHRVTLHVGAGTFLPVKADDTAEHKMHAEWGTVSVETAAALNEARAKGGRIVAVGTTSLRLLESAAADDGTIKPFTAETAIFITPGYRFKAVDVLMTNFHLPRSTLFMLVSAFSGLETMQQAYAHAIGSGYRFYSYGDASLLFRRST

SEQ ID NO: 62970 - protein, 361 aa, Afipia felis
  misc_feature (1)..(361): tr|A0A380W9U7|A0A380W9U7_AFIFE S-adenosylmethionine:tRN A ribosyltransferase-isomerase OS=Afipia felis OX=1035 GN=queA PE=3 SV=1
MRTDLFDFDLPPESIALRPVEPRESARLLVVRPRVGLEDYTVRDLPDLLRAGDQLVVNDTKVIAAQLSGRRIGGATEPRIDVTLIKRVDGSRWQALVRPARKLAEGDVVRFGNEGRVCLLGTLDATVEAKGEAGEITLAFAFHGPVLDQAIADLGAPPLPPYIASRRAPDEKDVGDYQTMFAKHEGAVAAPTAGLHFTPALEAALASRGIGVQRLTLHVGAGTFLPVKADDTEDHKMHSEWGSISAETADVLNNARAKGGRIVAVGSTAMRLLESAADENGTIQPFTGETAIFITPGYRFRAVDVMMTNFHLPRSTLFMLVSAFSGLETMRASYAHAIEKGYRFYSYGDACLLFADKGHAA

SEQ ID NO: 62971 - protein, 361 aa, Afipia felis
  misc_feature (1)..(361): tr|A0A090MKJ8|A0A090MKJ8_AFIFE S-adenosylmethionine:tRN A ribosyltransferase-isomerase OS=Afipia felis OX=1035 GN=queA PE=3 SV=1
MRTDLFDFDLPPESIALRPVEPRESARLLVVRPGDGLDDYTVRDLPDLLRAGDQLVVNDTKVIAAQLAGRRVGGATEPRIDVTLIKRVDGSRWQALVRPARKLAEGDVVRFGNEGRVCLLGNLDATVEAKGEAGEITLSFAFHGPVLDQAIADLGAPPLPPYIASRRAPDEKDVGDYQTMFAKHEGAVAAPTAGLHFTPALEAALQARGIGVQRLTLHVGAGTFLPVKTDDTADHKMHAEWGTISAETACTLNEARAKGGRIVAVGSTAMRLLESAADENGTIQPFTGETAIFITPGYRFRAVDVMMTNFHLPRSTLFMLVSAFSGLETMQAAYAHAIEKGYRFYSYGDACLLFADTGHAA

SEQ ID NO: 62972 - protein, 358 aa, Afipia massiliensis
  misc_feature (1)..(358): tr|A0A4U6BS54|A0A4U6BS54_9BRAD S-adenosylmethionine:tRN A ribosyltransferase-isomerase OS=Afipia massiliensis O X=211460 GN=queA PE=3 SV=1
MRTDLFDFELPEANIALRPVSPRDTARMLVVTPGKPLAEATVSDLPRFLQPGDQLVVNDTKVIPAQLTGRRVGRETEPKIEATLIKRIDGSRWQALVKPAKKLAAGDAIRFGNEGRVCLLGNLDAQVEHKGENGEVTLSFSFHGPILDQAIADVGAPPLPPYIASRRTPDERDTADYQTMFAVSEGAVAAPTAGLHFTPALEAALRDRGIGLHRVTLHVGAGTFLPVKADDTSSHKMHAEWGTVSGETATALNDARAKGGRVVAIGTTSLRLLESAAADNGTIQPFTGETAIFITPGYRFKAVDVLMTNFHLPRSTLFMLVSAFSGLETMQQAYAHAISTGYRFYSYGDACLLFRQST

SEQ ID NO: 62973 - protein, 358 aa, Afipia sp.
  misc_feature (1)..(358): tr|A0A1G9WYS9|A0A1G9WYS9_9BRAD S-adenosylmethionine:tRN A ribosyltransferase-isomerase OS=Afipia sp. GAS231 OX= 1882747 GN=queA PE=3 SV=1
MRTDLFDFELPAANIALRPASPRDSARMLVVQPDGVLRDRTVGELPQWLEPGDQLVVNDTKVISAQLKGRRIGRDTEPKIEATLIKRLDGSRWQALVKPAKKLAPGDVVRFGNEGKVCLLGHLDATVEAKGEEGEITFSFSFHGPTLDQAIEDLGTPPLPPYIASKRTPDEQDAADYQTMFAAREGAVAAPTAGLHFTPALEAALRARGVELHRLTLHVGAGTFLPVKVDDTAGHKMHAEWGSISAETAAALNAARARGGRIVAVGTTSLRLLESAAAEDGTIQPFSAETSIFITPGYRFRAVDILLTNFHLPRSTLFMLVSAFSGLETMKAAYAHAIAGGYRFYSYGDACLLFRAES

SEQ ID NO: 62974 - protein, 358 aa, Afipia sp.
  misc_feature (1)..(358): tr|W3RG95|W3RG95_9BRAD S-adenosylmethionine:tRNA ribosy ltransferase-isomerase OS=Afipia sp. P52-10 OX=1429916 GN=queA PE=3 SV=1
MRTDLFDFELPPDRIALRPASPRDAARLLVVKPGEGLADRSVRDLPDYLRAGDQLVVNDTKVIAAQLSGRRIGREPEPRIEATLIKRIDGSRWQAFAKPAKRLAVGDVVRFGSEGRVCFLGQLDATVEAKGEAGEVTLAFTFHGPVLDQAIAEMGAPPLPPYIASKREADDQDATDYQTMFAREEGAVAAPTAGLHFTPELEAALTAKGVAIRRVTLHVGAGTFLPVKADDTAGHTMHAEWGTVSMETAEALNAAKRNGGRIVAVGSTSLRLLESAADEDGTIHPFSGETAIFITPGYRFRAVDLMMTNFHLPRSTLFMLVSAFSGLETMQAAYAHAIASGYRFYSYGDASLLFRAEA

SEQ ID NO: 62975 - protein, 348 aa, Agarivorans albus
  misc_feature (1)..(348): tr|R9PJF9|R9PJF9_AGAAL S-adenosylmethionine:tRNA ribosy ltransferase-isomerase OS=Agarivorans albus MKT 106 OX= 1331007 GN=queA PE=3 SV=1
MRVADFSFELPDELIARYPKQQRRDSRLLCLNGNTGELQHQQFPELLNHIQANDLLVFNNTRVIPARLFGQKASGGKLEVLIERVLDEHRVLAHVRCSKSPKPGSALRLADAFDATMLARHDSLFELRFDDQRTVLELLEAYGHMPLPPYIDRPDEDADKERYQTVYNEKPGAVAAPTAGLHFDDALMQQIQDKGADIAFVTLHVGAGTFQPVKVESVDEHVMHSEYAEVGDDVVAKIAKAKAAGGRVIAVGTTSVRSLESAAKDAKAKGQALQAYAAETDIFIYPGYQFELVDAMVTNFHLPESTLIMLISAFAGKDNVTKAYQAAIEQRYRFFSYGDAMFIERKDA

SEQ ID NO: 62976 - protein, 348 aa, Agarivorans sp.
  misc_feature (1)..(348): tr|A0A4D4IRQ1|A0A4D4IRQ1_9ALTE S-adenosylmethionine:tRN A ribosyltransferase-isomerase OS=Agarivorans sp. Toyou ra001 OX=2283141 GN=queA PE=3 SV=1
MRVADFSFDLPDELIARYPKQQRRDSRLLYLNGNSGELQHQQFPDLLDHIQENDLLVFNNTRVIPARLFGQKSTGGKLEVLIERVLDDRRVLAHVRCSKSPKPGNQLRLADAFDATMIARHDALFELRFDDTRTVLELLESYGHMPLPPYIDRPDEDADKERYQTVYNEKPGAVAAPTAGLHFDDALMQQIKDKGADTAFVTLHVGAGTFQPVKVESVDEHVMHSEYAEVGQEVVSKIAKAKAAGGRVIAVGTTSVRSLESAAKDAKSKGVELQAYAAETDIFIFPGYQFEVVDAMVTNFHLPESTLIMLVSAFAGKDHVTQAYQAAIDNQYRFFSYGDAMFITRKDA

SEQ ID NO: 62977 - protein, 352 aa, Agathobacter rectalis; identical to SEQ ID NO: 62553
  misc_feature (1)..(352): tr|C4ZBJ2|C4ZBJ2_AGARV S-adenosylmethionine:tRNA ribosy ltransferase-isomerase OS=Agathobacter rectalis (strain ATCC 33656 / DSM 3377 / JCM 17463 / KCTC 5835 / VPI 09 90) OX=515619 GN=queA PE=3 SV=1

SEQ ID NO: 62978 - protein, 345 aa, Agathobacter ruminis
  misc_feature (1)..(345): tr|A0A2G3E5J0|A0A2G3E5J0_9FIRM S-adenosylmethionine:tRN A ribosyltransferase-isomerase OS=Agathobacter ruminis OX=1712665 GN=queA PE=3 SV=1
MDVKDFYYDLPQELIAQDPLEDRSSSRLMVLNRTTGAVTHKIFSDIIDYLNPGDCLVLNNTKVIPARLFGVKEETGAHVEVLLLKRKENDNWECLVRPGKKLKPGAKVIFGDGLLHGEITDVLEEGNREIHFTYEGIFEEILDQLGQMPLPPYITHELKDKNRYQTVYAKYDGSAAAPTAGLHFTKELLQKVKDKGVLIAEVTLHVGLGTFRPVKVENVLDHHMHSEYYQITQEAADLINQTKANGHRVISVGTTSTRTLESAADENGFLKATSGWTQIFIYPGYQFKVIDCLITNFHLPESTLVMLVSALAGREHVLAAYEEAVKERYRFFSFGDAMFITDDEK

SEQ ID NO: 62979 - protein, 341 aa, Agathobaculum butyriciproducens
  misc_feature (1)..(341): tr|A0A2U1BBW3|A0A2U1BBW3_9FIRM S-adenosylmethionine:tRN A ribosyltransferase-isomerase OS=Agathobaculum butyric iproducens OX=1628085 GN=queA PE=3 SV=1
MKKSDFYFDLPERLIAQHPLEQRDASRLMVLDRRDGSVTHRHFRDLLEYVQPGDCMVFNNSRVIPARLMGHAVGHVTPIEVLLLTDKGDGLWECLTRPGKKTRTGVELTFGDGLLTATVEAVQPDGNRLIRFHYEGIFLEILDKLGTMPLPPYIKEKLDDPERYQTVYSKTPGSAAAPTAGLHFTTELLDALKAKGVKLAFVTLHVGLGTFRPVKEDEITDHIMHSEYYIMDEETAGIINDTRAAGGKIWAVGTTATRTLETIAADDGTVRAQSGWTDIFIYPGYKFKAVDHLVTNFHLPESTLMMLISAFATREMVMNAYQEAIKEEYRFFSFGDSMLLY

SEQ ID NO: 62980 - protein, 363 aa, Aggregatibacter actinomycetemcomitans
  misc_feature (1)..(363): tr|H0KHC0|H0KHC0_AGGAC S-adenosylmethionine:tRNA ribosy ltransferase-isomerase OS=Aggregatibacter actinomycetem comitans RhAA1 OX=1089447 GN=queA PE=3 SV=1
MRVADFYFDLPDELIARYPKAERTASRLLQLNGENGEIFHRTFADVLELINPGDLMIFNNTRVIPARMFGRKISGGKIEVLVERVLSDSRFLAHVRASKAPKEGAELILGEDKLGEGNGVNATMIGRQGSLFEIEITEKQTALFDVLQKIGHMPLPPYIDRPDEEADQERYQTVYNKVPGAVAAPTAGLHFDDELLAQLNAKGVNFAFVTLHVGAGTFQPVRVENIEDHVMHVEYVEVPQKVCDAILATKKAGKRVIAVGTTSVRSIESAALAAEEKQSAVLIEPYFSDTSIFIYPGKSFRVVDCLITNFHLPESTLIMLVSAFAGFSHTMNAYKSAVENRYRFFSYGDAMFISKNPDVKGLE

SEQ ID NO: 62981 - protein, 363 aa, Aggregatibacter actinomycetemcomitans
  misc_feature (1)..(363): tr|A0A142FYC7|A0A142FYC7_AGGAC S-adenosylmethionine:tRN A ribosyltransferase-isomerase OS=Aggregatibacter actin omycetemcomitans OX=714 GN=queA PE=3 SV=1
MRVADFYFDLPDELIARYPKTERTASRLLQLDGENGEIFHRTFADVLELINPGDLMIFNNTRVIPARMFGRKSSGGKIEVLVERVLSESRFLAHVRASKAPKEGTELILGEDKLGEGHGVNAVMVGRQGSLFEIEITEKQTALFDVLQKIGHMPLPPYIDRPDEEADQERYQTVYNKVPGAVAAPTAGLHFDDELLAKLNAKGVNFAFVTLHVGAGTFQPVRVENIEDHVMHAEYVEVPQEVCDAILATQKAGKRVIAVGTTSVRSIESAALAAEQKKSAVLIEPYFSDTSIFIYPGKSFRVVDCLITNFHLPESTLIMLVSAFAGFSHTMNAYKSAVENRYRFFSYGDAMFISKNPDVKGLK

SEQ ID NO: 62982 - protein, 363 aa, Aggregatibacter aphrophilus
  misc_feature (1)..(363): tr|A0A3S4Q6K5|A0A3S4Q6K5_AGGAP S-adenosylmethionine:tRN A ribosyltransferase-isomerase OS=Aggregatibacter aphro philus ATCC 33389 OX=985008 GN=queA PE=3 SV=1
MRVADFNFDLPDELIARYPKPERTASRLLQLNGENGEIFHRTFADVLDLIQPGDLVVFNNTRVIPARMFGRKTSGGKLEVLVERVLSESRFLAHVRSSKAPKAGAELILGEDKLGEGNGVKAIMLGRQDSLFEIEIAEKQTALFDVLQQIGHMPLPPYIDRPDEEADQERYQTVYNKVPGAVAAPTAGLHFDDELLAKLKEKGVNFAFVTLHVGAGTFQPVRVENIEDHVMHAEYVEVPQSVCDAILTTKQAGKRVIAVGTTSVRSIESAALAAEEKQSAVLIEPYFSDTSIFIYPGKKFRIVDCLITNFHLPESTLIMLVSAFAGFSHTMNAYKSAVENRYRFFSYGDAMFINKNPNVKGLE

SEQ ID NO: 62983 - protein, 305 aa, Aggregatibacter aphrophilus
  misc_feature (1)..(305): tr|A0A336N4P8|A0A336N4P8_AGGAP S-adenosylmethionine:tRN A ribosyltransferase-isomerase OS=Aggregatibacter aphro philus OX=732 GN=queA PE=3 SV=1
MRVADFNFDLPDELIARYPKPERTASRLLQLNGENGEIFHRTFADVLDLIQPGDLVVFNNTRVIPARMFGRKTSGGKLEVLVERVLSESRFLAHVRSSKAPKAGAELILGEDKLGEGNGVKAIMLGRQDSLFEIEIAEKQTALFDVLQQIGHMPLPPYIDRPDEEADQERYQTVYNKVPGAVAAPTAGLHFDDELLAKLKEKGVNFAFVTLHVGAGTFQPVRVENIEDHVMHAEYVEVPQSVCDAILTTKQAGKRVIAVGTTSVRSIESAALAAEEKQSAVLIEPYFSDTSILFTQAKSSASWIV

SEQ ID NO: 62984 - protein, 363 aa, Aggregatibacter segnis
  misc_feature (1)..(363): tr|E6KYW1|E6KYW1_9PAST S-adenosylmethionine:tRNA ribosy ltransferase-isomerase OS=Aggregatibacter segnis ATCC 3 3393 OX=888057 GN=queA2 PE=3 SV=1
MRVADFYFDLPDELIARYPKTERTASRLLQLNGENGDIFHRTFADVLELIHPGDLMIFNNTRVIPARMFGRKISGGKIEVLVERVLSESRFLAHVRASKAPKEGAELILGEDKLGEGNGVKALMVGRQGSLFEIEIAEKQTALFDVLQQIGHMPLPPYIDRPDEEADQERYQTVYNKVPGAVAAPTAGLHFDDELLAKLKEKGVNFAFVTLHVGAGTFQPVRVENIEDHVMHAEYVEVSQEVCDAIFATKKAGKRVIAVGTTSVRSIESAALAAEEKQRDVLIEPYFSDTSIFIYPGKKFRVVDCLITNFHLPESTLIMLVSAFAGFSHTMNAYKSAVENRYRFFSYGDAMFISKNPHVKGME

SEQ ID NO: 62985 - protein, 363 aa, Aggregatibacter segnis
  misc_feature (1)..(363): tr|A0A369Y7S0|A0A369Y7S0_9PAST S-adenosylmethionine:tRN A ribosyltransferase-isomerase OS=Aggregatibacter segni s OX=739 GN=queA PE=3 SV=1
MRVADFYFDLPDELIARYPKTERTASRLLQLNGENGDIFHRTFADVLELIHPGDLMIFNNTRVIPARMFGRKISGGKIEVLVERVLSESRFLAHVRASKAPKEGAELILGEDKLGEGNGVKATMIGRQGSLFEIEIAEKQTALFDVLQQIGHMPLPPYIDRPDEEADQERYQTVYNKVPGAVAAPTAGLHFDDELLAKLKEKGVNFAFVTLHVGAGTFQPVRVENIEDHVMHAEYVEVPQEVCDAILATKKAGKRVIAVGTTSVRSIESAALAAEEKQAATLIEPYFSDTSIFIYPGKQFRVVDCLITNFHLPESTLIMLVSAFAGFRHTMNAYKSAVENHYRFFSYGDAMFISKNPNVKGME

SEQ ID NO: 62986 - protein, 363 aa, Aggregatibacter sp.
  misc_feature (1)..(363): tr|U1S4E4|U1S4E4_9PAST S-adenosylmethionine:tRNA ribosy ltransferase-isomerase OS=Aggregatibacter sp. oral taxo n 458 str. W10330 OX=1321772 GN=queA PE=3 SV=1
MRVADFYFDLPDELIARYPKTERTASRLLQLNGENGDIFHRTFADVLELIHPGDLMIFNNTRVIPARMFGRKISGGKIEVLVERVLSESRFLAHVRASKAPKEGAELILGEDKLGEGNGVKALMVGRQGSLFEIEIAEKQTALFDVLQQIGHMPLPPYIDRPDEEADQERYQTVYNKVPGAVAAPTAGLHFDDELLAKLKEKGVNFAFVTLHVGAGTFQPVRVENIEDHVMHAEYVEVPQEVCDAILATKKAGKRVIAVGTTSVRSIESAALAAEEKQGAALIEPYFSDTSIFIYPGKKFRIVDCLITNFHLPESTLIMLVSAFAGFSHTMNAYKSAVENRYRFFSYGDAMFISKNPNVKGME

SEQ ID NO: 62987 - protein, 343 aa, Agitococcus lubricus
  misc_feature (1)..(343): tr|A0A2T5J102|A0A2T5J102_9LACT S-adenosylmethionine:tRN A ribosyltransferase-isomerase OS=Agitococcus lubricus OX=1077255 GN=queA PE=3 SV=1
MQLSDFSYHLPDELIARYPLAQRSASRLLYLSQQGVQHKQVVDLPSLIKPNDLLVFNDTRVLAARLYGQKSSGGKVEVLIERIINDDTALVHLRASKSPKAGAQLLFANGQVQAQMLDRVEDLFKLQFSQPIRGVLAQYGEMPLPPYLNRQVEQADSERYQTVYSDPNKQNSVAAPTAGLHFDEALLANINAVGANFAYVTLHVGAGTFRPVKTEDIRDHQMHSEWLNVPQETVQAIKDTKAKGGRVIAIGTTSVRALESAALYNEGQLKAWSGETQIFIYPSYQWKVVDALFTNFHLPESTLLMLVCAFAGKEAVMNAYAQAVEQKYRFFSYGDAMFVEKSG

SEQ ID NO: 62988 - protein, 364 aa, Agrobacterium albertimagni
  misc_feature (1)..(364): tr|K2QSD4|K2QSD4_9RHIZ S-adenosylmethionine:tRNA ribosy ltransferase-isomerase OS=Agrobacterium albertimagni AO L15 OX=1156935 GN=queA PE=3 SV=1
MRVDLFDFDLPDDNIALRPASPRDHARFLVVRPEDEPVLEDHHVYDLPSFLRPGDALVFNDTKVIPAQLEGIRHREGAEEIAVSCTLHMRVSTSRWKAFAKPGKRIKQGDRIDFGVGQGESAACLAGSLVATVAEKGEAGEITLAFDLSGPDLDQAIATVGHIPLPPYIAAKRPEDEKDRADYQTIYAREEGAVAAPTAGLHFTPDLFAKLDAAGIERHFVTLHVGAGTFLPVKADDTAEHKMHEEIGHIDAKTAAALNAVRARGNRIIAVGTTSLRLLESAAEDNGHIPAWSGATGIFITPGYRFKAVDLLMTNFHLPKSTLFMLVSAFAGLDTMRQAYAHAIETGYRFYSYGDSSLLFRKDD

SEQ ID NO: 62989 - protein, 360 aa, Agrobacterium arsenijevicii
  misc_feature (1)..(360): tr|A0A0D8KM89|A0A0D8KM89_9RHIZ S-adenosylmethionine:tRN A ribosyltransferase-isomerase OS=Agrobacterium arsenij evicii OX=1585697 GN=queA PE=3 SV=1
MRVDLFDFDLPEENIALRPANPRDSARLLVVDPNVGRMEDHRVFDLISFLKPGDALVFNDTRVIPAQLEGVRLREGAPETQVSATLHMRADQSRWKAFARPGKRIKQGDRIRFGYERDNACGLAHLEATVEEKGEEGEITLLFDVSGPVLDEAIASVGHIPLPPYIAAKRPEDAQDQTDYQTIYAREKGAVAAPTAGLHFTPDLFEALDKAGIERHFVTLHVGAGTFLPVKSDDTDDHKMHFEIGHVSEETAAKLNAVKARGGRIVSVGTTSLRLIESATDENGVVQPWSGATGIFITPGYKFRAVDILMTNFHLPKSTLFMLVSAFCGLETMRDAYAHAIESGYRFYSYGDSSLLFRKN

SEQ ID NO: 62990 - protein, 360 aa, Agrobacterium bohemicum
  misc_feature (1)..(360): tr|A0A135P6A2|A0A135P6A2_9RHIZ S-adenosylmethionine:tRN A ribosyltransferase-isomerase OS=Agrobacterium bohemic um OX=2052828 GN=queA PE=3 SV=1
MRVDLFDFDLPDDNIALRPASPRDSARLLVVDPNAGSMADHQVFDLPSFLKPGDALVFNDTRVIPAQLEGVRLREGAPETAVSATLHMRTDASRWKAFARPGKRIKQGDRIRFGYERDNACSLAFLEATVEEKGEEGEITLLFDVSGPVLDEAIASVGHIPLPPYIAAKRPEDAQDQTDYQTIYAREKGAVAAPTAGLHFTPELFEKLDQAGVERHFVTLHVGAGTFLPVKADDTEEHKMHLEIGYVSEETAAKLNAVKARGGRIICVGTTSLRLIESAATDEGQIKPWSGPTGIFITPGYRFKAVDILMTNFHLPKSTLFMLVSAFCGLDTMRNAYAHAISTGYRFYSYGDSSLLFRKI

SEQ ID NO: 62991 - protein, 360 aa, Agrobacterium deltaense
  misc_feature (1)..(360): tr|A0A1S7TKI3|A0A1S7TKI3_9RHIZ S-adenosylmethionine:tRN A ribosyltransferase-isomerase OS=Agrobacterium deltaen se NCPPB 1641 OX=1183425 GN=queA PE=3 SV=1
MRVDLFDFDLPEENIALRPANPRDSARLLVVDPNENRMEDHRVFDLPSFLKPGDALVFNDTRVIPAQLEGVRLREGAPETAVSATLHMRADQSRWKAFARPGKRIKQGDRIRFGYERDNACGFAHLEATVEEKGEEGEITLLFDVSGPVLDEAIASVGHIPLPPYIAAKRPEDAQDQTDYQTIYAREKGAVAAPTAGLHFTPDLFAALDKVGIERHFVTLHVGAGTFLPVKSDDTDDHKMHFEVGHVSQETADRLNAVKARGGRIVCVGTTSLRLIESAADENGVVHPWSDATGIFITPGYRFRAVDILMTNFHLPKSTLFMLVSAFCGLETMRDAYKHAIETGYRFYSYGDSSLLFRKN

SEQ ID NO: 62992 - protein, 360 aa, Agrobacterium deltaense
  misc_feature (1)..(360): tr|A0A1S7P9V1|A0A1S7P9V1_9RHIZ S-adenosylmethionine:tRN A ribosyltransferase-isomerase OS=Agrobacterium deltaen se Zutra 3/1 OX=1183427 GN=queA PE=3 SV=1
MRVDLFDFDLPEENIALRPANPRDSARLLVIDPNEDRMEDHRVFDLPSFLKPGDALVFNDTRVIPAQLEGVRLREGAPETAVSATLHMRTDQSRWKAFARPGKRIKQGDRIRFGYERDNACGLAHLEATVEEKGEDGEITLLFDVSGPVLDEAIASVGHIPLPPYIAAKRPEDAQDQTDYQTIYAREKGAVAAPTAGLHFTPDLFAALDKVGIERHFVTLHVGAGTFLPVKSDDTDDHKMHFEIGHVSQETADRLNAVKARGGRIVCVGTTSLRLIESAADENGVIHPWSDATGIFITPGYRFRAVDILMTNFHLPKSTLFMLVSAFCGLETMRDAYRRAIETGYRFYSYGDSSLLFRKN

SEQ ID NO: 62993 - protein, 366 aa, Agrobacterium fabrum
  misc_feature (1)..(366): sp|Q8UES7|QUEA_AGRFC S-adenosylmethionine:tRNA ribosylt ransferase-isomerase OS=Agrobacterium fabrum (strain C5 8 / ATCC 33970) OX=176299 GN=queA PE=3 SV=2
MRVDLFDFDLPEENIALRPANPRDSARLLVVDPNENRMEDHRVFDLPSFLRPGDALVFNDTRVIPAQLEGVRLREGAPETAVSATLHMRADQSRWKAFARPGKRIKEGDRIRFGYDRDTVNSSSGACGLAHLEATVEEKGEEGEITLLFDISGPVLDEAIASVGHIPLPPYIAAKRPEDQQDQTDYQTIYAREKGAVAAPTAGLHFTPDLFEALDSAGIERHFVTLHVGAGTFLPVKSDDTDDHKMHFEIGYVSQETADRLNAVKARGGRIVCVGTTSLRLIESAATEDGTIHPWSDATGIFITPGYRFRAVDMLMTNFHLPKSTLFMLVSAFCGLETMRDAYRHAIETGYRFYSYGDSSLLFRKN

SEQ ID NO: 62994 - protein, 366 aa, Agrobacterium fabrum
  misc_feature (1)..(366): tr|A0A3G2D445|A0A3G2D445_9RHIZ S-adenosylmethionine:tRN A ribosyltransferase-isomerase OS=Agrobacterium fabrum OX=1176649 GN=queA PE=3 SV=1
MRVDLFDFDLPEENIALRPANPRDSARLLVVDPNENRMEDHRVFDLPSFLRPGDALVFNDTRVIPAQLEGVRLREGAPETAVSATLHMRADQSRWKAFARPGKRIKEGDRIRFGYERDTVNSSSGACGLAHLEATVEEKGEEGEITLLFDVSGPVLDEAIASIGHIPLPPYIAAKRPEDQQDQTDYQTIYAREKGAVAAPTAGLHFTPDLFEALDSAGIERHFVTLHVGAGTFLPVKSDDTDDHKMHFEIGYVSQETADRLNAVKARGGRIVCVGTTSLRLIESAATEDGTIHPWSDATGIFITPGYRFRAVDMLMTNFHLPKSTLFMLVSAFCGLETMRDAYKHAIETGYRFYSYGDSSLLFRKN

SEQ ID NO: 62995 - protein, 360 aa, Agrobacterium genomosp.
  misc_feature (1)..(360): tr|A0A1S7P9Q6|A0A1S7P9Q6_9RHIZ S-adenosylmethionine:tRN A ribosyltransferase-isomerase OS=Agrobacterium genomos p. 3 str. CFBP 6623 OX=1183432 GN=queA PE=3 SV=1
MRVDLFDFDLPEENIALRPANPRDSARLLVVDPNENRMEDHRVFDLPSFLRPGDALVFNDTRVIPAQLEGVRLREGAPETAVSATLHMRADQSRWKAFARPGKRIKEGDRIRFGYERDNACGLAHLEATVEAKGEDGEITLLFDVSGPVLDEAIASVGHIPLPPYIAAKRPEDAQDQSDYQTIYAREKGAVAAPTAGLHFTPDLFAALDKAGIERHFVTLHVGAGTFLPVKSDDTDDHKMHFEIGQVSQETADRLNAVKARGGRIVCVGTTSLRLIESAADENGVIHPWSDATGIFITPGYRFRAVDILMTNFHLPKSTLFMLVSAFCGLETMRDAYKRAIETGYRFYSYGDSSLLFRKN

SEQ ID NO: 62996 - protein, 360 aa, Agrobacterium genomosp.
  misc_feature (1)..(360): tr|A0A1S7MA46|A0A1S7MA46_9RHIZ S-adenosylmethionine:tRN A ribosyltransferase-isomerase OS=Agrobacterium genomos p. 2 str. CFBP 5494 OX=1183436 GN=queA PE=3 SV=1
MRVDLFDFDLPEENIALRPANPRDSARLLVVDPNENRMEDHRVFDLPSFLRAGDALVFNDTRVIPAQLEGVRLREGAPETAVSATLHMRADQSRWKAFARPGKRIKQGDRIRFGYERDNACGLAHLEATVEQKGEEGEITLLFDVSGPVLDEAIASIGHIPLPPYIAAKRPEDAQDQTDYQTIYAREKGAVAAPTAGLHFTPDLFAALDKAGIERHFVTLHVGAGTFLPVKADDTDDHKMHFEIGHVSQETADRLNAVKARGGRIVCVGTTSLRLIESAAAEDGTIHPWSDATGIFITPGYRFRAVDMLMTNFHLPKSTLFMLVSAFCGLETMRDAYKHAIETGYRFYSYGDSSLLFRKN

SEQ ID NO: 62997 - protein, 360 aa, Agrobacterium larrymoorei
  misc_feature (1)..(360): tr|A0A4D7DNP5|A0A4D7DNP5_9RHIZ S-adenosylmethionine:tRN A ribosyltransferase-isomerase OS=Agrobacterium larrymo orei OX=160699 GN=queA PE=3 SV=1
MRVDLFDFDLPEENIALRPANPRDSARLLVVDPNTDRMTDHQVFDLPTFLKPGDALVFNDTRVIPAQLEGVRLREGAQETAVSATLHMRADASRWKAFARPGKRIKQGDRIRFGYERDNACGLAFLEATVEEKGDEGEITLLFDVSGPALDEAIASVGHIPLPPYIAAKRPEDAQDQTDYQTIYAREKGAVAAPTAGLHFTPALFEALDKAGIERHFVTLHVGAGTFLPVKADDTADHKMHLEIGYVSEETAEKLNAVKARGGRIICVGTTSLRLIESAAGDDGQILPWSGATGIFITPGYRFKAVDILMTNFHLPKSTLFMLVSAFCGLETMRAAYAHAIETGYRFYSYGDSSLLFRKI

SEQ ID NO: 62998 - protein, 360 aa, Agrobacterium larrymoorei
  misc_feature (1)..(360): tr|A0A4Z1PUI3|A0A4Z1PUI3_9RHIZ S-adenosylmethionine:tRN A ribosyltransferase-isomerase OS=Agrobacterium larrymo orei OX=160699 GN=queA PE=3 SV=1
MRVDLFDFDLPEENIALRPANPRDSARLLVVDPNTDRMTDHQVFDLPTFLKPGDALVFNDTRVIPAQLEGVRLREGAQETAVSATLHMRADASRWKAFARPGKRIKQGDRIRFGYERDNACGLAFLEATVEEKGDEGEITLLFDVSGPVLDEAIASVGHIPLPPYIAAKRPEDAQDQTDYQTIYAREKGAVAAPTAGLHFTPALFEALDRAGIERHFVTLHVGAGTFLPVKADDTADHKMHLEIGYVSEETAEKLNAVKARGGRIICVGTTSLRLIESAAGDDGQILPWSGATGIFITPGYRFKAVDILMTNFHLPKSTLFMLVSAFCGLETMRAAYAHAIETGYRFYSYGDSSLLFRKI

SEQ ID NO: 62999 - protein, 360 aa, Agrobacterium radiobacter
  misc_feature (1)..(360): tr|W1L7Q7|W1L7Q7_RHIRD S-adenosylmethionine:tRNA ribosy ltransferase-isomerase OS=Agrobacterium radiobacter DSM 30147 OX=1336745 GN=queA PE=3 SV=1
MRVDLFDFDLPEENIALRPANPRDSARLLVVDPNENRMEDHRVFDLPSFLKPGDALVFNDTRVIPAQLEGVRLREGAPETAVSATLHMRADQSRWKAFARPGKRIKQGDRIRFGYERDNACGLAHLEATVEEKGEEGEITLLFDVSGPVLDEAIASVGHIPLPPYIAAKRPEDAQDQTDYQTIYAREKGAVAAPTAGLHFTPDLFAALDKVGIERHFVTLHVGAGTFLPVKSDDTDDHKMHFEIGHVSQETADRLNAVKARGGRIVCVGTTSLRLIESAADENGVIHPWSDATGIFITPGYRFRAVDILMTNFHLPKSTLFMLVSAFCGLETMRDAYKHAIETGYRFYSYGDSSLLFRKN

SEQ ID NO: 63000 - protein, 360 aa, Agrobacterium radiobacter
  misc_feature (1)..(360): sp|B9JFA8|QUEA_AGRRK S-adenosylmethionine:tRNA ribosylt ransferase-isomerase OS=Agrobacterium radiobacter (stra in K84 / ATCC BAA-868) OX=311403 GN=queA PE=3 SV=1
MRVDLFDFDLPDERIALRPAEPRDSARLLVVDPNAEMVLSDRQIRDLSSYLRPGDAIVFNDTKVIPAQLEGIRHREGAPGQQVSATLHMRAAPDRWKAFAKPGKRIKIGDRIQFGHGENVCALGALDAVVEEKGEGGEITLRFDLSGPALDEAIAAVGHIPLPPYIAAKRPEDERDRADYQTIYAREEGAVAAPTAGLHFTPSLFATLDAMGVERHFVTLHVGAGTFLPVKADDTEDHKMHFEIGHVDAATAEKLNAVKARGGRIVCVGTTSLRLLESAAAEDGTIKPWSGATGIFITPGYRFKTVDLLMTNFHLPRSTLFMLVSAFAGLDTMRAAYTHAIETGYRFYSYGDGSLLHRKD

SEQ ID NO: 63001 - protein, 360 aa, Agrobacterium rhizogenes
  misc_feature (1)..(360): tr|A0A178HBK6|A0A178HBK6_AGRRH S-adenosylmethionine:tRN A ribosyltransferase-isomerase OS=Agrobacterium rhizoge nes OX=359 GN=queA PE=3 SV=1
MRVDLFDFDLPEENIALRPANPRDSARLLVVDPNENRMEDHRVFNLPSFLRPGDALVFNDTRVIPAQLEGVRLREGAPETSVSATLHMRADQSRWKAFARPGKRIKEGDRIRFGYERDNACGLAHLEATVEEKGEDGEITLLFDVSGPVLDEAIASVGHIPLPPYIAAKRPEDQRDQTDYQTIYAREKGAVAAPTAGLHFTPDLFEALDKAGIERHFVTLHVGAGTFLPVKSDDTDDHKMHFEIGHVSQETADRLNAVKARGGRIVCVGTTSLRLIESAADENGVIHPWSDATGIFITPGYRFRAVDMLMTNFHLPKSTLFMLVSAFCGLETMRDAYKRAIETGYRFYSYGDSSLLFRKN

SEQ ID NO: 63002 - protein, 360 aa, Agrobacterium rhizogenes
  misc_feature (1)..(360): tr|A0A546XJV1|A0A546XJV1_AGRRH S-adenosylmethionine:tRN A ribosyltransferase-isomerase OS=Agrobacterium rhizoge nes OX=359 GN=queA PE=3 SV=1
MRVDLFDFDLPEENIALRPANPRDSARLLVVDPNENRMEDHHVFNLPSFLRPGDALVFNDTRVIPAQLEGVRLREGAPETAVSATLHMRTDQSRWKAFARPGKRIKEGDRIRFGYERDNACGLAHLEATVEEKGEDGEITLLFDVSGPVLDEAIASVGHIPLPPYIAAKRPEDQQDQTDYQTIYAREKGAVAAPTAGLHFTPDLFEALDKAGIERHFVTLHVGAGTFLPVKSDDTDDHKMHFEIGHVSQETADRLNAVKARGGRIICVGTTSLRLIESAADENGVIHPWSDATGIFITPGYRFRAVDMLMTNFHLPKSTLFMLVSAFCGLETMRDAYRRAIETGYRFYSYGDSSLLFRKN

SEQ ID NO: 63003 - protein, 360 aa, Agrobacterium rosae
  misc_feature (1)..(360): tr|A0A2S4EF44|A0A2S4EF44_9RHIZ S-adenosylmethionine:tRN A ribosyltransferase-isomerase OS=Agrobacterium rosae O X=1972867 GN=queA PE=3 SV=1
MRVDLFDFHLPDDNIALRPASPRDSARLLVVDPNAGSMTDHQVFDLPSFLKPGDALVFNDTRVIPAQLEGVRLREGAPETAVSATLHMRADASRWKAFARPGKRIKQGDRIRFGYERDNACGLAFLEATVEEKGEEGEITLLFDVSGPVLDEAIASVGHIPLPPYIAAKRQEDAQDQTDYQTIYAREKGAVAAPTAGLHFTPALFEALDAAGIERHFVTLHVGAGTFLPVKADDTEEHKMHLEIGTVSEETAAKLNAVKARGGRIVCVGTTSLRLIESAATDDGQIMPWSGPTGIFITPGYRFKAVDILMTNFHLPKSTLFMLVSAFCGLETMREAYGRAIKTGYRFYSYGDSSLLFRKI

SEQ ID NO: 63004 - protein, 360 aa, Agrobacterium rubi
  misc_feature (1)..(360): tr|A0A1B9T836|A0A1B9T836_9RHIZ S-adenosylmethionine:tRN A ribosyltransferase-isomerase OS=Agrobacterium rubi OX =28099 GN=queA PE=3 SV=1
MRVDLFDFDLPDDNIALRPASPRDSARLLVVDPNADSMTDHHVFDLPSFLKPGDALVFNDTRVIPAQLEGVRLREGAPETAVSATLHMRADASRWKAFARPGKRIKQGDRIRFGYERDNACGLAFLEATVEEKGEEGEITLLFDVSGPVLDEAIASVGHIPLPPYIAAKRPEDAQDQTDYQTIYAREKGAVAAPTAGLHFTPALFEALDAAGIERHFVTLHVGAGTFLPVKADDTEEHKMHFEIGTVSEETAAKLNAVKARGGRIVCVGTTSLRLIESAARDDGQIAPWSGATGIFITPGYRFKAVDILMTNFHLPKSTLFMLVSAFCGLETMREAYRHAIDTGYRFYSYGDSSLLFRKT

SEQ ID NO: 63005 - protein, 360 aa, Agrobacterium rubi
  misc_feature (1)..(360): tr|A0A081CWF5|A0A081CWF5_9RHIZ S-adenosylmethionine:tRN A ribosyltransferase-isomerase OS=Agrobacterium rubi TR 3 = NBRC 13261 OX=1368415 GN=queA PE=3 SV=1
MRVDLFDFDLPDDNIALRPASPRDSARLLVVDPNANSMTDHNVFDLPSFLKPGDALVFNDTRVIPAQLEGVRLREGAPETAVSATLHMRADASRWKAFARPGKRIKQGDRIRFGYERDNACGLAFLEATVEEKGEEGEITLLFDVSGPVLDEAIASVGHIPLPPYIAAKRPEDAQDQTDYQTIYAREKGAVAAPTAGLHFTPALFEALDAAGIERHFVTLHVGAGTFLPVKADDTEEHKMHFEIGTVSEETAAKLNAVKARGGRIVCVGTTSLRLIESAARDDGQIAPWSGATGIFITPGYRFKAVDILMTNFHLPKSTLFMLVSAFCGLETMREAYRHAIETGYRFYSYGDSSLLFRKT

SEQ ID NO: 63006 - protein, 360 aa, Agrobacterium salinitolerans
  misc_feature (1)..(360): tr|A0A4Z1R6N4|A0A4Z1R6N4_9RHIZ S-adenosylmethionine:tRN A ribosyltransferase-isomerase OS=Agrobacterium salinit olerans OX=1183413 GN=queA PE=3 SV=1
MRVDLFDFDLPEENIALRPANPRDSARLLVVDPNENRMEDHRVFDLPSFLRPGDALVFNDTRVIPAQLEGVRLREGAPETAVSATLHMRADQSRWKAFARPGKRIKEGDRIRFGYERDNACGLAHLEATVEEKGEDGEITLLFDVSGPVLDEAIASVGHIPLPPYIAAKRPEDVQDQTDYQTIYAREKGAVAAPTAGLHFTPELFAALDKAGIERHFVTLHVGAGTFLPVKADDTDDHKMHFEIGHVSQETADRLNAVKARGGRIVCVGTTSLRLIESAATEDGAIHPWSNATGIFITPGYRFRAVDMLMTNFHLPKSTLFMLVSAFCGLETMRDAYKHAIETGYRFYSYGDSSLLFRKN

SEQ ID NO: 63007 - protein, 360 aa, Agrobacterium salinitolerans
  misc_feature (1)..(360): tr|A0A1S7U5Q8|A0A1S7U5Q8_9RHIZ S-adenosylmethionine:tRN A ribosyltransferase-isomerase OS=Agrobacterium salinit olerans str. Hayward 0363 OX=1183434 GN=queA PE=3 SV=1
MRVDLFDFDLPEENIALRPANPRDSARLLVVDPNQDRMEDHRVFDLPSFLRPGDALVFNDTRVIPAQLEGVRLREGAPETAVSATLHMRADQSRWKAFARPGKRIKEGDRIRFGYERDNACGLAHLEATVEEKGEDGEITLLFDVSGPVLDEAIASVGHIPLPPYIAAKRPEDQQDQTDYQTIYAREKGAVAAPTAGLHFTPELFAALDKAGIERHFVTLHVGAGTFLPVKADDTDDHKMHFEIGHVSQETADRLNAVKARGGRIVCVGTTSLRLIESAAAEDGTIQPWSDATGIFITPGYRFRAVDILMTNFHLPKSTLFMLVSAFCGLETMRDAYKHAIETGYRFYSYGDSSLLFRKN

SEQ ID NO: 63008 - protein, 360 aa, Agrobacterium sp.
  misc_feature (1)..(360): tr|A0A437KTK3|A0A437KTK3_9RHIZ S-adenosylmethionine:tRN A ribosyltransferase-isomerase OS=Agrobacterium sp. CNP So 2736 OX=2499627 GN=queA PE=3 SV=1
MRVDLFDFDLPEENIALRPANPRDSARLLVVDPNENRMEDHRVFDLPSFLKPGDALVFNDTRVIPAQLEGVRLREGAPETAVSATLHMRTDQSRWKAFARPGKRIKQGDRIRFGYERDNACGLAHLEATVEEKGEDGEITLLFDVSGPVLDEAIASVGHIPLPPYIAAKRPEDAQDQTDYQTIYAREKGAVAAPTAGLHFTPDLFAALDKVGIERHFVTLHVGAGTFLPVKSDDTDDHKMHFEIGHVSQETADRLNAVKARGGRIVCVGTTSLRLIESAADENGVIHPWSDATGIFITPGYRFKAVDILMTNFHLPKSTLFMLVSAFCGLETMRDAYRRAIETGYRFYSYGDSSLLFRKN

SEQ ID NO: 63009 - protein, 360 aa, Agrobacterium sp.
  misc_feature (1)..(360): tr|A0A0X6ZT08|A0A0X6ZT08_9RHIZ S-adenosylmethionine:tRN A ribosyltransferase-isomerase OS=Agrobacterium sp. D14 OX=1336743 GN=queA PE=3 SV=1
MRVDLFDFDLPEENIALRPANPRDSARLLVVDPNENRMEDHRVFDLPSFLKPGDALVFNDTRVIPAQLEGVRLREGAPETAVSATLHMRADQSRWKAFARPGKRIKQGDRIRFGYERDNACGLAHLEATVEEKGEEGEITLLFDVSGPVLDEAIASVGHIPLPPYIAAKRPDDAQDQTDYQTIYAREKGAVAAPTAGLHFTPDLFAALDKVGIERHFVTLHVGAGTFLPVKSDDTDDHKMHFEIGHVSRETADRLNAVKARGGRIVCVGTTSLRLIESAADENGVVHPWSDATGIFITPGYRFRAVDILMTNFHLPKSTLFMLVSAFCGLETMRDAYKHAIETGYRFYSYGDSSLLFRKN

SEQ ID NO: 63010 - protein, 360 aa, Agrobacterium tumefaciens
  misc_feature (1)..(360): tr|A0A1S7QT61|A0A1S7QT61_RHIRD S-adenosylmethionine:tRN A ribosyltransferase-isomerase OS=Agrobacterium tumefac iens str. Kerr 14 OX=1183424 GN=queA PE=3 SV=1
MRVDLFDFDLPEENIALRPANPRDSARLLVVDPNENRMEDHRVFDLPSFLKPGDALVFNDTRVIPAQLEGVRLREGAPETAVSATLHMRADQSRWKAFARPGKRIKEGDRIRFGYERDNACGLAHLEATVEEKGEEGEITLLFDVSGPVLDEAIASVGHIPLPPYIAAKRPEDAQDQTDYQTIYAREKGAVAAPTAGLHFTPDLFEALDGVGVERHFVTLHVGAGTFLPVKSDDTDDHKMHFEIGHVSQETAARLNAVKARGGRIVCVGTTSLRLIESAASEDGVIHPWSGPTGIFITPGYRFRAVDILMTNFHLPKSTLFMLVSAFCGLETMRDAYKHAIETGYRFYSYGDSSLLFRKN

SEQ ID NO: 63011 - protein, 360 aa, Agrobacterium tumefaciens
  misc_feature (1)..(360): tr|M8AUT3|M8AUT3_RHIRD S-adenosylmethionine:tRNA ribosy ltransferase-isomerase OS=Agrobacterium tumefaciens str . Cherry 2E-2-2 OX=1281779 GN=queA PE=3 SV=1
MRVDLFDFDLPEENIALRPASPRDSARLLVVDPNENRMEDHRVFDLPSFLKPGDALVFNDTRVIPAQLEGVRLREGAPETAVSATLHMRVDQSRWKAFARPGKRIKQGDRIRFGYERDNACGLAHLEATVEEKGEDGEITLLFDVSGPVLDEAIASVGHIPLPPYIAAKRPEDARDQTDYQTIYAREKGAVAAPTAGLHFTPNLFEALDKVGIERHFVTLHVGAGTFLPVKSDDTDDHKMHFEIGHVSRETADRLNAVKARGGRIVCVGTTSLRLIESAADENGVIHPWSDATGIFITPGYRFRAVDILMTNFHLPKSTLFMLVSAFCGLETMRDAYKHAIETGYRFYSYGDSSLLFRKN

SEQ ID NO: 63012 - protein, 352 aa, Agrobacterium vitis
  misc_feature (1)..(352): sp|B9JWX0|QUEA_AGRVS S-adenosylmethionine:tRNA ribosylt ransferase-isomerase OS=Agrobacterium vitis (strain S4 / ATCC BAA-846) OX=311402 GN=queA PE=3 SV=1
MRVDLFDFDLPDENIALRPANPRDQARFLIVRPDGSLMLEDRRVFELPSFLRAGDALVFNDTKVIPAQLEGVRIREGAERTPVSCTLHMRVAANRWKAFARPGKRIKQGDVIDFDGLSANVAEKGEAGEIDLEFAASGPDLDRAIAGVGHIPLPPYIAAKRPEDSQDRTDYQTIYAREEGAVAAPTAGLHFTPALFEALDKAGIERHFVTLHVGAGTFLPVKADDTDDHKMHQEIGHVSAETAEALNAVKARGGRIVSVGTTSLRLLESAASEDGRLLPWSDATGIFITPGYRFKAVDVLMTNFHLPKSTLFMLVSAFAGLETMRAAYAHAIETGYRFYSYGDSSLLFRKDK

SEQ ID NO: 63013 - protein, 352 aa, Agrobacterium vitis
  misc_feature (1)..(352): tr|A0A1S2DQF4|A0A1S2DQF4_AGRVI S-adenosylmethionine:tRN A ribosyltransferase-isomerase OS=Agrobacterium vitis O X=373 GN=queA PE=3 SV=1
MRVDLFDFDLPDENIALRPANPRDQARFLVVRPDGAPMLEDRKVFELPSFLRAGDALVFNDTKVIPAQLEGVRIREGAERTPVSCTLHMRVAANRWKAFARPGKRIKQGDVIDFDGLLATVTEKGEAGEIDLEFAASGPDLDRAIAGVGHIPLPPYIAAKRPEDGQDRTDYQTIYAREEGAVAAPTAGLHFTPALFEALDKAGIERHFVTLHVGAGTFLPVKADDTDDHKMHQEIGHVSAETAEALNAVKARGGRIVSVGTTSLRLLESAASEDGRILPWSDATGIFITPGYRFKAVDVLMTNFHLPKSTLFMLVSAFAGLETMRAAYAHAIETGYRFYSYGDSSLLFRKDK

SEQ ID NO: 63014 - protein, 351 aa, Agromyces sp.
  misc_feature (1)..(351): tr|A0A542JQ49|A0A542JQ49_9PSED S-adenosylmethionine:tRN A ribosyltransferase-isomerase OS=Agromyces sp. SLBN-50 OX=744977 GN=queA PE=3 SV=1
MRVADFQFDLPDSLIARHPLAERRASRLLVLDGPTGALAHRQFADLLEYLRPGDLMVFNDTRVIPARLFGQKASGGKLEVLVERVLDEYRVLAHVRSSKSPKPGSLIHIEGGGEAEMLARHDALFELRFSEPVLPLLDRVGHMPLPPYIDRPDEAADRERYQTVYSDRSKAGAVAAPTAGLHFDEALLTAIRDKGIDTAFVTLHVGAGTFQPVRVERIEDHHMHREWLQVGQDVVDAVSACRARGGRVIAVGTTSVRSLESAARDGELKAFSGDTDIFLYPGKRFHVVDALVTNFHLPESTLLMLVSAFAGYPETMAAYAAAVEQQYRFFSYGDAMFITRNPDPRGPEETL

SEQ ID NO: 63015 - protein, 347 aa, Ahniella affigens
  misc_feature (1)..(347): tr|A0A2P1PY23|A0A2P1PY23_9GAMM S-adenosylmethionine:tRN A ribosyltransferase-isomerase OS=Ahniella affigens OX= 2021234 GN=queA PE=3 SV=1
MRKQDFHFELPKELIASVPLPERSASRLLVLDGESGPLLDRQFRDLSQWLRPGDLLVFNNTKVIPARTFGQKETGGAVEIMLERVLDEHRALAQIRASHAPKPGALITLANGEHVRVGGRIDGFFEIATTTSARNLLDLFEAVGEMPLPHYMERRPEDADRERYQTVYAKNPGAVAAPTAGLHFDQPLLDALHAQGINRCEVTLHVGAGTFQPVRVDDIREHRMHAEWVSVSAETVAQIAATRQAGGRIIAVGTTSVRALESAAASGELQPFSGDTRIFITPGYSFKVIDALITNFHLPESTLLMLVSALAGRERVLAAYAHAVQQRYRFFSYGDAMLILPGGFARD

SEQ ID NO: 63016 - protein, 352 aa, Ahrensia marina
  misc_feature (1)..(352): tr|A0A0M9GMG4|A0A0M9GMG4_9RHOB S-adenosylmethionine:tRN A ribosyltransferase-isomerase OS=Ahrensia marina OX=15 14904 GN=queA PE=3 SV=1
MRVNDFDFELPEKHIALRPAEPRDSAKLLVVKPSGREDSQVSNLAQFLKAGDCLVFNDTKVIPAQLNGIRERDGAPGAEVGFTLHLRGAADSWNAFAKGAKKLRVGDSVTFGADLTARIAEKLDGGEVRLVFNRTGPELDTAIMAVGHVPLPPYIAAKREDDGKDLKDYQTIYAREDGAVAAPTAGLHFTDRLFNSLDKAGIKREFVTLHVGAGTFLPVKVDDTKDHKMHSEIGTISDDVAQRLNAVKQAGGRIVAVGTTSLRLLESAANSDGTLSAWRGATDIFITPGYKFKFVDLLMTNFHLPRSTLMMLVSAFAGYENMRKAYEHAKTHDYRFYSYGDSSLLFPEGSEE

SEQ ID NO: 63017 - protein, 356 aa, Ahrensia sp.
  misc_feature (1)..(356): tr|A0A2E0IU25|A0A2E0IU25_9RHOB S-adenosylmethionine:tRN A ribosyltransferase-isomerase OS=Ahrensia sp. OX=18724 19 GN=queA PE=3 SV=1
MRVDAFDFDLPEACIAVRPASPRDAARMLVVRPGEPLADAGVRDLTRFLKAGDVLVFNDTKVIPAQLEGDRTRADGAKAHIGATLHMRVAPDCWKAFIRGAKKLKVGDTVDFSANGHQLTAEVLARGVDGEADLRFDRSGGDLDAALALVGHVPLPPYIASKRAEDARDRLDYQTIYAREEGAVAAPTAGLHFTDELFAALDEAGIHRAFVTLHVGAGTFLPVKADDTDAHKMHAEIGHVDEKTAQFLNQARARGGRIVSVGTTSLRLLESATSEEGTIEPWSGATEIFITPGYRFKAIDVLMTNFHLPRSTLFMLVSAFSGLETMQAAYRHAIDTGYRFYSYGDSCLLFPQETAR

SEQ ID NO: 63018 - protein, 356 aa, Ahrensia sp.
  misc_feature (1)..(356): tr|A0A2E2RJT2|A0A2E2RJT2_9RHOB S-adenosylmethionine:tRN A ribosyltransferase-isomerase OS=Ahrensia sp. OX=18724 19 GN=queA PE=3 SV=1
MRVDAFDFDLPEECIAVRPASPRDAARMLVVRPGETLADAGIRDLPGLLRPGDVLVFNDTKVIPAQLEGDRIRADGAKAHIGATLHMRVAPDCWKAFIRGAKKLKIGDTVDFSANGHGLTAEVLARGDDGEADLRFDRSGGDLDAALALVGHVPLPPYIASKRAEDAQDRLAYQTIYAREEGAVAAPTAGLHFTDGLFAALDEAGIHRAFVTLHVGAGTFLPVKADDTDAHKMHAEIGHVDEKTALFLNEARAKGGRIVSVGTTSLRLLESAASEDGTIEPWSGATDIFITPGYRFRAVDVLMTNFHLPRSTLFMLVSAFCGLETMQAAYRHAIETGYRFYSYGDSSLLFPQETAR

SEQ ID NO: 63019 - protein, 346 aa, Aidingimonas halophila
  misc_feature (1)..(346): tr|A0A1H2ZR93|A0A1H2ZR93_9GAMM S-adenosylmethionine:tRN A ribosyltransferase-isomerase OS=Aidingimonas halophil a OX=574349 GN=queA PE=3 SV=1
MQRADFHYDLPEELIARYPSEQRSDCRLLCVDGPSGELAHRRFPDLVDLLAPGDLLVFNDTRVIPARLHGHKVSGGKVEMLLERPLDTHRGLAHLRASKAPRPGTQLMFEGDIHAVVEARREAFFELRFLGDTPMIELLERHGHMPLPPYIDRADETSDRDRYQTVYARRDGAVAAPTAGLHFDEPMLERLAAKGVESAFVTLHVGAGTFQPVRVDDIREHDMHSEWLEVDEATCAKVQRTKAAGRRVIAVGTTSVRCLETAAMNAPDGDIAPFQGDTDIFIYPGYEWRCVDALITNFHLPESTLLMLVSSFSGHATVMEAYREAVDRHYAFFSYGDAMFLTRRSP

SEQ ID NO: 63020 - protein, 325 aa, Akkermansia glycaniphila
  misc_feature (1)..(325): tr|A0A1C7PCD1|A0A1C7PCD1_9BACT S-adenosylmethionine:tRN A ribosyltransferase-isomerase OS=Akkermansia glycaniph ila OX=1679444 GN=queA PE=3 SV=1
MRTIDFDYHLPEELIADRPAPHREDSRMLVVHRSTGLIEHRKFTDLLEYVRPGDEFVMNNTKVVPARYFSNDGRIELVRASLHTDLLWKCLVRPGRKMKIGKTVAIGEAIGTVESIDEEGYRLIRFDRPVDEETYGRLALPHYMNRESDPDDKERYQTVYARHEGAIAAPTAGLHFTPEILEQIPHSFVTLHVGVGTFRPVKVDRIEEHHMHTESFVLPEETARRIAAAQRVVAVGTTSVRVLEHLAARNGLPLSPAAGETDIFIYPPYEYKIVDALLTNFHLPQSTLLMLVSALAGRELILEAYRQAVEQRYRFFSYGDCMLIL

SEQ ID NO: 63021 - protein, 329 aa, Akkermansia muciniphila
  misc_feature (1)..(329): tr|A0A2N8I066|A0A2N8I066_9BACT S-adenosylmethionine:tRN A ribosyltransferase-isomerase OS=Akkermansia muciniphi la OX=239935 GN=queA PE=3 SV=1
MHLAVRTIDFDYPLPEELIADRPLPDRSASRMMVIHRDTGMIEHRHFCDLPEYVREGDHFILNDTRVVPARYFSNDGSIEIVRAEVLNPLLWKCMVRPGRKMKLGRTVAIGEAVGIVEDIDGEGYRLIRFDREVDEEKYGRLALPHYMNRESDPSDKERYQTVYARHEGAIAAPTAGLHFTPELLASVPHDFLTLHVGVGTFRPVKADRIEDHQMHTEHFFLPEAAARAVNNARRVIAVGTTSVRVLEHVATAEGLPLRECAGSTNIFIYPPYNYKVVDALITNFHLPQSTLLMLVSAFAGKELIMKAYLEAIRERYRFFSYGDCMLIL

SEQ ID NO: 63022 - protein, 329 aa, Akkermansia muciniphila
  misc_feature (1)..(329): tr|A0A2N8ILC2|A0A2N8ILC2_9BACT S-adenosylmethionine:tRN A ribosyltransferase-isomerase OS=Akkermansia muciniphi la OX=239935 GN=queA PE=3 SV=1
MHLAVRTIDFDYPLPEELIADRPLPDRSASRMMVIHRDTGMIEHRHFCDLPEYVREGDHFILNDTRVVPARYFSNDGSIEIVRAEVLNPLLWKCMVRPGRKMKLGRTVAVGEAVGTVEGIDEEGYRLIRFDREVDEEKYGRLALPHYMNRESNPSDRERYQTVYARHEGAIAAPTAGLHFTPELLASVPHDFLTLHVGVGTFRPVKADRIEDHQMHTEHFFLPEAAARAVNNARRVIAVGTTSVRVLEHVATAEGLPLRECAGSTNIFIYPPYNYKVVDALITNFHLPQSTLLMLVSAFAGKELIMKAYLEAIRERYRFFSYGDCMLIL

SEQ ID NO: 63023 - protein, 329 aa, Akkermansia sp.
  misc_feature (1)..(329): tr|R7E138|R7E138_9BACT S-adenosylmethionine:tRNA ribosy ltransferase-isomerase OS=Akkermansia sp. CAG:344 OX=12 62691 GN=queA PE=3 SV=1
MHLAVRTIDFDYPLPEELIADRPLPDRAASRMMVIHRDTGLIEHRHFCDLPEYVREGDHFILNDTRVVPARYFSNDGAIEVVRAEVLNPLLWKCMVRPGRKMKLGRTVSIGDAVGTVEGIDGEGYRLIRFDREVDEEKYGRLALPHYMNRESDPSDKERYQTVYARHEGAIAAPTAGLHFTPELLAAVPHDFLTLHVGVGTFRPVKADRIEDHQMHTEHFFLPEATARAINEAGRVIAVGTTSVRVLEHVATAEGLPLKECSGSTNIFIYPPYKYKVVDALITNFHLPQSTLLMLVSAFAGKELVMKAYLEAIRERYRFFSYGDCMLIL

SEQ ID NO: 63024 - protein, 329 aa, Akkermansia sp.
  misc_feature (1)..(329): tr|A0A139TTK1|A0A139TTK1_9BACT S-adenosylmethionine:tRN A ribosyltransferase-isomerase OS=Akkermansia sp. KLE17 98 OX=1574265 GN=queA PE=3 SV=1
MHLAVRTIDFDYPLPEELIADRPLPDRAASRMLVLHRDTGLMEHRHFCDLPEYVRPGDHFILNDTRVVPARYFSNDGSIEIVRAEVLNPLLWKCMVRPGRKMKVGRTVSVGESVGTVEGIDAEGYRLIRFDREVDEEKYGRLALPHYMNRESDPSDRERYQTVYARNEGAIAAPTAGLHFTPELLASVPHDFLTLHVGVGTFRPVKADNIEDHQMHTEHFFLPEATARAINEAERVIAVGTTSVRVLEHVAAAEGLPLRECSGSTNIFIYPPYKYKVVDALITNFHLPQSTLLMLVSAFAGKELVMKAYMEAIRERYRFFSYGDCMLIL

SEQ ID NO: 63025 - protein, 349 aa, Albidiferax sp.
  misc_feature (1)..(349): tr|A0A1H0UNG1|A0A1H0UNG1_9BURK S-adenosylmethionine:tRN A ribosyltransferase-isomerase OS=Albidiferax sp. OV413 OX=1855285 GN=queA PE=3 SV=1
MRPYTLSDFDFTLPEALIAQHPAPERSSSRLLDGTGPAAQDRIFRDLPSLLKAGDLLVFNDTKVLKARLFGEKASGGKVELLVERVLTGNQVAAHMRVSKKPEPGATINLVGDGGFRATLLGRWPDADGTLFRFVLSNDAGDDPYTLMERHGHVPLPPYITHTDSAEDAQRYQTVFARAPGAVAAPTAALHFDDALLAQLEAQGVQRASVTLHVGAGTFQPVKTENIAEHQMHSEWYEVPAATQQAIAACKARGGRVVAVGTTTVRTLESWAQSGVASGDTRIFITPGFAFQHVDLLVTNFHLPKSSLMMLVSAFAGYEHIMDLYRHAIANQYRFFSYGDAMLLQRKTA

SEQ ID NO: 63026 - protein, 353 aa, Albidovulum inexpectatum
  misc_feature (1)..(353): tr|A0A2S5JJU7|A0A2S5JJU7_9RHOB S-adenosylmethionine:tRN A ribosyltransferase-isomerase OS=Albidovulum inexpecta tum OX=196587 GN=queA PE=3 SV=1
MKLSDFDFDLPEELIATRPIRPRPAARLLVAEGDRIRDMHVRDLVDLLGPGDRLVLNDTKVIPARLTGTRARQTPQGEAIARIEVTLAEPRPDGRWSALVRPLRKLRQGEEIRFSDRLTAHVVSIDDGRAELDFNLKGEDFDAALAQAGAMPLPPYIAQRRAPDEQDREDYQTVFARRPGAVAAPTASLHFDDDLLARLAERGVAFTHVTLHVGAGTFLPVKVEDVTTHKMHAEWGEVSAEAAAEINATRAAGGRVIPVGTTALRLIESAADPDGLMHPWQGETDIFIYPGYRFRVTDGLMTNFHLPKSTLMMLVSALMGMDRIRRIYDHAVRNRYRFFSYGDASLLLPEGRN

SEQ ID NO: 63027 - protein, 352 aa, Albidovulum xiamenense
  misc_feature (1)..(352): tr|A0A1G9GH01|A0A1G9GH01_9RHOB S-adenosylmethionine:tRN A ribosyltransferase-isomerase OS=Albidovulum xiamenens e OX=990712 GN=queA PE=3 SV=1
MQLSDFDFDLPEELIATRPARPRSAARLLVASRSQMVDARVFELPRLLRAGDLLVLNDTRVIPARLDGVRRRETAQGHVEAGIEATLVEALGGGRWRALLKPLRKVRPGERLHFGAGLEAVCEAHEEGMARLAFNLEGAAFEAALAEAGAMPLPPYIAARRPPDAQDREDYQTVWAERPGSVAAPTASLHFDAPLLAALEAAGVRFARVTLHVGAGTFLPVKTEDISRHRMHAEWGEVSEAAAEAINATRRAGGRVIPVGTTALRVIESAAPEPGRVAPFRGETDIFIRPGYDFRIADGLMTNFHLPKSTLMMLVSALMGLERIRQIYAHAVAERYRFFSYGDASLLLPGGL

SEQ ID NO: 63028 - protein, 359 aa, Albimonas donghaensis
  misc_feature (1)..(359): tr|A0A1H2SS08|A0A1H2SS08_9RHOB S-adenosylmethionine:tRN A ribosyltransferase-isomerase OS=Albimonas donghaensis OX=356660 GN=queA PE=3 SV=1
MRVDDFDFELPEALIALRPARPRSSARMLVSRPGGGGETGGGIEDRRVSDLASILRPGDLLVFNDTRVIPARLFGERRRESADGPGVAKVEATLIAREGDAAWRALARPGKRLRVGDRLYFGADGALGAELTEKAEGGEVRLVFDRGGPALDTAIAEAGVMPLPPYIAQRRAADAADRDDYQTVFASKLGAVAAPTASLHFDAPLLAALEAAGVRSTRLTLHVGAGTFLPVKSDTLDGHKMHSEWGEVPEAAAEAVLETRAAGGRVIPVGTTALRLVETAGREDRFLEPWAGDTDIFIRPGHRFRIADGLMTNFHLPRSTLMMLVAGLVGMDRMRAIYAHAVAERYRFYSYGDSSLLFP

SEQ ID NO: 63029 - protein, 353 aa, Albimonas pacifica
  misc_feature (1)..(353): tr|A0A1I3G8B0|A0A1I3G8B0_9RHOB S-adenosylmethionine:tRN A ribosyltransferase-isomerase OS=Albimonas pacifica OX =1114924 GN=queA PE=3 SV=1
MRVDDFDFDLPEELIALRPVRPRSSARMLHAQGGAISDRHVHDLPSLLRPGDLLVFNDTRVIPARLFGERRRPSPDGSGVAKVEATLLSREAPDAWEALARPAKRLREGDRLVFGPPEAELGATVAAKGEAGAVRLVFDVAGPALDAAIAAAGVMPLPPYIAHRRPADEKDAEDYQTVFAERPGAVAAPTASLHFDAPLLAALEAAGVRSTRLTLHVGAGTFLPVKVEDVENHRMHSEWGEVPESAAEAVNETRAAGGRVIPVGTTALRLLETAGTEDRRLEPWVGDTDIFIRPGHRFRVADGLMTNFHLPRSTLLMLVSALVGVEPARAIYAHAIAGRYRFYSYGDSSLLFP

SEQ ID NO: 63030 - protein, 372 aa, Alcaligenaceae bacterium
  misc_feature (1)..(372): tr|A0A354K123|A0A354K123_9BURK S-adenosylmethionine:tRN A ribosyltransferase-isomerase OS=Alcaligenaceae bacter ium OX=2021368 GN=queA PE=3 SV=1
MTGCRFYFLPVSSSLTVADFDYNLPSELIAQAPAAARTDSRLLHLDSEGRLNDLDFTAITSLVRPGDLLVFNDTRVIKARLFGRKASGGQVEVLIERITSEHEALAHIRASKSPGPGTSLRLSDAIDVTVMGRDNDLFILKFDGPILDLLDRYGSIPLPPYISHQPDALDDLRYQTVYAREPGAVAAPTAGLHFDENILEKFARMGVARAFVTLHVGAGTFQPVRVDKLSDHVMHAERYTVPAATAQAIARTRAEGGRIIAVGTTSVRALESAAKAQREDALAHPDRNIPDPRNQLLANSGDTRLFITPGFAYQVVDAMVTNFHLPQSTLLMLVSAFIGMEQMKAAYTHAIKQRYRFFSYGDAMFLERNPLL

SEQ ID NO: 63031 - protein, 355 aa, Alcaligenaceae bacterium
  misc_feature (1)..(355): tr|A0A4S1EIP7|A0A4S1EIP7_9BURK S-adenosylmethionine:tRN A ribosyltransferase-isomerase OS=Alcaligenaceae bacter ium 429 OX=2562948 GN=queA PE=3 SV=1
MPVDPSLELSQFDYDLPPELIAQTPAATRTGSRLLHLNAAGQLTDMQFSQISQLLRPGDLLVFNNTKVIKARLLGEKQSGGKVEVLVERITSAHQALAHIRASKSPKPGTRLVLADGQLEVTVTGRQDALFELSFEQPALEALEQFGATPLPPYIQQVPTAEDDQRYQTVYAEAPGAVAAPTAGLHFDENLLNSLQELGVDQAFVTLHVGAGTFQPVRSEQLSEHQMHAERFFVPAETLEKLQRTREQGGRIIAVGTTSVRALESAVRYQECNGHQNADGSIEGDTRLFITPGYTFTWVDALVTNFHLPQSTLLMLVSALSKLPFIQQAYSHAIKQHYRFFSYGDAMFIEAAQQS

SEQ ID NO: 63032 - protein, 354 aa, Alcaligenes aquatilis
  misc_feature (1)..(354): tr|A0A427LYD7|A0A427LYD7_9BURK S-adenosylmethionine:tRN A ribosyltransferase-isomerase OS=Alcaligenes aquatilis OX=323284 GN=queA PE=3 SV=1
MSIDPSLTIAQFDYELPPDLIAQSPPAQRQGSRLLHLDSASQLHDRQFTDLPSLLRKGDLLVFNDTRVIKARLHGQKSSGGKVEVLIERVTGPDTALAHIRASKSPKPGTLLELAEGRVLADCTGREDALFALRFHEPVLDMLEQYGATPLPPYITHAADEQDDSRYQTVYARHPGAVAAPTAGLHFTDDMLATLREQGVDQAFVTLHVGAGTFQPVRVDNISEHVMHAERYHVPAATLTKIEATRAAGGRVIAVGTTSVRSLESAASKEPGMNQRCADGSIEGDTRLFITPGFQYQWVDALITNFHLPQSTLLMLVSALAGIEPIQRAYQHAVQSRYRFFSYGDAMFIEPPTP

SEQ ID NO: 63033 - protein, 354 aa, Alcaligenes aquatilis
  misc_feature (1)..(354): tr|A0A3G2HRR7|A0A3G2HRR7_9BURK S-adenosylmethionine:tRN A ribosyltransferase-isomerase OS=Alcaligenes aquatilis OX=323284 GN=queA PE=3 SV=1
MSIDPSLTIAQFDYELPPDLIAQSPPAQRQGSRLLHLDSASQLHDRQFTDLPSLLRKGDLLVFNDTRVIKARLHGQKSSGGKVEVLIERVTGPDTALAHIRASKSPKPGTLLELAEGRVLADCTGREDALFALRFHEPVLDMLEQYGATPLPPYITHAADEQDDSRYQTVYARHPGAVAAPTAGLHFTDAMLATLREQGVDQAFVTLHVGAGTFQPVRVDNISEHVMHAERYHVPAATLAKIEATRAAGGRVIAVGTTSVRSLESAASNEPGMNQRCADGSIEGDTRLFITPGFQYQWVDALITNFHLPQSTLLMLVSALAGIEPIQRAYQHAVQSRYRFFSYGDAMFIEPPTP

SEQ ID NO: 63034 - protein, 354 aa, Alcaligenes faecalis
  misc_feature (1)..(354): tr|A0A411T219|A0A411T219_ALCFA S-adenosylmethionine:tRN A ribosyltransferase-isomerase OS=Alcaligenes faecalis OX=511 GN=queA PE=3 SV=1
MSIDPSLTIAQFDYELPPELIAQSPPAQRQGSRLLHLDGAGQLHDRQFTDLPGLLRKGDLLVFNDTRVIKARLHGQKSSGGKVEVLIERVTGPDTALAHIRASKSPKPGTLLELADGKVLADCTGREDALFALRFHEPVLDMLEQYGATPLPPYITHAADEQDESRYQTVYARHPGAVAAPTAGLHFTDDMLATLRAQGVDQAFVTLHVGAGTFQPVRVDNISEHVMHAERYHVPAATLAKIEATRAAGGRIIAVGTTSVRSLESAASKEPGMNQRCADGSIEGDTRLFITPGFQYQWVDALITNFHLPQSTLLMLVSALAGIEPIQRAYQHAVQSRYRFFSYGDAMFIEPPTP

SEQ ID NO: 63035 - protein, 354 aa, Alcaligenes faecalis
  misc_feature (1)..(354): tr|A0A3G6HEF6|A0A3G6HEF6_ALCFA S-adenosylmethionine:tRN A ribosyltransferase-isomerase OS=Alcaligenes faecalis OX=511 GN=queA PE=3 SV=1
MSIDPSLTIAQFDYELPPDLIAQSPPAQRQGSRLLHLDGASQLHDRQFTDLPSLLRKGDLLVFNDTRVIKARLHGQKSSGGKVEVLIERVTGPDTALAHIRASKSPKPGTLLELAEGRVLADCTGREDALFALRFHEPVLDMLEQYGATPLPPYITHAADEEDDSRYQTVYARHPGAVAAPTAGLHFTDDMLATLREQGVDQAFVTLHVGAGTFQPVRVDNISEHVMHAERYHVPAATLAKIDATRAAGGRVIAVGTTSVRSLESAASKEPGMNQRCADGSIEGDTRLFITPGFQYQWVDALITNFHLPQSTLLMLVSALAGIEPIQRAYQHAVQSRYRFFSYGDAMFIEPPTP

SEQ ID NO: 63036 - protein, 354 aa, Alcaligenes sp.
  misc_feature (1)..(354): tr|U7UA86|U7UA86_9BURK S-adenosylmethionine:tRNA ribosy ltransferase-isomerase OS=Alcaligenes sp. EGD-AK7 OX=13 86079 GN=queA PE=3 SV=1
MSIDPSLTIAQFDYELPPDLIAQSPPAQRQGSRLLHLDGASQLHDRQFTDLPSLLRKGDLLVFNDTRVIKARLHGQKSSGGKVEVLIERVTGPDTALAHIRASKSPKPGTLLELADGKVLADCTGREDALFALRFHEPVLDMLEQYGATPLPPYITHAADEEDDSRYQTVYARHPGAVAAPTAGLHFTDDMLNTLREQGVDQAFVTLHVGAGTFQPVRVDNISEHVMHAERYHVPAATLAKIEATRAAGGRVIAVGTTSVRSLESAASKEPGMNQRCTDGSIEGDTRLFITPGFQYQWVDALITNFHLPQSTLLMLVSALAGIEPIQRAYQHAVQSRYRFFSYGDAMFIEPPTP

SEQ ID NO: 63037 - protein, 351 aa, Alcaligenes xylosoxydans
  misc_feature (1)..(351): tr|A0A1R1JZU8|A0A1R1JZU8_ALCXX S-adenosylmethionine:tRN A ribosyltransferase-isomerase OS=Alcaligenes xylosoxyd ans xylosoxydans OX=85698 GN=queA PE=3 SV=1
MQALTVSDFDYELPPELIAQTPAAQRTGSRLLHLDGASQLHDRQFADLEGLLRPGDLLVFNDTRVIKARLAGHKITGGKVEVLVERITDTDRALAHVRASKSPGAGMVLRLADAFDATVLGREGELFDIRFPGPVLELLDAHGATPLPPYITHAADAGDDDRYQTVYAREPGAVAAPTAGLHFDQPTLDRLAALGVERAFVTLHVGAGTFQPVRVDNLTDHIMHAEWFTVPQATVDAIAATRARGGRVIAVGTTSVRALESAAAQTEGRTAPGLPLAAAQGDTRLFITPGYQYRVIDALVTNFHLPQSTLLMLVSALAGVEPIRRAYAHAVAQRYRFFSYGDAMFIESPAP

SEQ ID NO: 63038 - protein, 351 aa, Alcaligenes xylosoxydans
  misc_feature (1)..(351): tr|A0A5C2NG43|A0A5C2NG43_ALCXX S-adenosylmethionine:tRN A ribosyltransferase-isomerase OS=Alcaligenes xylosoxyd ans xylosoxydans OX=85698 GN=queA PE=3 SV=1
MQALTVSDFDYELPPELIAQTPAAQRTGSRLLHLDGASQLHDRQFADLEGLLRPGDLLVFNDTRVIKARLAGHKITGGKVEVLVERITDTDRALAHVRASKSPGAGMVLRLADAFDATVLGREGELFDIRFPGPVLELLDAHGATPLPPYITHAADAGDDDRYQTVYAREPGAVAAPTAGLHFDQPTLDRLAAQGVERAFVTLHVGAGTFQPVRVDNLADHVMHAEWFTVPQATVDAIAATRARGGRVIAVGTTSVRALESAAAQTEGRTAPGLPLAAAQGDTRLFITPGYQYRVIDALVTNFHLPQSTLLMLVSALAGVEPIRRAYAHAVAQRYRFFSYGDAMFIESPAP

SEQ ID NO: 63039 - protein, 340 aa, Alcanivoracaceae bacterium
  misc_feature (1)..(340): tr|A0A3L8AVW1|A0A3L8AVW1_9GAMM S-adenosylmethionine:tRN A ribosyltransferase-isomerase OS=Alcanivoracaceae bact erium GenoA1_TS13_700 OX=2072747 GN=queA PE=3 SV=1
MKRADFHYELPERLIARYPMPERSGSRLLCLDRQSGALQDQRFTDVLRWLQGGDLLVFNNTRVIPARIFGRKETGGRVEVLVERITSPDSCLAHVRASKAPKPGSRILVEGADSLLMEGRSGDLFCLRSLQGDLLNWLQQVGHMPLPPYIDREDERLDQERYQTVYASTPGAVAAPTAGLHFDDALLSALAEAGVDSAYVTLHVGAGTFQPVRADDIRDHVMHSEWLQVDQATVDKIRRTKARGGRVIAVGTTSVRSLETAASCNQGQIAPFEGDTDIFIYPGYSFSVVDGLITNFHLPESTLIMLVSAFAGQQAVLNAYHHAVAQEYRFFSYGDAMLIL

SEQ ID NO: 63040 - protein, 347 aa, Alcanivoracaceae bacterium
  misc_feature (1)..(347): tr|A0A2E2DDP2|A0A2E2DDP2_9GAMM S-adenosylmethionine:tRN A ribosyltransferase-isomerase OS=Alcanivoracaceae bact erium OX=2024895 GN=queA PE=3 SV=1
  misc_feature (21)..(21): Xaa can be any naturally occurring amino acid
  misc_feature (89)..(90): Xaa can be any naturally occurring amino acid
  misc_feature (139)..(139): Xaa can be any naturally occurring amino acid
  misc_feature (199)..(199): Xaa can be any naturally occurring amino acid
  misc_feature (224)..(224): Xaa can be any naturally occurring amino acid
  misc_feature (311)..(311): Xaa can be any naturally occurring amino acid
  misc_feature (315)..(315): Xaa can be any naturally occurring amino acid
MNVDDFDFELPDGLIARHPPXQRRDARLLALTRDALQHQQFPDLLGHVRPGDLLIFNDTRVIPARLFGHKDSGGKVEVLIERVVDDHEXXAHVRASKSPKPGSWLQFDEGVRAQVTGRRDALFILQFHGCETLLGALEXIGHVPLPPYIDRPDEQGDMERYQTVYAREPGAVAAPTAGLHFDEAMLAALQQHGVDIGYXTLHVGAGTFQPVRVDKVEDHHMHSXRYQIPETLVEQVAQAHARGGRIVAVGTTALRALEAASQSGSLKAGQGETDIFIYPGYQFRLVECLLTNFHLPKSTLLMLISAFAGQXRVMXAYQAAIEAEYRFFSYGDAMFIERVDVSTAERV

SEQ ID NO: 63041 - protein, 359 aa, Alcanivorax borkumensis
  misc_feature (1)..(359): sp|Q0VSA0|QUEA_ALCBS S-adenosylmethionine:tRNA ribosylt ransferase-isomerase OS=Alcanivorax borkumensis (strain ATCC 700651 / DSM 11573 / NCIMB 13689 / SK2) OX=393595 GN=queA PE=3 SV=1
MNVDDFDFELPDRLIARHPPAQRRDARLLALTCDALEHQQFPDLLSHVHPGDLLIFNDTRVIPARLFGQKESGGKVEVLIERVVDDHEALAHVRASKSPKPGSWLEFAKGIRAQVTGRRGALFILHFSLPGNGCDTLLSALELIGHVPLPPYIDRPDEDGDMERYQTVYAREPGAVAAPTAGLHFDDAMLAALEQRGVDIGFVTLHVGAGTFQPVRVDKVEDHHMHSERYQIPGSLVEQVAQAHARGGRVVAVGTTALRALEAASQSGGLHAGQGETDIFIFPGYRFRLVDALVTNFHLPKSTLLMLISAFAGRDRIMGAYRAAIEAQYRFFSYGDAMFIEGTQPASRNTQHVKSGADE

SEQ ID NO: 63042 - protein, 355 aa, Alcanivorax dieselolei
  misc_feature (1)..(355): tr|K0CJL7|K0CJL7_ALCDB S-adenosylmethionine:tRNA ribosy ltransferase-isomerase OS=Alcanivorax dieselolei (strai n DSM 16502 / CGMCC 1.3690 / B-5) OX=930169 GN=queA PE= 3 SV=1
MQVDDFDFDLPDELIARYPPAQRRDARLLTLTGAGMGHGRFPDLSAWLRPGDLLVFNDTRVIPARLFGRKQTGGRVEVLIERLLGGREALAHVRASKSPKAGGWLEFDQGVAAEVRGRRGELFHLMFTGCEQVLDALERVGHVPLPPYIDRPDEDTDLQRYQTVYAREPGAVAAPTAGLHFDEAFIEQLREQGVETGFVTLHVGAGTFQPVRVDKVEEHHMHSERFRISEALVEQVLAARARGGRVVAVGTTALRALEAASAGGALSSGEAETDIFIYPGYRFRQVDALVTNFHLPRSTLLMLISAFAGQDRVLAAYQEAVREGYRFFSYGDAMFIEGTQHAARNTQHAQDGGDV

SEQ ID NO: 63043 - protein, 354 aa, Alcanivorax hongdengensis
  misc_feature (1)..(354): tr|L0WAX8|L0WAX8_9GAMM S-adenosylmethionine:tRNA ribosy ltransferase-isomerase OS=Alcanivorax hongdengensis A-1 1-3 OX=1177179 GN=queA PE=3 SV=1
MNVDDFDFDLPDGLIARHPPAQRRDARLLALKRDQLLHQQFPDLLSHLRPGDLLVFNDTRVIPARLYGQKESGGKVEVLIERILDEHQALAHVRASKSPKPGSWLHFDQGIIAQVSGRRDALFHLTFSGCGTLLDALERIGHVPLPPYIDRPDEQGDLERYQTVYAREPGAVAAPTAGLHFDDEMLAALTDAGIDTGFITLHVGAGTFQPVRVDKVEDHQMHSERYQVPEALAEQVAQAHARGGRVVAVGTTALRALEAASQSGRLQAGQGETDIFIFPGYRFRLVDALVTNFHLPRSTLLMLISAFAGRERVMHAYQAAIEARYRFFSYGDAMFIERQPDVGCQTSDAGESRV

SEQ ID NO: 63044 - protein, 347 aa, Alcanivorax jadensis
  misc_feature (1)..(347): tr|A0A095UEP3|A0A095UEP3_9GAMM S-adenosylmethionine:tRN A ribosyltransferase-isomerase OS=Alcanivorax jadensis T9 OX=1177181 GN=queA PE=3 SV=1
MNVDDFDFDLPDGLIARHPPAERRDARLLALTCDALQHQQFPDLLSHVHPGDLLIFNDTRVIPARLFGQKESGGKVEVLIERVVDEREALAHVRASKSPKPGTWLQFDEGVRAQVTGRRDALFILLFQGCDTLLGALERIGHVPLPPYIDRPDEAGDMERYQTVYAREPGAVAAPTAGLHFDDEMLAALEQHGVDIGFVTLHVGAGTFQPVRVDKVEDHHMHSERYQIPDSLVEQVAQAHARGGRVVAVGTTALRALEAASQTGGLVAGQGETEIFIYPGYRFRLVDCLVTNFHLPKSTLLMLISAFAGRERVMAAYQAAIDAQYRFFSYGDAMFIERVAVPPAEGL

SEQ ID NO: 63045 - protein, 369 aa, Alcanivorax nanhaiticus
  misc_feature (1)..(369): tr|A0A095SLP0|A0A095SLP0_9GAMM S-adenosylmethionine:tRN A ribosyltransferase-isomerase OS=Alcanivorax nanhaitic us OX=1177154 GN=queA PE=3 SV=1
MPVQYVNVDDFDFELPDGLIARHPPAQRRDARLLALTRDNLQHQQFPDLLSHVRPGDLLIFNDTRVIPARLFGQKDSGGKVEVLIERVVDDHEALAHVRASKSPKPGSWLQFDQGVRAQVTGRRDALFILQFQGCGSSQESGCGTLLDVLEQIGHVPLPPYIDRPDEVGDMERYQTVYAREPGAVAAPTAGLHFDDEMLAALEQHGVDIGYVTLHVGAGTFQPVRVDRVEDHHMHSERYQIPDTLVEQVAQAHARGGRIVAVGTTALRALEAASQSGGLQAGQGETDIFIFPGYQFRLVECLLTNFHLPKSTLLMLISAFAGQQRVMAAYQAAIEAEYRFFSYGDAMFIERQSGVGRPASDQKVHPCPE

SEQ ID NO: 63046 - protein, 343 aa, Alcanivorax pacificus
  misc_feature (1)..(343): tr|A0A0B4XJB7|A0A0B4XJB7_9GAMM S-adenosylmethionine:tRN A ribosyltransferase-isomerase OS=Alcanivorax pacificus W11-5 OX=391936 GN=queA PE=3 SV=1
MRVDDFDFDLPEQLIARRPATERAGSRLLALTRDALAHRQFPDLTALLRPGDLLVFNDTRVIPARLFGQKDSGGRVEVLIERLTGTHTALAHVRASKAPKPGTGLQFDDGVSATMVARQGDLFELVFQGEAPLLDVLARIGHVPLPPYIDRPDDEQDMSRYQTVYARHPGAVAAPTAGLHFDEPLLAALAEQGVAQAFVTLHVGAGTFQPVRVDKVEDHVMHSERYQVPQSLVDEVAATRARGGRVVAVGTTSLRALEAAAGDGALRAGEGDTDIFIVPGYRFRVVDALVTNFHLPRSTLLMLISAFAGRERVLAAYAEAVAQQYRFFSYGDAMFIERAEDAT

SEQ ID NO: 63047 - protein, 347 aa, Alcanivorax profundi
  misc_feature (1)..(347): tr|A0A418XW15|A0A418XW15_9GAMM S-adenosylmethionine:tRN A ribosyltransferase-isomerase OS=Alcanivorax profundi OX=2338368 GN=queA PE=3 SV=1
MNVDDFDFELPDGLIARHPPAQRRDARLLALTRDALQHQQFPDLLGHVRPGDLLIFNDTRVIPARLFGHKDSGGKVEVLIERVVDDHEALAHVRASKSPKPGSWLQFDEGVRAQVTGRRDALFILQFHGCETLLGALERIGHVPLPPYIDRPDEQGDMERYQTVYAREPGAVAAPTAGLHFDEAMLAALQQHGVDIGYVTLHVGAGTFQPVRVDKVEDHHMHSERYQIPETLVEQVAQAHARGGRIVAVGTTALRALEAASQSGGLKAGQGETDIFIYPGYQFRLVECLLTNFHLPKSTLLMLISAFAGQERVMNAYQAAIEAEYRFFSYGDAMFIERVDVSTAKGD

SEQ ID NO: 63048 - protein, 363 aa, Alcanivorax sp.
  misc_feature (1)..(363): tr|B4X5W8|B4X5W8_9GAMM S-adenosylmethionine:tRNA ribosy ltransferase-isomerase OS=Alcanivorax sp. DG881 OX=2360 97 GN=queA PE=3 SV=1
MPVQYVNVDDFDFELPDGLIARHPPAERRDARLLALTRDALLHQQFPDLLSHVHPGDLLIFNDTRVIPARLFGQKESGGKVEVLIERVVDDHEALAHVRASKSPKPGSWLEFDEGIRAQVTGRRDALFILQFSLPGQGCDTLLTALEKIGHVPLPPYIDRPDEDGDMERYQTVYAREPGAVAAPTAGLHFDDAMLAALEQHGVDIGFVTLHVGAGTFQPVRVDKVEDHHMHSERYQIPDSLVEQVAQAHARGGRVVAVGTTALRALEAASQSGGLQTGQGETDIFIYPGYRFRLVDALVTNFHLPKSTLLMLISAFAGRDRVMNAYQAAIESQYRFFSYGDAMFIEGTQHASRDTQHAGGADE

SEQ ID NO: 63049 - protein, 350 aa, Alcanivorax sp.
  misc_feature (1)..(350): tr|A0A2E4YJE4|A0A2E4YJE4_9GAMM S-adenosylmethionine:tRN A ribosyltransferase-isomerase OS=Alcanivorax sp. OX=18 72427 GN=queA PE=3 SV=1
  misc_feature (81)..(81): Xaa can be any naturally occurring amino acid
  misc_feature (92)..(92): Xaa can be any naturally occurring amino acid
  misc_feature (102)..(102): Xaa can be any naturally occurring amino acid
  misc_feature (108)..(108): Xaa can be any naturally occurring amino acid
  misc_feature (128)..(128): Xaa can be any naturally occurring amino acid
  misc_feature (138)..(138): Xaa can be any naturally occurring amino acid
  misc_feature (148)..(148): Xaa can be any naturally occurring amino acid
  misc_feature (165)..(165): Xaa can be any naturally occurring amino acid
  misc_feature (180)..(180): Xaa can be any naturally occurring amino acid
  misc_feature (187)..(187): Xaa can be any naturally occurring amino acid
  misc_feature (189)..(189): Xaa can be any naturally occurring amino acid
  misc_feature (202)..(202): Xaa can be any naturally occurring amino acid
  misc_feature (208)..(208): Xaa can be any naturally occurring amino acid
  misc_feature (230)..(231): Xaa can be any naturally occurring amino acid
  misc_feature (237)..(237): Xaa can be any naturally occurring amino acid
  misc_feature (267)..(267): Xaa can be any naturally occurring amino acid
  misc_feature (274)..(274): Xaa can be any naturally occurring amino acid
  misc_feature (277)..(278): Xaa can be any naturally occurring amino acid
  misc_feature (282)..(282): Xaa can be any naturally occurring amino acid
  misc_feature (301)..(301): Xaa can be any naturally occurring amino acid
  misc_feature (346)..(346): Xaa can be any naturally occurring amino acid
MRVDDFDFDLPEALIARHPPERRRDARLLALTVDALKHQRFPDLADHLRPGDLLVFNDTRVIPARLFGHKSSGGRVEVLIXRLLEGTRALAXVRASKSPKPXTGLVFXQGIGARVEGRRGELFELDFXGCETALEALXRIGHVPLPPXIDRPDEGADQERYQTVXAREPGAVAAPTAGLXFDQPMLXQXQAMGVETGFVTLXVGAGTXQPVRVERVEDHPMHSERFRVEXXLVEQVXATRARGGRVVAVGTTALRTLEAASAGGALXAGESETXIFXXPGYXFRQVDALVTNFHLPRSTLXMLVSAFAGRERVLAAYEEAIRERYRFFSYGDAMFIERAPDAQRGXSCPE

SEQ ID NO: 63050 - protein, 349 aa, Algibacter alginicilyticus
  misc_feature (1)..(349): tr|A0A0N7HYD3|A0A0N7HYD3_9FLAO S-adenosylmethionine:tRN A ribosyltransferase-isomerase OS=Algibacter alginicily ticus OX=1736674 GN=queA PE=3 SV=1
MKLSHFGFNLPEELLAEHPAENRDESRLMVLDRAKQTIEHKQFKDLIEYFNEDDVMILNDTKVFPARLYGNKEKTGARIEVFLLRELNEEQRLWDVLVDPARKIRIGNKLYFGDDDTLVAEVIDNTTSRGRTLRFLYDGSYTEFRRKLTELGETPLPKYIKREVEPEDEDRYQTIFAEKEGAVAAPTAGLHFSKHLLKRLEIKGVEFAKVTLHVGLGTFNPVEVEDLSKHKMDSEELFIGPEAVKTVNTAIENKRRVCAVGTTSMRAIESAVSSNGRLNEMSGWTNKFIFPPYDFSIANCMITNFHTPKSTLLMMASAFAGHDFIKRAYEEAVKEKYKFYSYGDAMLII

SEQ ID NO: 63051 - protein, 349 aa, Algibacter amylolyticus
  misc_feature (1)..(349): tr|A0A556QUP6|A0A556QUP6_9FLAO S-adenosylmethionine:tRN A ribosyltransferase-isomerase OS=Algibacter amylolytic us OX=1608400 GN=queA PE=3 SV=1
MKLSHFGFELPEERLAEYPAENRDESRLMVLNRKEQTIEHKMFKDVIDYFDEDDVLVLNNTKVFPARLFGNKEKTGARIEVFLLRELNEEQRLWDVLVDPARKIRIGNKLYFGDDDTLVAEVIDNTTSRGRTLRFLYDGSYREFRIKLNELGETPLPKYIKRDVEPEDEARYQTIFAKNEGAVAAPTAGLHFSRHLLKRLEIKGVNFAEVTLHVGLGTFNPVEVEDLSKHKMDSEELKIGPEAVNIVNRGLKEKRRICAVGTTAVRAVESAVSTNGQLNEYDGWTNKFIFPPYEFTIPNAMITNFHTPKSTLLMMVSAFAGHDFIKRAYDEAIKEGYNFYSYGDAMLII

SEQ ID NO: 63052 - protein, 349 aa, Algibacter aquaticus
  misc_feature (1)..(349): tr|A0A1E5T9F9|A0A1E5T9F9_9FLAO S-adenosylmethionine:tRN A ribosyltransferase-isomerase OS=Algibacter aquaticus OX=1849968 GN=queA PE=3 SV=1
MKLSHFGFDLPDELLAEYPAENRDESRLMVLNRKEQTIEHKMFKDLIDYFKEDDVLILNNTKVFPARLYGNKEKTGARIEVFLLRELNEEQRLWDVLVDPARKIRIGNKLYFGDDDTLVAEVIDNTTSRGRTLRFLYDGSYKEFRRKLNELGETPLPKYIKREVEPEDEARYQTIFAKNEGAVAAPTAGLHFSKHLLKRLEIKGVDFAEVTLHVGLGTFNPVEVEDLSKHKMDSEELKIDEKAVKVVNEAIENKRRVCAVGTTAMRAIESAVSSNGRLNEIDGWTNKFIFPPYDFSIANCMITNFHTPKSTLLMMVSAFAGHDFIKKAYDEAVKEKYKFYSYGDAMLII

SEQ ID NO: 63053 - protein, 349 aa, Algibacter lectus
  misc_feature (1)..(349): tr|A0A090V9A3|A0A090V9A3_9FLAO S-adenosylmethionine:tRN A ribosyltransferase-isomerase OS=Algibacter lectus OX= 221126 GN=queA PE=3 SV=1
MKLSHFGFNLPDELLAEYPAENRDESRLMVLNRKEQTIEHKMFKDIIDYFQEDDVLILNDTKVFPARLYGNKEKTGARIEVFLLRELNEEQRLWDVLVDPARKIRIGNKLYFGDDETLVAEVIDNTTSRGRTLRFLYDGSYTEFRKKLNELGETPLPKYIKRDVEPEDQDRYQTIYAKTEGAVAAPTAGLHFSRHLLKRLEIKGVKFAEVTLHVGLGTFNPVEVEDLSKHKMDSEELKIEAKAVEIVNTALSEKRRICAVGTTAMRAIESAVSTSGKLNEVEGWTNKFIFPPYDFSIANCMITNFHTPKSTLLMMISAFAGHDFAKKAYEEAVKEKYKFYSYGDAMLII

SEQ ID NO: 63054 - protein, 349 aa, Algibacter pectinivorans
  misc_feature (1)..(349): tr|A0A1I1PPU8|A0A1I1PPU8_9FLAO S-adenosylmethionine:tRN A ribosyltransferase-isomerase OS=Algibacter pectinivor ans OX=870482 GN=queA PE=3 SV=1
MKLSHFGFELPEERLAEYPAENRDESRLMVLNRKEQTIEHKMFKDVIDYFDEDDVLVLNNTKVFPARLFGNKEKTGARIEVFLLRELNEEQRLWDVLVDPARKIRIGNKLYFGDDDTLVAEVIDNTTSRGRTLRFLYDGSYREFRIKLNELGETPLPKYIKRDVEPEDEERYQTIFAKNEGAVAAPTAGLHFSKHLLKRLEIKGVNFAEVTLHVGLGTFNPVEVEDLSKHKMDSEELKIGPEAVKIVNKGLKEKRRICAVGTTAVRAVESAVSTNGELNEFDGWTNKFIFPPYDFSIPNAMITNFHTPKSTLLMMVSAFAGHDFVKRAYDEAIKEGYNFYSYGDAMLII

SEQ ID NO: 63055 - protein, 349 aa, Algibacter sp.
  misc_feature (1)..(349): tr|A0A2N0J8T3|A0A2N0J8T3_9FLAO S-adenosylmethionine:tRN A ribosyltransferase-isomerase OS=Algibacter sp. RHA_19 OX=1798237 GN=queA PE=3 SV=1
MKLSSFNFELPDNLLAEYPSEHRDEAKLMVIHRETGKIEHKMFKDLINYFDEGDVMVLNNTKVFPARLYGNKEKTGARIEVFLLRELNAEQRLWDVLVDPARKIRIGNKLYFGDDETLVAEVIDNTTSRGRTLRFLYDGSYTDFRQKLKDLGETPLPKYIKRDVEETDEDRYQTIYAKHEGAVAAPTAGLHFSKHLLKRLEIKGVDFAELTLHVGLGTFNPVEVEDLSKHKMDSEELVIDEKATEVVNSAIDGKRRICAIGTTAMRGLESAVSSNGHLNTYEGWTNKFIFPPYDFSIANSMVTNFHLPKSTLLMMVSAFVGHDLMKKAYKEAILESYKFYSYGDAMLII

SEQ ID NO: 63056 - protein, 349 aa, Algibacter sp.
  misc_feature (1)..(349): tr|A0A2U2X9A8|A0A2U2X9A8_9FLAO S-adenosylmethionine:tRN A ribosyltransferase-isomerase OS=Algibacter sp. ZY111 OX=2100723 GN=queA PE=3 SV=1
MKLSHFGFELPEERLAEYPAENRDESRLMVLNRKEQTIEHKMFKDVIDYFDEDDVLVLNNTKVFPARLFGNKEKTGARIEVFLLRELNEEQRLWDVLVDPARKIRIGNKLYFGEDESLVAEVIDNTTSRGRTLRFLYDGSYREFRIKLNELGETPLPKYIKRDVEPDDESRYQTIYAKNEGAVAAPTAGLHFSRHLLKRLEIKGVNFAEVTLHVGLGTFNPVEVEDLSKHKMDSEELIINEDAVKIVNKGLKEKRRICAVGTTAVRAVESAVSTSGQLNEFDGWTNKFIFPPYEFSIPNAMITNFHTPKSTLLMMVSAFAGHDFIKRAYDEAIKEGYNFYSYGDAMLII

SEQ ID NO: 63057 - protein, 349 aa, Algibacter wandonensis; identical to SEQ ID NO: 63053
  misc_feature (1)..(349): tr|A0A4R8MFH5|A0A4R8MFH5_9FLAO S-adenosylmethionine:tRN A ribosyltransferase-isomerase OS=Algibacter wandonensi s OX=1343161 GN=queA PE=3 SV=1

SEQ ID NO: 63058 - protein, 351 aa, Algoriella xinjiangensis
  misc_feature (1)..(351): tr|A0A1I4ZUA1|A0A1I4ZUA1_9FLAO S-adenosylmethionine:tRN A ribosyltransferase-isomerase OS=Algoriella xinjiangen sis OX=684065 GN=queA PE=3 SV=1
MKMKTSDFDFNLPEELLAEHPSENRDESRLMVIHRDTGVIEHKLFKDVIDYFEEGDVMIRNNTKVFPARLMGNKEKTGAQIEVFLLRELDAETRLWDVLVDPARKIRIGNKLFFDNDDTLVAEVVDNTTSRGRTLRFLFDGSYEEFRAKLKELGETPLPKYILRDVEPEDAERYQTIYAKHEGAVAAPTAGLHFSKHLLKRLEIKGVEFAELTLHIGLGTFQAVEVEDLSKHKMESEQVIIPQITADIVNRAIDDKKRVCAIGTSSMRSIESAVSADGHLNALDSWTNKFVHPPYDFSIANCMITNFHTPKSTLIMMISAFAGHDLTMKAYNEAVKEGYRFYSYGDAMLIL

SEQ ID NO: 63059 - protein, 405 aa, Algoriphagus alkaliphilus
  misc_feature (1)..(405): tr|A0A1G5YGR7|A0A1G5YGR7_9BACT S-adenosylmethionine:tRN A ribosyltransferase-isomerase OS=Algoriphagus alkaliph ilus OX=279824 GN=queA PE=3 SV=1
MEIPKIDLSEYEYTLPDERIAKFPLEKRDASKLLHFLKGNIKHLHFYDLPELLTSDTLLVYNDTKVIPARLIFLRETGAKIEIFLLQPISPTTVIPEIMLANYPVTWETMIGNAKKWKDGEILQGQVQVNDRKVVLSAKLINRETKAVEFSWDDPEIAFVDLVEASGEVPLPPYLNRKPNEADKSRYQTVYSKKEGAVAAPTAGLHFTEEVFQKLRAKGIREAQVTLHVSAGTFQPIKAENVVEHPMHSEQIQVSRETIELLLAQKGNTVAVGTTSVRTLESLFWYGVKLLEGKGEDLLIEKLFAYQPRTAVPTKSESLHAIVEFMEKNGLESILGSTEIFIFPGYRYRMIEGLITNFHQPGSTLILLIATILGEDWKRVYKEAMESDYRFLSYGDSSLLWISYG

SEQ ID NO: 63060 - protein, 349 aa, Algoriphagus alkaliphilus
  misc_feature (1)..(349): tr|A0A1G5WF48|A0A1G5WF48_9BACT S-adenosylmethionine:tRN A ribosyltransferase-isomerase OS=Algoriphagus alkaliph ilus OX=279824 GN=queA PE=3 SV=1
MKLSDFKFDVPKKLISLYPTENRDDSRLMVVHRKTGQIEHRIFKDILEYFEEGDVFVTNDTKVFPARLYGNKEKTGAKIEVFLLRELNPELRLWDVLVDPARKIRVGNKLYFGDSDLVAEVIDNTTSRGRTIRFLFDGNHDEFEKTIDTLGETPLLKDIIERKIEPEDRERYQTVFAKNVGAVAAPTAGLHFTPQLLKRLELKGVEVTPITLHVGLGTFRQVDVEDLTKHKMDSENYNIPANTVKLVNEALDAKKRVVAVGTTSLKTIESSVTAGGRLKESTGWTDKFIIPPYEFKIANSLITNFHLPESTLLMTASAFGGYDLVMKAYREAIKEKYRFFSYGDAMLIL

SEQ ID NO: 63061 - protein, 349 aa, Algoriphagus antarcticus
  misc_feature (1)..(349): tr|A0A3E0DHN4|A0A3E0DHN4_9BACT S-adenosylmethionine:tRN A ribosyltransferase-isomerase OS=Algoriphagus antarcti cus OX=238540 GN=queA PE=3 SV=1
MKLSDFKFDVPKKLISLYPAANRDESRLMVLHRDTGKIEHRVFKDITEYFGEGDVFVTNDTKVFPARLYGNKEKTGAEIEVFLLRELNSELKLWDVLVDPARKIRVGNKLYFGDSDLVAEVIDNTTSRGRTIRFLFDGTDEEFHKTIDTLGETPLLKEFIERKVEAEDKERYQTVFAKNVGAVAAPTAGLHFTPHLLKRLELQGVDVTPITLHVGLGTFRQVDVEDLTKHKMDSENYSIPDNTVALVNRALDAKKRVVAVGTTSLKTIESSVTANGRLKASSGWTDKFIIPPYEFKIANSLITNFHLPESTLLMTASAFGGYDLVMKAYKEAIKEKYRFFSYGDAMLIL

SEQ ID NO: 63062 - protein, 403 aa, Algoriphagus antarcticus
  misc_feature (1)..(403): tr|A0A3E0DKE4|A0A3E0DKE4_9BACT S-adenosylmethionine:tRN A ribosyltransferase-isomerase OS=Algoriphagus antarcti cus OX=238540 GN=queA PE=3 SV=1
MKISAIDLTAYEYTLPEEKIAKFPLAKRDASKLLHYKDGEISHLNFSNIPDLLPADTLLVYNDTKVIPARLIFQRETGARIEIFLLQPVLPTTVIPEIMLAKHPVVWETMIGNAKKWKDGEILKGLIPFNDGTITLQARLIDRATRQVEFSWDNAEVAFVDVVEARGEVPLPPYLNRKPVEEDKSRYQTVYSEKEGAVAAPTAGLHFTPEIFEQLRLKGIMEAQVTLHVSAGTFQPIKASQVTEHPMHSEQIHISRKTIELIISHLGKVVTVGTTSVRTLESLYWYGVKLLEGKGEDLKIEKLFPYENRRSLPAAKESYAAILTYMNEKSLETIMGTTEIFIFPGYEFKIVKGLITNFHQPGSSLILLIATILGEDWKRVYDEALANEYRFLSYGDSSLLWLK

SEQ ID NO: 63063 - protein, 349 aa, Algoriphagus aquaeductus
  misc_feature (1)..(349): tr|A0A326RQP9|A0A326RQP9_9BACT S-adenosylmethionine:tRN A ribosyltransferase-isomerase OS=Algoriphagus aquaeduc tus OX=475299 GN=queA PE=3 SV=1
MKLSDFKFDVPKKLIALYPTDNRDESRLMVVHRKTGEIEHRTFKDILDYFGEGDVFVTNDTKVFPARLYGNKEKTGAKIEVFLLRELNPELRLWDVLVDPARKIRVGNKLYFGDSDLVAEVIDNTTSRGRTIRFLFDGNEEEFQKTIDTLGETPLLKEIIERKIEPEDRERYQTVFAKNVGAVAAPTAGLHFTPQLLKRLELKGVEVTPITLHVGLGTFRQVDVEDLTKHKMDSENYFIPEKTVALVNEALDNKKRVVAVGTTSLKTVESSVTAGGRLKASSGWTDKFIIPPYDFKIANALITNFHLPESTLLMTASAFGGYDLIMKAYKEAVKEKYRFFSYGDAMLIL

SEQ ID NO: 63064 - protein, 402 aa, Algoriphagus aquaeductus
  misc_feature (1)..(402): tr|A0A326RTX0|A0A326RTX0_9BACT S-adenosylmethionine:tRN A ribosyltransferase-isomerase OS=Algoriphagus aquaeduc tus OX=475299 GN=queA PE=3 SV=1
MEIPKIDLKDFEYTLPEERIAKFPLEKRDASQLLHYQNGKIDHYHFFDLPELLPGNTLLVYNNTKVIPARLIFQRETGAKIEIFLLQPVAPTTVIPEIMLAKHPVTWETMIGNAKKWKDGEVLKGRIAVNGREVILSARIVNRENKQVEFTWENYEIAFVDLVEASGEVPLPPYLNRKPTANDKSRYQTVYSKKEGAVAAPTAGLHFTEEVFAKLRTKGIEEAEVTLHVSAGTFQPIKVANVLEHPMHSEQMEIKRETVEKLLSHSGKIVAVGTTSVRTLESLYWYGVKLIERKGSDFQIEKLYPYASHHHVPSREQSLQAIIEEMNIRATDTIMGTTEIFIFPGYRFQLVDGLITNFHQPGSTLILLISAILGGKWRNVYQEALDKNYRFLSYGDSSLLWI

SEQ ID NO: 63065 - protein, 403 aa, Algoriphagus aquimarinus
  misc_feature (1)..(403): tr|A0A5C7ANV8|A0A5C7ANV8_9BACT S-adenosylmethionine:tRN A ribosyltransferase-isomerase OS=Algoriphagus aquimari nus OX=237018 GN=queA PE=3 SV=1
MQIPAIDLTAYEYTLPEEKIAKFPLAKRDASKLLHYKDGQISHLNFSNIPDLLPADTLLVYNDTKVIPARLIFQRETGARIEIFLLQPISPTTVIPEIMLAKHPVIWETMIGNSKKWKDGEILKGVIPFQGSTITLFAKLIDRESRQVEFSWDNAEVAFVDVVEASGEVPLPPYLNRKPVEEDKSRYQTVYSEKEGAVAAPTAGLHFTPEIFERLKTKGIKEAQVTLHVSAGTFQPIKASQVTEHPMHSEQIHVDRKTIETIIPNLGKIVTVGTTSVRTLESLYWYGVKLLEGKGEELRIEKLFPYEDRENLPSAQKSYEAILIHMKEKGLQTIMGTTEIFIFPGYEFKIVKGLITNFHQPGSTLILLIATILGEDWRHVYKDALANNYRFLSYGDSSLLWIE

SEQ ID NO: 63066 - protein, 349 aa, Algoriphagus aquimarinus
  misc_feature (1)..(349): tr|A0A1I0YZ10|A0A1I0YZ10_9BACT S-adenosylmethionine:tRN A ribosyltransferase-isomerase OS=Algoriphagus aquimari nus OX=237018 GN=queA PE=3 SV=1
MKLSDFKFDVPKKLVAHYPAANRDESRLMVLHRDTGEIEHRIFKDITEYFGEGDVFVTNDTKVFPARLYGNKEKTGAEIEVFLLRELNAELKLWDVLVDPARKIRVGNKLYFGDSDLVAEVIDNTTSRGRTIRFLFDGTEEEFHKTIDTLGETPLLKEFIERKVEAEDKERYQTVFAKNVGAVAAPTAGLHFTPHLLKRLELQGVDVTPITLHVGLGTFRQVDVEDLTKHKMDSENYSIPDGTVELVNRSLDAKKRVVAVGTTSLKTIESSVTANGRLKASSGWTDKFIIPPYEFKIANSLITNFHLPESTLLMTASAFGGYDLVMKAYKEAIKEKYRFFSYGDAMLIL

SEQ ID NO: 63067 - protein, 402 aa, Algoriphagus boritolerans
  misc_feature (1)..(402): tr|A0A1H5RS56|A0A1H5RS56_9BACT S-adenosylmethionine:tRN A ribosyltransferase-isomerase OS=Algoriphagus boritole rans DSM 17298 = JCM 18970 OX=1120964 GN=queA PE=3 SV=1
MEIPKIDLRDYEYTLPEERIAKFPLEKRDSSKLLHVRKGAMEHLHFYDLPSLLSSDTLLVYNDTKVIPARLIFQRETGARIEIFLLQPVAPTTVISEIMLTRHPVTWETMIGNSKKWKDDEILTGQVRVNGRVVILSAQLADRESKSVVFSWDDATVAFVDLVEASGEVPLPPYLNRKPNEEDKSRYQTVYSKKEGAVAAPTAGLHFTAEIFEKLRAKGIQEAQVTLHVSAGTFQPIKAQNILEHPMHSEQIQIGRETVEKLLAQKGKTVAVGTTSVRTLESLFWFGVKLLENKGSEFRIEKLFAYENRSTVPSKEDALQAVLNYMEKNQLETILGSTEIFIFPGYRFRMIEGLITNFHQPGSTLILLIATILGKSWSVVYQEALDRDYRFLSYGDSSLLWI

SEQ ID NO: 63068 - protein, 349 aa, Algoriphagus boritolerans
  misc_feature (1)..(349): tr|A0A1H5UXM3|A0A1H5UXM3_9BACT S-adenosylmethionine:tRN A ribosyltransferase-isomerase OS=Algoriphagus boritole rans DSM 17298 = JCM 18970 OX=1120964 GN=queA PE=3 SV=1
MKLSDFKFDVPKKLISLYPTENRDDSRLMVVHRKTGQIEHRIFKDILEYFEEGDVFVTNDTKVFPARLYGNKEKTGAKIEVFLLRELNPELRLWDVLVDPARKIRVGNKLYFGDSDLVAEVIDNTTSRGRTIRFLFDGNHDEFEKTIDTLGETPLLKEIIERKIEPEDRERYQTVFAKNVGAVAAPTAGLHFTPQLLKRLELKGVEVTPITLHVGLGTFRQVDVEDLTKHKMDSENYNIPAGTVKLVNEALDSKKRVVAVGTTSLKTIESSVTAGGRLKESNGWTDKFIIPPYEFKIANALITNFHLPESTLLMTASAFGGYDLVMKAYKEAIKEKYRFFSYGDAMLIL

SEQ ID NO: 63069 - protein, 349 aa, Algoriphagus boseongensis
  misc_feature (1)..(349): tr|A0A4R6T4V6|A0A4R6T4V6_9BACT S-adenosylmethionine:tRN A ribosyltransferase-isomerase OS=Algoriphagus boseonge nsis OX=1442587 GN=queA PE=3 SV=1
MKLSDFKFDVPKKLIALYPTENRDESRLMVVHRKTGQIEHKSFKDILDYFDEGDVFVTNDTKVFPARLYGNKEKTGAKIEVFLLRELNPELRLWDVLVDPARKIRVGNKLYFGDSDLVAEVIDNTTSRGRTIRFLFDGTPEEFQKTIDSLGETPLLKEYIDRKIEPEDRERYQTVFAKNLGAVAAPTAGLHFTPQLLKRLELKGIDVTPITLHVGLGTFRQVDVEDLTKHKMDSENYDIPQKTVDLVNEALDNKRKVVAVGTTSLKTVESSVTAGGRLKVSSGWTDKFIIPPYEFKIANALITNFHLPESTLLMTAAAFGGYDLIMKAYKEAIKEKYRFFSYGDAMLIL

SEQ ID NO: 63070 - protein, 402 aa, Algoriphagus boseongensis
  misc_feature (1)..(402): tr|A0A4R6T8T8|A0A4R6T8T8_9BACT S-adenosylmethionine:tRN A ribosyltransferase-isomerase OS=Algoriphagus boseonge nsis OX=1442587 GN=queA PE=3 SV=1
MEIPQIDLKNYEYTLPDERIAKFPLEKRDHSQLLQYLKGEIRHYHFYDLPDLLPTDTLLVYNDTKVIPARLIFQRETGAKIEIFLLAPVAPTTVIPEIMLAKHPVTWETMIGNAKKWKDGEILQGRIQMGAKEVVLQAKLVDRESKQVEFSWNDPEIAFVDLVEASGEIPLPPYLNRKAEASDKDRYQTVYSKKEGAVAAPTAGLHFTEEVFERLRKKGVREAQVTLHVSAGTFQPIKVDNVLEHPMHSEQIQVNRETLEILLSNSGKTVAVGTTSVRTLESLFWYGVKLIEGKGEDFFVPKLFAYEKRERIPSRAEAMQAILDLMERQQVETILGQTEIFIFPGYSYQMIEGLITNFHQPGSTLVLLIATILGEDWKKVYQEALDNDYRFLSYGDSSLLWL

SEQ ID NO: 63071 - protein, 349 aa, Algoriphagus chordae
  misc_feature (1)..(349): tr|A0A2W7QTM8|A0A2W7QTM8_9BACT S-adenosylmethionine:tRN A ribosyltransferase-isomerase OS=Algoriphagus chordae OX=237019 GN=queA PE=3 SV=1
MKLSDFKFDVPKKLVALYPEANRDESRLMVLHRDTGKIEHRIFKDITEYFGEGDVFVTNDTKVFPARLYGNKEKTGAEIEVFLLRELNAELKLWDVLVDPARKIRVGNKLYFGDSDLVAEVIDNTTSRGRTIRFLFDGTEEEFHKTIDTLGETPLLKDFIERKVEAEDKERYQTVFAQNVGAVAAPTAGLHFTPHLLKRLELQGVDVTPITLHVGLGTFRQVDVEDLTKHKMDSENYSIPDGTVELVNRSLDAKKRVVAVGTTSLKTIESSVTANGRLKASSGWTDKFIIPPYEFKIANSLITNFHLPESTLLMTASAFGGYDLVMKAYKEAIKEKYRFFSYGDAMLIL

SEQ ID NO: 63072 - protein, 403 aa, Algoriphagus chordae
  misc_feature (1)..(403): tr|A0A2W7R8I5|A0A2W7R8I5_9BACT S-adenosylmethionine:tRN A ribosyltransferase-isomerase OS=Algoriphagus chordae OX=237019 GN=queA PE=3 SV=1
MQIPAIDLKSYEYTLPEEKIAKFPLAKRDSSKLLLYKDTQISHLNFSNISDLLPADSLLVYNDTKVIPARLIFQRETGARIEIFLLQPISPTTVIPEIMLAKHPVIWETMIGNAKKWKDGEILKGLIPFRGGTITLNAKLIDRATRQVEFSWDNADVAFVDVVEASGEVPLPPYLNRKPVEDDKSRYQTVYSEKDGAVAAPTAGLHFTPEILAQIKAKGIKQAQVTLHVSAGTFQPIKADQVTEHPMHSEQINVNRQTIEMISSQLGKVVAVGTTSVRTLESLYWYGVKLIEGKGEELIIEKLFPYENRESVPTAQESYEAILNHMTENNLETIMGSTEIFIFPGYEFKIVEGLITNFHQPGSTLILLIATILGEDWKRVYAEALANDYRFLSYGDSSLLWIE

SEQ ID NO: 63073 - protein, 402 aa, Algoriphagus faecimaris
  misc_feature (1)..(402): tr|A0A1G6U674|A0A1G6U674_9BACT S-adenosylmethionine:tRN A ribosyltransferase-isomerase OS=Algoriphagus faecimar is OX=686796 GN=queA PE=3 SV=1
MFDPKIDLKDYEYFLPDDRIAKFPLEKRDHSNLLQFKGGKISHHHFYDLPVFLPSDTLLVYNNTKVIPARLIFQRETGARIEIFLLQPLTPSTVIPEVMLSTRPVSWDVMIGNAKKWKDGEVLSGEIHINGAQVILQARLENREKRIVSFEWNAQNIAFVDIVEASGEVPLPPYLNRKPVEEDKERYQTVYSKKEGAVAAPTAGLHFTETVFENLRAKGIKEAEVTLHVSAGTFQPIKADNITEHNMHSEQIHLQRETIAQLFNQESKIVAVGTTSVRTLESLYWYGVKLLKNEGDHFLIEKLYPYQDHGGLPTRKESLAAILAQMEKTGKQEIMGSTEIFIFPGYKFQMIEGLITNFHQPGSTLVLLIASILGEDWKKIYQEALDKNYRFLSYGDSSLLWV

SEQ ID NO: 63074 - protein, 349 aa, Algoriphagus faecimaris
  misc_feature (1)..(349): tr|A0A1G6XJQ4|A0A1G6XJQ4_9BACT S-adenosylmethionine:tRN A ribosyltransferase-isomerase OS=Algoriphagus faecimar is OX=686796 GN=queA PE=3 SV=1
MKLSDFKFDVPKKLIALYPTDNRDESRLMVVHRKTGEIEHKTFKDIIEYFGEGDVFVTNDTKVFPARLYGNKEKTGAEIEVFLLRELNPELRLWDVLVDPARKIRVGNKLYFGDSDLVAEVIDNTTSRGRTIRFLFDGTEEEFHKTIDTLGETPLLKDIIERKIEPEDRDRYQTVFAKNVGAVAAPTAGLHFTPHLLKRLELQGVEVTPITLHVGLGTFRQVDVEDLTKHKMDSENYDIPDGTVKLVNEALDHKKRVVAVGTTVLKTVESSVTASNHLKASSGWTDKFIIPPYEFKIANALITNFHLPESTLLMTASAFGGYDLVMKAYKEAIKEKYRFFSYGDAMLIL

SEQ ID NO: 63075 - protein, 349 aa, Algoriphagus halophilus
  misc_feature (1)..(349): tr|A0A1N6D345|A0A1N6D345_9BACT S-adenosylmethionine:tRN A ribosyltransferase-isomerase OS=Algoriphagus halophil us OX=226505 GN=queA PE=3 SV=1
MKLSDFKFDVPKKLVSLYPTENRDESRLMVLHRDTGKIEHRVFKDIVEYFGEGDVFVTNDTKVFPARLYGNKEKTGAEIEVFLLRELNSELRLWDVLVDPARKIRVGNKLYFGDSDLVAEVIDNTTSRGRTIRFLFDGTEEEFHKTIDSLGETPLLKEFIERKVEAEDRERYQTVFAKNVGAVAAPTAGLHFTPHLLKRLELQGVDVTPITLHVGLGTFRQVDVEDLTKHKMDSENYSIPEETVALVNRALDEKKRVVAVGTTSLKTVESSVTANGRLKASAGWTDKFIIPPYEFKIANALITNFHLPESTLLMTASAFGGYDLVMKAYKEAIKEKYRFFSYGDAMLIL

SEQ ID NO: 63076 - protein, 403 aa, Algoriphagus halophilus
  misc_feature (1)..(403): tr|A0A1N6EFQ9|A0A1N6EFQ9_9BACT S-adenosylmethionine:tRN A ribosyltransferase-isomerase OS=Algoriphagus halophil us OX=226505 GN=queA PE=3 SV=1
MNIPQIDLKEYEYTLPEERIARFPLEKRDSSKLLHFKNQVITHQRFSDIPNLLPEDSLLVYNNTKVIPARLIFQRETGARIEIFLLQPIAPTTVIPEIMLAKHPVIWETMIGNLKKWKDGEILQGRIIYQNQEIILSAKLINRDRREVEFSWDQEQIAFVDVVEASGEVPLPPYLNRKPVAEDRDRYQTVYSQKEGAVAAPTAGLHFTNEVLEKLRKKGVKTEEVTLHVSAGTFQPIKSKNITEHPMHSEQIHVAIDTIRNLLQHEGKMVAVGTTSVRTLESLYWYGVKLLRNDGEEFNIPKLYPYTESSVHPHYKDSFQAILSHMEAKGMDTLVGSTEIFIFPGYQFQVVNGLITNFHQPGSTLILLIASILGNRWREIYEEALNSGYRFLSYGDSSLLWID

SEQ ID NO: 63077 - protein, 349 aa, Algoriphagus hitonicola
  misc_feature (1)..(349): tr|A0A1I2WDH1|A0A1I2WDH1_9BACT S-adenosylmethionine:tRN A ribosyltransferase-isomerase OS=Algoriphagus hitonico la OX=435880 GN=queA PE=3 SV=1
MKLSDFKFDVPKKLIALYPTDNRDESRLMVVHRKTGEIEHKTFKDIIEYFGEGDVFVTNDTKVFPARLYGNKEKTGAEIEVFLLRELNPELRLWDVLVDPARKIRVGNKLYFGDSDLVAEVIDNTTSRGRTIRFLFDGTEEEFHKTIDTLGETPLLKEIIERKIEPEDRERYQTVFAKNVGAVAAPTAGLHFTPHLLKRLELQGVEVTPITLHVGLGTFRQVDVEDLTKHKMDSENYNIPDATVKLVNEALDHKKRVVAVGTTVLKTVESSVTASNHLKASSGWTDKFIIPPYEFKIANALITNFHLPESTLLMTASAFGGYDLIMKAYKEAIKEKYRFFSYGDAMLIL

SEQ ID NO: 63078 - protein, 402 aa, Algoriphagus hitonicola
  misc_feature (1)..(402): tr|A0A1I2XDI7|A0A1I2XDI7_9BACT S-adenosylmethionine:tRN A ribosyltransferase-isomerase OS=Algoriphagus hitonico la OX=435880 GN=queA PE=3 SV=1
MFDPKIELKDYEYILPEDRIAKFPLEKRDHSNLLHYREGKISHHHFYDLPDFLESNSLLVYNNTKVIPARLIFQRETGARIEIFLLQPIAPSTVIPEIMLSTKDVAWEVMIGNAKKWKDGEVLKGQVNYQGELLVLEARLENREKQLVSFHWESDEIPFVSIVEASGEVPLPPYLNRKPVAEDKSRYQTVYSKKEGAVAAPTAGLHFTDEVFESLRKKGIKEAELTLHVSAGTFQPIKVANVTEHAMHSEQIHIQRETIEQLLDQEGKTIAVGTTSVRSLESLYWFGVKILEENTPEFFIEKLFPYKKRTQLPTKKQALQAVLDRMDQEKSTEIMGSTEIFIFPGYQFQMIEGLITNFHQPGSTLILLIAAILGEDWKKVYEEALGNGYRFLSYGDSSLLWI

SEQ ID NO: 63079 - protein, 403 aa, Algoriphagus locisalis
  misc_feature (1)..(403): tr|A0A1I6XHB8|A0A1I6XHB8_9BACT S-adenosylmethionine:tRN A ribosyltransferase-isomerase OS=Algoriphagus locisali s OX=305507 GN=queA PE=3 SV=1
MQIPAIDLREYEYTLPEEKIAKHPLAKRDASKLLHYKDGQISHLNFSNIPDLLPADTLLVYNDTKVIPARLIFQRETGARIEIFLLQPISPTTVIPEIMLAKHPVIWETMIGNVKKWKPSEVLKGQIPFQGGTITLEAKLIDRETRKVEFSWDRTDVAFVDVVEASGEVPLPPYLNRKPIEEDKSRYQTVYSEKEGAVAAPTAGLHFTPEIFQQLKSKGIKEAQVTLHVSAGTFQPIKATHVTEHPMHSEQIHVNRETIEMILLHLGNVVTVGTTSVRTLESLYWYGVKLIEGKDEELKIEKLFPYEDRKSLPSAQKSYEAILIYMKEKGLETIMGTTEIFIFPGYQFKVVKGLITNFHQPGSTLILLIATILGDDWKRVYVEALENNYRFLSYGDSSLLRID

SEQ ID NO: 63080 - protein, 349 aa, Algoriphagus locisalis
  misc_feature (1)..(349): tr|A0A1I7DVJ2|A0A1I7DVJ2_9BACT S-adenosylmethionine:tRN A ribosyltransferase-isomerase OS=Algoriphagus locisali s OX=305507 GN=queA PE=3 SV=1
MKLSDFKFDVPKKLVAHYPAANRDESRLMVVHRKTGEIEHRVFKDIIEYFGEGDVFVTNDTKVFPARLYGNKEKTGAEIEVFLLRELNAELKLWDVLVDPARKIRVGNKLYFGDSDLVAEVIDNTTSRGRTIRFLFDGTEEEFHKTIDTLGETPLLKEFIERKVEAEDKERYQTVFAKNVGAVAAPTAGLHFTPHLLKRLELQGVDVTPITLHVGLGTFRQVDVEDLTKHKMDSENYEIPTGTVNLVNKSLDAKKRVVAVGTTALKTIESSVTANGRLKESSGWTDKFIIPPYEFKIANSLITNFHLPESTLLMTAAAFGGYDLVMKAYKEAIKEKYRFFSYGDAMLIL

SEQ ID NO: 63081 - protein, 349 aa, Algoriphagus machipongonensis
  misc_feature (1)..(349): tr|A3HWX0|A3HWX0_9BACT S-adenosylmethionine:tRNA ribosy ltransferase-isomerase OS=Algoriphagus machipongonensis OX=388413 GN=queA PE=3 SV=1
MKLSDFKFEVPKKLVSLYPAENRDESRLMVLHRDTGKIEHRVFKDITEYFGEGDVFVTNDTKVFPARLYGNKEKTGAEIEVFLLRELNPELRLWDVLVDPARKIRVGNKLYFGDSDLVAEVIDNTTSRGRTIRFLFDGTEEEFHKTIDTLGETPLLKEFIERKVETEDRERYQTVFAKNVGAVAAPTAGLHFTPHLLKRLELQGVEVSPITLHVGLGTFRQVDVEDLTKHKMDSENYNIPEGTVSLVNKALDEKKRVVAVGTTSLKTVESSVTANGRLKASQGWTDKFIIPPYEFKIANALITNFHLPESTLLMTASAFGGYDLVMKAYKEAIKEKYRFFSYGDAMLIL

SEQ ID NO: 63082 - protein, 405 aa, Algoriphagus machipongonensis
  misc_feature (1)..(405): tr|E2RUD9|E2RUD9_9BACT S-adenosylmethionine:tRNA ribosy ltransferase-isomerase OS=Algoriphagus machipongonensis OX=388413 GN=queA PE=3 SV=1
MAMKIPEIDLKAYEYTLPEDRIAKFPLEKRDSSKLLLYKNKSIQHLQFYNIPELIPSESLLVYNDTKVIPARLIFQRVTGARIEIFLLQPVAPTTVIPEIMLAKHPVTWETMIGNAKKWKEGETLHGLVTLGDKNIKLSAQLVDKNQRRVTFSWDDPEISFVDVVEGSGEVPLPPYLNRKPVEDDKNRYQTVYSEKEGAVAAPTAGLHFTNEILSKLKEKGVQTEQVTLHVSAGTFQPIKAEKITEHPMHSEQVHIPIGAIKNFIKHAGQIIAVGTTSVRTLESLYWFGVRLIRKETLEFFIPKLYPYENIENLPSSVEAFQSILEHMEKHNLDTLVGSTEIFIFPGYQYKVVKGLITNFHQPGSTLILLIATILGDDWKKVYEEALNNNYRFLSYGDSSLLWID

SEQ ID NO: 63083 - protein, 349 aa, Algoriphagus marincola
  misc_feature (1)..(349): tr|A0A0P7XKX9|A0A0P7XKX9_9BACT S-adenosylmethionine:tRN A ribosyltransferase-isomerase OS=Algoriphagus marincol a HL-49 OX=1305737 GN=queA PE=3 SV=1
MKLSDFKFDVPKKLVALYPTPNRDESRLMVVHRKTGEFEHRSFKDILDYFDEGDVFVTNDTKVFPARLYGNKEKTGAEIEVFLLRELNPELRLWDVLVDPARKIRVGNKLYFGDSDLVAEVIDNTTSRGRTIRFLFDGTPEEFYKAIDTLGETPLLKEIIERKVEPEDRERYQTVFAKNVGAVAAPTAGLHFTPHLLKRLELKGIEVTPITLHVGLGTFRQVDVEDLTKHKMDSENYDIPEKTVKLVNEALDHKKRVVAVGTTVLKTVESSVTASNHLKASSGWTDKFIIPPYEFKIANAMITNFHLPESTLLMTAAAFGGYDLIMKAYKEAIKEKYRFFSYGDAMLIL

SEQ ID NO: 63084 - protein, 402 aa, Algoriphagus marincola
  misc_feature (1)..(402): tr|A0A0P7XCS8|A0A0P7XCS8_9BACT S-adenosylmethionine:tRN A ribosyltransferase-isomerase OS=Algoriphagus marincol a HL-49 OX=1305737 GN=queA-2 PE=3 SV=1
MQKVNLQEYEYTLPEQRIAKYPLEKRDSSKLLHYQSGKISHHHFFDLPDFLEKGTLLVYNDTKVIPARLIFQRETGARIEIFLLNPVQPTTVIPEIMLSTQPVTWQTMIGNAKKWKSDEILKGVIEIQGQKVVLEARLVDKENKWVEFNWNSESVPFVDIVESSGEVPLPPYLNRKAEESDKDRYQTVYSEKEGAVAAPTAGLHFTEEVFEKLPKKGIEEAQVTLHVSAGTFQPIKVDDVTAHPMHSEQIHLQKSTIEKLLNQEGPIVAVGTTSVRTLESLYWHGVQLLENKGTAFKVAKLIPYDSRESLPSKNESLQAVLNQMEAEEKVEIMGETEIFIFPGYQFQMIDGLITNFHQPGTTLMLLIGSLIGDDWKKVYQEALDNDYRFLSYGDSSLLWINK

SEQ ID NO: 63085 - protein, 349 aa, Algoriphagus ornithinivorans
  misc_feature (1)..(349): tr|A0A1I5I8P6|A0A1I5I8P6_9BACT S-adenosylmethionine:tRN A ribosyltransferase-isomerase OS=Algoriphagus ornithin ivorans OX=226506 GN=queA PE=3 SV=1
MKLSDFKFDVPKKLIALYPTDNRDESRLMVVHRKTGEIEHRSFKDIIEYFGEGDVFVTNDTKVFPARLYGNKEKTGAEIEVFLLRELNPELRLWDVLVDPARKIRVGNKLYFGDSDLVAEVIDNTTSRGRTIRFLFDGTEEEFHKTIDTLGETPLLKEIIDRKIEPEDRERYQTVFAKNVGAVAAPTAGLHFTPHLLKRLELQGVEVSPITLHVGLGTFRQVDVEDLTKHKMDSENYDIPEKTVGLVNEALDNKKRVVAVGTTSLKTIESSVTANGRLKASSGWTDKFIIPPYEFKIANALITNFHLPESTLLMTASAFGGYDLIMKAYKEAIKEKYRFFSYGDAMLIL

SEQ ID NO: 63086 - protein, 403 aa, Algoriphagus ornithinivorans
  misc_feature (1)..(403): tr|A0A1I5HPU0|A0A1I5HPU0_9BACT S-adenosylmethionine:tRN A ribosyltransferase-isomerase OS=Algoriphagus ornithin ivorans OX=226506 GN=queA PE=3 SV=1
MKEPQINLRDYEYTLPEDRIAKYPLEKRDDSKLLHYKAGNITHHRFYNLPDLLEEGMLLIYNDTKVIPARLIFQRETGAKIEIFLLAPVSPSTVIPEIMLAKHPVSWETMIGNAKKWKDGEILKGRVQHLGKEIILEAKLLDRERKLVEFSWSPFDVAFVDIVESSGEVPLPPYLNRKAEEEDKSRYQTVYSKKEGAVAAPTAGLHFTEEVFLAIRKKGVKESEVTLHVSAGTFQPIKVDKVQEHPMHSEQIHLQRSVIEKCLEQEGKTVAVGTTSVRSLESLYWYGVKLIENKGEEFFVEKLFPYEIREVLPSKKEALQAVLDLMDSTGQTEVMGSTEIFIFPGYQFQMIEGLITNFHQPGTTLVLLIAAMIGNDWKSVYQEALEKDYRFLSYGDSSLLWFD

SEQ ID NO: 63087 - protein, 349 aa, Algoriphagus ratkowskyi
  misc_feature (1)..(349): tr|A0A2W7TDI5|A0A2W7TDI5_9BACT S-adenosylmethionine:tRN A ribosyltransferase-isomerase OS=Algoriphagus ratkowsk yi OX=57028 GN=queA PE=3 SV=1
MKLSDFKFDVPKKLVALYPAPNRDESRLMVLHRDSGKIEHRVFKDITEYFGEGDVFVTNDTKVFPARLYGNKEKTGAEIEVFLLRELNSELKLWDVLVDPARKIRVGNKLYFGDSDLVAEVIDNTTSRGRTIRFLFDGTDEEFHKTIDTLGETPLLKEFIERKVEAEDKERYQTVFAKNVGAVAAPTAGLHFTPHLLKRLELQGVDVTPITLHVGLGTFRQVDVEDLTKHKMDSENYSIPEETVELVNRSLDAKKRVVAVGTTSLKTIESSVTANGRLKASSGWTDKFIIPPYEFKIANSLITNFHLPESTLLMTASAFGGYDLVMKAYKEAIKEKYRFFSYGDAMLIL

SEQ ID NO: 63088 - protein, 403 aa, Algoriphagus ratkowskyi
  misc_feature (1)..(403): tr|A0A2W7R9P8|A0A2W7R9P8_9BACT S-adenosylmethionine:tRN A ribosyltransferase-isomerase OS=Algoriphagus ratkowsk yi OX=57028 GN=queA PE=3 SV=1
MQIPSIDLKAYEYTLPEEKIAKFPLAKRDSSKLLQYKDGQISHFNFSDISELLPAETLLVYNDTKVIPARLIFQRETGARIEIFLLQPISPTTVIPEIMLAKHPVIWETMIGNAKKWKDGEVLKGIIPLENRTIVLLAKLIDRESRKVEFSWDDDEVAFVDVVEASGEVPLPPYLNRKPNEEDKIRYQTVYSEKEGAVAAPTAGLHFTPEIFELIRSKGIKEAQVTLHVSAGTFQPIKASEVTEHPMHSEQIHVNRNTIRHILSHLGNVVTVGTTSVRTLESLYWYGVKLLEEKGEDLTIEKLFPYLDRKSLPTAKESYDAILSYMDEKGIDTIMGTTEIFIFPGYKFKIVNGLITNFHQPGSTLILLIATILGEDWKRVYAEAMANEYRFLSYGDSSLLWIK

SEQ ID NO: 63089 - protein, 349 aa, Algoriphagus sp.
  misc_feature (1)..(349): tr|A0A418PTZ0|A0A418PTZ0_9BACT S-adenosylmethionine:tRN A ribosyltransferase-isomerase OS=Algoriphagus sp. N3 O X=2056311 GN=queA PE=3 SV=1
MKLSDFKFDVPRKLISLYPTENRDESRLMVVHRKTGQIEHRLFKDILEYFGEGDVFVINDTKVFPARLYGNKEKTGAKIEVFLLRELNPELRLWDVLVDPARKIRVGNKLYFGDSDLVAEVIDNTTSRGRTIRFLFDGNEEEFQKTIDSLGETPLLKEFIDRKIEPEDRERYQTVFAKNVGAVAAPTAGLHFTPQLLKRLELKGVEIAPITLHVGLGTFRQVDVEDLTKHKMDSENYNIPEKTVQLVNEALDSKKRVVAVGTTSLKTVESSVTAGGRLKASSGWTDKFIIPPYEFKIANSLITNFHLPESTLLMTAAAFGGYDLIMKAYKEAVKEKYRFFSYGDAMLIL

SEQ ID NO: 63090 - protein, 349 aa, Algoriphagus sp.
  misc_feature (1)..(349): tr|A0A142EI43|A0A142EI43_9BACT S-adenosylmethionine:tRN A ribosyltransferase-isomerase OS=Algoriphagus sp. M8-2 OX=1727163 GN=queA PE=3 SV=1
MKLSDFKFDVPKKLIALYPTDNRDESRLMVVHRKTGEIEHRTFKDILEYFGEGDVFVTNDTKVFPARLYGNKEKTGAKIEVFLLRELNPELRLWDVLVDPARKIRVGNKLYFGDSDLVAEVIDNTTSRGRTIRFLFDGNEEEFQKTIDSLGETPLLKEFIERKIEPEDRDRYQTVFAKNVGAVAAPTAGLHFTPQLLKRLELKGVEVTPITLHVGLGTFRQVDVEDLTKHKMDSENYDIPQKTVELVNEALDAKKRVVAVGTTSLKTVESSVTAGGRLKASNGWTDKFIIPPYDFKIANSLITNFHLPESTLLMTASAFGGYDLIMKAYKEAVKEKYRFFSYGDAMLIL

SEQ ID NO: 63091 - protein, 349 aa, Algoriphagus yeomjeoni
  misc_feature (1)..(349): tr|A0A327P0V0|A0A327P0V0_9BACT S-adenosylmethionine:tRN A ribosyltransferase-isomerase OS=Algoriphagus yeomjeon i OX=291403 GN=queA PE=3 SV=1
MKLSDFKFDVPKKLVAHYPAANRDESRLMVLHRNTGEIEHRVFKDIIEYFGDGDVFVTNDTKVFPARLYGNKEKTGAEIEVFLLRELNAELKLWDVLVDPARKIRVGNKLYFGDSDLVAEVIDNTTSRGRTIRFLFDGTEEEFHKTIDTLGETPLLKEFIERKVEAEDKERYQTVFAKNVGAVAAPTAGLHFTPHLLKRLELQGVDVAPITLHVGLGTFRQVDVEDLTKHKMDSENYEIPDGTVDLVNRSLDAKKRVVAVGTTSLKTIESSVTANGRLKASSGWTDKFIIPPYEFKIANSLITNFHLPESTLLMTAAAFGGYDLVMKAYKEAIKEKYRFFSYGDAMLIL

SEQ ID NO: 63092 - protein, 403 aa, Algoriphagus yeomjeoni
  misc_feature (1)..(403): tr|A0A327PAX0|A0A327PAX0_9BACT S-adenosylmethionine:tRN A ribosyltransferase-isomerase OS=Algoriphagus yeomjeon i OX=291403 GN=queA PE=3 SV=1
MQIPEIDLKAYEYTLPEEKIAKFPLSRRDSSKLLHYRNGQISHLNFSNLPELLPAETLLVYNDTKVIPARLIFQRETGAKIEIFLLQPLAPTTVIPEIMLAKHPVIWETMIGNAKKWKDNEVLKGQIPFEGGTITLQAKLIDRETRQVEFSWDKAEVAFVDVVEASGEVPLPPYLNRKPIEEDKSRYQTVYSEKEGAVAAPTAGLHFTPEIFLQLKSKGIKEAQVTLHVSAGTFQPIKATQVTEHPMHSEQIHVNRKTIEMVLSQLGSVVTVGTTSVRTLESLYWYGVKLIEGKGEELKIQKLFPYENRDSLPSPQKSFEAILALMEEKGFQTIMGSTEIFIFPGYKFKIVKGLITNFHQPGSTLILLIATILGNEWKRVYTEALANNYRFLSYGDSSLLWID

SEQ ID NO: 63093 - protein, 402 aa, Algoriphagus zhangzhouensis
  misc_feature (1)..(402): tr|A0A1M7ZHG3|A0A1M7ZHG3_9BACT S-adenosylmethionine:tRN A ribosyltransferase-isomerase OS=Algoriphagus zhangzho uensis OX=1073327 GN=queA PE=3 SV=1
MLEPLVNLRDYEYTLPEDRIAKYPLEKRDHSKLLHYKNGKIEHLQFFDIPDLIESGSLLVYNDTKVIPARLIFQRETGARIEIFLLQPVSPSTVIPEIMLAKHPVQWECMIGNARKWKDGEILKGSIPFRGKEIILSAKIIERETKRVEFSWSDFSLSFVDIVEASGEVPLPPYLNRQADEEDKSRYQTVYSKKEGAVAAPTAGLHFTNEVFEKIRSKRIKEAQVTLHVSAGTFQPIKVDKVTEHPMHSEQIHLSRETIQLCMEQEGKTIAVGTTSVRSLESLYWFGVKLIEGKGKDFKIEKLFPYEDRKALPSKKESLKAVLEFMDSTGIGELMGTTEIFIFPGYQFQMIEGLITNFHQPGTTLVLLIAAMLGDDWKMVYQDAMERDYRFLSYGDSSLLWF

SEQ ID NO: 63094 - protein, 349 aa, Algoriphagus zhangzhouensis
  misc_feature (1)..(349): tr|A0A1M7ZIT1|A0A1M7ZIT1_9BACT S-adenosylmethionine:tRN A ribosyltransferase-isomerase OS=Algoriphagus zhangzho uensis OX=1073327 GN=queA PE=3 SV=1
MKLSDFKFDVPKKLVALYPTENRDESRLMVVHRKTGEIEHRSFKDIIDYFGEGDVFVTNDTKVFPARLYGNKEKTGAEIEVFLLRELNPELRLWDVLVDPARKIRVGNKLYFGDSDLVAEVIDNTTSRGRTIRFLFDGTEEEFHKTIDSLGETPLLKEIIERKIEPEDRDRYQTVFAKNVGAVAAPTAGLHFTPHLLKRLELQGVEVTPITLHVGLGTFRQVDVEDLTKHKMDSENYDIPDGTVDLVNEALDNKKRVVAVGTTSLKTIESSVTANGRLKASSGWTDKFIIPPYEFKIANALITNFHLPESTLLMTAAAFGGYDLIMKAYKEAIKEKYRFFSYGDAMLIL

SEQ ID NO: 63095 - protein, 362 aa, Alicycliphilus denitrificans
  misc_feature (1)..(362): tr|A0A420KDF0|A0A420KDF0_9BURK S-adenosylmethionine:tRN A ribosyltransferase-isomerase OS=Alicycliphilus denitr ificans OX=179636 GN=queA PE=3 SV=1
MSTSPRAFTLSDFDFALPEALIAQHPAPVRSASRLLDGRAAPPADRIFHELPALLREGDLLVFNDTRVVKARVFGEKASGGRLELLIERVLAGNEVVAHMKVSKKPLPGATVHMAGGRAAGGFDATLISRWPDADGPLFRFALHGPAGETPWELMERHGHLPLPPYIERQQNAGHDPDEAEDAERYQTIFARTPGAVAAPTAALHFDDAVLAALAERGVQRASVTLHVGAGTFQPVKTESLAEHRMHSEWYEVPLATLAALERCRMRAGRVVAVGTTTVRTLESWARSGQTTGETDIFITPGFQFQVVQLLVTNFHLPKSTLMMLVSAFAGYEHVMQLYRHAIEERYRFFSYGDSMLLERAR

SEQ ID NO: 63096 - protein, 367 aa, Alicycliphilus denitrificans
  misc_feature (1)..(367): tr|E8TUH8|E8TUH8_ALIDB S-adenosylmethionine:tRNA ribosy ltransferase-isomerase OS=Alicycliphilus denitrificans (strain DSM 18852 / JCM 14587 / BC) OX=596153 GN=queA P E=3 SV=1
MSTSPRAFTLSDFDFALPEALIAQHPAPVRSSSRLLDGRAAPPSDRIFHELPALLREGDLLVFNDTRVVKARVFGEKASGGRLELLIERVLAGNEVVAHMKVSKKPMPGATVHMAGGKAAGGFDATLLSRWPDADGPLFRFALHGPAGETPWELMERHGHLPLPPYIERQQNAGHDPDEAEDAERYQTVFARAPGAVAAPTAALHFDDAVLAALAERGVQRASVTLHVGAGTFQPVKTESLAEHRMHSEWYEVPLATLAALERCRMRAGRVVAVGTTTVRTLESWARSGQTTGETDIFITPGFQFQVVQLLVTNFHLPKSTLMMLVSAFAGYEHVMQLYRHAIEERYRFFSYGDSMLLERKNDPTHP

SEQ ID NO: 63097 - protein, 366 aa, Alicycliphilus sp.
  misc_feature (1)..(366): tr|A0A5C8C4P1|A0A5C8C4P1_9BURK S-adenosylmethionine:tRN A ribosyltransferase-isomerase OS=Alicycliphilus sp. OX =1872437 GN=queA PE=3 SV=1
MPPSPRIHTLSDFDFELPELLIAQHPAPERSSSRLLDGRQSPPTDRIFRELPGLLQPGDLVVFNDTKVVKARVFGEKASGGQLELLIERVLTGNEVVAHMKVSKKPLPGATIHMAGGRRAGGFDATLLARWPDENGPLFHFALHGPAGESAWELMERHGHLPLPPYIERQQNAAHDPDAAEDAERYQTVFARAPGAVAAPTAALHFDAAVLAQLQQRGVETANVTLHVGAGTFQPVKTENLAEHQMHSEWYEIPLATLAALERCRQRGGRVLAVGTTTVRTLESWAQSGQARGDTRIFITPGFAFQVVDLLLTNFHLPKSTLMMLVSAFAGYEHIMLLYRHAIAQRYRFFSYGDAMLLQRRERTTP

SEQ ID NO: 63098 - protein, 367 aa, Alicycliphilus sp.
  misc_feature (1)..(367): tr|A0A0E9L7W8|A0A0E9L7W8_9BURK S-adenosylmethionine:tRN A ribosyltransferase-isomerase OS=Alicycliphilus sp. B1 OX=1603291 GN=queA PE=3 SV=1
MSTSPRAFTLSDFDFALPEALIAQHPAPVRSSSRLLDGRAAPPSDRIFHELPALLREGDLLVFNDTRVVKARVFGEKASGGRLELLIERVLTGNEVVAHMKVSKKPLPGATVHMAGGKAAGGFDATLLARWPDAGGTLFRFALHGPAGETPWELMERHGHLPLPPYIERQQNADHDPDEAEDAERYQTVFARTPGAVAAPTAALHFDDAVLAALAARGVERASVTLHVGAGTFQPVKTESLAEHRMHSEWYEVPLATLAALERCRARGGRVVAVGTTTVRTLESWARSGQNTGETDIFITPGFAFQVVDLLVTNFHLPKSTLMMLVSAFAGYEHVMALYQHAIAQRYRFFSYGDSMLLERRNEPTPP

SEQ ID NO: 63099 - protein, 355 aa, Alicyclobacillus acidocaldarius
  misc_feature (1)..(355): tr|B7DNX3|B7DNX3_9BACL S-adenosylmethionine:tRNA ribosy ltransferase-isomerase OS=Alicyclobacillus acidocaldari us LAA1 OX=543302 GN=queA PE=3 SV=1
MRVEDFDYELPEHLIAQQPLPERDQSRLLVVDPVDRVVRHRIFAEIVEELNSGDVLVMNDSRVLPARLHAVKPDTGGHVELLLVRPVDDQPNTWQCLARPAKRLRVGHRLVVGEGDGRVEIEVVGEEDEGIRLVRFHTNESVIDVAHRLGEMPLPPYIHEKLEDQERYQTVYAKRVGSVAAPTAGLHFTERLLQKLRDKGVQLCHVTLHVGIGTFRPVQVENVEEHRMHSEWYEVSPATAEIVNRAKSEGRPVIAVGTTALRTLEAAGQSGMLEAKQGETDIFIYPGFKFHIMDGLITNFHLPKSTLFMLVCAIMGTDYAKAVYREAVERSYRFFSFGDAMFIKRRADVAGTSEV

SEQ ID NO: 63100 - protein, 357 aa, Alicyclobacillus acidocaldarius
  misc_feature (1)..(357): tr|F8IFQ0|F8IFQ0_ALIAT S-adenosylmethionine:tRNA ribosy ltransferase-isomerase OS=Alicyclobacillus acidocaldari us (strain Tc-4-1) OX=1048834 GN=queA PE=3 SV=1
MFVRVEDFDYELPEHLIAQQPLPERDQSRLLVVDPVDRVVRHRIFADIVEELNPGDVLVMNDSRVLPARLHAVKPDTGGHVELLLVRPIDHQPNTWQCLARPAKRVRVGHRLVLGEGGDVVEMEVVGEEDEGIRLVRFDTTESVIDIANRLGEMPLPPYIHEKLEDQERYQTVYAKRVGSVAAPTAGLHFTERLLQRLRDKGVQLCHVTLHVGIGTFRPVQVENVEEHRMHSEWYEVSPETAEMVNRAKADGRPVIAVGTTALRTLEAAGQSGVLEAKQGETDIFIYPGFKFHIMDGLITNFHLPKSTLFMLVCAIMGTDYAKAVYREAVERSYRFFSFGDAMFIKRRADIAGTREV

SEQ ID NO: 63101 - protein, 354 aa, Alicyclobacillus acidoterrestris
  misc_feature (1)..(354): tr|A0A512CSC5|A0A512CSC5_9BACL S-adenosylmethionine:tRN A ribosyltransferase-isomerase OS=Alicyclobacillus acid oterrestris OX=1450 GN=queA PE=3 SV=1
MRVEDFDYELPERLIAQTPLSSRDESRLLVVDPVTHDIQHTHFREITSFLRKGDVLVLNDSRVIPARMYGEKVDTGGRVEILLLRPSEREQIWIALTRPAKRLRLGTKIRVGNGDDQVMVEVVGVEGEGLREVRFWSDEPVVEIANRLGEMPLPPYIHASLEDKDRYQTVYAKHVGSVAAPTAGLHFTEELLNRVREMGVEVHTVTLHVGIGTFRSVQVEEVEAHEMHSEWYEVSEATAEAINRAKSEGRRIISVGTTSLRTLESAGATGRLMPGAQETDIFIYPGYKFRMADALITNFHLPKSTLFMLVSAWMGTDFAKEVYGVAIKEEYRFFSFGDAMFLTRRAPVDGTSQV

SEQ ID NO: 63102 - protein, 354 aa, Alicyclobacillus acidoterrestris
  misc_feature (1)..(354): tr|T0DTH2|T0DTH2_ALIAG S-adenosylmethionine:tRNA ribosy ltransferase-isomerase OS=Alicyclobacillus acidoterrest ris (strain ATCC 49025 / DSM 3922 / CIP 106132 / NCIMB 13137 / GD3B) OX=1356854 GN=queA PE=3 SV=1
MRVEDFDYELPERLIAQTPLSSRDESRLLVVDPVTHDIQHTHFREITSFLREGDVLVLNDSRVIPARMYGEKVDTGGRVEILLLRPSEREQSWIALTRPAKRLRLGTKIRVGNDDDHVMVEVVGVEGEGLREVRFWSDEPVVDIANRLGEMPLPPYIHASLEDKDRYQTVYAKHVGSVAAPTAGLHFTEELLKRVREMGVEVHTVTLHVGIGTFRSVQVEEVEAHEMHSEWYEVSEATAEAINRAKSEGRRIISVGTTSLRTLESAGATGRLIPGAQETDIFIYPGYKFRMVDALITNFHLPKSTLFMLVSAWMGTDYAKEVYGVAIKEEYRFFSFGDAMFLTRRAPVDGTSQV

SEQ ID NO: 63103 - protein, 364 aa, Alicyclobacillus ferrooxydans
  misc_feature (1)..(364): tr|A0A0P9EHU2|A0A0P9EHU2_9BACL S-adenosylmethionine:tRN A ribosyltransferase-isomerase OS=Alicyclobacillus ferr ooxydans OX=471514 GN=queA PE=3 SV=1
MYQRKTSDLRVEDFDYALPDELIAQHPLEDRDASRLMVLDPVVETIEHRTFRDIVRYLNAGDVLVFNNSKVLPARLYGKKEDTGANVELLLTKRLGPYEWEAMAKPAKRLREGHVVIFPSNHGLEGSGTDVLGQAVVAGVEEDGIRRLRFTLSGSMEEFLYEIGQMPLPPYIHEPLREADRYQTVYAKDEGSVAAPTAGLHFTESLLDSLREKGVDLQFVTLHVGIGTFRPVTVDRVEDHHMHSETYYVDPTVADAVNRAKREGRRVIAVGTTALRTLESAGQSGEVHPGHGDTDIFIYPGYQFQVIDALITNFHLPKSTLIMLVSALMGTEFTKRVYEAAVRERYRFFSFGDAMFITRKGQSE

SEQ ID NO: 63104 - protein, 355 aa, Alicyclobacillus hesperidum
  misc_feature (1)..(355): tr|J9HPM3|J9HPM3_9BACL S-adenosylmethionine:tRNA ribosy ltransferase-isomerase OS=Alicyclobacillus hesperidum U RH17-3-68 OX=1200346 GN=queA PE=3 SV=1
MRVDEFDYYLPEHLIAQEPLPERDQSRLLVVDPVVQAIWHRKFADIVEELHPGDVLVMNDSRVLPARLYARKSATGAQVELLLLRPSEADSHTWYALARPAKRLRQGTPLTLGEGEDAIEIEVVAEGEEGIREIRFLTEESVIDIANRYGEMPLPPYIHNNLEDQERYQTVYAKRVGSVAAPTAGLHFTPQLLERIGAKGVDIRHVTLHVGLGTFRPVQVETVESHHMHSEWYEVSPETAAAVNQAKAEGRRIVAVGTTALRTLEAAGASGTLEAKQDETDIFVYPGYKFKMIDALITNFHLPKSTLFMLVCALMGTEFAKTVYAEAVAESYRFFSFGDAMFITRRAAVEATGNV

SEQ ID NO: 63105 - protein, 355 aa, Alicyclobacillus hesperidum; identical to SEQ ID NO: 63104
  misc_feature (1)..(355): tr|A0A1H2Q2U0|A0A1H2Q2U0_9BACL S-adenosylmethionine:tRN A ribosyltransferase-isomerase OS=Alicyclobacillus hesp eridum OX=89784 GN=queA PE=3 SV=1

SEQ ID NO: 63106 - protein, 376 aa, Alicyclobacillus macrosporangiidus
  misc_feature (1)..(376): tr|A0A1I7J0D9|A0A1I7J0D9_9BACL S-adenosylmethionine:tRN A ribosyltransferase-isomerase OS=Alicyclobacillus macr osporangiidus OX=392015 GN=queA PE=3 SV=1
MRVEDFDYELPEELIAQTPLERRTDSRLMVVDPVARTVRHTRFANLRDHLVPGDVLVLNNSKVLPARIMAVKTDTGARIELLLSKAIADDEWEVLARPAKRLKAGTTLDILEPVPGEADGWRPSGGTAVVTAVREEGLRHLRFSAQEPLEAFFQRVGNVPLPPYIHAKLKDPNRYQTVYAQHAGSVAAPTAGLHFTEDLLQEVREMGVEVHFVTLHVGLGTFKPVKVERVEEHRMHSEAYYVPPSVADAVRRAKREGRRVIAVGTTALRTLESAGQDGDIRAGGGDTSIFIYPGYQFRVIDALITNFHLPKSTLLMLVAAMMGLDFTKRVYETAVAERYRFFSFGDAMFIVRGVWAGDGKGKVAAAGGDSNGTGTV

SEQ ID NO: 63107 - protein, 359 aa, Alicyclobacillus macrosporangiidus
  misc_feature (1)..(359): tr|A0A1I7L089|A0A1I7L089_9BACL S-adenosylmethionine:tRN A ribosyltransferase-isomerase OS=Alicyclobacillus macr osporangiidus OX=392015 GN=SAMN05421543_1224 PE=3 SV=1
MTQSALDLNLHLSRPPAPAPLPPEARGLRRDEVRLLVMDRATGACRHARFVDLPHFLSAGDLMVVNTSATIPGRLRAVYRGEPLYLHLAIRLTEDTCILERRRADGGPDPRPFEPGDTLRVVHPEDGRVLARIQVEAHFHPDSRLWRVRADRDLFRVAEAAGVPIQYGYVTRPLETGAFQTLFSRTPGSAEMPSAARPFTHRVLRGLAARGVRFCSLLLHTGVSSHEVASDLARHPVLPEWYHIPPATAAAVNRAMAEGRRVIAVGTTVVRALESAAVPARGGEGVRVRSGSNWTTHLVTPATPPRVVHGLITGMHDNHTSHLALLYAFARPEFLRRAYEEAVQLGYLWHEFGDISLLV

SEQ ID NO: 63108 - protein, 355 aa, Alicyclobacillus montanus
  misc_feature (1)..(355): tr|A0A1M6KAF1|A0A1M6KAF1_9BACL S-adenosylmethionine:tRN A ribosyltransferase-isomerase OS=Alicyclobacillus mont anus OX=1830138 GN=queA PE=3 SV=1
MRVDEFDYQLPSHLIAQHPIENRSESRLMVVDPVTKTWQHRRFAQIVEELQSGDVLVVNDSRVLPARLVGEKCDTGGRFELLLLQPTGEDTYTALARPAKRLRQGSTLQFYPKGDLSQPLVGEAEVLKELPDGVREIRFTQMSSSDTLHAYIEKIGVMPLPPYIRAPLKDEERYQTVYARVTGSVAAPTAGLHFTQELLEELRSQGVLIAPVTLHVGLGTFRPVQVEEVSAHQMHSEWYEVPKETADIVNQAHANGKRVVAVGTTALRTLESAGSSGVLQATSGETDIFIYPGYRFRMADALITNFHLPKSTLFMLVSAWMGREFALQVYEAAIAEEYRFFSFGDAMFLKRRGEA

SEQ ID NO: 63109 - protein, 364 aa, Alicyclobacillus sacchari
  misc_feature (1)..(364): tr|A0A4R8LTM3|A0A4R8LTM3_9BACL S-adenosylmethionine:tRN A ribosyltransferase-isomerase OS=Alicyclobacillus sacc hari OX=392010 GN=queA PE=3 SV=1
MYGKDGTTTVRVDEFDYYLPEHLIAQEPLPERDQSRLLVVDPVAQRVWHRQFADIVEELHPGDVLVMNDSRVLPARLYARKSATGAQVEVLLLRPSESDAHTWFALARPAKRLRQGTPLTLGEGEDAIEIEVVAEGEEGIREIRFLTDESVIDIANRFGEMPLPPYIHNNLEDQERYQTVYAKRVGSVAAPTAGLHFTSQLLERIRAKGVDIRHVTLHVGLGTFRPIQVETVESHHMHSEWYEVSPETAEAVNRAKAEGRRIVAVGTTALRTLEAAGASGKLEAKQDETDIFVYPGYKFKMVDALITNFHLPKSTLFMLVCALMGTEFAKSVYAQAVAESYRFFSFGDAMFITRRADVEATGNV

SEQ ID NO: 63110 - protein, 355 aa, Alicyclobacillus tengchongensis
  misc_feature (1)..(355): tr|A0A0V0PS05|A0A0V0PS05_9BACL S-adenosylmethionine:tRN A ribosyltransferase-isomerase OS=Alicyclobacillus teng chongensis OX=368812 GN=queA PE=3 SV=1
MRVDEFDYYLPEHLIAQEPLPERDQSRLLVVDPVVQAIWHRKFADIVEELHPGDVLVMNDSRVLPARLYARKSATGAQVELLLLRPSEADSHTWYALARPAKRLRQGTPLTLGEGEDAIEIEVVAEGEEGIREIRFLTEESVIDIANRYGEMPLPPYIHNNLEDQERYQTVYAKRVGSVAAPTAGLHFTPQLLERIGAKGVDIRHVTLHVGLGTFRPVQVETVESHHMHSEWYEVSPETAAAVNQAKAEGRRIVAVGTTALRTLEAAGASGTLEAKQDETDIFVYPGYKFKMIDALITNFHLPKSTLFMLVCALIGTEFAKTVYAEAVAESYRFFSFGDAMFITRRADVEATGNV

SEQ ID NO: 63111 - protein, 355 aa, Alicyclobacillus vulcanalis
  misc_feature (1)..(355): tr|A0A1N7P9E7|A0A1N7P9E7_9BACL S-adenosylmethionine:tRN A ribosyltransferase-isomerase OS=Alicyclobacillus vulc analis OX=252246 GN=queA PE=3 SV=1
MRVEDFDYELPEHLIAQHPLPERDQSRLLVVDPVDRVVSHRIFADIVDELHPGDVLVMNDSRVLPARLFAVKPDTGGRVELLLVKPDESQPNTWQCLARPAKRLRVGHRLVLGEGADRVELEIVGEEDEGIRLVRFLTDEAVTDVAHRFGEVPLPPYIHETLEDKERYQTVYAKREGSVAAPTAGLHFTDRLLQRLREKGVQLCHVTLHVGIGTFRPVQVENVEEHRMHSEWYEVSPETAEIVNRAKAEGRPVIAVGTTALRTLEAAGQTGVLEAKQGETDIFIYPGFQFRIMDGLITNFHLPKSTLFMLVCAIMGTDYAKAVYREAVEREYRFFSFGDAMFIKRRADVAGTGQV

SEQ ID NO: 63112 - protein, 352 aa, Aliidiomarina haloalkalitolerans
  misc_feature (1)..(352): tr|A0A432VTP4|A0A432VTP4_9GAMM S-adenosylmethionine:tRN A ribosyltransferase-isomerase OS=Aliidiomarina haloalk alitolerans OX=859059 GN=queA PE=3 SV=1
MNKSDFYFELPDHLIAHYPQPDRSASRLLTLSGPTGEVNHRQFRDLPDLLEAGDLLVFNDTRVIPARMLGQKVSGGKIEVLVERILDDHRVLAHVRANRAPKAGTKLLLEEAVAAEIGERSDALFEVHFDPAKTVLEWLDAYGHMPLPPYIERPDEASDRERYQTVYGKKPGAVAAPTAGLHFDETIMQRLQEKGVNTAYVTLHVGAGTFQPVRTDDIREHKMHSEYAEVPAHVVETIRATKAAGKRVVAVGTTSVRSLESAAKANGGEIGEFAAETDIFIFPGYEFKVIDAMVTNFHLPESTLIMLISAFAGKEQVMGAYQAAIDHEYRFFSYGDAMFITRNDRAPEQASA

SEQ ID NO: 63113 - protein, 349 aa, Aliidiomarina iranensis
  misc_feature (1)..(349): tr|A0A432VVA8|A0A432VVA8_9GAMM S-adenosylmethionine:tRN A ribosyltransferase-isomerase OS=Aliidiomarina iranens is OX=1434071 GN=queA PE=3 SV=1
MKRSDFYFELPEKLIAHYPQPDRSSSRLLTLDGPTGAIAHRQFRELPDLLNAGDLLVFNDTRVIPARLLGQKVSGGKIEVLVERVIDDHHVLAHVRANRAPKPGTELLLENAVSCVIGERADALFEVHFDKSRTVLEWLEEYGHMPLPPYIDRPDEASDRERYQTVYGVKPGAVAAPTAGLHFDSAVMDALAAKGVETAYVTLHVGAGTFQPVRADDIREHKMHSEYAVVPESVVAAVEATRARGGRVVAVGTTSVRSLESAAQAHGGELAEFAAETDIFIYPGYKFNVVDAMLTNFHLPESTLIMLISAFAGKAEVMAAYEAAIEQEYRFFSYGDAMFITGKHTATQD

SEQ ID NO: 63114 - protein, 346 aa, Aliidiomarina maris
  misc_feature (1)..(346): tr|A0A327WUN2|A0A327WUN2_9GAMM S-adenosylmethionine:tRN A ribosyltransferase-isomerase OS=Aliidiomarina maris O X=531312 GN=queA PE=3 SV=1
MKVADFSFDLPDELIARYPQPERSASRMLQVDASTGELTHSQFGDIVAAINPGDLLIFNDTRVIPARLLGQKVSGGKVEVLVERVLDEHHVLAHVRANRAPKAGVRVRLEDAFEAEVIGREGALFKLHFDAPQTVLELLEAHGHMPLPPYIDRPDEDSDRERYQTVYNRKPGAVAAPTAGLHFDQKILQQLQDKGVEFAYVTLHVGAGTFQPVRVESIEAHVMHSEYAEVGQDTIDAIQAARARGNRVIAVGTTSVRSLESMARASQGEGLQPFFAETDIFIYPGYQFAVVDAMVTNFHLPESTLLMLVSAFASRDIMLNAYASAVQHEYRFFSYGDAMFLHNRAG

SEQ ID NO: 63115 - protein, 343 aa, Aliidiomarina minuta
  misc_feature (1)..(343): tr|A0A432W4G3|A0A432W4G3_9GAMM S-adenosylmethionine:tRN A ribosyltransferase-isomerase OS=Aliidiomarina minuta OX=880057 GN=queA PE=3 SV=1
MKVSDYTFTLPDELIARYPQAERSASRLLDLHAKSGAVTHRQFRDIVDLVAPGDLLVFNDTRVIPARMLGQKVSGGKVEILVERIVDEHSVLAHVRCNRAPKAGTQLLLEGIVEAEVTGRQDTLFEVTFAGNEGVLNILELHGHMPLPPYIDRPDESSDRERYQTVYNRKPGAVAAPTAGLHFDDKILQALRDKGVEFAYVTLHVGAGTFQPVRVESIEEHVMHSEYAEVAEPCIAAIEATKARGGRVIAVGTTSVRSLESMAQASGSEGLQPFFEETDIFIFPGYEFQVVDAMLTNFHLPESTLLMLVSAFAGREHIIAAYDEAVQQEYRFFSYGDAMFIHA

SEQ ID NO: 63116 - protein, 344 aa, Aliidiomarina sanyensis
  misc_feature (1)..(344): tr|A0A432WCH4|A0A432WCH4_9GAMM S-adenosylmethionine:tRN A ribosyltransferase-isomerase OS=Aliidiomarina sanyens is OX=1249555 GN=queA PE=3 SV=1
MKKSDFYFDLPDHLIARYPQPDRSSSRLLTLDGESGAIGHRGFRDLPSLLAPGDLLVFNDTRVIPARLLGQKVSGGKIEVLVERILDQHRVLAHVRSNRSPKNGAQLLLEGAVHAEVVGRVEALFEIAFDPAKTVLEWLDAYGHMPLPPYIDRPDEQSDRERYQTVYSKKPGAVAAPTAGLHFDDSVMQALADKGIETAYVTLHVGAGTFQPVRTENILEHKMHSEYAEVSEAVVDAVATCKARGGRVIAVGTTSVRSLESAAHFNGGTLAPYTAETDIFIYPGYRFHVVDAMVTNFHLPESTLIMLISAFAGKSEVMQAYQAAIQEEYRFFSYGDAMFITRKP

SEQ ID NO: 63117 - protein, 345 aa, Aliidiomarina shirensis
  misc_feature (1)..(345): tr|A0A432WQY6|A0A432WQY6_9GAMM S-adenosylmethionine:tRN A ribosyltransferase-isomerase OS=Aliidiomarina shirens is OX=1048642 GN=queA PE=3 SV=1
MKRSDFYFELPENLIAHYPQPDRSSSRLLTLDGPSGDLAHRQFRELPDLLNPGDLLVFNDTRVIPARLLGNKVSGGKIEVLVERIVDDHRVLAHVRANRAPKPGTELLLEDAVPCVIGERADALFEVHFDKGRTVLEWLEEFGHMPLPPYIDRPDEASDRERYQTVYGVKPGAVAAPTAGLHFDSAVMDALAAKGIETAYVTLHVGAGTFQPVRTDDIREHKMHSEYAVVPESVVAAVAATRARGGRVIAVGTTSVRSLESAAKANGGELAEFAAETDIFIYPGYRFNVVDAMLTNFHLPESTLIMLISAFAGQAEVMAAYQAAIEQEYRFFSYGDAMFITAKQG

SEQ ID NO: 63118 - protein, 345 aa, Aliidiomarina soli
  misc_feature (1)..(345): tr|A0A432WDX2|A0A432WDX2_9GAMM S-adenosylmethionine:tRN A ribosyltransferase-isomerase OS=Aliidiomarina soli OX =1928574 GN=queA PE=3 SV=1
MKVADFSFELPDELIARYPQPERSASRMLDVDASSGELTHRQFKDIVDLLQRGDLLVFNDTRVIPARLLGQKVSGGKVEVLVERVLDEHHVLAHVRANRAPKAGVRVLLEEAFEAEVLGREGALFKLHFDSQQTVLELLEAHGHMPLPPYIDRPDEDSDRERYQTVYNRKPGAVAAPTAGLHFDDAILQQLQDKGVEFAYVTLHVGAGTFQPVRVESIEEHIMHSEYAEVGEDTIAAIQAAKARGGRVVAVGTTSVRSLESMAKASATDQLQPFFAETDIFIYPGYQFAVVDAMVTNFHLPESTLLMLVSAFASRDIMLNAYQSAVEHNYRFFSYGDAMFLHSRA

SEQ ID NO: 63119 - protein, 362 aa, Aliidiomarina sp.
  misc_feature (1)..(362): tr|A0A552WZF8|A0A552WZF8_9GAMM S-adenosylmethionine:tRN A ribosyltransferase-isomerase OS=Aliidiomarina sp. IM1 326 OX=2593535 GN=queA PE=3 SV=1
MKKSEFHFDLPDHLIARYPQPDRSSSRLLTLDGPSGAISHQQFRELPNLLRAGDLLVFNDTRVIPARLLGQKVSGGKVEVLVERVLDQHRVLAHLRSNRSPKAGTKLLLENAVQATVMGREDALFEIAFDPSRSVLEWLDAYGHMPLPPYIDRPDEASDRERYQTVYSKKPGAVAAPTAGLHFDDAVMQALAEKGVETAYVTLHVGAGTFQPVRTDDIRDHTMHSEYAEVPADVVAAVERTKARGGRVIAVGTTSVRSLESAAHFNQGTLAPFTAETNIFIYPGYRFHVVDAMITNFHLPESTLIMLISAFAGKEHVMAAYQAAIQAEYRFFSYGDAMFITQNPRVEAMSTSTPHQNEKVDS

SEQ ID NO: 63120 - protein, 346 aa, Aliidiomarina taiwanensis
  misc_feature (1)..(346): tr|A0A432X1C3|A0A432X1C3_9GAMM S-adenosylmethionine:tRN A ribosyltransferase-isomerase OS=Aliidiomarina taiwane nsis OX=946228 GN=queA PE=3 SV=1
MKRQEYHFELPDELIARYPQKDRATSRLLHLNGSTGTCEHKQFRDLLELIEPNDLLVFNDTRVIPARLLGQKVSGGKLEVLVERVTGSHTAFAHVRSNRAPKVGAELLLECAVKVQVIGREDALFELEFDHEKSVLEWLDTYGHMPLPPYIDRPDEQADRERYQTVYGRKLGAVAAPTAGLHFDEPMLQALREKGVHFAHVTLHVGAGTFQPVRVDNILEHKMHSEYAEVPTEVVQAIAEARQRGGRVIAVGTTSVRSLESAAVAGNGELKPFANETDIFIYPGYEFKVVDAMLTNFHLPESTLIMLVSAFAGKSHVMGAYKEAIEHKYRFFSYGDAMFISKKITE

SEQ ID NO: 63121 - protein, 333 aa, Aliifodinibius roseus
  misc_feature (1)..(333): tr|A0A1M4VSD9|A0A1M4VSD9_9BACT S-adenosylmethionine:tRN A ribosyltransferase-isomerase OS=Aliifodinibius roseus OX=1194090 GN=queA PE=3 SV=1
MNYTLSDFDYDLPEKLIAQQPAQPRDHARLLVYDRSTGTITDAVFYNLRNYLPGDTTLVLNNSKVEKCRLLFEDGKKEIFILDAANDTTVRALVRPGKKFQKGRTLSLTDRISATVVDIDKEGIRTLRLRPPLNEEVYDHYKYTPFPPYIEQDESLSEEYQTVYARDSGSKAAPTAGLHFTDELLSEIQDSGILKAEVTLHVGLGTFAPVKTETIEEHTMHSEWFRLTPKTARQLNQADHLTAVGTTSVRVLETCLQQNDRFTPTAMDTDIFIRPGYSFKAVDALITNFHLPKSTLLMLVAAFTGFEEMRHIYQHAIDEQYRFYSFGDAMLIL

SEQ ID NO: 63122 - protein, 348 aa, Aliifodinibius roseus
  misc_feature (1)..(348): tr|A0A1M4WMJ6|A0A1M4WMJ6_9BACT S-adenosylmethionine:tRN A ribosyltransferase-isomerase OS=Aliifodinibius roseus OX=1194090 GN=queA PE=3 SV=1
MKLTDFKFDIDDYNVPEEPVEPRDAARLMVLDREDETITHKKFSDIHEYLNEGDVLIYNDTKVFPARLKGKKEKTDADIEVFLLRELVPENMLWDVLVEPARKIRIGNKLYFGPNLMAEVIDNTTSRGRTIRFLFEGTNEELYKLLDDIGEMPLPPYIERDAKEEDKEQYQTIFAKERGSVAAPFAAMHFTEELVEKLEDKGVEMLPITLHIGWGTFRPVEVEDLTKHRMDSENFHISQETSDKINEALASSDHKVVGCGTTAVRTIETSITASGISKPGTGWTDKFIYPPYDFKITEGVITNFHRPESTMLMLGAAFGGYDFVMEAYEEAKENDYRFFAFGDAMLII

SEQ ID NO: 63123 - protein, 348 aa, Aliifodinibius sediminis
  misc_feature (1)..(348): tr|A0A521CNF1|A0A521CNF1_9BACT S-adenosylmethionine:tRN A ribosyltransferase-isomerase OS=Aliifodinibius sedimi nis OX=1214077 GN=queA PE=3 SV=1
MKLTDFKFETDDFNVPEEPVEPRDASKLMVLDREDESITHKKFSDIHEYLNEGDVLIYNDTKVFPARLKGKKEKTDADIEVFLLRELVPENMLWDVLVEPARKIRIGNKLYFGPNLMAEVIDNTTSRGRTIRFLFEGTNEELYKLLDEIGEMPLPPYIEREAREEDKEQYQTIFAKERGSVAAPFAAMHFTHELVEKLEDKGVEVLPITLHIGWGTFRPVEVEDLTKHRMDSENYHISKETSDKINKALASRDNKVVGCGTTAVRTIETSITASGISKPGTGWTDKFIYPPYDFKITEGVITNFHRPESTMLMLGAAFGGYDFVMRAYEEAKENDYRFFGFGDSMLII

SEQ ID NO: 63124 - protein, 337 aa, Aliifodinibius sediminis
  misc_feature (1)..(337): tr|A0A521ED04|A0A521ED04_9BACT S-adenosylmethionine:tRN A ribosyltransferase-isomerase OS=Aliifodinibius sedimi nis OX=1214077 GN=queA PE=3 SV=1
MMSYSLSDFDYDLPEELIAQEPAQPRDHARLLIYNRSADTITDDYFYNLPDYLPEETTLVLNNSKVEKCRLLFDDGKKEIFILDAVNDTTVRALVRPGKKFKKGRTVQLADGISATVQDIDEEGIRMLELTPSLSHKLYEEFKHTPFPPYIEQNESLSEEYQTVYARPDSSGGSKAAPTAGLHFTDELLARISRAGIAKAEVTLHVGLGTFAPVKSETIDEHTMHAEWFRLRRETAQQLNEAAHITAVGTTSVRVLESCAQHNNHFSSTAMKTDIFIRPGFTFQATDALITNFHLPKSTLLMLVAAFTGYENMKKIYQHAISEEYRFYSFGDAMLIV

SEQ ID NO: 63125 - protein, 348 aa, Aliifodinibius sp.
  misc_feature (1)..(348): tr|A0A2A2GB46|A0A2A2GB46_9BACT S-adenosylmethionine:tRN A ribosyltransferase-isomerase OS=Aliifodinibius sp. WN 023 OX=2032627 GN=queA PE=3 SV=1
MKLTDFKFDTEDFNVPDEPVQPRDAAKLMVLNREDQSIKHETFADIHKYLDEGDVLIYNNTKVFPARLKGKKEKTDADIEVFLLRELVPENMLWDVLVEPARKIRIGNKLYFGPNLMAEVIDNTTSRGRTIRFLFEGSNEELYHILDNIGEMPLPPYIEREAREEDKEQYQTIFAKERGSVAAPFAAMHFTEELVEKLEDKGVEMLPITMHIGWGTFRPCEVEDLTKHRTDSENYYISEETSSKINEALADEDRKVVGCGTTSVRTIETSITASGISKPGTGWTDKFIFPPYDFKITEGVITNFHRPESTMLMLGAAFAGYDFLMEAYEEAQEKDYRFFAFGDSILIL

SEQ ID NO: 63126 - protein, 333 aa, Aliifodinibius sp.
  misc_feature (1)..(333): tr|A0A2A2GD71|A0A2A2GD71_9BACT S-adenosylmethionine:tRN A ribosyltransferase-isomerase OS=Aliifodinibius sp. WN 023 OX=2032627 GN=queA PE=3 SV=1
MSYTLSDFDYDLPDEFIAQKPADPRDHSRLLVYDRESETITDDHFYNIYKYLPKNTTLVVNNSKVEKCRLLFDDGKKEIFILDTANNTTVQAMVRPGKKFKKGKTVDLTDTISAEILDIDEEGLRTLKMSPSLDNQVYEQYKHTPFPPYIEQNESLSEKYQTVYADHLGSKAAPTAGLHFTDELLAKIKEEGVNQAEVTLHVGLGTFAPVKADSIEEHTMHSEWFKITEKTADQLNNAEHLTAVGTTSVRVLESALRKHQQFTSTKMDTDIFIRPGFEFKGTDALITNFHLPKSTLLMLVAAFTGYEEMKKIYQHAIDEEYRFYSFGDAMLIL

SEQ ID NO: 63127 - protein, 346 aa, Aliiglaciecola lipolytica
  misc_feature (1)..(346): tr|K6X5N9|K6X5N9_9ALTE S-adenosylmethionine:tRNA ribosy ltransferase-isomerase OS=Aliiglaciecola lipolytica E3 OX=1127673 GN=queA PE=3 SV=1
MKLSDFHFDLPEHLIARYPTEQRTASRLLCLDGKTGALNHTRFSSILDLIEVGDLLIFNNTRVIPARLLGKKSSGGKVEVLVERILDDKTVLAHVKSSKSPKPGAQLILEEQIQMEMVKRHDQLFELKVLNDEPVLSLLEQYGHMPLPPYIDRPDEDSDKERYQTVYSDKPGAVAAPTAGLHFDEQTLEALKQKGINIAFVTLHVGAGTFQPVRVDNIYEHHMHSEYAEVPQDVVDAIVQTKANGKRVIAVGTTSVRSLESAAAATIKQGKPLAPFFEDTDIFIYPGYQFEVVDAMLTNFHLPESTLIMLISAFAGRENVMHAYQDAIANEYRFFSYGDAMFIEKS

SEQ ID NO: 63128 - protein, 346 aa, Aliiglaciecola sp.
  misc_feature (1)..(346): tr|A0A553KXZ1|A0A553KXZ1_9ALTE S-adenosylmethionine:tRN A ribosyltransferase-isomerase OS=Aliiglaciecola sp. M1 65 OX=2593649 GN=queA PE=3 SV=1
MKVSDFHFDLPDELIARYPTEQRSASRLLCLDGKSGEVNHSHFTAFVEHVDAGDLLIFNNTRVIPARLLGQKATGGKVEVLVERIIDEQTLLAHVKASKSPKPGTVLKLESYIELEMVQRRDQLFELRVLNDQPILALLEAYGHMPLPPYIDRPDEDSDKERYQTVYSEKPGAVAAPTAGLHFDDEILAALKAKGVNMEFVTLHVGAGTFQPVRVDNIEEHHMHSEYAEVPQTVVDAINQTKASGKRVIAVGTTSVRSLESMAAATVKKGKPMAPFFEDTEIFIYPGYQFEVVDAMLTNFHLPESTLIMLISAFAGRDNVMNAYQQAIEKEYRFFSYGDAMLIEKA

SEQ ID NO: 63129 - protein, 346 aa, Aliikangiella marina
  misc_feature (1)..(346): tr|A0A545THX8|A0A545THX8_9GAMM S-adenosylmethionine:tRN A ribosyltransferase-isomerase OS=Aliikangiella marina OX=1712262 GN=queA PE=3 SV=1
MQKQDFRFDLPESLIANEPCSNRTDSRLMVLDPVENTCQHKHFRDLVDFLNPEDCLIFNNTKVIPARLQGTRESGGKVEVLVERVIPGDDYDTCVAQVRASNTPKKGAKINIAEELALEVIGREGAFFKLKSLSQGPLFELIEKYGAMPLPPYIKREAEEVDKQRYQTVYAEKQGAVAAPTAGLHFDEALMQKITNKGVATGFVTLHVGAGTFTPVRVDNITQHQMHSEWYELSESVVQLVNETRSKGGRVIAVGTTSVRCLESASRAGEIKASSGETDIFIYPGYEFKAVDGLITNFHLSESTLLMLVSAFAGKDFMLEQYRVAVENQYRFFSYGDSMFIQNRLP

SEQ ID NO: 63130 - protein, 369 aa, Aliikangiella sp.
  misc_feature (1)..(369): tr|A0A545UAF2|A0A545UAF2_9GAMM S-adenosylmethionine:tRN A ribosyltransferase-isomerase OS=Aliikangiella sp. M10 5 OX=2592383 GN=queA PE=3 SV=1
MRKQDFQFQLPDSLIANQPSENRTDSRLMVIDPKTQTVGDHHFFNLVDFLQPNDCLIFNNTKVIPARLQGSRETGGKVEVLIERIIPRRYESVKKDAHIPGQDDLSNKDVCIAQLRASNAPKPGAEIILADDFRLVVVGREGAFFKLESQTDEPLLELVERYGSTPLPPYIRRETEALDKQRYQTVYAEKQGAVAAPTAGLHFDEALLKKINDKGVETDFVTLHVGAGTFSPIRVDNILEHQMHSEWFEVPESVVELVSRTRRNGGRVIAVGTTSVRCLESASQKGQLESCCGETDIFIYPGYQFKSVDALVTNFHLSESTLLMLVSAFAGREFILDAYNKAVERAYRFFSYGDAMFIQNTEDSEKETK

SEQ ID NO: 63131 - protein, 354 aa, Aliiroseovarius crassostreae
  misc_feature (1)..(354): tr|A0A0P7I076|A0A0P7I076_9RHOB S-adenosylmethionine:tRN A ribosyltransferase-isomerase OS=Aliiroseovarius crass ostreae OX=154981 GN=queA PE=3 SV=1
MKLSDFDFDLPEELIATRPVRPRPASRMLVATPGGQVDAHVRDLCDWLRPGDRLVLNNTKVIPGRLFGTRSRAGQAPGEGQAKIEVTLLSPTADGHWRAMIKPLRKVREGEVIAFAAGLSATLLNKQDGQGALAFNMSGADFDAALQEAGEMPLPPYIAAKRAADAQDAVDYQTVFAKKTGAVAAPTASLHFDEALLARVAEMGVGITEVTLHVGAGTFLPVKVDDVRDHKMHAEWGHVSENAAEEINATKAAGGRVIPVGTTALRLIESAATSQGQIAAWAGETDIFIMPGYGFKIADGLMTNFHLPKSTLMMLVSALMGQGRMRAVYQHAITHRYRFFSYGDSSLLLPGGVG

SEQ ID NO: 63132 - protein, 353 aa, Aliiroseovarius halocynthiae
  misc_feature (1)..(353): tr|A0A545SWM8|A0A545SWM8_9RHOB S-adenosylmethionine:tRN A ribosyltransferase-isomerase OS=Aliiroseovarius haloc ynthiae OX=985055 GN=queA PE=3 SV=1
MKLSDFDFDLPEELIATRPVRPRTASRLLVATADCLTDAHVGDLTDWLRPGDRLVLNDTKVIPGRLFGTRTRPGQAPGEGIAHIEVTLLSPDGQGRWHAMAKPLRKLKEGDVIVFSDALNAEFLSRDDDQAVLRFNLEGDAFGAAIEDAGKMPLPPYIAAKRAADAQDNEDYQTVFARNTGAVAAPTASLHFDTDLLARVAAMGVGLTHVTLHVGAGTFLPVKVDDISKHKMHAEWGEVGQNAADQINATLAAGGRVIPVGTTALRLIESAAIAKGQIAPWTGETDIFITPGFNFSIASGLMTNFHLPKSTLMMLVSALMGQDRMRQVYDHAISQKYRFFSYGDSSLLLPDGT

SEQ ID NO: 63133 - protein, 357 aa, Aliiroseovarius pelagivivens
  misc_feature (1)..(357): tr|A0A2R8AJF7|A0A2R8AJF7_9RHOB S-adenosylmethionine:tRN A ribosyltransferase-isomerase OS=Aliiroseovarius pelag ivivens OX=1639690 GN=queA PE=3 SV=1
MKLSDFDFDLPEDLIATRPARPRTASRLLVATPDNLTDAHVGGLTDWLRPGDRLILNDTKVIPGRLFGTRTRPGQAPGEGVASIEVTLLSPDGQGQWHAMAKPLRKLKEGDVIAFSDALSAEFLGRDDEQAVLRFNLEGDAFDAAIAEAGKMPLPPYIAAKRAADAQDNEDYQTVFARNTGAVAAPTASLHFDTDLLSRITAMGVDLTHVTLHVGAGTFLPVKVDDVSKHKMHAEWGEVSQSAADEINATIAAGGRVIPVGTTALRLIESAATAKGQIAPWTGETDIFITPGFEFSIADGLMTNFHLPKSTLMMLVSALMGTQRMRDVYSHAIAQKYRFFSYGDSSLLLPQGANIGA

SEQ ID NO: 63134 - protein, 365 aa, Aliiroseovarius sediminilitoris
  misc_feature (1)..(365): tr|A0A1I0PFR9|A0A1I0PFR9_9RHOB S-adenosylmethionine:tRN A ribosyltransferase-isomerase OS=Aliiroseovarius sedim inilitoris OX=1173584 GN=queA PE=3 SV=1
MTRTDKPPTRAAMKLSDFDFNLPDALIATRPVRPRTASRLLVATPDQITDAHVSDLTRWLSPGDRLVLNDTKVIPGRLFGTRTRAGQAPGEGVAKIEVTLLSPDSAGQWHVMAKPLRKLRDGDVIIFSDDLCAQFVGRDGEQAVICFNLEGAAFDAALAAAGNMPLPPYIAAKRAADAQDNEDYQTVFARHSGAVAAPTASLHFDDGLLDRIAAMGVGLTHVTLHVGAGTFLPVKVDDIAQHKMHAEWGRVSTVAAHEIEATVAAGGRIIPVGTTALRLIESAATAPGKIRPWQGDTDIFITPGFRFNITDGLMTNFHLPKSTLMMLVSALMGTDRMRAVYDHAIAHRYRFFSYGDSSLLLPNQP

SEQ ID NO: 63135 - protein, 352 aa, Aliishimia ponticola
  misc_feature (1)..(352): tr|A0A4S4NHJ4|A0A4S4NHJ4_9RHOB S-adenosylmethionine:tRN A ribosyltransferase-isomerase OS=Aliishimia ponticola OX=2499833 GN=queA PE=3 SV=1
MKLSDFDFDLPDALIATRPARPRTSARLLVAQGDAIEDRHVFDLPQILRAGDRLVLNDTRVIPARLTGLRRRDSAQGPVEAKIEVTLLSPDAGGGWRALVKPLRKLRQGETVAFDAGLSATLERVDDGQALLRFNLEGDAFQEALNAAGAMPLPPYIASQRAADAQDKDDYQTVFAKREGAVAAPTASLHFDEALLESLREIGVEFTTVTLHVGAGTFLPVKVEDVTTHRMHAEWGKVSAEAAQQIATTKAQGGRVIPVGTTALRLIETAARATGEIAPWEGDTDIFIYPGFTFNVADALMTNFHLPKSTLMMLVSALMGRERMMRVYAHAVADKYRFFSYGDASLLIPPAK

SEQ ID NO: 63136 - protein, 350 aa, Aliivibrio finisterrensis
  misc_feature (1)..(350): tr|A0A4V1Z8B1|A0A4V1Z8B1_9GAMM S-adenosylmethionine:tRN A ribosyltransferase-isomerase OS=Aliivibrio finisterre nsis OX=511998 GN=queA PE=3 SV=1
MQVSDFHFELPDELIARYPQPERTASRLLHLNGNSGELIDGQFTDVLDLVQSGDLVVFNNTRVIPARMFGVKASGGKLEVLVERVLDEHSVLAHVRCSKSPKPGNQLWLGENQEYEAEMVARHDTLFEIRFTSEKKVLDILDEIGHMPLPPYIDRPDEDADKERYQTVYNEKPGAVAAPTAGLHFDTEILEKMKAKGVEFAYVTLHVGAGTFQPVRVDNILEHHMHSEYAEVSQEVVDAIKATKARGGRVVSVGTTSVRSLESAAQHALKQGTELAPFFDDTEIFIYPGYEFQVVDALVTNFHLPESTLIMLVSAFAGYENTMKAYDQAVNNQYRFFSYGDAMFITKKTA

SEQ ID NO: 63137 - protein, 350 aa, Aliivibrio finisterrensis
  misc_feature (1)..(350): tr|A0A4Q5KWN8|A0A4Q5KWN8_9GAMM S-adenosylmethionine:tRN A ribosyltransferase-isomerase OS=Aliivibrio finisterre nsis OX=511998 GN=queA PE=3 SV=1
MQVSDFHFELPDELIARYPQPERTASRLLHLNGNSGELIDGQFTDVLDLVQSGDLVVFNNTRVIPARMFGVKASGGKLEVLVERVLDEHSVLAHVRCSKSPKPGNQLWLGENQEYEAEMIARHDTLFEIRFTSEKKVLDILDEIGHMPLPPYIDRPDEDADKERYQTVYNEKPGAVAAPTAGLHFDTEILEKMKAKGVEFAYVTLHVGAGTFQPVRVDNILEHHMHSEYAEVSQEVVDAIKATKARGGRVVSVGTTSVRSLESAAQHALKQGTELAPFFDDTEIFIYPGYEFQVVDALVTNFHLPESTLIMLVSAFAGYENTMKAYDQAVNNQYRFFSYGDAMFITKKTA

SEQ ID NO: 63138 - protein, 350 aa, Aliivibrio fischeri
  misc_feature (1)..(350): sp|Q5E3D1|QUEA_ALIF1 S-adenosylmethionine:tRNA ribosylt ransferase-isomerase OS=Aliivibrio fischeri (strain ATC C 700601 / ES114) OX=312309 GN=queA PE=3 SV=1
MQVSDFHFELPDELIARYPQPERTASRLLQLNGNSGELNDGQFTDILDLVQAGDLLVFNNTRVIPARMFGMKASGGKLEVLVERVLDEHSVLAHVRCSKSPKPGTMLLLGENQEHEAEMVARHDTLFEIRFTSDKKVLDILDEIGHMPLPPYIDRPDEDADKERYQTVYNKKPGAVAAPTAGLHFDTEILEKMKAKGVEFAYVTLHVGAGTFQPVRVDNILEHHMHSEYAEVSQEVIDAINATKARGGRVVSVGTTSVRSLESAAQHALKQGTELAPFFDDTEIFIYPGYEFQVVDALVTNFHLPESTLIMLVSAFAGYENTMKAYEQAVNNKYRFFSYGDAMFITKKTA

SEQ ID NO: 63139 - protein, 350 aa, Aliivibrio fischeri
  misc_feature (1)..(350): sp|B5F9Y4|QUEA_ALIFM S-adenosylmethionine:tRNA ribosylt ransferase-isomerase OS=Aliivibrio fischeri (strain MJ1 1) OX=388396 GN=queA PE=3 SV=1
MQVSDFHFELPDELIARYPQPERTASRLLQLNGNSGELNDGQFTDILDLVQAGDLLVFNNTRVIPARMFGMKASGGKLEVLVERVLDEHSVLAHVRCSKSPKPGTMLLLGENQEHEAEMVARHDTLFEIRFTSDKKVLDILDEIGHMPLPPYIDRPDEDADKERYQTVYNKKPGAVAAPTAGLHFDTEILEKMKAKGVEFAYVTLHVGAGTFQPVRVDNILEHHMHSEYAEVSQEVIDAINATKARGGRVVSVGTTSVRSLESAAQHALKQGTELAPFFDDTEIFIYPGYEFQVVDALVTNFHLPESTLIMLVSAFAGYDNTMKAYEQAVNNKYRFFSYGDAMFITKKTA

SEQ ID NO: 63140 - protein, 350 aa, Aliivibrio logei
  misc_feature (1)..(350): tr|A0A1B9NXS0|A0A1B9NXS0_ALILO S-adenosylmethionine:tRN A ribosyltransferase-isomerase OS=Aliivibrio logei OX=6 88 GN=queA PE=3 SV=1
MQVSDFHFELPDELIARYPQPERTASRLLHLNGNSGELHDGQFTDVLDLVQHGDLVVFNNTRVIPARMFGVKASGGKLEVLVERVLDDHSVLAHVRCSKSPKPGNQLWLGENQEYEAEMVARHDTLFEIRFTSEKKVLDILDEIGHMPLPPYIDRPDEDADKERYQTVYNEKPGAVAAPTAGLHFDTDILEKMKAKGGEFAYVTLHVGAGTFQPVRVDNILDHHMHSEYAEVSQEVVDAIKATKARGGRVISVGTTSVRSLESAAQHALKQGTELAPFFDDTEIFIYPGYEFQVVDALVTNFHLPESTLIMLVSAFAGYDNTMKAYDQAVNHQYRFFSYGDAMFITKKTS

SEQ ID NO: 63141 - protein, 350 aa, Aliivibrio salmonicida
  misc_feature (1)..(350): sp|B6EK66|QUEA_ALISL S-adenosylmethionine:tRNA ribosylt ransferase-isomerase OS=Aliivibrio salmonicida (strain LFI1238) OX=316275 GN=queA PE=3 SV=1
MQVSDFHFELPDELIARYPQPERTASRLLHLNGNSGELHDGQFTDVLDLVQHGDLVVFNNTRVIPARMFGVKASGGKLEVLVERVLDDHSVLAHVRCSKSPKPGNQLWLGENQEYEAEMVARHDTLFEIRFTSEKKVLDILDEIGHMPLPPYIDRPDEDADKERYQTVYNEKPGAVAAPTAGLHFDTDILEKMKAKGVEFAYVTLHVGAGTFQPVRVDNILDHHMHSEYAEVSQEVVDAIKATKARGGRVISVGTTSVRSLESAAQHALKQGTELAPFFDDTEIFIYPGYEFQVVDALVTNFHLPESTLIMLVSAFAGYDNTMKAYDQAVNHQYRFFSYGDAMFITKKTS

SEQ ID NO: 63142 - protein, 350 aa, Aliivibrio sifiae
  misc_feature (1)..(350): tr|A0A2S7XG99|A0A2S7XG99_9GAMM S-adenosylmethionine:tRN A ribosyltransferase-isomerase OS=Aliivibrio sifiae OX= 566293 GN=queA PE=3 SV=1
MQVSDFHFELPDELIARYPQPERTASRLLQLNGNSGELVDGQFTDVLDLVQSGDLVVFNNTRVIPARMFGVKASGGKLEVLVERVLDEHSVLAHVRCSKSPKPGNQLWLGENQEYEAEMVARHDTLFEIRFSSEKKVLDILDEIGHMPLPPYIDRPDEDADKERYQTVYNEKPGAVAAPTAGLHFDTDILEKMKAKGVEFAYVTLHVGAGTFQPVRVDNILEHHMHSEYAEVSQEVVDAVNAAKARGGRVISVGTTSVRSLESAAQHALKQGTELAPFFDDTEIFIYPGYEFQVVDALVTNFHLPESTLIMLVSAFAGYENTMKAYEQAVNNQYRFFSYGDAMFITKKTA

SEQ ID NO: 63143 - protein, 350 aa, Aliivibrio sifiae
  misc_feature (1)..(350): tr|A0A2S7XES2|A0A2S7XES2_9GAMM S-adenosylmethionine:tRN A ribosyltransferase-isomerase OS=Aliivibrio sifiae OX= 566293 GN=queA PE=3 SV=1
MQVSDFHFELPDELIARYPQPERTASRLLHLNGNSGELVDGQFTDVLDLVQSGDLVVFNNTRVIPARMFGVKASGGKLEVLVERVLDEHSVLAHVRCSKSPKPGNQLWLGENQEYEAEMVARHDTLFEIRFTSEKKVLDILDEIGHMPLPPYIDRPDEDADKERYQTVYNEKPGAVAAPTAGLHFDTDILEKMKAKGVEFAYVTLHVGAGTFQPVRVDNILEHHMHSEYAEVSQEVVDAVNATKARGGRVISVGTTSVRSLESAAQHALKQGTELAPFFDDTEIFIYPGYEFQVVDALVTNFHLPESTLIMLVSAFAGYENTMKAYEQAVNNKYRFFSYGDAMFITKKTA

SEQ ID NO: 63144 - protein, 350 aa, Aliivibrio sp.
  misc_feature (1)..(350): tr|A0A1B9P908|A0A1B9P908_9GAMM S-adenosylmethionine:tRN A ribosyltransferase-isomerase OS=Aliivibrio sp. 1S175 OX=1840087 GN=queA PE=3 SV=1
MQVSDFHFELPDELIARYPQPERTASRLLRLNGNSGELVDGQFTDVLDLVQSGDLVVFNNTRVIPARMFGVKASGGKLEVLVERVLDEHSVLAHVRCSKSPKPGNQLWLGENQEYEAEMVARHDTLFEIRFTSEKKVLDILDEIGHMPLPPYIDRPDEDADKERYQTVYNEKPGAVAAPTAGLHFDTDILEKMKAKGVEFAYVTLHVGAGTFQPVRVDNILEHHMHSEYAEVSQEVVDAVNATKARGGRVISVGTTSVRSLESAAQHALKQGTELAPFFDDTEIFIYPGYEFQVVDALVTNFHLPESTLIMLVSAFAGYENTMKAYEQAVNNQYRFFSYGDAMFITKKTA

SEQ ID NO: 63145 - protein, 350 aa, Aliivibrio wodanis
  misc_feature (1)..(350): tr|A0A090IS53|A0A090IS53_9GAMM S-adenosylmethionine:tRN A ribosyltransferase-isomerase OS=Aliivibrio wodanis OX =80852 GN=queA PE=3 SV=1
MQVSDFHFELPDELIARYPQPERTASRLLQLNGNSGELVDGQFTNVLDLVQSGDLVVFNNTRVIPARMFGVKASGGKLEVLVERVLDEHSVLAHVRCSKSPKPGNQLWLGENQEYEAEMVARHDTLFEIRFISEKKVLDILDEIGHMPLPPYIDRPDEDADKERYQTVYNEKPGAVAAPTAGLHFDTEILEKMKAKGVEFAYVTLHVGAGTFQPVRVDNILEHHMHSEYAEVSQEVVDAVKATKARGGRVISIGTTSVRSLESAAQHALKQGTELAPFFDDTEIFIYPGYEFQVVDALVTNFHLPESTLIMLVSAFAGYENTMKAYDQAVNNQYRFFSYGDAMFITKKTA

SEQ ID NO: 63146 - protein, 341 aa, Alishewanella aestuarii
  misc_feature (1)..(341): tr|J1Q5G0|J1Q5G0_9ALTE S-adenosylmethionine:tRNA ribosy ltransferase-isomerase OS=Alishewanella aestuarii B11 O X=1197174 GN=queA PE=3 SV=1
MLVKDFSFELPEQLIASEPQAERSASRLLCMNKHSGALSHHIFKDILALLNPGDLLVFNNTRVIPARLFGQKASGGKVEVLVERMLSGPRFLAHIRASKAPKVGTELILENDARVTMVARHDSLFELEYQSAEPVLTMLERLGHMPLPPYIARPDTEADKARYQTVYNQKPGAVAAPTAGLHFDEPLLAALQQKGIEFAYVTLHVGAGTFQPVRVDSVTEHKMHSEYFEVEQQVVDAIAACKARGNRVVAVGTTSVRSLESAAMQHGGTLAPYSGDTAIFIYPGYQFKVVDALITNFHLPESTLIMLVSAFSQREHIMAAYQTAIAEQYRFYSYGDAMFIS

SEQ ID NO: 63147 - protein, 341 aa, Alishewanella agri
  misc_feature (1)..(341): tr|I8U9X6|I8U9X6_9ALTE S-adenosylmethionine:tRNA ribosy ltransferase-isomerase OS=Alishewanella agri BL06 OX=11 95246 GN=queA PE=3 SV=1
MLVKDFSFELPEQLIASEPQAERSASRLLCMDKQNGTLSHYIFKDILQLLNPGDLLVFNNTRVIPARLFGQKDSGGKVEVLVERLLNEQRFLAHIRASKAPKVGTELLLEQEARVRMVARHDSLFELEYLATEPVLSMLERLGHMPLPPYIARPDTEADKARYQTVYNQKPGAVAAPTAGLHFDEPLLAALQQKGIEFAYVTLHVGAGTFQPVRVDEISAHKMHSEYFEVEQQVVDAITACKARGNRVVAVGTTSVRSLESAAMQHGGVLAPFSGDTAIFIYPGYQFKVIDALITNFHLPESTLIMLVSALSSREHIMAAYQTAIAEKYRFYSYGDAMFIS

SEQ ID NO: 63148 - protein, 341 aa, Alishewanella jeotgali
  misc_feature (1)..(341): tr|H3ZGM3|H3ZGM3_9ALTE S-adenosylmethionine:tRNA ribosy ltransferase-isomerase OS=Alishewanella jeotgali KCTC 2 2429 OX=1129374 GN=queA PE=3 SV=1
MLVKDFSFELPEQLIASEPQAERSASRLLCMNKHSGALSHHIFKDILALLNPGDLLVFNNTRVIPARLFGQKASGGKVEVLVERMLSGPRFLAHIRASKAPKVGTELILENDARVTMVARHDSLFELEYQSVEPVLTMLERLGHMPLPPYIARPDTEADKARYQTVYNQKPGAVAAPTAGLHFDEPLLAALQQKGIEFAYVTLHVGAGTFQPVRVDSVTEHKMHSEYFEVEQQVVDAIAACKARGNRVVAVGTTSVRSLESAAMQHGGILAPYSGDTAIFIYPGYQFKVVDALITNFHLPESTLIMLVSAFSQREHIMAAYQTAIAERYRFYSYGDAMFIS

SEQ ID NO: 63149 - protein, 341 aa, Alishewanella sp.; identical to SEQ ID NO: 63148
  misc_feature (1)..(341): tr|A0A1C2C899|A0A1C2C899_9ALTE S-adenosylmethionine:tRN A ribosyltransferase-isomerase OS=Alishewanella sp. HH- ZS OX=1856684 GN=queA PE=3 SV=1

SEQ ID NO: 63150 - protein, 341 aa, Alishewanella sp.
  misc_feature (1)..(341): tr|A0A0T5PIH6|A0A0T5PIH6_9ALTE S-adenosylmethionine:tRN A ribosyltransferase-isomerase OS=Alishewanella sp. WH1 6-1 OX=1651088 GN=queA PE=3 SV=1
MLVKDFSFELPEQLIASEPQAERSASRLLCMNKQNGTLSHYIFKDILQLLNPGDLLVFNNTRVIPARLFGQKDSGGKVEVLVERLLNEQRFLAHIRASKAPKVGTELLLEQEARVRMVARHDSLFELEYLATEPVLSMLERLGHMPLPPYIARPDTEADKARYQTVYNQKPGAVAAPTAGLHFDEPLLAALQQKGIEFAYVTLHVGAGTFQPVRVDEISAHKMHSEYFEVEQQVVDAITACKARGNRVVAVGTTSVRSLESAAMQHGGVLAPFSGDTAIFIYPGYQFKVIDALITNFHLPESTLIMLVSALSSREHIMAAYQTAIAEKYRFYSYGDAMFIS

SEQ ID NO: 63151 - protein, 405 aa, Alistipes finegoldii
  misc_feature (1)..(405): tr|I3YKD6|I3YKD6_ALIFI S-adenosylmethionine:tRNA ribosy ltransferase-isomerase OS=Alistipes finegoldii (strain DSM 17242 / JCM 16770 / AHN 2437 / CCUG 46020 / CIP 107 999) OX=679935 GN=queA PE=3 SV=1
MPMSERHIDINEFDYDLPDGRIAKFPLAERSASKLLVYRGGEIGEAHFADIGDVLPEGQLLVFNNTKVIRARIIMHKPSGARIEVFCLEPHDPADYERAFAVVGRCEWSCIVGNLKKWKEGYVEINFEHEGRPEHLRAWLVENRGREHTVRFEWSAAMTFGQLLEYLGRIPIPPYLNRESEEIDYTRYQTVYSKFEGSVAAPTAGLHFTPELIEGMKARGFGFEEVTLHVGAGTFLPVKDDDAARHPMHTEHFEVRRAAVARLLEKWGRITAVGTTSVRTLESLTALAWRIRTAGTPDAERVVGQWELYDVPAEFSGREALETLLKYMDEKGLERIKAATQIMITPLGYEFRIVRNIVTNFHQPKSTLLLLVSAFVGGDWKRIYEYALGHGFRFLSYGDSSVLMR

SEQ ID NO: 63152 - protein, 403 aa, Alistipes finegoldii
  misc_feature (1)..(403): tr|A0A4Q5JN67|A0A4Q5JN67_9BACT S-adenosylmethionine:tRN A ribosyltransferase-isomerase OS=Alistipes finegoldii OX=214856 GN=queA PE=3 SV=1
MNERHIDINEFDYDLPDGRIAKFPLAERSASKLLVYRGGEIGEAHFADIGDVLPEGQLLVFNNTKVIRARIIMHKPSGARIEVFCLEPHDPADYERAFAVVGRCEWSCIVGNLKKWKEGYVEINFEHEGRPEHLRAWLVENRGREHTVRFEWSAAMTFGQLLEYLGRIPIPPYLNRESEEIDYTRYQTVYSKFEGSVAAPTAGLHFTPELIEGMKARGFGFEEVTLHVGAGTFLPVKDDDAARHPMHTEHFEVRRAAVARLLEKWGRITAVGTTSVRTLESLTALAWRIRTAGTPDAERVVGQWELYDVSAEFSGREALETLLKYMDEKGLERIKAATQIMITPLGYEFRIVRNIVTNFHQPKSTLLLLVSAFVGGDWKRIYEYALGHGFRFLSYGDSSVLMR

SEQ ID NO: 63153 - protein, 349 aa, Alistipes indistinctus
  misc_feature (1)..(349): tr|A0A412SF74|A0A412SF74_9BACT S-adenosylmethionine:tRN A ribosyltransferase-isomerase OS=Alistipes indistinctu s OX=626932 GN=queA PE=3 SV=1
MKLSQYNYSFSPNMLAKYPAENRDESRLMVIDRASGKIEHSVFKNVIDYFDEGDVLTFNDTKVFPARLYGNKEKTGAEIEIFLLRELNRDLRLWDVLVDPARKIRIGNKLYFGDDDLLVAEVIDNTTSRGRTLRFLFDGDYDEFKATLYKMGETPLPKWIRSKVEPIDDERYQTIFARHEGAVAAPTAGLHFSKHLMKRLEIKGVDMAFLTLHVGLGNFRTVDVEDLTKHKMDSEQVVIPEETAEKVNQIKRAGGKVCAVGTTVMRSMESSVSTEGFLKPFDGWTNKFIFCPYEFSVANCMITNFHLPYSTQLMMVSAFAGYDLLMEAYKVAKEEKYRFGTYGDAMLIL

SEQ ID NO: 63154 - protein, 437 aa, Alistipes indistinctus
  misc_feature (1)..(437): tr|A0A5B5UGT6|A0A5B5UGT6_9BACT S-adenosylmethionine:tRN A ribosyltransferase-isomerase OS=Alistipes indistinctu s OX=626932 GN=F1988_02680 PE=3 SV=1
MNNRHTAIRDCHFIATFARDRPLRGGNRDSHPILPAVNNELLISDYNYPLPEDRIAKFPLERREMSKLLVYEKGGISESRFARIGEALPAGAMLVFNNTKVIRARLVFYKPTGARIEIFCLEPHDPADYERAFAVKGSCRWSCIVGNLKKWKDDELHIDFEAEGRAQRLTARKAGQTDKEQIIEFSWNGDQSFGQLLEALGRIPIPPYLCRESEELDNSRYQTVYSKFEGSVAAPTAGLHFTPEIIAELRNTGHLTDEVTLHVGAGTFLPVKADEVTRHKMHTEHFEIRLSTIRNLIDHLGEVIAVGTTSVRTLESLCALGWRILSSGSPDAERPVGQWEIYDVPAQRETGELLEALSVYLEQERLAKLKTATQIMIMPGYRYRIVRGIITNFHQPQSTLLLLVSAFIGEDWRKVYDFALNNDFRFLSYGDCSLLLP

SEQ ID NO: 63155 - protein, 349 aa, Alistipes inops
  misc_feature (1)..(349): tr|A0A0B0C1R0|A0A0B0C1R0_9BACT S-adenosylmethionine:tRN A ribosyltransferase-isomerase OS=Alistipes inops OX=15 01391 GN=queA PE=3 SV=1
MKLSQYNYNFSPELLAKYPADNRDESRLMVVERKTGKIEHRIFKEIIDYFNEKDVFIFNNTKVFPARLYGNKEKTGAEIEIFLLRELNRDLRLWDVLVDPARKIRIGNKLYFGDDDLLVAEVIDNTTSRGRTLRFLFDGTYEEFRAALYKLGETPLPKWIRDKVEPIDEERYQTIFATEEGAVAAPTAGLHFSKHLMKRLEIKGIESAMITLHVGLGNFRTVDVEDLTKHKMDSEQVHIPEEAAAKVNRAKEGGHRVCAIGTTVQRAIESSVSTNGMLKPCDGWTNKFIFCPYDFSVADSMVSNFHLPCSTQLMLVAAFGGYETVMHAYKVAIEEGYRFGTYGDAMLLL

SEQ ID NO: 63156 - protein, 405 aa, Alistipes inops
  misc_feature (1)..(405): tr|A0A0B0BUK0|A0A0B0BUK0_9BACT S-adenosylmethionine:tRN A ribosyltransferase-isomerase OS=Alistipes inops OX=15 01391 GN=queA PE=3 SV=1
MTPKDSVNISDFDYPLPDERIARFPADERDASRLLVYRRGALSETRFRGIGGELPEGAVLVFNNTKVIRARIVMHKPSGARVEVFCLEPHAPADYERAFAAQGECRWQCIVGNLKKWKEGPLAIDFDCNGVPCRVQAWREGTAGTSQVVRFTWDAALSFGQLLEHLGRIPIPPYLGRDSEEIDNTRYQTVYSRFEGSVAAPTAGLHFTPELIERLRREGVRTEEVTLHVGAGTFLPVKTDNPLQHTMHTEHFEVTAATVRRLAAAAAGRHIVAVGTTSVRTLESLPVLGWRILREGNPHTDTPVGQWEAYDLPAEADGAELLGTLASYMEAAGTEKLQAATQIMIMPGFTYRLTSGMITNFHQPKSTLLLLVSAFIGEEWRRLYDYALSHGFRFLSYGDSSLLLP

SEQ ID NO: 63157 - protein, 408 aa, Alistipes obesi
  misc_feature (1)..(408): tr|A0A3D3YM88|A0A3D3YM88_9BACT S-adenosylmethionine:tRN A ribosyltransferase-isomerase OS=Alistipes obesi OX=11 18061 GN=DIT81_07150 PE=3 SV=1
MERHIDINQFDYDLPDERIAKFPLAERSASKLLVYRNGAISESRFDRLGEELPEGAMLVFNNTKVIRARIIMHKPSGARIEVFCLEPHAPADYERAFAVKGKCAWSCIVGNLKKWKEGALVIDFTLDGTPQQLRAYRTGTGGREQIVRFEWEADLTFGELLELLGRIPIPPYLNRDSQQIDYTRYQTVYSKFEGSVAAPTAGLHFTPELIASLGAAGVEFEEVTLHVGAGTFLPVKDDDACRHAMHTEHFEIRRTTVERLLHRWGHIVAVGTTSVRTLESLAALAWRIRREGSPDEMRAVGQWELYDIPASYTGREALEELLAYMERNDLGTLKASTQIMIAPLGYRWRIVRAIVTNFHQPKSTLLLLVSAYVGEDWHRIYDYALRNDFRFLSYGDSSLLVNDAPFAG

SEQ ID NO: 63158 - protein, 349 aa, Alistipes obesi
  misc_feature (1)..(349): tr|A0A3D3YLF3|A0A3D3YLF3_9BACT S-adenosylmethionine:tRN A ribosyltransferase-isomerase OS=Alistipes obesi OX=11 18061 GN=queA PE=3 SV=1
MKLSQYGYEFKPEMLAKYPAENRDEARLMVVNRAKGTIEHRIFKDIIDYFDEGDLFVFNDTKVFPARLYGNKEKTGAEIEIFLLRELNRELRLWDVLVDPARKIRIGNKLYFGDDDLMVAEVIDNTTSRGRTLRFLFDGDYDEFKTALFKLGETPLPRWVREKVEPEDSERYQTIFAAKEGAVVAPTAGMHFSKHLMKRMEIRGVERAFLTLHAGLGNFRTVDVEDLSKHKMDSEQYIVDDATAASVNRAKRNGRKVVSIGTTVMRTLETVVSTNGTINAGEGWTNKFIFSPYEFTVADAMVSNFHLPYSTQLMMVAAFGGYDCVMNAYKIAREEGYRFGTYGDAMLLL

SEQ ID NO: 63159 - protein, 191 aa, Alistipes onderdonkii
  misc_feature (1)..(191): tr|A0A5B3H844|A0A5B3H844_9BACT S-adenosylmethionine:tRN A ribosyltransferase-isomerase (Fragment) OS=Alistipes onderdonkii OX=328813 GN=F2Y11_16955 PE=3 SV=1
MKLSQYGYDFAPEMLAKHPTENRDDSRLMVIDRAKGTIEHRIFKDIIEYFDEKDLFVFNDTKVFPARLYGNKEKTGAEIEIFLLRELNRELRLWDVLVDPARKIRIGNKLYFGDDDLLVAEVIDNTTSRGRTLRFLFDGSYEEFKQTLFSLGETPLPKWVRDKVEPEDAERYQTIFAEHEGAVAAPTAGMH

SEQ ID NO: 63160 - protein, 403 aa, Alistipes onderdonkii
  misc_feature (1)..(403): tr|A0A1Y3QRW1|A0A1Y3QRW1_9BACT S-adenosylmethionine:tRN A ribosyltransferase-isomerase OS=Alistipes onderdonkii OX=328813 GN=B5G41_11970 PE=3 SV=1
MIERHIDINRFDYDLPDGRIAKFPLAERSSSKLLVYRGGEISEAHFADMGDVLPAGQLLVFNNTKVIRARIIMHKPSGARIEVFCLEPHDPADYERAFAVTGTCQWSCIVGNLKKWKEGYVEINFEHEGRPEHLRAWIAENRGREHTVRFEWSAAMTFGQLLEYLGRIPIPPYLNRESELIDYTRYQTVYSKFEGSVAAPTAGLHFTPELIEGMKARGFGFEEVTLHVGAGTFLPVKDEDAAKHPMHTEHFEVRRATIVALLAKPGAVTAVGTTSVRTLESLPALAWRIHTGDSIDGPGPVGQWELYDIPADYTGRDALEELLAYMDARGLDRIKAATQIMIAPLGYEFRIVRNIITNFHQPKSTLLLLVSAFAGEDWRRIYDYALSHDFRFLSYGDSSVLMR

SEQ ID NO: 63161 - protein, 405 aa, Alistipes putredinis
  misc_feature (1)..(405): tr|R7JHN8|R7JHN8_9BACT S-adenosylmethionine:tRNA ribosy ltransferase-isomerase OS=Alistipes putredinis CAG:67 O X=1263036 GN=queA PE=3 SV=1
MLKMERHIDIDHFDYDLPDERIAKYPLEERSASKLLVYERGEISERRFRDIGDILPAGTLLVFNNTKVIRARIIMHKPSGARIEVFCLEPHDPADYERAFAVKGSCRWSCIVGNLKKWKEGPLVIDFEYEGRAERMLAWREGEGGREQIVRFEWTADLTFGQLLEHLGRIPIPPYLNRESQEIDNTRYQTVYSKFEGSVAAPTAGLHFTPELIERMRTQGFSFEEVTLHVGAGTFLPVKDRDAAAHPMHTEHFEIRRSSVGRLLEKWDNITAVGTTSVRTLESLAALAWRIRTSGTPDASRVIGQWELYDLPEAFTGREALQVLSDYMVREGIEKLKAATQIMITPLGYRFRIVRNIVTNFHQPKSTLLLLVSAYVGDDWHRIYDYALTHDFRFLSYGDSSVLMR

SEQ ID NO: 63162 - protein, 349 aa, Alistipes putredinis
  misc_feature (1)..(349): tr|A0A1Q6F603|A0A1Q6F603_9BACT S-adenosylmethionine:tRN A ribosyltransferase-isomerase OS=Alistipes putredinis OX=28117 GN=queA PE=3 SV=1
MKLSQYGYDFSADLLAKYPAENRDESRLMVVNRAKGTIEHRIFKEIIEYFDEKDLFIFNDTKVFPARLYGNKEKTGAEIEIFLLRELNRELRLWDVLVDPARKIRIGNKLYFGDDDLLVAEVIDNTTSRGRTLRFLFDGSYEEFKETLFKLGETPLPKWVREKVEPEDAERYQTIFASKEGAVAAPTAGMHFSKHLFKRMEIKGIEKAFITLHVGLGNFRTVDVEDLSKHKMDSEQFFVDEPTAEAVNKTKREGHKIVSIGTTVMRTLETAVSTGGMIKPMEGWTNKFIFAPYEFSVADAMVTNFQLPYSTQLMMVSAFGGYDLIMNAYKIAKEEGYRFGTYGDAMLIL

SEQ ID NO: 63163 - protein, 336 aa, Alistipes shahii
  misc_feature (1)..(336): tr|D4IMF0|D4IMF0_9BACT S-adenosylmethionine:tRNA ribosy ltransferase-isomerase OS=Alistipes shahii WAL 8301 OX= 717959 GN=queA PE=3 SV=1
MLAKYPADNRDESRLMVINRAKGTIEHRIFKDIIEYFDEKDLFVFNDTKVFPARLYGNKEKTGAEIEIFLLRELNRELRLWDVLVDPARKIRIGNKLYFGDDDLLVAEVIDNTTSRGRTLRFLFDGSYEEFKHALFALGETPLPKWVREKVEPEDAERYQTIFAEKEGAVAAPTAGMHFSKHLMKRMEIKGIDKTFVTLHVGLGNFRTVDVEDLSKHKMDSEQFFVEEAAAEAVNAAKRQERKVVAIGTTVMRTIETAVSTNGMIKPMEGWTNKFIFAPYEFTVADAMVTNLHLPYSTQLMMVAAFGGYETVMNAYKVAKEEGYRFGTYGDAMLIL

SEQ ID NO: 63164 - protein, 349 aa, Alistipes shahii
  misc_feature (1)..(349): tr|A0A5B3GT36|A0A5B3GT36_9BACT S-adenosylmethionine:tRN A ribosyltransferase-isomerase OS=Alistipes shahii OX=3 28814 GN=queA PE=3 SV=1
MKLSQYGYDFSPEMLAKYPADNRDESRLMVINRAKGTIEHRIFKDIIEYFDEKDLFVFNDTKVFPARLYGNKEKTGAEIEIFLLRELNRELRLWDVLVDPARKIRIGNKLYFGDDDLLVAEVIDNTTSRGRTLRFLFDGSYEEFKHALFALGETPLPKWVREKVEPEDAERYQTIFAEKEGAVAAPTAGMHFSKHLMKRMEIKGIDKTFVTLHVGLGNFRTVDVEDLSKHKMDSEQFFVEEAAAEAVNAAKRQERKVVAIGTTVMRTIETAVSTNGMIKPMEGWTNKFIFAPYEFTVADAMVTNLHLPYSTQLMMVAAFGGYETVMNAYKVAKEEGYRFGTYGDAMLIL

SEQ ID NO: 63165 - protein, 349 aa, Alistipes sp.
  misc_feature (1)..(349): tr|A0A4Y1WJR4|A0A4Y1WJR4_9BACT S-adenosylmethionine:tRN A ribosyltransferase-isomerase OS=Alistipes sp. 3BBH6 O X=2585117 GN=queA_1 PE=3 SV=1
MKLSQYGYDFAPEMLAKHPTENRDDSRLMVIDRAKGTIEHRIFKDIIEYFDEKDLFVFNDTKVFPARLYGNKEKTGAEIEIFLLRELNRELRLWDVLVDPARKIRIGNKLYFGDDDLLVAEVIDNTTSRGRTLRFLFDGSYEEFKQTLFSLGETPLPKWVRDKVEPGDAERYQTIFAEHEGAVAAPTAGMHFSKHLMKRMEIKGIDRAFVTLHVGLGNFRTVDVEDLSKHKMDSEQFFVTEEAAGTVNEAKRNGHKVAAIGTTVMRTLETAVSTNGMIKPMEGWTNKFIFAPYEFTVADAMVTNFHLPYSTQLMMVAAFGGYETIMNAYKIAKEEGYRFGTYGDAMLIL

SEQ ID NO: 63166 - protein, 349 aa, Alistipes sp.; identical to SEQ ID NO: 63164
  misc_feature (1)..(349): tr|A0A1Q6EM57|A0A1Q6EM57_9BACT S-adenosylmethionine:tRN A ribosyltransferase-isomerase OS=Alistipes sp. 56_sp_N ov_56_25 OX=1896969 GN=queA PE=3 SV=1

SEQ ID NO: 63167 - protein, 403 aa, Alistipes timonensis
  misc_feature (1)..(403): tr|A0A1H4EUN1|A0A1H4EUN1_9BACT S-adenosylmethionine:tRN A ribosyltransferase-isomerase OS=Alistipes timonensis JC136 OX=1033731 GN=queA PE=3 SV=1
MERHIDINRFDYDLPDERIAKFPLAERSASKLLVWRGGGISERHFADIGDVLPAGELLVFNNTKVIRARIIMHKPSGARIEVFCLEPHDPADYERAFAVTGGCAWSCIVGNRKKWKEGYVEINFDCQGRAEHLRAWIAEDHGRECVVRFEWSAPMTFGQLLEHLGRIPIPPYLNRESEEIDNTRYQTVYSKFEGSVAAPTAGLHFTPGLIGAMEARGFGFEEVTLHVGAGTFLPVKDDDAAKHPMHTEHFEVRRATVARLLEKWGHITAVGTTSVRTLESLAALAWRIRTAGTPDAGRVVSQWELYDIPADYSGRDALEELLAWMDANGVERLKASTQIMITPLGYEFRIVRNIVTNFHQPKSTLLLLVSAFAGDDWRRIYDYALGHDFRFLSYGDSSVLMRE

SEQ ID NO: 63168 - protein, 349 aa, Alistipes timonensis
  misc_feature (1)..(349): tr|A0A1H4C1U7|A0A1H4C1U7_9BACT S-adenosylmethionine:tRN A ribosyltransferase-isomerase OS=Alistipes timonensis JC136 OX=1033731 GN=queA PE=3 SV=1
MKLSQYGYDFSPEMLAKYPADNRDESRLMVINRAKGTIEHRIFKDIIEYFDEKDLFVFNDTKVFPARLYGNKEKTGAEIEIFLLRELNRELRLWDVLVDPARKIRIGNKLYFGDDDLLVAEVIDNTTSRGRTLRFLFDGSYEEFKQTLFALGETPLPKWVREKVEPEDADRYQTIFAEKEGAVAAPTAGMHFSKHLMKRMEIKGVDKTFVTLHVGLGNFRTVDVEDLSKHKMDSEQFFVTEEAAGAVNEAKNAGRKVVAIGTTVMRTIETAVSTNGLIKPMEGWTNKFIFAPYEFTVADAMVTNLHLPYSTQLMMVAAFGGYETVMNAYKIAKEEGYRFGTYGDAMLIL

SEQ ID NO: 63169 - protein, 382 aa, Aliterella atlantica
  misc_feature (1)..(382): tr|A0A0D9A2K2|A0A0D9A2K2_9CYAN S-adenosylmethionine:tRN A ribosyltransferase-isomerase OS=Aliterella atlantica CENA595 OX=1618023 GN=queA PE=3 SV=1
MNSFPKTIQSEPSSGRGREDKERSLSSYDYELPPSAIAQNPVIPRDSAKLLVVDSPHTHCHRIFSDLPQLLKPGDLLIMNDTRVIPARLHGRKTSGAAVEVLLLEEKQYNTWLALVKPGKRLQKGARIVFAREAGEAGEAQYVSISATVLEVNEATGGRLLRFDLPNGVSLLQILDSFGEIPLPPYITDSQAEDDQYQTVYAQNAGAIAAPTAGLHFTPELLQKLAEKGINSAFITLHVGVGTFRPVEVEDVTTHQMHGEWIDVSAATVEQIRATKARGGRVIAVGTTAVRALEGAAALSGQLEPFCGKTQLFIYPGYQWRVVDGLITNFHLPRSSLMMLVSALIGRQRLLDLYTEAIANAYRFYSFGDAMLILPEARVTHP

SEQ ID NO: 63170 - protein, 341 aa, Alkalibacillus haloalkaliphilus
  misc_feature (1)..(341): tr|A0A511W5R1|A0A511W5R1_9BACI S-adenosylmethionine:tRN A ribosyltransferase-isomerase OS=Alkalibacillus haloal kaliphilus OX=94136 GN=queA PE=3 SV=1
MRVEDFDFELPEELIAQTPLKERASSKMMIIDREEESVSHKRFADVVNYLNPGDCLVLNNTKVLPARLLGVKEETGANIELLLLHQIEGDRWEVLAKPAKKFKEGATVSFGDGLLSATCIESLDQGGKVVEFHYDGIFLEVLNELGEMPLPPYIKEQLDDQDRYQTVYAEESGSAAAPTAGLHFTEELLQQIKAKGVNVAYLTLHVGLGTFRPVQVDNLEEHDMHAEYYRLTEETANLLTETKANGGRVVAVGTTSIRTLETIMRDYDEFRAVSGWTDIFIYPPYQFKAVDGLITNFHLPKSTLIMLVSAFSTKELIMSAYQEAIEQRYRFFSFGDAMLIL

SEQ ID NO: 63171 - protein, 340 aa, Alkalibacter saccharofermentans
  misc_feature (1)..(340): tr|A0A1M4S484|A0A1M4S484_9FIRM S-adenosylmethionine:tRN A ribosyltransferase-isomerase OS=Alkalibacter saccharo fermentans DSM 14828 OX=1120975 GN=queA PE=3 SV=1
MKTRDFNFELPQELIAQHPIEKRDASRLMVIDRNTGDIHHKNFFDVTHHLKAGDTLVLNNTRVMPARLYGKNKDREGVVEILLLKRTEKDEWETMVKPGKKAKLGDVLVFEDVLQGEVVSIKEDGLRIIRFQYEGIFENILDKLGHMPLPPYIKETLSDKERYQTVYSKEVGSAAAPTAGLHFTGELLEKIKKKGVNIAYITLHVGIGTFRPVKVDDVTKHKMHSEYYSIDEKTAEMLNHTRDNGGRIIAVGTTSVRTLETVAQRGFPLKSCSGWTDIFIYPPHDFQAVDGMITNFHLPESTLLMLVSAFAQKDLIMGAYKKAVEEKYRFFSFGDSMIII

SEQ ID NO: 63172 - protein, 344 aa, Alkalibacterium gilvum
  misc_feature (1)..(344): tr|A0A1H6UKK8|A0A1H6UKK8_9LACT S-adenosylmethionine:tRN A ribosyltransferase-isomerase OS=Alkalibacterium gilvu m OX=1130080 GN=queA PE=3 SV=1
MGLSTEDFDFQLPEELIAQTPLKNRSASKMMVLSKENKEIKDQQFNDILDELNPGDALVMNNTRVLPARLHGVKEETKAHMEVLLLKNTQGDQWETLMKPARKAKEGTTISFGDGRLKATVIEELEHGGRIVEFTYEGLFLETLESLGEMPLPPYIKERLDDQERYQTVYAKENGSAAAPTAGLHFTEEILDRVKEKGIEIVFLTLHVGLGTFRPVSVSNIDEHEMHAEFYQLSEESAKKLNDTKEKGGRIIAVGTTSIRTLETIGRDNSGVLKAASGWTDIFISPGYTFNTVDAFLTNFHLPKSTLLMLVSAFAGREFVLNAYSHAVDERYRFFSFGDAMFVK

SEQ ID NO: 63173 - protein, 344 aa, Alkalibacterium kapii
  misc_feature (1)..(344): tr|A0A511ATD9|A0A511ATD9_9LACT S-adenosylmethionine:tRN A ribosyltransferase-isomerase OS=Alkalibacterium kapii OX=426704 GN=queA PE=3 SV=1
MGLSTKDFDFQLPEELIAQTPLKNRSASKMMIISRENKEIKDQKFDDIIDELNPGDALVMNNTRVLPARLHGIKEETHAHLELLLLKNTDGDKWETLMKPAKKAKKNTVISFGDGRLKATVVEELEHGGRIVEFSYDGVFLEILESLGEMPLPPYIKERLDDQERYQTVYAKENGSAAAPTAGLHFTEDILDKIKQKGIEIVFLTLHVGLGTFRPVSVSDIDQHEMHTEFYQLSEAAAKKLNETKEKGGRIIAVGTTSIRTLETIGRDNAGTLKAASGWTDIFISPGYTFNTVDAFLTNFHLPKSTLLMLVSAFAGRDFTLEAYKHAVEEKYRFFSFGDAMFVK

SEQ ID NO: 63174 - protein, 121 aa, Alkalibacterium olivapovliticus
  misc_feature (1)..(121): tr|A0A2T0W2C6|A0A2T0W2C6_9LACT S-adenosylmethionine:tRN A ribosyltransferase-isomerase OS=Alkalibacterium oliva povliticus OX=99907 GN=CLV38_12422 PE=3 SV=1
MHEEFYQLSQTSADMLNETKNNGGRIIAIGTTSIRTLETIGQEYDGQFKAASGWTSIFISPGYQFKAVDAFLTNFHLPKSTLIMLVSAFLGREFVLRSYHHAVEEKYRFFSFGDAMFVKKR

SEQ ID NO: 63175 - protein, 208 aa, Alkalibacterium olivapovliticus
  misc_feature (1)..(208): tr|A0A2T0W2R3|A0A2T0W2R3_9LACT S-adenosylmethionine:tRN A ribosyltransferase-isomerase OS=Alkalibacterium oliva povliticus OX=99907 GN=CLV38_12423 PE=3 SV=1
MTLTTDDFDFALPEELIAQTPLKNRSSSKMMVLTKESETIEDRQFESIVDELNEGDALVMNDTRVLPARLYGEKEDTHAHIEVLLLKNIEDDKWETLMKPAKKAKPGTVLSFGDGRLKATVLESLEHGGRIVEFSYDGIFLETLESLGEMPLPPYIKERLQDSERYQTVYAKENGSAAAPTAGLHFTEELLEKIKNKGVKLVFLTLHV

SEQ ID NO: 63176 - protein, 346 aa, Alkalibacterium pelagium
  misc_feature (1)..(346): tr|A0A1H7NAV8|A0A1H7NAV8_9LACT S-adenosylmethionine:tRN A ribosyltransferase-isomerase OS=Alkalibacterium pelag ium OX=426702 GN=queA PE=3 SV=1
MTLTTNDFDFELPEELIAQTPLKNRSSSKMMVLNKETESIEDRQFESIIDELNPGDALVMNNTRVLPARLYGEKEDTKAHMEVLLLKNLEGDKWETLMKPAKKAKPGTVITFGDGRLKATVIESLEHGGRIVEFSYDGIFLETLESLGEMPLPPYIKERLDDSERYQTVYAKENGSAAAPTAGLHFTEDILEKIQEKGVKLVFLTLHVGLGTFRPVSVDNIEEHKMHEEFYQLSEESAATLNKTRDEGGRIIAIGTTSIRTLETIGQEFDGRFQAASGWTDIFIAPGYQFKAVDGFLTNFHLPKSTLIMLVSAFLGRDFVLEAYNHAVQERYRFFSFGDAMFVKKR

SEQ ID NO: 63177 - protein, 351 aa, Alkalibacterium putridalgicola
  misc_feature (1)..(351): tr|A0A1H7T0S1|A0A1H7T0S1_9LACT S-adenosylmethionine:tRN A ribosyltransferase-isomerase OS=Alkalibacterium putri dalgicola OX=426703 GN=queA PE=3 SV=1
MTLSTKDFDFQLPDELIAQTPLEDRSSSRMMVLTTETKKIEDKQFEDIVDELNPGDALVMNNTRVLPARLYGTKEETNAHIEVLLLKNTEGDTWETLMKPAKKAKKGTVISFGDGRLKGTVVEELEHGGRMVEFSYEGIFLETLESLGEMPLPPYIKERLENQERYQTVYAKENGSAAAPTAGLHFTEAILDKIKAKDVKIVFLTLHVGLGTFRPVSVENIDEHKMHAEFYQLSEEAAEELNETRKSGGRIIAVGTTSIRTLETIGKANDGLLKATSGWTDIFISPGYEFSVVDGFLTNFHLPKSTLIMLVSAFAGREFVLQAYNHAVKEKYRFFSFGDAMFVKKKEYKED

SEQ ID NO: 63178 - protein, 344 aa, Alkalibacterium sp.
  misc_feature (1)..(344): tr|A0A1L8PKL0|A0A1L8PKL0_9LACT S-adenosylmethionine:tRN A ribosyltransferase-isomerase OS=Alkalibacterium sp. 2 0 OX=1798803 GN=queA PE=3 SV=1
MTLSTKDFDFQLPEELIAQTPLEKRSSSRMMVLTSDTERIEDKQFESIVDELQPGDALVVNNSRVLPARLHGTKEETNAHIEVLLLKNTEEDTWETLMKPAKKAKIGTVIIFGDGRLKATVVDELEHGGRMVEFSYEGIFLETLESLGEMPLPPYIKERLENQERYQTVYAKENGSAAAPTAGLHFTEEILEKIKAKGVKLIFLTLHVGLGTFRPVSVENIDEHKMHAEFYQLSEESAAELNETRKNGGRIIAVGTTSIRTLETIGKANDDLLKATSGWTDIFISPGYEFSVVDAFLTNFHLPKSTLIMLVSAFAGREFILNAYKHAVEEKYRFFSFGDAMFVK

SEQ ID NO: 63179 - protein, 346 aa, Alkalibacterium sp.
  misc_feature (1)..(346): tr|A0A011RKK2|A0A011RKK2_9LACT S-adenosylmethionine:tRN A ribosyltransferase-isomerase OS=Alkalibacterium sp. A K22 OX=1229520 GN=queA PE=3 SV=1
MTLTTEDFDFELPEELIAQTPLSDRSSSRMMVLNREKQTIEDRGFESIIDELQPGDALVMNDTRVLPARLYGEKEETAAHIEVLLLKNKEGDRWETLMKPAKKAKPGTVISFGDGRLKATVVESLEHGGRIVEFSYEGIFLEILESLGEMPLPPYIKERLNDSDRYQTVYARENGSAAAPTAGLHFTEEILDKIRSKEIKTVFLTLHVGLGTFRPVSVENIDEHKMHEEFYQLSEESASILNQTRSEGGQIVAVGTTSIRTLETIAQEHDGMFKASSGWTSIFIAPGYSFKAVDAFLTNFHLPKSTLIMLVSAFLGREFVLEAYHHAVKERYRFFSFGDAMFVKKK

SEQ ID NO: 63180 - protein, 351 aa, Alkalibacterium subtropicum
  misc_feature (1)..(351): tr|A0A1I1E7J8|A0A1I1E7J8_9LACT S-adenosylmethionine:tRN A ribosyltransferase-isomerase OS=Alkalibacterium subtr opicum OX=753702 GN=queA PE=3 SV=1
MNLSTKDFDFQLPEELIAQTPLENRSSSRMMVLTTETEQIEDKQFEDIIDELHPGDALVMNNTRVLPARLYGTKEETNAHVEVLLLKNTEGDTWETLMKPAKKAKKGTVISFGDGRLKATVVEELEHGGRMVEFSYEGIFLETLESLGEMPLPPYIKERLENQERYQTVYAKENGSAAAPTAGLHFTEEILDKIKAKGIKLVFLTLHVGLGTFRPVSVENIDEHKMHAEFYQLSEEAAEELNETRKSGGRIIAVGTTSIRTLETIGKANEGVLKATSGWTDIFISPGYKFSVVDAFLTNFHLPKSTLIMLVSAFAGREFVLKAYNHAVEEKYRFFSFGDAMFVKKKEYKED

SEQ ID NO: 63181 - protein, 346 aa, Alkalibacterium thalassium
  misc_feature (1)..(346): tr|A0A1G9BHB7|A0A1G9BHB7_9LACT S-adenosylmethionine:tRN A ribosyltransferase-isomerase OS=Alkalibacterium thala ssium OX=426701 GN=queA PE=3 SV=1
MTLTTNDFDFELPEELIAQTPLKNRSSSKMMVLTKETEAIEDRQFESIIDELNPGDALVMNNTRVLPARLYGEKEDTKAHMEVLLLKNLEGDKWETLMKPAKKAKPGTVITFGDGRLKATVIESLEHGGRIVEFSYEGIFLETLESLGEMPLPPYIKERLDDSERYQTVYAKENGSAAAPTAGLHFTEEILEKIQKKGVKLVFLTLHVGLGTFRPVSVDNIEEHKMHEEFYQLSEESADTLNRTREEGGRIIAIGTTSIRTLETIGQAFDGRFQAASGWTDIFIAPGYEFKAVDGFLTNFHLPKSTLIMLVSAFLGRDFVLEAYNHAVQERYRFFSFGDAMFVKKR

SEQ ID NO: 63182 - protein, 340 aa, Alkalibaculum bacchi
  misc_feature (1)..(340): tr|A0A366IF58|A0A366IF58_9FIRM S-adenosylmethionine:tRN A ribosyltransferase-isomerase OS=Alkalibaculum bacchi OX=645887 GN=queA PE=3 SV=1
MNTKDFNYDLPEELIAQTPCEKRDNSRLMVVNREHTTITHKHFYDILEYLGEGDTLVLNNTRVIPARLFGTKADTGAVIEILLLKRVQGDIWETLVKPGKKARVGAVIEFGDTLRGEVIEIKEDGNRHIQFQYDGIFEEILDELGMMPLPPYIKEKLEDQERYQTIYSKVKGSAAAPTAGLHFTEELLKEIRQKGVHIAYVTLHVGLGTFRPVKVDHVEEHKMHSEYYVLTQETADIINETKRRGNKVIAVGTTSVRTLETVAQKSCPLQESSGWTDIFIYPGYEFKVVDRIITNFHLPESTLMMLVSAFASKDFIMKAYKEAVEEKYRFFSFGDSMIIV

SEQ ID NO: 63183 - protein, 342 aa, Alkalicoccus halolimnae
  misc_feature (1)..(342): tr|A0A5C7FGT5|A0A5C7FGT5_9BACI S-adenosylmethionine:tRN A ribosyltransferase-isomerase OS=Alkalicoccus halolimn ae OX=1667239 GN=queA PE=3 SV=1
MDVSQFDYTLPESLIAQTPLSDREASRMLVLDRNSGERGHHYFHELTKHLRAGDTLVLNNTKVIPARLYGMKQETGAKIEVLLLKEEPGYIWEALVKPAKRIKKGTFIDFGEGLLRAQCTEVLPDGRRKLAFQFEGIFTEILDQLGEMPLPPYIQEQLEEKDRYQTVFAKHRGSAAAPTAGLHFTETMIEKLEKQGVSIVYLTLHVGLGTFRPVSVDEVESHTMHAEFYNLPEETAGILNRTKENGGRIVAVGTTSARTLETITRDNNGSFTGASGWTDIFIYPGFTFRAIDGLLTNFHLPKSTLVMLVSAFAGRESVLKAYEEAVEKKYRFFSFGDAMLII

SEQ ID NO: 63184 - protein, 342 aa, Alkalicoccus saliphilus
  misc_feature (1)..(342): tr|A0A2T4U2Q1|A0A2T4U2Q1_9BACI S-adenosylmethionine:tRN A ribosyltransferase-isomerase OS=Alkalicoccus saliphil us OX=200989 GN=queA PE=3 SV=1
MDVSQFDYELPEDLIAQTPLQDRESSRMLVLERSEGEIKHQHFHDLSRHLKQGDTLVLNNTKVIPARLFGIKEETGANIEVLLLKEEAGSVWEALVKPAKRVKKGTKLTFGEGLLKAECTEILPDGRRKLAFSFEGIFHEILDKLGEMPLPPYIQEQLEEKDRYQTVFAKHRGSAAAPTAGLHFTDTMLEKLQKQGIDIVYLTLHVGLGTFRPVSVETVENHTMHAEFYNLPPETAEKLNETKKRGGRIVAVGTTSARTLETIARDTDGEFKEASGWTDIFIYPGFTFRAIDGLLTNFHLPKSTLVMLVSAFAGRDNIMKAYHEAVENRYRFFSFGDAMLII

SEQ ID NO: 63185 - protein, 345 aa, Alkalilimnicola ehrlichii
  misc_feature (1)..(345): sp|Q0A9C4|QUEA_ALKEH S-adenosylmethionine:tRNA ribosylt ransferase-isomerase OS=Alkalilimnicola ehrlichii (stra in ATCC BAA-1101 / DSM 17681 / MLHE-1) OX=187272 GN=que A PE=3 SV=1
MHVDDFSFDLPEALIAHHPPEQRRDSRLLCLDRDTGAVADRRFPDLVDLLRPEDLLVLNDTRVIPARLFGHKPTGGRVEVLVERPLDRHRVLARLRASKVPAPGTVLTLEGGVAAEVTGREGEFFTLRFTAEQTVLELLEHHGHMPLPPYIRRADVAADRERYQTVFARRPGAVAAPTAGLHFDNELLARIGARGVDTAWVTLHVGSGTFAPLRVSDPREHRMHSEWLDVPPATCAAIERARGRGGRVVAVGTTVVRALETAAQDGAVQPYQGETDIFIYPGHRFHAVDALVTNFHLPGSTLLMLVSAFAGRERVLAAYRHAVAQRYRFFSYGDAMFIAAGAADE

SEQ ID NO: 63186 - protein, 348 aa, Alkalilimnicola ehrlichii
  misc_feature (1)..(348): tr|A0A3E0X0X2|A0A3E0X0X2_9GAMM S-adenosylmethionine:tRN A ribosyltransferase-isomerase OS=Alkalilimnicola ehrli chii OX=351052 GN=queA PE=3 SV=1
MQRSDFQFDLPPELIADYPLAERSGSRLLQLNGRTGECRDGRFRDLEQLLRPGDLLVLNDTRVIPARLHGEKATGGKVEVLIERVLDQRRALAHIRASKAPKPGASLWLEGAISVTVVGREGEFFLIEVEAAENLLGLLERHGHMPLPPYIRRPDEEHDRERYQTVYAQRPGAVAAPTAGLHFDDELLARLSAKGVGQARVTLHVGAGTFQPMRAERLEEHRMHREYLEVSPETCAQITAAKEAGGRIVAVGTTVVRSLETAARHGRLAPFQGETDIFIYPGFTFRVVDALVTNFHLPESTLIMLVSAFAGYQNTMQAYRHAIEERYRFFSYGDAMFISPPQPAAVAE

SEQ ID NO: 63187 - protein, 344 aa, Alkalimonas amylolytica
  misc_feature (1)..(344): tr|A0A1H4E1N2|A0A1H4E1N2_ALKAM S-adenosylmethionine:tRN A ribosyltransferase-isomerase OS=Alkalimonas amylolyti ca OX=152573 GN=queA PE=3 SV=1
MQLADFHFELPDALIARYPQAERSASRLLCMDRHTGALSHRVFRDLADQLKAGDLLVFNNTKVIPARLFGQKASGGKVEVLVERMLDEQRFLAHVRASKSPKPGTELLLENDARVTMLGRQGELFELELQGDENVLSMLERLGHMPLPPYIDRPDSEEDKARYQTVYHQKPGAVAAPTAGLHFDQPLLDTLKEKGIQFAFITLHVGAGTFQPVRVEDVTTHQMHAEYIEVDQAVIDAVNACKARGNKVIAVGTTSVRALESTAQHALSQQHPLAPFQGDTQIFIYPGYQFQLVDALITNFHLPESTLIMLVSAFSSRDHVMQAYNTAVEQQYRFYSYGDAMFIS

SEQ ID NO: 63188 - protein, 358 aa, Alkalinema sp.
  misc_feature (1)..(358): tr|A0A251WDQ5|A0A251WDQ5_9CYAN S-adenosylmethionine:tRN A ribosyltransferase-isomerase OS=Alkalinema sp. CACIAM 70d OX=1934309 GN=queA PE=3 SV=1
MDLDRSLSAYDYTLPETQIAQNPANPRDCSRLMVIDNRTQHHHQHFYELEQFLKPGDLLVMNNTRVIPARLYGHKPTGSQVEVLLLEEKSPNQWLALVKPGRKLQPGAVIEFTPIDPQSASVQLAATILDRDSATGGRLLEFRTATHQSLLEVIEQYGHMPLPPYIQDSQSTPEQYQTVYGDRLGSAAAPTAGLHFTPELLERLTQKGVDRTFVTLHVGVGTFRPVEVEDITQHEMHGEWIEVPAETVEKVRQTQINGGRVIAVGTTSARSLEGASQRSGKLEPYCGKTEIFIYPGYEWKTVDGMITNFHLPKSSLMMMISALIGRQRLLDLYAEAIRENYRFYSFGDAMLILPEAKI

SEQ ID NO: 63189 - protein, 341 aa, Alkaliphilus metalliredigens
  misc_feature (1)..(341): sp|A6TQM7|QUEA_ALKMQ S-adenosylmethionine:tRNA ribosylt ransferase-isomerase OS=Alkaliphilus metalliredigens (s train QYMF) OX=293826 GN=queA PE=3 SV=1
MKTNEFDFDLPDRLIAQTPLEKRDHSRLMVLDKNKQEIVHKHFYDITDYLNPGDCLVINNTRVLPARLFGVKENTGGKMEFLLLKRIDLNTWEVLVKPGKKAKIGSRFEFGEGILKAEVLSMADEGARIVRFEYEGVFEELLDQLGKMPLPPYITEELADRERYQTVYSKHEGSSAAPTAGLHFTPELLSEIKKKGINVVSITLHVGLGTFRPVKVDSLENHEMHAEYYEITEEAAQVINDTKKAGNRVFAVGTTSCRTLESASTEKGKIEANKGWTNIFIFPGYQFKILDGLITNFHLPESTLIMLVSALLGKEKTLQAYKVAVDEQYRFFSFGDAMLIV

SEQ ID NO: 63190 - protein, 341 aa, Alkaliphilus oremlandii
  misc_feature (1)..(341): tr|A8MGP0|A8MGP0_ALKOO S-adenosylmethionine:tRNA ribosy ltransferase-isomerase OS=Alkaliphilus oremlandii (stra in OhILAs) OX=350688 GN=queA PE=3 SV=1
METKDFDYDLPEELIAQVPLEHRDQSRLMVLDKETGDIAHRHFYDIIDFLNEGDCLVLNDTRVLPARLIGEKEGSGGKIEFLLLKRIELDTWEALVKPGKKAKVGSRFIFGDGRLCTEVIGIGEEGSRIIKFQYDGVFEDILDQLGQMPLPPYITEKLEDKERYQTVYSKNQGSAAAPTAGLHFTSELLKKLEEKGVKTAYITLHVGLGTFRPVKVEKIEEHTMHSEFYTIDDKNANIINEAKANGKRIIAVGTTSCRTLESVATKDGIIEPKSGWTDIFIYPGYDFKIVDNLITNFHLPESTLIMLVSTLAGKEATLNAYKIAVKEGYRFFSFGDAMFIK

SEQ ID NO: 63191 - protein, 341 aa, Alkaliphilus peptidifermentans
  misc_feature (1)..(341): tr|A0A1G5L3B8|A0A1G5L3B8_9CLOT S-adenosylmethionine:tRN A ribosyltransferase-isomerase OS=Alkaliphilus peptidif ermentans DSM 18978 OX=1120976 GN=queA PE=3 SV=1
MKTSEFNYHLPEHLIAQTPLEQRDESRLMVLDKSKGEISHRHFYDILDYLDDGDCLVLNDTRVIPARLIGEKIETGGKIEFLLLKRIELDKWEVLVKPGKRAKVGSSFQFGDGLLTAKVVDIGDEGSRIVEFFYEGIFEEILDKLGNMPLPPYITETLEDAERYQTVYSKNQGSAAAPTAGLHLTTELLKKIENKGVNIVFITLHVGLGTFRPVKVENILEHKMHAEYYSIEENTALLINTAKNNGRKIVAVGTTCCRTLESAASEDGQLKASSGWTDIFIYPGYKFKMVDNLITNFHLPESTLIMLVSALAGKELVMSAYETAVKESYRFFSFGDAMLIK

SEQ ID NO: 63192 - protein, 341 aa, Alkaliphilus sp.
  misc_feature (1)..(341): tr|A0A2G2MM94|A0A2G2MM94_9CLOT S-adenosylmethionine:tRN A ribosyltransferase-isomerase OS=Alkaliphilus sp. OX=1 872455 GN=queA PE=3 SV=1
MKKEDFDFDLPQELIAQTPLEKRDLSRLMVLDRKTGNIDHSHFYNIIDFMTKDDCLVLNNSRVLPARLIGEKIGTKGKIEFLLLKRLELDTWEVLVKPGKKAKVGAEFQFGEGLLKAKILRIIDEGIRVVKFEHDGVFENIIDELGEMPLPPYITTKLKDQERYQTVYSKHTGSAAAPTAGLHFTNELLERIKEKGVKVVYITLHVGLGTFRPVAVDNIEEHKMHAEFYMIDEETAKTINDVRKKGGNVITVGTTCCRTLESVADDNGQVEASSGWTDIFIYPGYKYKIVTSMITNFHLPKSSLVMMISALVGRENILNAYRVAVEERYRFFSFGDAMFLK

SEQ ID NO: 63193 - protein, 345 aa, Alkalispirillum mobile
  misc_feature (1)..(345): tr|A0A498C3U1|A0A498C3U1_9GAMM S-adenosylmethionine:tRN A ribosyltransferase-isomerase OS=Alkalispirillum mobil e OX=85925 GN=queA PE=3 SV=1
MHVDDFHFDLPEALIAHHPPEQRRDSRLLCLDRETGAIADRRFPDLEGLLRPEDLLVLNDTRVIPARLFGQKPTGGRVEVLVERPLDPHRVLARLRASKTPSTGTVLHLEGGAEAEVTGREGEFFTLRFAGERTVLEILEQHGHMPLPPYIRREDVAADRQRYQTVFARKPGAVAAPTAGLHFDNEMLARIGARGVDTAWVTLHVGSGTFAPLRVTDPREHRMHSEWLDVPATTCAAVERARARGGRVVAIGTTVVRALETAAGDGALRPYQGETDIFIYPGYRFQAVDALVTNFHLPGSTLLMLVSAFAGRERVLAAYRHAVAEHYRFFSYGDAMFLAKGAADE

SEQ ID NO: 63194 - protein, 342 aa, Alkalispirochaeta americana
  misc_feature (1)..(342): tr|A0A1N6P9G5|A0A1N6P9G5_9SPIO S-adenosylmethionine:tRN A ribosyltransferase-isomerase OS=Alkalispirochaeta ame ricana OX=159291 GN=queA PE=3 SV=1
MKTSDLFFDLPQELIAQEPPRERGASRLFLAHRATGGVEHRVMTDIIDAVAPGTVMVFNDSRVRRARVYARTVDTGSSQEFLLVEPRGENRWLAIGPNTKKQRLGRVFRFDPSGVTARISSVEPPYRELTFSQPVTDQWLEEHGHIPLPPYIHRSDSSDDAQRYQTVYARTVGSVAAPTAGLHFTRDMLQALGDRGVEIHFVTLHVGIGTFLPVRTEVLEEHKMHSERYSVSRETARAIGKAKDEGRPVLAVGTTAVRTLESAWNEALQRVEAGEDETGIFIYPGYRFRVVDQLFTNFHTPGSTLLALVSAFATPEDIKEWYRQAVEERYRFFSYGDAMLIR

SEQ ID NO: 63195 - protein, 111 aa, Alkalispirochaeta odontotermitis
  misc_feature (1)..(111): tr|A0A0A0E2J1|A0A0A0E2J1_9SPIO S-adenosylmethionine:tRN A ribosyltransferase-isomerase (Fragment) OS=Alkalispir ochaeta odontotermitis OX=1329640 GN=JY97_01050 PE=3 SV =1
NIPYETAEKITAAKKDGRKVLAVGTTTVRTLETSWSSNKLASGAGKTDLFIYPGYRFKVVDQLFTNLHTPKSTLLMLVSAFLGRKRLLEAYDIAIEENYRFFSYGDAMLIR

SEQ ID NO: 63196 - protein, 342 aa, Alkalispirochaeta sphaeroplastigenens
  misc_feature (1)..(342): tr|A0A2S4JFA8|A0A2S4JFA8_9SPIO S-adenosylmethionine:tRN A ribosyltransferase-isomerase OS=Alkalispirochaeta sph aeroplastigenens OX=1187066 GN=queA PE=3 SV=1
MKTSDLFFDLPQELIAQEPPPERGTSRLFLADRAGGTAEHRVMADIVEAVAPGTVMIFNDSRVRRARVYARTVDTGSSQEFLLIEPRDPNRWLVIGPNTKKQRLGRVFRFDPSGITARVSSVEPPYRELTFSEPVTDQWLDEHGHIPLPPYIARTDSPDDAQRYQTVYARAVGSVAAPTAGLHFTKEILQALQDRGVEIHFVTLHVGIGTFLPVRTEVLEDHQMHTERYSVSPETARAIGRAKEEGRPVLAVGTTAVRTLESAWDESLQRLVPGENDTGIFIYPGYRFRVVDQLFTNFHTPGSTLLALVSAFATPDDIRRWYRLAVEERYRFFSYGDAMLIR

SEQ ID NO: 63197 - protein, 400 aa, Alkalitalea saponilacus
  misc_feature (1)..(400): tr|A0A1T5CZW0|A0A1T5CZW0_9BACT S-adenosylmethionine:tRN A ribosyltransferase-isomerase OS=Alkalitalea saponilac us OX=889453 GN=queA PE=3 SV=1
MPVPEINISDFNYHLPDERIAKYPLTNRDESNLLVYKNQSVNHTNFKNLPEYLPQNTLLVFNNTRVIRARIHFFKSTGAKIEIFCLEPHNPSDAAMAFQQTQEVEWICLVGNLKKWKGETLSAVANTTVGDVNIFAQLVERINDACIIKFSWKNQHANFADILEGMGQTPIPPYLNRESETIDTERYQTVYSKLNGSVAAPTAGLHFSKTILKNIEEQNHKRLEITLHVGAGTFQPVKSEKISGHAMHTEQFEISCTSIEQLLNHNNPVIAVGTTSVRTLESLYYAGVRIINKLEYKKIGQWDGFEMPSDIPVNEALKALLNHLNQSGETTFKASTSIMVAPGYQFKIINGLITNFHQPKSTLLLLISALIGDNWKAVYEYAMNNDFRFLSYGDSSILIP

SEQ ID NO: 63198 - protein, 349 aa, Alkalitalea saponilacus
  misc_feature (1)..(349): tr|A0A1T5E6G5|A0A1T5E6G5_9BACT S-adenosylmethionine:tRN A ribosyltransferase-isomerase OS=Alkalitalea saponilac us OX=889453 GN=queA PE=3 SV=1
MKLSKFKYKLPEELIALHPTHNRDESRLMVVHRATGKIEHKVFKEIINYFVTDDVFVFNDTKVFPARLYGNKEKTGAEIEVFLLRELNAEQRLWDVLVDPARKIRIGNKLYFGDDDALVAEVIDNTTSRGRTLRFLYDGSHEDFKKTLYSLGETPLPKFIKREVEPEDSERYQTIFARNEGAVAAPTAGLHFSRELLKRLEIKGTHFSYITLHVGLGNFRTVDVEDLTKHKMDSEQIQITDEAAQIINDGKDRKNRICAVGTTVMRTLETSVSTFGHVKPFEGWTNKFIFPAYDFQVANCMVSNFHLPYSTLLMMVAAFGGYDLVMKAYKTAVKEKYRFGTYGDAMLII

SEQ ID NO: 63199 - protein, 344 aa, Alkanindiges illinoisensis
  misc_feature (1)..(344): tr|A0A4Y7X958|A0A4Y7X958_9GAMM S-adenosylmethionine:tRN A ribosyltransferase-isomerase OS=Alkanindiges illinois ensis OX=197183 GN=queA PE=3 SV=1
MQLSDFSYNLPDELIARYPLAKRSASRLLHLNAQGQTKDCTIAQLPELLQAGDLLVLNDTRVIKARLHGKRASGGAVEVLVERITGTDTALAHVKASNSPKAGATLYLADSQLEAQVEGRQNNLYALRFNQPVLPALEQFGALPIPPYFNRAADETDDERYQTVFNNPDKAASVAAPTASLHFDDELLTALAQKGIDKAFVTLHVGAGTFQPVRTDNIAEHVMHSEWGEVPQATVELVEKTKANGGKIIAVGTTATRALESAAKANNGELKAWSGETDIFIYPGYRFKVIDRLLTNFHLPESTLLMLVSALAGREPVLQAYAHAIQEKYRFFSYGDAMLIDRKI

SEQ ID NO: 63200 - protein, 344 aa, Alkanindiges sp.
  misc_feature (1)..(344): tr|A0A1S8CTU0|A0A1S8CTU0_9GAMM S-adenosylmethionine:tRN A ribosyltransferase-isomerase OS=Alkanindiges sp. H1 O X=1907941 GN=queA PE=3 SV=1
MQLSDFSYDLPDELIARYPLATRSASRLLYLNAQGHTQDCTIKQLPELLQAGDLLVLNDTRVIKARLHGRRASGGAVEVLVERITGIDTALAHIKASNSPKAGTTLYLANDQLEAQVAGRQNNLYELRFNQPVLAALEQFGALPIPPYFNRAADETDDERYQTVFHNPDKAASVAAPTASLHFDDELLAALEQSGINKAFVTLHVGAGTFQPVRTDNIVEHVMHSEWGEVPQATVELIAKTKANGGKIIAVGTTATRALESAAKANHGELKAWSGETDIFIYPGYSFKVIDRLLTNFHLPESTLLMLVSALAGRDPVLKAYEHAIRQQYRFFSYGDAMLIDKKI

SEQ ID NO: 63201 - protein, 339 aa, Allisonella histaminiformans
  misc_feature (1)..(339): tr|A0A1G5VN82|A0A1G5VN82_9FIRM S-adenosylmethionine:tRN A ribosyltransferase-isomerase OS=Allisonella histamini formans OX=209880 GN=queA PE=3 SV=1
MKLEEFNYDLPKELIAQEPAEPRDSCRLMMLDRKTGEYTHHTFRDILDEIRPGDVFVFNNTKVIPARLYGHRKETGGKVEILLLTPKGNDNWEILVNPGKKALPGQVIEFNEHLSCEILDKTDFGGRVAHFTYDQDFDSILEEIGEMPIPPYIHKKLEDNDEYQTVYAKYKGSAAAPTAGLHFTKELMEEMKNRGAEIRYVTLHVGLGTFRPVSEENIEEHEMHKEFYSVTEETAEAVNRAKAEGRRIIAVGTTSVRTLESAGQSGKLQAGSGWTQLYIYPGYTWHIVDAICTNFHLPESTLIMMMCSFAGKEHVLNAYKEAVRQKYRFFSFGDAMFIR

SEQ ID NO: 63202 - protein, 349 aa, Alloactinosynnema album
  misc_feature (1)..(349): tr|A0A1H0HVR3|A0A1H0HVR3_9PSEU S-adenosylmethionine:tRN A ribosyltransferase-isomerase OS=Alloactinosynnema alb um OX=504798 GN=SAMN05192558_102268 PE=3 SV=1
MRNASPDIQMSTMEFELPSELEAHEPPEARGLSRDGVRLLVGTGSSVDHRRFADLPSALRAGDLLVVNTSATVPAAVKVPDTDLSVHFSTELRDGSWLVELRQAQGKTTARYRDGVAGRRYALPAGGSVTLTRPYSRDRLWEAEVDRGPFGSVIGYLRAVGSPIRYGYVPRDWPIAYYQTVFGTEPGSAEMPSASRPFTDRMVTTLVTKGVRIAPVLLHTGVASQEAHERPYPERFRVPASSATLINDTRTTGGRVIAIGTTAVRAVESAVAPDGTVKAAEGWTDLIITPERGVTVTDGLLTGFHEPRASHLDMLEAVAGRRLLRECYQEAIEAGYLWHEFGDLNLLIP

SEQ ID NO: 63203 - protein, 340 aa, Alloactinosynnema iranicum
  misc_feature (1)..(340): tr|A0A1G6N3N5|A0A1G6N3N5_9PSEU S-adenosylmethionine:tRN A ribosyltransferase-isomerase OS=Alloactinosynnema ira nicum OX=1271860 GN=SAMN05216174_103158 PE=3 SV=1
MSTLEFTLPEELEAHEPPEARGLPRDGVRLLVGEGKTVTHERFTNLPALLRAGDVLVVNTSATLPAAAGVVGGGLTVHLSTEASDGTWLVELRQAGDKATAPYPFGVAGARYDLVGGATVTLLSRYSDDRLWVAAVDPGGFDSVSGYLHCFGSPIRYGYVPKSWPLRYYQTVFGTEPGSAEMPSAARPFTDRLVTRLVSAGIQFAPVLLHTGVASPEAHERPYPERFRVSSTTARLVNRARADGGRVVAVGTTAVRALESAVGDDGDVHAREGWTDLIITPGRGVRAVDGLLTGFHEPRASHLDMLAAIAGQELLDRCYRAAIDHGYLWHEFGDVNLLIP

SEQ ID NO: 63204 - protein, 362 aa, Alloactinosynnema sp.
  misc_feature (1)..(362): tr|A0A0H5CMD1|A0A0H5CMD1_9PSEU S-adenosylmethionine:tRN A ribosyltransferase-isomerase OS=Alloactinosynnema sp. L-07 OX=1653480 PE=3 SV=1
MDRETRPLNEFGAGMTTVIEGAMSAMEFALPPDLEAHEPPEARGLSRDGVRLLVGSGSSVQHHRFADLPTILTPGDLLVVNTSATIPAAVRVLGSDLSVHFSTELPNGRWLVELRKAGGQATVPYRSGVPDTRYDLPEGASVTLTAPYSRDRLWEATVDPGAFGSMLGYLRALGRPIRYEYVPRDWPIRYYQSVFGTNPGSAEMPSASRPFTDRIVTTLVSAGVRFAPVMLHTGVASPEAHERPYPERFSVGEPTAALVNHTRQEGHRVIAVGTTAVRALESAVGPDRTVQPTAGWTDLIVSPDRGVQVVDGLLTGFHEPRASHLDMLAAIAGTSLLSECYREAIAHRYLWHEFGDLNLLVP

SEQ ID NO: 63205 - protein, 342 aa, Allobacillus sp.
  misc_feature (1)..(342): tr|A0A556PTU8|A0A556PTU8_9BACI S-adenosylmethionine:tRN A ribosyltransferase-isomerase OS=Allobacillus sp. SKP4 -8 OX=1955272 GN=queA PE=3 SV=1
MDINEFDFDLPEELIAQTPLEDRSASRLLTIDRAKDQFHHQQFTDIIDYLNPGDCLVLNNTKVLPARLMGYKADTYGKVELLLLHQVNGDDWEVLVKPAKKVKAGTWIQFGDGLLKAECLEEKEHGGRVVRFHYEGIFMEILDQLGEMPLPPYIKEQLDDQDRYQTVYAKEVGSAAAPTAGLHFTEQLLERIKQKGVHIAYITLHVGLGTFRPVQTDDIEKHEMHAEFYRLDEQTASDLNDIKAKGNRIIAVGTTSIRTLETIARDTGGVFEARSGWTDIFIYPPYKFQAIDAMITNFHLPKSTLIMLVSAFAGQERTLKAYKEAVEKSYRFFSFGDAMFIY

SEQ ID NO: 63206 - protein, 342 aa, Allobacillus sp.
  misc_feature (1)..(342): tr|A0A556PVB2|A0A556PVB2_9BACI S-adenosylmethionine:tRN A ribosyltransferase-isomerase OS=Allobacillus sp. SKP2 -8 OX=1955271 GN=queA PE=3 SV=1
MDINEFDFDLPEQLIAQTPLKDRSASRLLTIDRAKDQFYHQQFTDIIDYLNPGDCLVLNNTKVLPARLMGYKADTYGKVELLLLHQVNGDDWEVLVKPAKKVKVGTWIHFGDGLLKAECLDEKEHGGRVVRFHYEGIFMEILDQLGEMPLPPYIKEQLEDQDRYQTVYAKEVGSAAAPTAGLHFTEGLLEQIKQKGVHIAYVTLHVGLGTFRPVQTDDIENHEMHAEFYRLDEQTASSLNEIKAKGNRIIAVGTTSIRTLETIARDTNGTFEARSGWTDIFIYPPYTFQAIDAMITNFHLPKSTLIMLVSAFAGKERTLRAYKEAVEKSYRFFSFGDAMFIY

SEQ ID NO: 63207 - protein, 343 aa, Allochromatium vinosum
  misc_feature (1)..(343): tr|D3RMI6|D3RMI6_ALLVD S-adenosylmethionine:tRNA ribosy ltransferase-isomerase OS=Allochromatium vinosum (strai n ATCC 17899 / DSM 180 / NBRC 103801 / NCIMB 10441 / D) OX=572477 GN=queA PE=3 SV=1
MRRSDFHYELPAELIAQHPLPERSGSRLLVLDGSQTPPRDRMFTDLPSLLKPHDLLIFNNTQVMRARLFGHKETGGQVEILIERLLDAREALAHVRASKSPKPGSRIRVTDGAWLSVVGREGDLFRLRALESDFGEQMARHGHMPLPPYIQRPDDVLDESRYQTVFARRTGAVAAPTAALHFDEPMLARLDALGVARAEITLHVGAGTFQPVREDDLERHHMHSEWLEVDETVCERIERTRQLGGRVIAVGTTSVRSLETAAADGRLRPFRGESRLFIRPGYRFRVVDAMITNFHLPESTLLMLVAAFSGYSEIMKAYRHAIDQRYRFFSYGDAMFLTRQDAA

SEQ ID NO: 63208 - protein, 343 aa, Allochromatium warmingii
  misc_feature (1)..(343): tr|A0A1H3B6J6|A0A1H3B6J6_ALLWA S-adenosylmethionine:tRN A ribosyltransferase-isomerase OS=Allochromatium warmin gii OX=61595 GN=queA PE=3 SV=1
MRRSDFHYELPAELIAQHPLPERSGSRLLVFDAATGQRSDRLFTDLPSLLQPHDLLIFNNTRVMRARLFGQKESGGRVEILIERLLTANTALAHVRASKAPKAGTRLRITDGAWLLVEGREGDLFRLRALDANFDEQMRQHGHIPLPPYIQRPDDALDETRYQTILARHLGAVAAPTAALHFDPALLARLDALGIARAEITLHVGAGTFQPVREDDLDRHPMHSEWLEVNAQVCEQIATTRQFGGRVIAVGTTSVRSLETAAATGMLAPFCGDSRLFIRPGYRFKVVDALITNFHLPESTLLMLVSAFAGHAAIMDAYRHAIAERYRFFSYGDAMFLTRCDPD

SEQ ID NO: 63209 - protein, 338 aa, Allofrancisella guangzhouensis
  misc_feature (1)..(338): tr|A0A0A8EAG7|A0A0A8EAG7_9GAMM S-adenosylmethionine:tRN A ribosyltransferase-isomerase OS=Allofrancisella guang zhouensis OX=594679 GN=queA PE=3 SV=1
MKTDDFDYKLPEELIASYPLGKRDESRLLKLSKATGNIEDYKFKNFIDFISSKDLLVFNNSKVMLARLYGEKITGAKLEFLIEKIRSPKLFLTHIKANRSPVIGSEIYIQDTLAKVLDKDSGIYLLELQGQRNIYQLMEKFGHIPLPPYMKREDEEFDAERYQTVYAKDLGSVAAPTAGLHFSEELMQKIKDKGVNAAYITLHVGSGTFKPVQVDDIESHKMHSEVISVPEDVCQKIRQTKANGGRVIAIGTTSVRSLETAGQSGQIQAYQGETDIFLYPGKKFNVVDAMITNFHLPKSTLIMLVSAFAGKENVIKAYNHAIDKKYRFYSYGDAMFIV

SEQ ID NO: 63210 - protein, 338 aa, Allofrancisella inopinata
  misc_feature (1)..(338): tr|A0A4R7LIB9|A0A4R7LIB9_9GAMM S-adenosylmethionine:tRN A ribosyltransferase-isomerase OS=Allofrancisella inopi nata OX=1085647 GN=queA PE=3 SV=1
MKTDDFDYKLPEEQIASYPLDKRDESRLLKLSKETGNIKDYKFKDFIDFINPKDLLVFNNSKVMLARLYGKKTTGAKLEFLVEKIKTPKVFETHIKANRSPNIGSEIYVQDTLAKVLDKDGGVYLLELQGEKNIYQLMEEFGHIPLPPYMKREDEEFDAERYQTVYAKDLGSVAAPTAGLHFSEELMQQIKNKEVGTAYITLHVGSGTFKPVQVDDVESHKMHSEVISVPEDVCQKIRQTKANGGRVIAIGTTSVRSLETAGQSGQIQAYQGETDIFLYPGKKFNVVDAMITNFHLPKSTLIMLVSAFAGKENIIKAYKHAIDKKYRFYSYGDAMFIY

SEQ ID NO: 63211 - protein, 354 aa, Alloprevotella rava
  misc_feature (1)..(354): tr|G5GCS3|G5GCS3_9BACT S-adenosylmethionine:tRNA ribosy ltransferase-isomerase OS=Alloprevotella rava F0323 OX= 679199 GN=queA PE=3 SV=1
MKLSQFKFDLPQEQIAPDPNPHRDDCRMMVLHRQTGEIEHKQFGDILSYFQPHDLFVFNDTKVFPARLYGRKEKTGARIEVFLLRELNHEQHFWDVLVDPARKIRIGNKLYFGEAEDIVAEVIDNTTSRGRTLRFLYEGEREDFKRSLYALGEAPIPRFTGHVSTPENRESDIEDFQCIFARHEGAVTAPTAGMHFSKILMKKMEIQDINTAYLTLHCGLGNFRSTDVEDLTKHKMESEEMIVGTECCAAVNKAKDEGRRILAVGTTVQRALEVCVGPDHRIREFEGHTNKFIFPPYNFLVADSMVVNFHLPESTMVMLTAAFGGYEQTMAAYEEAIKEGYMFGPFGDAMLIVD

SEQ ID NO: 63212 - protein, 409 aa, Alloprevotella rava
  misc_feature (1)..(409): tr|G5GBJ9|G5GBJ9_9BACT S-adenosylmethionine:tRNA ribosy ltransferase-isomerase OS=Alloprevotella rava F0323 OX= 679199 GN=queA PE=3 SV=1
MQDPRHIHIKDFSYNLPDERIAKHPLEKRDEAKLLLYNQEGIGEDVFRNLTNYLQPGQLIVFNNTKVIYARLHFRKATGALIEVFCLEPHTPSDYQVNFSTTRRVTWTCLIGNMKKWKEGRLEQEIKVGDKLLTLTAERGGVSGTGFEVTFDWNDDTVAFSEILDAIGELPIPPYLNRDTEQRDLEEYQTVYSKIKGSVAAPTAGLHFTDELLSQLDAHGIERDEITLHVGAGTFKPVKSEEIEGHTMHSEWIAVARTSIEKLIAHGGQCIAVGTTSVRTLESLYYIGVILQQNPNATEEELRVPQWMPYEYAVQTAEPLTTLQALQNILDYLERNNLPTLHTSTQIMIAPSYEYHVVRTMITNFHQPQSTLLLLVSAFVKGDWQRIYNYALEHDFRFLSYGDGCLLNF

SEQ ID NO: 63213 - protein, 351 aa, Alloprevotella sp.
  misc_feature (1)..(351): tr|A0A3P1ZD99|A0A3P1ZD99_9BACT S-adenosylmethionine:tRN A ribosyltransferase-isomerase OS=Alloprevotella sp. OH 1205_COT-284 OX=2491043 GN=queA PE=3 SV=1
MKLSQFKFKLPEEQIAEYPTPHRDESRMMVLHRTTGEIEHRMFKDFLEYFDEHDVFVFNDTKVFPARLYGNKEKTGARIEVFLLRELNRDLRLWDVLVDPARKIRIGNKLYFGDDNSIVAEVIDNTTSRGRTLRFLYDGEHEEFKKSLYALGEAPIPHEIIKRPSEPEDLERFQCIFAKHEGAVTAPTAGLHFSKSMMKRMEIKGIESAFITLHCGLGNFRQTDVEDLTKHKMDSEQMFVNHECCSIVNKAKDEGRKICAVGTTVQRALEASVSTEGHIKEYEGWTNKFIFPPHDFSVANAMFSNFHMPLSTLLMLTAAFGGYDYTMAAYEEAIKEGYRFGTYGDVMLIVD

SEQ ID NO: 63214 - protein, 351 aa, Alloprevotella sp.
  misc_feature (1)..(351): tr|A0A496KIM0|A0A496KIM0_9BACT S-adenosylmethionine:tRN A ribosyltransferase-isomerase OS=Alloprevotella sp. OX =1872471 GN=queA PE=3 SV=1
MKLSQFKYKLPQEKIAEYPAPHRDDCRMLVLHRKTGEIEHREFKDFLEYFDEEDVFVFNDTKVFPARLYGNKEKTGARIEVFLLRELNRDLRLWDVLVDPARKIRIGNKLYFGEDNSIVAEVIDNTTSRGRTLRFLYDGDHDEFRQQLYALGEAPIPHEIIKRPSEPEDLERFQCIFAKHEGAVTAPTAGLHFSKNMMKRMEIKGIESAFVTLHCGLGNFTQTDVEDLTKHKMYSEQMFVRKECCEMVNTAKEKGRKICAVGTTVQRALEASVSTEGRIKEFEGWTSKFIFPPYDFSVADAMFSNFHMPESTLLMLTAAFGGYEHVMNAYEVALKEDYRFGTFGDVMLIVD

SEQ ID NO: 63215 - protein, 409 aa, Alloprevotella tannerae
  misc_feature (1)..(409): tr|C9LDQ1|C9LDQ1_9BACT S-adenosylmethionine:tRNA ribosy ltransferase-isomerase OS=Alloprevotella tannerae ATCC 51259 OX=626522 GN=queA PE=3 SV=1
MEDTKHIQIKDYNYTLPEDRIAKYPVAPRDHSKLLLYRDGRVSEDSFYNLPTYLKPGALMVFNNTKVIFARLHFQKATGALIEIFCLEPHTPADYQQSFAATRRVTWTCLVGNMKKWKEGRLERTVKVGDRELLLTAEHKGPAGTGFEIAFDWGDDAVSFSEVLDAIGELPIPPYLNRQTEQSDLNNYQTVYSKIEGSVAAPTAGLHFTDDVLRRLDEAGIVREEITLHVGAGTFKPVKSEEIEGHTMHAEWIAVSRQNIEHLLAHDCSCIAVGTTSVRTLESLYYIGVLIHRNPHVAPEDLHVPQWLPYEYETSTEEKLTPEAALREILAYLDRNRMSVLHTATQIIIAPGYTYKIVKTMVTNFHQPQSTLLLLVSAFVGGNWRTIYDYALAHDFRFLSYGDSSLLNY

SEQ ID NO: 63216 - protein, 349 aa, Alloprevotella tannerae
  misc_feature (1)..(349): tr|C9LGY1|C9LGY1_9BACT S-adenosylmethionine:tRNA ribosy ltransferase-isomerase OS=Alloprevotella tannerae ATCC 51259 OX=626522 GN=queA PE=3 SV=1
MKLSQFNFKLPAEKIAKYPSPLRDDCRMMVLDKTTGKIEHRKFDELLDYFDEKDLFVFNDTKVFPARLYGNKEKTGARIEVFLLRELNQELRLWDVLVDPARKIRIGNKLYFGEDNSIVAEVIDNTTSRGRTLRFLYDGDHEEFKRSLYALGEAPIPREINRPTEPEDLERFQTIFARNEGAVTAPGAGLHFSKVMMKKMELKGIDAAYLTLHCGLGNYRTTDVEDLTKHKMESEQMFVDAKCCRHVNSAQDANRKILAVGSTVMRALEVCVGPDGHIKEFEGWTNKFIFPPYEFSVADAMLVNFQFPYSTLLMLASAFGGYDQVMGAYKEAIKGEYMFGPYGDAMLII

SEQ ID NO: 63217 - protein, 347 aa, Unknown
  misc_feature (1)..(347): tr|A0A2A5XY64|A0A2A5XY64_9PROT S-adenosylmethionine:tRN A ribosyltransferase-isomerase OS=alpha proteobacterium MED-G10 OX=2007300 GN=queA PE=3 SV=1
MKLEQLDYHIPKNLIATEPTKPRDESSLVVVNKEFEVIKFKEILNQLRKGDTLVFNNTKVINAHLDGQIKKRKVSVNLNKLIDKQKTIWSAFLKSNKKPLINEEIIFPFDLKAKIIDVIKNNNTDFFQIQFSCDYEKLRKILNSFGKIPLPPYIKKIREIKRKDSVDYQTIFAKTEGAVAAPTASLHFSEKLFEKIKKKKVNIVYVTLHINGGTFLPIKAENVFEHSMHSEFGAISKKSAEIINEHKKKGGRVIAVGTTVLRLLESSKDKNGLIKEFNGETDIYLKPGSKINSVDGLITNFHTPKSTLLLLVYAFIGEQKTKKLYEYAIKKKLRFFSYGDACLLWKM

SEQ ID NO: 63218 - protein, 366 aa, Unknown
  misc_feature (1)..(366): tr|J9DHZ7|J9DHZ7_9PROT S-adenosylmethionine:tRNA ribosy ltransferase-isomerase OS=alpha proteobacterium IMCC144 65 OX=1220535 GN=queA PE=3 SV=1
MQVEAFDFNLPEELIALRPASPRDSAKLLHVASDGNLSDKIIRDLPSYFSKGEVLVVNDTRVIPAKLTGTRLRDSASNSASETEQNSGAQIDLNLIERQGASMWKCLLKPAKKVRSGDVISFADAEGGSYIATVREKEQGEALIDFNLSLEKMDEVLGLIGSMPLPPYIAGRRTPDEKDNQDYQTLFAEHDGAVAAPTAGLHFTPELQAKLENIGVEICRVTLHVGAGTFLPIKVEDTNHHKMHAEWGEVKPETADRLNAAKQNGFKICCVGTTSLRLLESAARDDGLIAPFAAPTDIFIKPGYQFKAADRLLTNFHLPKSTLFMLVSAFSGLATMKKAYDHAVHSRYRFYSYGDACLLELTEKMD

SEQ ID NO: 63219 - protein, 339 aa, Alphaproteobacteria bacterium
  misc_feature (1)..(339): tr|A0A2P5VMN1|A0A2P5VMN1_9PROT S-adenosylmethionine:tRN A ribosyltransferase-isomerase OS=Alphaproteobacteria b acterium MarineAlpha1_Bin1 OX=2013065 GN=queA PE=3 SV=1
MDVELFNFELPDEAVALRPARPRDSARLLIVGKDGCQDRVIGDLPQLLLPGDLLIFNNTRVLPLQLLARRGAGRVELTLMQHLGPGRWRAFAKPARKLSGGDVLLISEGFAATVEAPHQDGQVVLNFAFSDDVMMEALQRFGTMPLPPYIRKHRAVDDQDAVDYQTVLARHDGAVAAPTAGLHFTEELLHRLSEAEIERGEVTLHVGPGTFLPVTANDTDDHIMHNEWGQIDGPLAAQIRFTKANGGRVVAVGTTSLRLLESAGEEAFSGETDIFITPGYEFRVVDALLTNFHLPRSTLFMLVAAFSGLETMQAAYAYAIRSGYRFYSYGDACLLERPA

SEQ ID NO: 63220 - protein, 340 aa, Alphaproteobacteria bacterium
  misc_feature (1)..(340): tr|A0A424T7C5|A0A424T7C5_9PROT S-adenosylmethionine:tRN A ribosyltransferase-isomerase OS=Alphaproteobacteria b acterium TMED54 OX=1986640 GN=queA PE=3 SV=1
  misc_feature (34)..(35): Xaa can be any naturally occurring amino acid
  misc_feature (49)..(49): Xaa can be any naturally occurring amino acid
  misc_feature (56)..(56): Xaa can be any naturally occurring amino acid
  misc_feature (191)..(191): Xaa can be any naturally occurring amino acid
  misc_feature (201)..(201): Xaa can be any naturally occurring amino acid
MNINQFDFDLPEVLIAQQPIYPRHNSRLLSCIKXXMEDDFFYNLPNLLXPGDVVVXNDTKVLKARLIGLINQKKISFTLHMKVDENKWYSFCKPAKKCKLNDEVKFSQSFNAKIIDKNNYGEVLLSFNYSGKELFEQISKHGLMPLPPYIKNKSFETESHYQTYFAKKIGAVAAPTAGLHFTKDVINLLIXNKIIITSITXHVGAGTFLPVKTQNIDDHKMHFELFEVSQKTSDIINYAKKNGNKIVAIGTTVMRTLETVFLKYNKIMSLSDKTDLFIKPGFKFNAVDYLLTNFHLPKSTLLILISAFSGKEEIKQIYNHAIKQSYRFYSYGDCCLLRKK

SEQ ID NO: 63221 - protein, 366 aa, Alsobacter sp.
  misc_feature (1)..(366): tr|A0A2T1HNF7|A0A2T1HNF7_9RHIZ S-adenosylmethionine:tRN A ribosyltransferase-isomerase OS=Alsobacter sp. SH9 OX =2109933 GN=queA PE=3 SV=1
MRVDLFDFDLPEDRIALRPAQPRDAARMLVVRPGDEPALEDRTVRDLPDLLQAGDRLVVNDTRVIPARLDGIRVRGDSVAHIQATLHLREGPDLWRAFVRPAKRLAVGERIRFGEESESMACLLASLDAEVVEKGEGGEVLLRFAFTGPALDEAIARLGHIPLPPYIAAKRPDDERDRQDYQTLFAEREGAVAAPTAGLHFTPELTQRLAARGVGLTRLTLHVGAGTFLPVKADDTADHKMHAEWGMISPEAAAELNATRAAGGRIVSVGTTSLRLLESAVSEDGRFAPWQGQTSIFITPGHRFRAVDVLMTNFHLPRSTLFMLVSAFSGLDAMRAAYAHAIEAGYRFYSYGDASLLFPAPPESTP

SEQ ID NO: 63222 - protein, 343 aa, Altererythrobacter aquimixticola
  misc_feature (1)..(343): tr|A0A4T3EZH3|A0A4T3EZH3_9SPHN S-adenosylmethionine:tRN A ribosyltransferase-isomerase OS=Altererythrobacter aq uimixticola OX=2489173 GN=queA PE=3 SV=1
MRVDLFDFDLPPELIALRPVRPRDAARMLVVRGADAPFEDRGVLDLPQLLEPGDVMVFNDTRVIPAQLEGRRGEARIGATLHKRVDLRRWQAFIRNAKRVREGDVLEFPADVSAIAEKRHEDGSFTLAFEGGEPVEVLLERAGRMPLPPYIAGKRETDEQDRKDYQTIFAREEGAVAAPTASLHFTQRLLDALDERGVIRTTLTLHVGAGTFLPVKAGDTADHRMHAEFGRIDAETAQLLNETRAKGGRIIAAGTTALRLLESAADEDGIIHPFEGDTAIFITPGYRFRGVDGLMTNFHLPKSTLFMLVSALMGLDRMQAAYAHAIAQGYRFYSYGDSSLLLP

SEQ ID NO: 63223 - protein, 343 aa, Altererythrobacter atlanticus
  misc_feature (1)..(343): tr|A0A0F7KPH1|A0A0F7KPH1_9SPHN S-adenosylmethionine:tRN A ribosyltransferase-isomerase OS=Altererythrobacter at lanticus OX=1267766 GN=queA PE=3 SV=1
MRVDLFDFDLPPERIALRPARPRDASRMLVVRAEGAFEDRIARDLPAMLRPGDVLVFNDTKVIPAQLEGRRGEARIGATLHKRLDLRRWQAFIRNAKRLRPEDIIDFGADVTALAEQRHDDGSWTLAFQGEEPVEVLLERAGRMPLPPYIAGKREMDEADREDYQTIFAREEGAVAAPTAALHFTPQLLAALDEAGVKRETLTLHVGAGTFLPVKAEDTADHAMHSEWGRIEQATADRLNAARKAGNRVIAVGTTSLRLLESATGEDGVIRPFAGDTAIFITPGYRFRAIDGLMTNFHLPKSTLFMLVSALMGLERMQAAYAHAIEAGYRFYSYGDASLLLPD

SEQ ID NO: 63224 - protein, 342 aa, Altererythrobacter dongtanensis
  misc_feature (1)..(342): tr|A0A1B2AEN9|A0A1B2AEN9_9SPHN S-adenosylmethionine:tRN A ribosyltransferase-isomerase OS=Altererythrobacter do ngtanensis OX=692370 GN=queA PE=3 SV=1
MRVDLFDFELPNELIALRPAVPRDAARMLVLRGPHETIDGGVRDLPDLLAPGDVLVFNDTRVIPAQLEGRRGDARIGATLHKRIDLRRWQAFVRNGKRLREGDAIDFGGSVSATAQKRFPDGSWVLAFAGDEPVEVLLEHAGRMPLPPYIAGKRPTDERDRADYQTMFADKDGAVAAPTAALHFTPELMEDLATRGILTETLTLHVGAGTFLPVKAEDTEDHAMHAEWGRIDAETADRLNAVRAHGGRVIAVGTTSLRLLESAAEEDRIIRPFEGDTSIFITPGYRFRAIDGLMTNFHLPKSTLFMLVSALMGRERMQAAYAHAIAERYRFYSYGDSSLLLP

SEQ ID NO: 63225 - protein, 343 aa, Altererythrobacter epoxidivorans
  misc_feature (1)..(343): tr|A0A0M5L088|A0A0M5L088_9SPHN S-adenosylmethionine:tRN A ribosyltransferase-isomerase OS=Altererythrobacter ep oxidivorans OX=361183 GN=queA PE=3 SV=1
MRVDLFDFDLPTELIALRPAKPRDAARMLVAKGGDQPLIDAGVRDLPSFLRVGDVLVFNDTRVIPAQLEGMRGEAKIGATLHKRIDLRRWQAFIRNAKRVREGDQLVFGGGVTAIAETRHDDGSYSLCFGGDEPVEVLLERAGRMPLPPYIAGKRPTDEQDREDYQTMFAEKDGAVAAPTAALHFTPQLLAALKDAGIRSETLTLHVGAGTFLPVKVDDTDDHRMHAEWGTISEETADRLNAARAAGGRIISVGTTSLRLLESAARDDGTIMPFEGDTSIFITPGYRFKAIDGLMTNFHLPKSTLFMLVSALMGRERMQEVYAHAIANSYRFYSYGDSSLLLP

SEQ ID NO: 63226 - protein, 344 aa, Altererythrobacter ishigakiensis
  misc_feature (1)..(344): tr|A0A562UWE7|A0A562UWE7_9SPHN S-adenosylmethionine:tRN A ribosyltransferase-isomerase OS=Altererythrobacter is higakiensis OX=476157 GN=queA PE=3 SV=1
MRVDLFDFELPQELIALRPVRPRDAARMLYVPGTGPFEDRGVRDLPKLLSAGDVLVFNDTRVIPGQLEGRRAGGEAKIGATLHKREDLRRWIAFIRNAKRLKEGDQIVFGGGVTALAETRNQDGSFTLLFEGDEPVEVLLDRAGTMPLPPYIAGKRDIDEQDYEDYQTMFAQKDGAVAAPTASLHFTERLMSELDAAGIRHETLTLHVGAGTFLPVKADDTDDHQMHSEWGRITPQVAERLNAARVAGKRIIAVGTTSLRLLESAACDDRTIAPFEGDTDIFITPGYRFKGVDGLMTNFHLPKSTLIMLVSALIGRERMMEAYAHAINANYRFYSYGDSSLLLP

SEQ ID NO: 63227 - protein, 342 aa, Altererythrobacter marensis
  misc_feature (1)..(342): tr|A0A0G3X917|A0A0G3X917_9SPHN S-adenosylmethionine:tRN A ribosyltransferase-isomerase OS=Altererythrobacter ma rensis OX=543877 GN=queA PE=3 SV=1
MRIDLFDFELPQDLIALRPVAPRDTARMLVVDDEKDFADRIVRDLPDILAPGDVLVFNDTRVIPAQLEGQRGDARIGATLHKRIDLRRWQAFVRNAKRCRPGDRVEFGGGVTALVEGRGEDGSITFAFEGEEPVEVLLERAGRMPLPPYIAGKRPADERDERDYQTMFAARDGAVAAPTAALHFTPELIAALDARGVARETLTLHVGAGTFLPVKVDDTDDHRMHSEWGRIDAATADRLNAARQRGGRVIAVGTTSLRLLESAAGADGVIRPFEGDTAIFITPGYTFRAIDGLMTNFHLPKSTLFMLVSALMGRERMRAVYTQAIERKYRFYSYGDSSLLLP

SEQ ID NO: 63228 - protein, 353 aa, Altererythrobacter marensis
  misc_feature (1)..(353): tr|A0A2W4YP89|A0A2W4YP89_9SPHN S-adenosylmethionine:tRN A ribosyltransferase-isomerase OS=Altererythrobacter ma rensis OX=543877 GN=queA PE=3 SV=1
MQVDLFDFELPPERIALRPVSPRDAARMLVVGGEGAFADAAVRDLPRLLAPGDVLVFNDTRVIPAQLDGRREGADGGEGARIGATLHKRIDLRRWQAFIRNGKRLRPGDRIDFPANVSAVAEQRHEDGSWTLSFAGDEPVEVLLERAGTMPLPPYIAGKRATDARDREDYQTIFAAQDGAVAAPTAALHFTPGLLGALDDAGIGRETLTLHVGAGTFLPVKADDTGDHQMHAEWGRIDAATASRLNAVRARGGRLIAVGTTSLRLLESAADAQGIIQPFEGDTAIFITPGYRFRAVDGLMTNFHLPRSTLFMLVSALIGLERMQAAYAHAIAEGYRFYSYGDSSLLLPERAGG

SEQ ID NO: 63229 - protein, 346 aa, Altererythrobacter namhicola
  misc_feature (1)..(346): tr|A0A1C7D8Z4|A0A1C7D8Z4_9SPHN S-adenosylmethionine:tRN A ribosyltransferase-isomerase OS=Altererythrobacter na mhicola OX=645517 GN=queA PE=3 SV=1
MKVDLFDFDLPQDLIALRPARPRDAARMLVVDGDAPFADRTVMDLPGMLRPGDVLVFNDTRVIPAQLEGRRGEARIGATLHKRIDLRRWQAFIRNAKRLKTGQQIEFPAGVTAIAETRHEDGSWTLAFAGEEPVEVLLERAGRMPLPPYIAGKRATDEQDKADYQTMFAREDGAVAAPTAALHFTDRLLAALDERGVRRETLTLHVGAGTFLPVKAEDTDDHRMHAEFGRIDAETAERLNAARASGGRLIAVGTTVLRLLESAADPDGTIQPFADDTSIFITPGYAFRAVDGLMTNFHLPKSTLMMLVSALMGRERMQAVYAHAIENGYRFYSYGDSSLLLPQENA

SEQ ID NO: 63230 - protein, 342 aa, Altererythrobacter sp.
  misc_feature (1)..(342): tr|A0A1Q3M8B6|A0A1Q3M8B6_9SPHN S-adenosylmethionine:tRN A ribosyltransferase-isomerase OS=Altererythrobacter sp . 66-12 OX=1895714 GN=queA PE=3 SV=1
MRVDLFDFHLPPECIALRPARPRDAARMLLVPGEGAFADCTVRDLPGVLRAGDVLVFNDTRVIPAQLEGRRGQARIGATLHKRIDLRRWQAFVRNAKRLREGDVIEFPAGVSALAEARHDDGSWTLAFAGEEPVEVLLDRAGRMPLPPYIAGKRETDEADRTDYQTIFAREDGAVAAPTAALHFTPALLAALDAGGIGRETLTLHVGAGTFLPVKAEDTEGHRMHAEWGRIDAATAERLNAARRAGRRVIAVGTTSLRLLESAADQHGTIREFAGDTAIFITPGYRFRAIDGLMTNFHLPRSTLFMLVSALMGLERMQAAYAHAIAAHYRFYSYGDASLLLP

SEQ ID NO: 63231 - protein, 342 aa, Altererythrobacter sp.
  misc_feature (1)..(342): tr|A0A369Q8H7|A0A369Q8H7_9SPHN S-adenosylmethionine:tRN A ribosyltransferase-isomerase OS=Altererythrobacter sp . HME9302 OX=2161824 GN=queA PE=3 SV=1
MRVDLFDFDLPTENIALRPARPRDSARLLVARGAEPFDDSIVSELPQLLEPGDVLVFNDTRVIPAQLEGKRGNAAIGATLHKRIDLRRWQAYIRNAKRLSTGDRIDFPAEVQATAEHRHDDGSWTLAFAGDEPVEVLLERAGNMPLPPYIARKRGTDEQDREDYQTMFAAEDGAVAAPTAALHFTPDLIAALDERGVGRETLTLHVGAGTFLPVKAEDTDDHAMHSEWGRIEPDVARRLNEARARGGRIIAVGTTSLRLLESAARPDGTIEAFAGDTDIFITPGYAFRAVDGLMTNFHLPKSTLMMLVSALVGRDRIMAAYAHAIAQDYRFYSYGDSSLLLP

SEQ ID NO: 63232 - protein, 343 aa, Altererythrobacter xiamenensis
  misc_feature (1)..(343): tr|A0A1Y6FHS0|A0A1Y6FHS0_9SPHN S-adenosylmethionine:tRN A ribosyltransferase-isomerase OS=Altererythrobacter xi amenensis OX=1316679 GN=queA PE=3 SV=1
MRVDLFDFDLPQELIALRPVRPRDAARMLVVKGSDAPLEDRGVRDLPSLLRPGDILVFNDTRVIPAQLEGRRGEAKIGATLHKRLDLRRWQAFIRNAKRVREGDQLTFGGGVTAIAEARHADGSFTLAFEGDEPVEVLLERAGTMPLPPYIAGKRGVDAQDREDYQTMFAEKDGAVAAPTASLHFTPELIATLDEAGIGRETLTLHVGAGTFLPVKAEDTDDHAMHAEWGRIEPETAARLNAARAAGGRIIAVGTTSLRLLESAAQEDGTIAPFAGDTAIFITPGYRFKAVDGLMTNFHLPKSTLMMLVSALMGRERMMDVYAHAIAHKYRFYSYGDSSLLLP

SEQ ID NO: 63233 - protein, 350 aa, Alteribacillus bidgolensis
  misc_feature (1)..(350): tr|A0A1G8N8L5|A0A1G8N8L5_9BACI S-adenosylmethionine:tRN A ribosyltransferase-isomerase OS=Alteribacillus bidgol ensis OX=930129 GN=queA PE=3 SV=1
MNVEDFNFTLPEELIAQIPLKKRDASRLMVLDPEAASYKHEMFPALLNYLKEGDCLVLNDTRVLPARLFGEKETGGQVEVLLLNQEQEDEWETLIKPAKRVKPGTKLSFGNGKLTAECTGILEHGGRMLRFEYEGVFLEILDELGEMPLPPYINEKLSDNDRYQTVYAKHDGSAAAPTAGLHFTEDLLHRIKKMGVHVTTVTLHVGLGTFRPVAAETIEDHHMHAEFFQISEGTAKLLNETKDNGNNIIAVGTTSARTLETVAQKEQGRFKKDSGWTDIFIYPGYCFQGIDALLTNFHLPKSTLVMLVSAMAGREFLLSSYQEAVKERYRFFSFGDAMLIMKGSHNKWRQ

SEQ ID NO: 63234 - protein, 351 aa, Alteribacillus iranensis
  misc_feature (1)..(351): tr|A0A1I1Z9Z3|A0A1I1Z9Z3_9BACI S-adenosylmethionine:tRN A ribosyltransferase-isomerase OS=Alteribacillus iranen sis OX=930128 GN=queA PE=3 SV=1
MNVDEFDFYLPDELIAQTPLKKRDASRLMVLDPEVKERKHDTFPGLLHYLEEGDCLVLNNTKVLPARLYGIKEETGAQVEVLLLNEEGNDEWETLVKPAKRVKPGNVLTFGNGKLKAECISTLEHGGRMLKFFYEGVFLEILEDLGEMPLPPYIKEKLQEKDRYQTVYAKHDGSAAAPTAGLHFTEDLLQEIKQRGVNVAYITLHVGLGTFRPVSVDTVEDHNMHEEFYEMDQVTADMLNDTRTKGKKIVAVGTTSARTLESVARKRKGKFDKESGWTDIFIYPGYEFFGIDGMLTNFHLPKSTLVMLVSAIAGQDFLLSSYEEAVKERYRFFSFGDAMLIMKGSHHRWQQ

SEQ ID NO: 63235 - protein, 350 aa, Alteribacillus persepolensis
  misc_feature (1)..(350): tr|A0A1G8DH86|A0A1G8DH86_9BACI S-adenosylmethionine:tRN A ribosyltransferase-isomerase OS=Alteribacillus persep olensis OX=568899 GN=queA PE=3 SV=1
MNVEDFNFTLPEELIAQTPLQRRDASRLMVLDPDVEVFKHEMFPDIVQYLNEGDCLVLNDTRVLPARLFGEKETGGQVEVLLLNQERNDEWETLIKPAKRVKPGTVLSFGGGKLKAECTSILEHGGRMLRFKYSGVFLEILEELGEMPLPPYIKEKLADKDRYQTVYAKHDGSAAAPTAGLHFTEELLENIKEKGVHVTTITLHVGLGTFRPVSAETVEDHQMHAEFYQMTEGTANLLNETKENGNKVVAVGTTSLRTLETIAKKHGGYFKKESGWTDIFIYPGYTFYGIDALLTNFHLPKSTLVMLVSALAGTDFLLSAYEEAVRQRYRFFSFGDAMFIMKGSRQTWQQ

SEQ ID NO: 63236 - protein, 347 aa, Alteromonadaceae bacterium
  misc_feature (1)..(347): tr|A0A420E7U4|A0A420E7U4_9ALTE S-adenosylmethionine:tRN A ribosyltransferase-isomerase OS=Alteromonadaceae bact erium ALS 81 OX=2164068 GN=queA PE=3 SV=1
MRVADYSFDLPEELIARYPNPERSSSRLLCLEGNTGRIEHRQFTDLLDYIAPGDLLVFNDTRVIPARLFGQKLSGGKIEVLIERVLDDHRVLAHVRSSKSPKVGAQLRLADTISVTMLARHEALFELEFDHQHTVLEWLEQYGHMPLPPYIDRPDEDSDKERYQTVYNRNPGAVAAPTAGLHFDDAMLEKVKAKGAQLAFVTLHVGAGTFQPVRVETIAEHVMHREIAEVSQAVVDKIKQTKANGGRVIAVGTTSVRSLESAAKASKNVGSELQAYKADTDIFIYPGYEFELVDAMVTNFHLPESTLMMLVSAFAGKNHIDAAYQSAIENKYRFFSYGDAMFLQRRT

SEQ ID NO: 63237 - protein, 341 aa, Alteromonadaceae bacterium
  misc_feature (1)..(341): tr|A0A2E6EEM9|A0A2E6EEM9_9ALTE S-adenosylmethionine:tRN A ribosyltransferase-isomerase OS=Alteromonadaceae bact erium OX=1916082 GN=queA PE=3 SV=1
  misc_feature (59)..(59): Xaa can be any naturally occurring amino acid
  misc_feature (68)..(68): Xaa can be any naturally occurring amino acid
  misc_feature (132)..(132): Xaa can be any naturally occurring amino acid
  misc_feature (217)..(217): Xaa can be any naturally occurring amino acid
  misc_feature (238)..(238): Xaa can be any naturally occurring amino acid
  misc_feature (243)..(243): Xaa can be any naturally occurring amino acid
  misc_feature (248)..(248): Xaa can be any naturally occurring amino acid
  misc_feature (269)..(269): Xaa can be any naturally occurring amino acid
  misc_feature (276)..(276): Xaa can be any naturally occurring amino acid
  misc_feature (290)..(290): Xaa can be any naturally occurring amino acid
  misc_feature (293)..(293): Xaa can be any naturally occurring amino acid
  misc_feature (297)..(297): Xaa can be any naturally occurring amino acid
  misc_feature (299)..(299): Xaa can be any naturally occurring amino acid
MQVKDFSFELPEQLIARFPKTERSSSRLLAMDKQSGELSHHIFKDLADFLQAGDLLVFXNTKVIPARXFGQKASGGKVEVLVERMLDNKRFLAHVRASKAPKPGTELLLEGSARVKMNQRHDELFELEVTGXEPVLEMLERLGHMPLPPYIDRPDTEEDKARYQTVYNEKPGAVAAPTAGLHFDQPLLDKLKAKGVEFAYVTLHVGAGTFQPVRVDXVLEHKMHAEYIEVSEQVVDAXAACKXRGGRXVAVGTTSVRSLESAAQQGGGXLIAYNGXTQIFIYPGYDFKVXDAXITNXHXPESTLIMLVSAFSSREHVMNAYETAIAEQYRFYSYGDAMFIY

SEQ ID NO: 63238 - protein, 343 aa, Alteromonadales bacterium
  misc_feature (1)..(343): tr|A0XWQ8|A0XWQ8_9GAMM S-adenosylmethionine:tRNA ribosy ltransferase-isomerase OS=Alteromonadales bacterium TW- 7 OX=156578 GN=queA PE=3 SV=1
MRVADFSFDLPDELIARFPKKDRTSSRLLSLDGPTGEISHKVFSDILELVNENDLLIFNNTRVIPARMFGQKASGGKVEVLVERVLDEHRVLAHVRASKSLKPGNEVILEGKAKATMIARHDTLFELEFDHSKNVLDTLNDIGHMPLPPYIDRPDDEADRERYQTVYGEKPGAVAAPTAGLHFDEPLMAALKNKGVNMAFVTLHVGAGTFQPVRVETIDEHVMHSEYIEVPQDVVDAVAQTKANGGRVIAVGTTSMRSLESAAKIHGGKLDTYFGDTDIFIFPGYQFNVVDAMVTNFHLPESTLIMLVSAFSGQDNIMGAYNTAIEQKYRFFSYGDAMFLTRK

SEQ ID NO: 63239 - protein, 348 aa, Alteromonadales bacterium
  misc_feature (1)..(348): tr|A0A2N0WU85|A0A2N0WU85_9GAMM S-adenosylmethionine:tRN A ribosyltransferase-isomerase OS=Alteromonadales bacte rium alter-6D02 OX=2058087 GN=queA PE=3 SV=1
MKVSDFSFELPEQLIARYPQEQRSASRLLGLDGNSGELTDGQFLDVIDKVNPGDLVIFNDTRVIPARVFGRKASGGKIEVLVERMLDEHRVLAHVRASKTPKPGTELILDGDVKATMVARHDTLFELKFDDARGVLEVLESVGHMPLPPYIDRPDEDSDKERYQTVYNKNPGAVAAPTAGLHFDDQVLAKLKDKGANIAFVTLHVGAGTFQPVRVETIAEHQMHKEYIEVSEQVCEQIKATKAAGSRVIAVGTTSMRSIESAANRALEDGELIAPFYDDSDIFIYPGYDFKVIDAMVTNFHLPESTLIMLISAFAGYDNVMKAYHHAIEKEYRFFSYGDAMFIEKKQS

SEQ ID NO: 63240 - protein, 346 aa, Alteromonas aestuariivivens
  misc_feature (1)..(346): tr|A0A3D8MEL4|A0A3D8MEL4_9ALTE S-adenosylmethionine:tRN A ribosyltransferase-isomerase OS=Alteromonas aestuarii vivens OX=1938339 GN=queA PE=3 SV=1
MKLSDFSFELPEHLIAKYPTEKRTASRLLHLNGATGDVFHRQFTDMLELVEEGDLLVFNNTRVIPARLLGNKATGGQVEVLVERILPDDSVLAHVRASKAPKPGTKLILEQQVDVTVLGRQEALFHLQFDGDAPVLSILESFGHMPLPPYIDRPDEGSDKERYQTVYNQKPGAVAAPTAGLHFDDDILTALRKKGVNLAFVTLHVGAGTFQPVRVDNIKEHKMHAEYAEVGQEVVDAILATKAAGKRVIAVGTTSVRSLESAAVAAENSDKPLLPFFADTDIFIYPGFRFKVVDAMFTNFHLPESTLMMLISAFAGREKVMAAYQQAIEQEYRFFSYGDSMFIEKA

SEQ ID NO: 63241 - protein, 344 aa, Alteromonas australica
  misc_feature (1)..(344): tr|A0A350P678|A0A350P678_9ALTE S-adenosylmethionine:tRN A ribosyltransferase-isomerase OS=Alteromonas australic a OX=589873 GN=queA PE=3 SV=1
MKLSEFSFTLPEKLIAKYPTENRSASRLLQLDGKTGKVSHSMFTDMLDLVDEGDLLVFNNTRVIPARLLGKKETGGQVEVLVERIIDEHTALAHVRASKAPKPGTKLTLEDKVNVTVKGREEALFVLTFNHEETVLQLLEAHGHMPLPPYIDRPDETSDKERYQTVYNDKPGAVAAPTAGLHFDDDILAALTRKGVKLAFVTLHVGAGTFQPVRVDNILEHKMHAEYAEVPDSVVDAVRETKAAGHRVIAVGTTSVRSLESAAKAAGDELIAPFYADTDIFIYPGFNFKVVDAMFTNFHLPESTLMMLISAFAGKEHVMSAYQEAIEQEYRFFSYGDSMFIKKR

SEQ ID NO: 63242 - protein, 344 aa, Alteromonas australica
  misc_feature (1)..(344): tr|A0A075P3H9|A0A075P3H9_9ALTE S-adenosylmethionine:tRN A ribosyltransferase-isomerase OS=Alteromonas australic a OX=589873 GN=queA PE=3 SV=1
MKLSEFSFTLPEKLIAKYPTENRSASRLLQLDGKTGKVSHSMFTDMLDLVDEGDLLVFNNTRVIPARLLGKKETGGQVEVLVERIIDEHTALAHVRASKAPKPGTKLTLEDKVNVTVKGREEALFVLTFNHEETVLQLLEAHGHMPLPPYIDRPDETSDKERYQTVYNDKPGAVAAPTAGLHFDDDILAALTRKGVKLAFVTLHVGAGTFQPVRVDNILEHKMHAEYAEVPDSVVDAVRETKAAGHRVIAVGTTSVRSLESAAKAAGDELIAPFYADTDIFIYPGFNFKVVDAMFTNFHLPESTLMMLISAFAGKEHVMSAYQEAIEQEYRFFSYGDSMFIKKC

SEQ ID NO: 63243 - protein, 345 aa, Alteromonas confluentis
  misc_feature (1)..(345): tr|A0A1E7ZAY6|A0A1E7ZAY6_9ALTE S-adenosylmethionine:tRN A ribosyltransferase-isomerase OS=Alteromonas confluent is OX=1656094 GN=queA PE=3 SV=1
MKLSDFSFELPERLIAKYPTEKRRASRLLCLKGSSGEVVHRQFAEMLELVNPGDLLVFNNTRVIPARLRGKKATGGQIEVLVERILDDHQVLAHVRASKSPKPGAELLLEDNVKVTVTGREGALFLLQFEKHASVLSQLEQYGHMPLPPYIDRADESSDKERYQTVYNQKPGAVAAPTAGLHFDDEMLTALRAKGVNLAFVTLHVGAGTFQPVRVENINDHVMHSEYAEVPQEVVDVVLNTKAAGNRVIAVGTTSVRSLESAAKAAGDELIAPFFDDTDIFIYPGFNFKIIDAMFTNFHLPESTLMMLISAFAGREHVMAAYQDAIEKEYRFFSYGDSMFIEKAE

SEQ ID NO: 63244 - protein, 348 aa, Alteromonas lipolytica
  misc_feature (1)..(348): tr|A0A1E8FEC7|A0A1E8FEC7_9ALTE S-adenosylmethionine:tRN A ribosyltransferase-isomerase OS=Alteromonas lipolytic a OX=1856405 GN=queA PE=3 SV=1
MKLSDFTFTLPEHLIAKHPTAERTASRLLHLDGKTGTVAHQQFRDMLVLVEPGDLLVFNNTRVIPARLLGQKASGGKVEVLIERIVDDKNALAHVRASKAPKPGTALLLEGAVNVTVTGRQDALFELHFEGDKSVLEQLESYGHMPLPPYIDRADEDSDKERYQTVYNQAPGAVAAPTAGLHFDDAILQALQEKQVNLAYVTLHVGAGTFQPVRVDNVLEHKMHSEFAIVPDSVVDAVRATKAAGKRVIAVGTTSVRSLESAALHASKDAIIEPFQADTDIFIYPGFEFKVVDAMFTNFHLPESTLIMLISAFAGRDNVLHAYAEAIKEQYRFYSYGDSMFIEKAINT

SEQ ID NO: 63245 - protein, 348 aa, Alteromonas macleodii
  misc_feature (1)..(348): tr|A0A2K9ID59|A0A2K9ID59_ALTMA S-adenosylmethionine:tRN A ribosyltransferase-isomerase OS=Alteromonas macleodii OX=28108 GN=queA PE=3 SV=1
MKLSDFSFELPERLIAKYPTQQRTASRLLHLDGKTGNVAHTMFADMLKFVEPGDLLVFNNTRVIPARLLGKKETGGQVEVLIERITSDNTALAHVRASKAPKPGSKLILEEKVNVTVTGRDDALFILQFDHDETVLTLLEAHGHMPLPPYIDRPDESSDKERYQTVYNQKPGAVAAPTAGLHFDDAILAALKEKGVNLAFVTLHVGAGTFQPVRVDNIQEHKMHAEFAEVPQDVVDAVLTTKANGKRVIAVGTTSVRSLESAAKASAERGDEEVIAPFNEDTEIFIYPGFEFKVVDAMFTNFHLPESTLMMLISAFAGKENVMKAYQEAIEKEYRFFSYGDSMFIERA

SEQ ID NO: 63246 - protein, 348 aa, Alteromonas macleodii
  misc_feature (1)..(348): tr|A0A1E7DBM0|A0A1E7DBM0_ALTMA S-adenosylmethionine:tRN A ribosyltransferase-isomerase OS=Alteromonas macleodii OX=28108 GN=queA PE=3 SV=1
MKLSDFSFELPEKLIAKYPTQQRTASRLLHLDGKTGNVAHTMFADMLKFVEPGDLLVFNNTRVIPARLLGKKETGGQVEVLIERITSDNTALAHVRASKAPKPGSKLILEEKVNVTVTGRDDALFILQFDHDETVLTLLEAHGHMPLPPYIDRPDESSDKERYQTVYNQKPGAVAAPTAGLHFDDAILAALKEKGVNLAFVTLHVGAGTFQPVRVDNIQEHKMHAEFAEVPQDVVDAVLTTKANGKRVIAVGTTSVRSLESAAKASAERGDEEVIAPFNEDTEIFIYPGFEFKVVDAMFTNFHLPESTLMMLISAFAGKENVMKAYQEAIEKEYRFFSYGDSMFIERA

SEQ ID NO: 63247 - protein, 348 aa, Alteromonas marina
  misc_feature (1)..(348): tr|A0A0B3YAI7|A0A0B3YAI7_9ALTE S-adenosylmethionine:tRN A ribosyltransferase-isomerase OS=Alteromonas marina OX =203795 GN=queA PE=3 SV=1
MKLSDFSFELPEKLIAKYPTQQRTASRLLHLEGKTGNVAHTMFADMLKFVEPGDLLVFNNTRVIPARLLGKKETGGQVEVLIERITSDNTALAHVRASKAPKPGTRLILEEKVNVTVTGRDDALFILQFDHDETVLTLLEAHGHMPLPPYIDRPDENSDKERYQTVYNQKPGAVAAPTAGLHFDDAILAALKEKGVNLAFVTLHVGAGTFQPVRVDNIQEHKMHAEFAEVPQDVVDAVLATKANGKRVIAVGTTSVRSLESAAKASAERGDEEVIAPFNEDTEIFIYPGFEFKVVDAMFTNFHLPESTLMMLISAFAGKDNVMNAYQEAIEKEYRFFSYGDSMFIERA

SEQ ID NO: 63248 - protein, 348 aa, Alteromonas mediterranea
  misc_feature (1)..(348): tr|S5C4G5|S5C4G5_9ALTE S-adenosylmethionine:tRNA ribosy ltransferase-isomerase OS=Alteromonas mediterranea UM7 OX=1300258 GN=queA PE=3 SV=1
MKLSDFSFVLPENLIAKYPTQQRTASRLLHLDGKNGKVEHTMFADMLKFVEPGDLLVFNNTRVIPARLLGKKETGGQVEVLIERITSDTTALAHVRASKAPKPGTKLILEEKVNVTVTGRDDALFILQFDHDETVLTLLEAHGHMPLPPYIDRPDENSDKERYQTVYNEKPGAVAAPTAGLHFDDSILNALKEKGVNLAFVTLHVGAGTFQPVRVDYIQEHKMHAEFAEVPQDVVDAVLNTKANGKRVIAVGTTSVRSLESAAKASAERGDEQIIAPFNEDTEIFIYPGFEFKVVDAMFTNFHLPESTLMMLISAFAGKENVMNAYQEAIAKEYRFFSYGDSMFIERA

SEQ ID NO: 63249 - protein, 348 aa, Alteromonas mediterranea
  misc_feature (1)..(348): sp|B4RVF4|QUEA_ALTMD S-adenosylmethionine:tRNA ribosylt ransferase-isomerase OS=Alteromonas mediterranea (strai n DSM 17117 / CIP 110805 / LMG 28347 / Deep ecotype) OX =1774373 GN=queA PE=3 SV=1
MKLSDFSFVLPENLIAKYPTQQRTASRLLHLDGKNGKVEHTMFADMLKFVEPGDLLVFNNTRVIPARLLGKKETGGQVEVLIERITSDTTALAHVRASKAPKPGTKLILEEKVNVTVTGRDDALFILQFDHDETVLTLLEAHGHMPLPPYIDRPDENSDKERYQTVYNEKPGAVAAPTAGLHFDDSILNALKEKGVNLAFVTLHVGAGTFQPVRVDNIQEHKMHAEFAEVPQDVVDAVLNTKANGKRVIAVGTTSVRSLESAAKASAERGDEQIIAPFNEDTEIFIYPGFEFKVVDAMFTNFHLPESTLMMLISAFAGKENVMNAYQEAIAKEYRFFSYGDAMFIERA

SEQ ID NO: 63250 - protein, 354 aa, Alteromonas naphthalenivorans
  misc_feature (1)..(354): tr|F5ZAU9|F5ZAU9_ALTNA S-adenosylmethionine:tRNA ribosy ltransferase-isomerase OS=Alteromonas naphthalenivorans OX=715451 GN=queA PE=3 SV=1
MKLSDYRFTLPENLIAKYPTENRTASRLLQLNGKSGAVTHSMFNDMLSLVDEGDLLVFNNTRVIPARLLGKKETGGHVEVLIERILTEHTALAHVRASKAPKPGTRLLLEEHVNITVEGRDDALFLLRFDHEETALSLLEQYGHMPLPPYIDRPDESTDKERYQTVYNETPGAVAAPTAGLHFDDNMLAALKAKGVNLAFVTLHVGAGTFQPVRVENIEEHKMHAEYAEVSQEVVDAVLATKAKGKRVIAVGTTSVRSLESAAKASAEQSIENNTGENPVIAPFYSDTEIFIYPGFTFKVVDAMFTNFHLPESTLMMLISAFAGRENVMNAYQEAIENEYRFFSYGDSMFIEKA

SEQ ID NO: 63251 - protein, 348 aa, Alteromonas pelagimontana
  misc_feature (1)..(348): tr|A0A2A6ASJ7|A0A2A6ASJ7_9ALTE S-adenosylmethionine:tRN A ribosyltransferase-isomerase OS=Alteromonas pelagimon tana OX=1858656 GN=queA PE=3 SV=1
MKLSDFSFTLPDHLIAKYPTEKRSASRLMHLDGKTGNVVHRQFEETLSLVEEGDLLVFNNTRVMPARLKGKKASGGQVEVLVERILPDNTVYAHVRASKAPKPDTKLVLEEAVHATVIGRLDALFHLRFDHDTPVLAILEAHGHMPLPPYIDRPDENSDKERYQTVYNQKPGAVAAPTAGLHFDDTILTALRQKGVNLAFVTLHVGAGTFQPVRVDNILEHKMHAEYAEVSQSVVDAVLATKAAGKRVIAVGTTSVRSLESAAVVAESSESLIMPFFADTDIFIYPGYRFKVVDAMFTNFHLPESTLMMLISAFAGRDNVMQAYAQAIAEEYRFFSYGDSMFIEKADG

SEQ ID NO: 63252 - protein, 346 aa, Alteromonas sp.
  misc_feature (1)..(346): tr|A0A3N5XYL3|A0A3N5XYL3_9ALTE S-adenosylmethionine:tRN A ribosyltransferase-isomerase OS=Alteromonas sp. U0105 OX=2259342 GN=queA PE=3 SV=1
MKLSDFHFDLPEHLIAKYPTAQRTASRLLTLDGNTGKVEHKAFTDCIDLLQEGDLLVFNNTKVIPARMLGKKETGGNVEVLVERITGTHECVAHVRASKAPKAGTHLILEGTVNVKVTGRRDALFELTFEEKDSVLSLLENYGHMPLPPYIDRPDEDADKDRYQTVYSKEPGAVAAPTAGLHFDKDILKKLEEKGIQQAFLTLHVGAGTFQPVRVDDITTHKMHAEFADVPQDVVDKIVATKAAGKRVIAVGTTSVRSLETAAKVAGDQLIAPYCDDTDIFIYPGFEFKVVDAMFTNFHLPESTLMMLISAFGGYDNVMQAYQQAIAEEYRFFSYGDSMLISRKTA

SEQ ID NO: 63253 - protein, 354 aa, Alteromonas sp.
  misc_feature (1)..(354): tr|A0A448Y1F6|A0A448Y1F6_9ALTE S-adenosylmethionine:tRN A ribosyltransferase-isomerase OS=Alteromonas sp. 76-1 OX=2358187 GN=queA PE=3 SV=1
MKLSDYRFTLPENLIAKYPTENRTASRLLQLNGKSGAVTHAMFNDMLSLVEEGDLLVFNNTRVIPARLLGKKETGGHVEVLIERILTENTALAHVRASKAPKPGTRLLLEEHVNITVEGRDDALFLLRFDHEETALSLLEQYGHMPLPPYIDRPDESTDKERYQTVYNETPGAVAAPTAGLHFDDNMLAALKAKGVNLAFVTLHVGAGTFQPVRVENIEEHKMHAEYAEVSQEVVDAVLATKAKGKRVIAVGTTSVRSLESAAKASAEQSIESNTGENPVIAPFYSDTEIFIYPGFTFKVVDAMFTNFHLPESTLMMLISAFAGRENVMNAYQEAIENEYRFFSYGDSMFIEKA

SEQ ID NO: 63254 - protein, 354 aa, Alteromonas stellipolaris
  misc_feature (1)..(354): tr|A0A0S1YHL2|A0A0S1YHL2_9ALTE S-adenosylmethionine:tRN A ribosyltransferase-isomerase OS=Alteromonas stellipol aris LMG 21856 OX=1160720 GN=queA PE=3 SV=1
MKLSDYRFTLPENLIAKYPTEDRTASRLLQLNGKSGAVTHSMFNDMLSLVEEGDLLVFNNTRVIPARLLGKKETGGQVEVLIERILTEHTALAHVRASKAPKPGTRLLLEDHVNISVEGRDDALFLLRFDHDETALSLLEQYGHMPLPPYIDRPDESTDKERYQTVYNETPGAVAAPTAGLHFDDDMLAALKAKGVNLAFVTLHVGAGTFQPVRVENIEEHKMHAEYAEVSQDVVDAVLTTKANGKRVIAVGTTSVRSLESAAKASAEQAIENNAGESPVIAPFHSDTEIFIYPGFTFKVVDAMFTNFHLPESTLMMLISAFAGRENVMNAYQEAIEKEYRFFSYGDSMFIEKA

SEQ ID NO: 63255 - protein, 349 aa, Altibacter sp.
  misc_feature (1)..(349): tr|A0A2D9N961|A0A2D9N961_9FLAO S-adenosylmethionine:tRN A ribosyltransferase-isomerase OS=Altibacter sp. OX=202 4823 GN=queA PE=3 SV=1
MKLSHFNFNLPPELLAEYPAANRDESRLMVLNRKEKTIEHKMFKDLIDYFKEDDVLVLNNTKVFPARLFGNKEKTGARIEVFLLRELNSETRLWDVLVDPARKIRIGNKLYFGDDESLVAEVIDNTTSRGRTLRFLFDGSYEEFRSKLTELGETPLPKYIKREVEPEDAERYQTIFAKKEGAVAAPTAGLHFSKHLLKRLEIKGVNFAEVTLHVGLGTFSPVEVEDLSKHKMDSEEIIITEDAVQTINKGIKTKRRVCAVGTTVMRALESSVSSDHTLNDYSGWTNKFIFPPYDFSIANSMVTNFHTPKSTLLMMVSAFAGHDFIKEAYAEAIKEKYRFYTYGDAMLII

SEQ ID NO: 63256 - protein, 341 aa, Alysiella crassa
  misc_feature (1)..(341): tr|A0A376BKL2|A0A376BKL2_9NEIS S-adenosylmethionine:tRN A ribosyltransferase-isomerase OS=Alysiella crassa OX=1 53491 GN=queA PE=3 SV=1
MHISQFDFDLPEQLIAQNPPAIRGNSRLLVALPQQDFADRHFADLLDYVNAGDVLVFNNTKVMKARLFGQKASGGKIEALIERVLDNQTALAHIRSSKSPKAGAELIFDGEIHATMVERVGELFKIQFSGSLNVYELLEQHGALPLPPYIERAADDSDDSRYQTVYAKHQGAVAAPTAGLHFTDEILNALQNKGVEFAEVTLHVGAGTFQPVRVDNIAEHKMHSEWFDVPAETVAKIQAAQTRGNKIWSVGTTSLRAIESAARSGSLQAGTGDTDIFITPGYEFQVIDRLITNFHLPKSTLLMLVSAFSGSQRIREVYQHAIGREYRFFSYGDAMILGREQ

SEQ ID NO: 63257 - protein, 341 aa, Alysiella filiformis
  misc_feature (1)..(341): tr|A0A286E6U3|A0A286E6U3_9NEIS S-adenosylmethionine:tRN A ribosyltransferase-isomerase OS=Alysiella filiformis DSM 16848 OX=1120981 GN=queA PE=3 SV=1
MHISEFDFDLPEQLIAQNPPQVRGSSRLLVATQAQQIEDKQFADLLDYVNAGDVLVFNNTKVMKARLFGQKASGGKIEALIERVLDAQTALAHIRSSKSPKAGAELIFDGTIHATMVERVGELFKIQFSGSLNVYELLEQHGALPLPPYIERTAQADDDERYQTVYAKHQGAVAAPTAGLHFTEELLCALKNKGIVFAEVTLHVGAGTFQPVRVENIAEHQMHSEWFDVPAETVAQIQAAKARGNKVWSVGTTSLRAIESAARSGSLKAGQGDTNIFITPGFEFQVIDCLITNFHLPKSTLLMLVSAFSGSARIRQIYQHAIEHQYRFFSYGDAMILARAD

SEQ ID NO: 63258 - protein, 341 aa, Amantichitinum ursilacus
  misc_feature (1)..(341): tr|A0A0N1JT09|A0A0N1JT09_9NEIS S-adenosylmethionine:tRN A ribosyltransferase-isomerase OS=Amantichitinum ursila cus OX=857265 GN=queA PE=3 SV=1
MQLSDFDYHLPEHLIAQFPPEVRGGSRLLHVAGATLEDRMFADLPHYLRAGDVLVFNDTRVIKARLFGQKESGGQVEALVERVLDTHRALAHIRASKSPKPGSRIIFNGDHAATMVERQGELFLLQFEEDTPVLDILEQAGQLPLPPYITHVPDDEDAKRYQTVYARDPGAVAAPTAGLHFTDDLLARLREMGVHTAFLTLHVGAGTFQPVRVENLAEHKMHHERYTIAPETVALLKRVREAGGRIIAVGTTSLRALEAASQHEFLGEPQGDTDIFITPGYQFRVVDRLVTNFHLPKSTLLMLVAAFAGFDTMRAAYAHAVAAEYRFFSYGDAMLLEKQSH

SEQ ID NO: 63259 - protein, 348 aa, Amaricoccus sp.
  misc_feature (1)..(348): tr|A0A501WUQ3|A0A501WUQ3_9RHOB S-adenosylmethionine:tRN A ribosyltransferase-isomerase OS=Amaricoccus sp. HB172 011 OX=2589815 GN=queA PE=3 SV=1
MRLDDFDFDLPEDLIALRPLRPRPASRLLVAEPARITDSTVAALGDWLRPGDLLVLNDTKVIPARLSGVRRRANGGEARIEATLIAAGTDGTWRALARPGKRLAVGDRIAFGEILSAEVREKDGAEVVLAFDQAGEGLDAALETVGEMPLPPYIAARRAPDAADREDYQTVFATRPGAVAAPTASLHFDEDLLGALAAKGVGQARVTLHVGAGTFLPVKVENIETHRMHAEWGEIGAETAAAIEATLAAGGRVIPVGTTALRLIETAATAPGRIAPWRGDTDIFIRPGFEFRVTRGLMTNFHLPKSTLLMLVSALMGVERIREIYAHAIAARYRFFSYGDSSLLLPRG

SEQ ID NO: 63260 - protein, 98 aa, Amaricoccus sp.
  misc_feature (1)..(98): tr|A0A2M9P9H9|A0A2M9P9H9_9RHOB S-adenosylmethionine:tRN A ribosyltransferase-isomerase (Fragment) OS=Amaricoccu s sp. HAR-UPW-R2A-40 OX=1985299 GN=CNY89_15960 PE=3 SV= 1
RVIPVGTTALRVLETAAAAGHLAPWRGETDIFIRPGHRFRVADGLMTNFHLPKSTLMILAAAFMGLTRIRRVYAHALARDYRFLSYGDASLLLPESRP

SEQ ID NO: 63261 - protein, 348 aa, Aminicella lysinilytica
  misc_feature (1)..(348): tr|A0A4V3CQV7|A0A4V3CQV7_9FIRM S-adenosylmethionine:tRN A ribosyltransferase-isomerase OS=Aminicella lysinilyti ca OX=433323 GN=queA PE=3 SV=1
MNIEDFDYDLPKELIAQTPAEQRDSCRLMVLNRENGTIEHRHFHDILEYLKPTDCLVMNDSRVIPARLYGIKDGTGAHVEFLLSKRIDGDEWESLVRPGRRLKPGDSVTFGDGKLKADVIGYGSDGTRKVKFNYEGIFMERLEELGKMPLPPYIERESNDEDKDMYQTVYAREDGSVAAPTAGLHFTDQLLEEAKAKGVKLAYVTLHVGIGTFRPVKCEKIEDHHMHFEEYFINEVTADVINGTIKAGGRIVSVGTTSTRTLESAAYKDDASGEYLVKAGHGNTGIFIYPGYEYKIIDALITNFHLPKSTLIMLISALYDREKILEAYKVAVDEKYRFFSYGDAMLIE

SEQ ID NO: 63262 - protein, 354 aa, Aminipila sp.
  misc_feature (1)..(354): tr|A0A410PUV8|A0A410PUV8_9FIRM S-adenosylmethionine:tRN A ribosyltransferase-isomerase OS=Aminipila sp. JN-39 O X=2507160 GN=queA PE=3 SV=1
MHINDFDYDLPSELIAQKPADKRDNSRLMVVHRDTGAVEHKHFYNILEYLEPGDCLVLNNSKVLPARLFGIKAETGAKVEFLLIKRLDGDLWETMVRPGKRLKPGDVVDFSREGATAKFQATVVDYGEEGTRHVKFEYEGIFLERLEELGSMPLPPYIERESEEQDKDRYQTVYCKEEGSVAAPTAGLHFTEELLGQAQEKGIRLAYVTLHVGIGTFRPVKCDIIEEHKMHFEEYEVSEESARIINETKENGGRIFSVGTTSCRTVESAATLNEDGQSSAYQVKPGHGNTGIFIYPGYEFKIIDCLITNFHLPKSTLLMLISALYDREKILEVYKTAVEEKYRFFSYGDAMLIL

SEQ ID NO: 63263 - protein, 346 aa, Aminivibrio pyruvatiphilus
  misc_feature (1)..(346): tr|A0A4R8M4Z8|A0A4R8M4Z8_9BACT S-adenosylmethionine:tRN A ribosyltransferase-isomerase OS=Aminivibrio pyruvatip hilus OX=1005740 GN=queA PE=3 SV=1
MDLFDLASYGYLLPEELIAQNPAEPRDSSRLMVLSREREEILHNTFASLGDFLDEGDLLVLNDTRVIPARLFGSKKNGGGRVEILLLKALDASFLQWEALVKPGRKNPPGTGIFLADGTEILVGARGGEGVRNVAFPAGTEVLPLLERIGETPLPPYITSSSAPRSSYQTVFARTDGSAAAPTASLHFTPGLLGELQRERGVRLGWLTLHVGLGTFRPVKSGDIREHKIHEEYCFLPAETRKLILETKRRGRKVIAAGTTVARTLESLAGENGSLESGERMTRLFIYPGYRFKIIDGLITNFHLPKSSLLMLVAAFAGYEFTMRAYGEAVSRRYRFFSFGDAMFIR

SEQ ID NO: 63264 - protein, 358 aa, Aminobacter aminovorans
  misc_feature (1)..(358): tr|A0A380WM18|A0A380WM18_AMIAI S-adenosylmethionine:tRN A ribosyltransferase-isomerase OS=Aminobacter aminovora ns OX=83263 GN=queA PE=3 SV=1
MRVDLFDFDLPEANIALRPAQPRDTARLLTVRPGAELADLSVRDLPTLLEPGDVLVLNDTRVIPAQLKGVRVRGEAVAHVDATLHMRTAPDRWLAFMRPGKRVAVGDRIQFGHDAEACMLGQLDATVLEKGEGGEALLAFDLAGPALDEALHDVGHIPLPPYIASKRADDERDRKDYQTVYAREEGAVAAPTAGLHFTPELFAALEAKGVEKQFVTLHVGAGTFLPVKADDTADHKMHSEIGHVSAETATVLNAARARGNKVVAVGTTSLRLMESAARQDGTLAAWSGPTDIFITPGYRFKFVDALMTNFHLPRSTLFMLVSAFAGLERMHDVYAHAISSGYRFYSYGDSSLLFRDDR

SEQ ID NO: 63265 - protein, 358 aa, Aminobacter aminovorans
  misc_feature (1)..(358): tr|A0A142M8H7|A0A142M8H7_AMIAI S-adenosylmethionine:tRN A ribosyltransferase-isomerase OS=Aminobacter aminovora ns OX=83263 GN=queA PE=3 SV=1
MRVDLFDFELPEANIALRPAEPRDMARLLCVRPDEALADLSVRDLPSLLNPGDVLVLNDTRVIPAQLKGVRVRGEAVAHVDATLHMRTAPDRWLAFMRPGKRVAIGDRIRFGHDAEACMLGQLDATVLEKGEGGEALLAFDLSGPGLDEALHAVGHIPLPPYIASKRPDDERDRKDYQTVYAREEGAVAAPTAGLHFTPELFAALEARGIEKQFVTLHVGAGTFLPVKADDTADHKMHSEVGYVSAETATVLNAARARGNKVVAVGTTSLRLMESAAREDGTLAAWSGPTDIFITPGYRFKFVDALMTNFHLPRSTLFMLVSAFAGLERMRDVYAHAISSGYRFYSYGDSSLLFRDDR

SEQ ID NO: 63266 - protein, 358 aa, Aminobacter sp.
  misc_feature (1)..(358): tr|A0A316GX49|A0A316GX49_9RHIZ S-adenosylmethionine:tRN A ribosyltransferase-isomerase OS=Aminobacter sp. AP02 OX=2135737 GN=queA PE=3 SV=1
MRVDLFDFELPEERIALRPAEPRDSARMLVVRPDDKLADFSVRDLPSLLEPGDVLVLNDTRVIPAQLKGTRVRGEAQAHVDATLHMRVGPDRWLAFMRPGKRVAVGDRIHFGHSGEVCAIGQLDATVIEKGEAGEALLAFDFSGAALDEALHAVGHIPLPPYIASKRPDDARDRSDYQTVYAKEEGAVAAPTAGLHFTPELFAQLEAKGIERQFVTLHVGAGTFLPVKADDTAEHKMHSEIGHVSEETAQALNAARARGNQVVAVGTTSLRLMESAARADGTIAAWSGPTDIFITPGYRFKFVDALMTNFHLPRSTLFMLVSAFRGLERMHEVYAHAISSGYRFYSYGDASLLFRNDR

SEQ ID NO: 63267 - protein, 358 aa, Aminobacter sp.
  misc_feature (1)..(358): tr|A0A562FI36|A0A562FI36_9RHIZ S-adenosylmethionine:tRN A ribosyltransferase-isomerase OS=Aminobacter sp. J15 O X=935260 GN=queA PE=3 SV=1
MRVDLFDFDLPDERIALRPADPKDSARMLVVRQGEPFEDRIVRDLPSLLRKGDALVFNDTRVIPAQLTGLRRRDGSVAQIDATLHMRVAADRWKAFARPAKRLIVGDRINFGHGGNTCLIGSLDATVVEKGEAGEVTLAFDLSGPALDEALHAVGHIPLPPYIATRRMDDERDRIDYQTIYAREEGAVAAPTAGLHFTPQLFEALDAAGIERHFVTLHVGAGTFLPVKADDTADHKMHSEIGHVSARTAEALNAVKARGGRIISVGTTSLRLMESAVGSDGLLKEWSGATDIFITPGYRFRTADVLMTNFHLPRSTLFMLVSAFCGLETMQAAYAHAIASGYRFYSYGDSSLLFRSDT

SEQ ID NO: 63268 - protein, 349 aa, Aminobacterium colombiense
  misc_feature (1)..(349): tr|D5EEL0|D5EEL0_AMICL S-adenosylmethionine:tRNA ribosy ltransferase-isomerase OS=Aminobacterium colombiense (s train DSM 12261 / ALA-1) OX=572547 GN=queA PE=3 SV=1
MVPNLYDIESYAYDLPEGRIAQTPASPRNHSRLLVLDKNSGTMIHSRFYELHRFLKEGDVIVLNDTRVIPARLFGVKEKGSARAEILLLKPLDGLWKRWEALVRPGRRLRPGSIVIVREDIPVQVQEALADGVRVVRFPEECNVLSLLEEVGEIPFPPYIKSTTATALDYQTVFAKRNGSSAAPTASLHFTENQLRDLEDKHGITFAWVTLHVGLGTFRPVQEEDIRQHVIHEEYCEVPEETAALIRKAKEEGRRIIASGTTVARTLESMATHDENVVQYGRKNTSLFIYPAYQFSVIDGLITNFHLPRSTLLMLVAALAGYDNIMEVYETAVKMGYRFFSFGDAMLIQ

SEQ ID NO: 63269 - protein, 355 aa, Aminomonas paucivorans
  misc_feature (1)..(355): tr|E3D0N2|E3D0N2_9BACT S-adenosylmethionine:tRNA ribosy ltransferase-isomerase OS=Aminomonas paucivorans DSM 12 260 OX=584708 GN=queA PE=3 SV=1
MNPPQKTAAVDLASVSAYQYDLPEELIAQDPAEPRDSSRLLVLERGRGVAAHRTFRDLEEYLREGDLLVLNDTRVRPARLRARKTSSGRVEILVLRPLDPASNLWTALVRPGRRVPPGTPLLLEDGTEVRVEERLEDGLRALRLPQETDPTRLFRRLGEVPLPPYITRSVAPAERYQTVYSRPDREGSAAAPTAGLHFTAPLLKRLEARGIGQAFVTLDVGLGTFRPVQTERAEDHVMHLERCSLGEETAEAIRQTRRRGGRVVAVGTTVVRTLETFANEEGQVLPGERDTRLYIRPGYRFRVVDGLITNFHLPRSTLLMLVAAFGGYEPVLEAYREAVQLRYRFFSFGDAMILL

SEQ ID NO: 63270 - protein, 343 aa, Ammonifex degensii
  misc_feature (1)..(343): tr|C9R8Q0|C9R8Q0_AMMDK S-adenosylmethionine:tRNA ribosy ltransferase-isomerase OS=Ammonifex degensii (strain DS M 10501 / KC4) OX=429009 GN=queA PE=3 SV=1
MALKRSDFEYYLPKELIAQEPLPERDKSRLMVVYRDREEFEHRLFRDLPEYLVPGDVLVLNRTRVLPARLYGVKEDTGGKVEVLLLRQLEPDLWEVLVRPGRRVPEGTRIVFGGGLLRGEVLSRLESGGRLVRFTYEGDFFALLHQLGEIPLPPYIKRKLAEPERYQTVYASEPGSAAAPTAGLHFTPELLQKLQEKGVEVVTLTLHIGLDTFRPVKEEDITAHRMHSEEYHLPEATAEAVNRAKEEGRRIVAVGTTVVRCLESVADERGRVRAGRGFTDLFIYPGYRFKVVDALVTNFHLPGSTLLMLVAAFAGREKILRAYAEAVRLRYRFFSFGDAMLIL

SEQ ID NO: 63271 - protein, 343 aa, Ammonifex thiophilus
  misc_feature (1)..(343): tr|A0A3D8P554|A0A3D8P554_9THEO S-adenosylmethionine:tRN A ribosyltransferase-isomerase OS=Ammonifex thiophilus OX=444093 GN=queA PE=3 SV=1
MALKRSDFEYYLPKELIAQEPLPERDKSRLMVVYRDREEFEHRLFRDLPEYLVPGDVLVLNRTRVLPARLYGAKEGTGGKVEVLLLRQLEPDLWEVLVRPGRRVPEGTRIVFGGGLLRGEVLSRLGSGGRLIRFTCEGDFFSLLHRLGEIPLPPYIKRKLAEPERYQTVYASEPGSAAAPTAGLHFTPELLQKLQEKGVEVVTLTLHIGLDTFRPVKEEDITAHRMHSEEYHLPEATAEAVNRAKREGRRIVAVGTTVVRCLESVADERGLVRAGRGFTDLFIYPGYRFKVIDALVTNFHLPGSTLLMLVAAFAGREKILRAYAEAVRLRYRFFSFGDAMLIL

SEQ ID NO: 63272 - protein, 342 aa, Ammoniphilus oxalaticus
  misc_feature (1)..(342): tr|A0A419SIS9|A0A419SIS9_9BACL S-adenosylmethionine:tRN A ribosyltransferase-isomerase OS=Ammoniphilus oxalatic us OX=66863 GN=queA PE=3 SV=1
MDVTLFDFDLPEKLIAQTPLQERTASRLLAVDKQTGKIEHRKFTDLLGYLQAGDLLVLNDTRVLPARLFGVKQDTGAKVELLLLKQLADDRWETLARPGKKIKQGATLSFGDGKLTGVCEGYTSAGGRVVRFEYEGIFNEILDELGQMPLPPYIKEQLNDAERYQTVFAKHPGSAAAPTAGLHFSEAYLQQIRRKGIQIAYITLHVGLGTFRPVQVDEITEHKMHAEYYSISEENAALINRAKSEGKRVIAIGTTATRALETVASSHDGTIVEGDGWTDIFIYPGYSFSIVDGMITNFHLPKSTLVMLVSAFAGRELILRAYHEAIQNEYRFFSFGDAMFIV

SEQ ID NO: 63273 - protein, 342 aa, Ammoniphilus sp.
  misc_feature (1)..(342): tr|A0A4Q1TAB3|A0A4Q1TAB3_9BACL S-adenosylmethionine:tRN A ribosyltransferase-isomerase OS=Ammoniphilus sp. CFH 90114 OX=2493665 GN=queA PE=3 SV=1
MDVNEFDFELPEELIAQSPLKERSASRLLVLNKETGEVKHQSFKDLIDYLSPGDVIVLNDTRVIPARLFGAKADTGAKIEVLLLKQLDGDRWETLVKPGKKMKPGSVVTFGDGRLTGICEESTEVGGRIIRFQYTGIFNEILDELGQMPLPPYIKEQLEDSERYQTVFAKNPGSAAAPTAGLHFTEEYLQQIRDKGIHIAYITLHVGLGTFRPVQVENVLEHKMHTEYFEISQENADRINAAKASGNRVVAVGTTATRTLETVGGKNEGKVVADSGWTDIFIYPGYHFTVVDGLLTNFHLPKSTLVMLVSSLAGKEPILNAYREAVEQRYRFFSFGDAMLII

SEQ ID NO: 63274 - protein, 348 aa, Amoebophilaceae bacterium
  misc_feature (1)..(348): tr|A0A3R7X3H6|A0A3R7X3H6_9BACT S-adenosylmethionine:tRN A ribosyltransferase-isomerase OS=Amoebophilaceae bacte rium TMED152 OX=1986680 GN=queA PE=3 SV=1
MKLSEFDFKLASTRTAIHPAENRDESRLMIVHKDSGKIEHKQFKDILKYFKEDDVLVLNDTKVFPARLYGQKEKTGAKIEVFLLRELNPDLNLWDVLVDPARKIRVGNKLYFGEGELVAEVIDNTTSRGRTIRFIPEDNERNFHDIIQEYGKTPLPKEIKRKVDKKDEERFQTVYAKNIGAVAAPAAGLHFTDILLKKLILKGVKIVNITSHTGLGTFKDIDVEDLTKHKMDSENYSIPEETAEIVNEAIKNGKRIFAVGTSTMKTLETAVTANDLLKAKSGWTDKFIFPPYDFKICGAMITNFHSPKSTLLMMASAFGGFDQIMKVYKVAIKEKYMFHTYGDALMII

SEQ ID NO: 63275 - protein, 348 aa, Amoebophilaceae bacterium
  misc_feature (1)..(348): tr|A0A3C1MCM7|A0A3C1MCM7_9BACT S-adenosylmethionine:tRN A ribosyltransferase-isomerase OS=Amoebophilaceae bacte rium OX=2053498 GN=queA PE=3 SV=1
MKLSAFKFDLPAKLIASHPVENRDESRLMVVHKDAGKIEHKYFQDVINYLGEDDTLVVNDTKVFSAMLYGNKEKTGAQIEVMLLRELSEEHHLWDTLVDPARKIRVGNKLFFGNGELVAEVLDNTTSRGRTLKFLFDGTTEELHSIIEQLGSTPLPKEIKRKVAPEDRSRYQTVYAQQTGAVVAPTAGLHFTPHLLKRLELQGTHIASLTLHIGLGTLRPVDVEDLSKYKVDSEFLSINTATAQLVNQSLDKNKRVCAVGTSTAKAIEASVSAAGGLKANHGWTNKFIFPPYPFKVCTSLITNFHLPASAPLMTATALGGYDLLMEAYQIAIKEKYRFFVYGDAMLIL

SEQ ID NO: 63276 - protein, 348 aa, Amoebophilus asiaticus
  misc_feature (1)..(348): sp|B3ESF6|QUEA_AMOA5 S-adenosylmethionine:tRNA ribosylt ransferase-isomerase OS=Amoebophilus asiaticus (strain 5a2) OX=452471 GN=queA PE=3 SV=1
MKLSSFKFTLPSKLIASHPVENREDARLMVVHKRTGQIEHKTFKDLIDYLGENDTLVLNDAKIFPSKLYGSKEKTGAQIEVFLLRELESGEHLWDTLVEPARKIRVGNKLYFGDGELVAEVLDNTTSRGRTLKFLFEGTREEFYEIVDQLGFVPLPNQLKRKPETEDRERYQTVYAQHIGAVVPPFAGLHFSAHLLKRLELKGVHITPLTLHIGLNSMKIIDVEDLTKYRIGSEQFLIPDNTVTTVNTALDDKKQVCAVGTSTIKALETSVSVAGRLKPAQGWTNKLIFPPYDFKVCTSLITNFHLPESLPLVNAAAFGGYELMMEAYQIAIKEKYRFFVYGDAMLII

SEQ ID NO: 63277 - protein, 342 aa, Amphibacillus marinus
  misc_feature (1)..(342): tr|A0A1H8P0D8|A0A1H8P0D8_9BACI S-adenosylmethionine:tRN A ribosyltransferase-isomerase OS=Amphibacillus marinus OX=872970 GN=queA PE=3 SV=1
MRVEDFDFHLPEQLIAQTPLKDRTSSKLLVMKKDSQQIEHQQFGNIIDYLQPGDCLVLNNTKVLPARLYGSKSDTGAKIELLLLHQRDTDQWEVLVKPAKKISIGTEIVFGNGQLRAVCTELQDHGGRVVKFTYQGIFLEVLNELGEMPLPPYIKEQLADRDRYQTVYAKEEGSAAAPTAGLHFTEALLAQIEAKGVKIAYVTLHVGLGTFRPVSVEAIEEHAMHAEFYHLTEEEAKKITTAKQSGGRIIAVGTTSTRTLETIATEHDGALVAASGWTSIFIYPPYHYQAIDGLITNFHLPKSTLVMLVSALAGRDFIMKGYQEAVTNHYRFFSFGDAMLII

SEQ ID NO: 63278 - protein, 342 aa, Amphibacillus xylanus
  misc_feature (1)..(342): tr|K0IXQ1|K0IXQ1_AMPXN S-adenosylmethionine:tRNA ribosy ltransferase-isomerase OS=Amphibacillus xylanus (strain ATCC 51415 / DSM 6626 / JCM 7361 / LMG 17667 / NBRC 15 112 / Ep01) OX=698758 GN=queA PE=3 SV=1
MNIEEFDFDLPEHLIAQTPLKDRTASKLMVLNRNDKSLEHRHFSDILDYLKPGDCLVLNNTKVLPARLYGVKEDTGAKVEVLLLHQKENDHWEVLVKPAKKVKLGTKLSFGEGRLTATCTEILEHGGRIVRFDYDGIFLEVLTELGEMPLPPYIKEQLADQDRYQTVYAKAEGSAAAPTAGLHFTNDLLEEIKAKGIEIAFVTLHVGLGTFRPVSVDRIEEHDMHSEYYHLSSKEAEKINRVKSQDGRIIAVGTTSTRTLEAIASENNGEIVPTSGWTSIFIYPPYQFKAVDAMITNFHLPKSTLIMLISALAGREFILDAYHEAIKQEYRFFSFGDAMLIV

SEQ ID NO: 63279 - protein, 359 aa, Amphiplicatus metriothermophilus
  misc_feature (1)..(359): tr|A0A239PUP0|A0A239PUP0_9PROT S-adenosylmethionine:tRN A ribosyltransferase-isomerase OS=Amphiplicatus metriot hermophilus OX=1519374 GN=queA PE=3 SV=1
MRVSDFDFDLPEERIALEPARPRDSARLLHVRADGLADRVVRDLPALLRPGDLLVLNDTKVIPAQLRGRRPARTAGGGEPVEIDVTLHRRLAPEEPAGARWRAFVRPAKRLREGDALDFGAGLTAVIEARSEAEAVLRFNRAGADFDAGLARAGAPPLPPYIARRRPARPEDAADYQTVYAAEPGSVAAPTAGLHFTEALLDALDKRGVRRLTITLHVGAGTFLPVTAEDTRDHVMHAEWGEITPAQAEAINAARAKGGRILAVGTTALRLLESTADREGRVRPCAEETSIFITPGYRFRAVDLLMTNFHLPRSTLFMLVCAFSGTARMKAAYAHAIKAGYRFYSYGDACLLERGPENE

SEQ ID NO: 63280 - protein, 349 aa, Amphritea atlantica
  misc_feature (1)..(349): tr|A0A1H9JRQ3|A0A1H9JRQ3_9GAMM S-adenosylmethionine:tRN A ribosyltransferase-isomerase OS=Amphritea atlantica O X=355243 GN=queA PE=3 SV=1
MQVKDFHFDLPDELIARYPLEKRSDSRLFCVDGNSGEFQHRQFFEVLDLLEPGDLVVFNNTRVIPARMFGEKASGGKIEVLIERVLDERSALAHIRSSRSPKPGAELTLEGGLKATMVARHDDLFELEFDLAEGHLIEALEQFGHMPLPPYMKREDELSDRERYQTVYNEKPGAVAAPTAGLHFDDALLASLEEKGVNKAFVTLHVGAGTFRPVKVENIQDHKMHAEYIEVPEAVCQAVRETKARGNRVLAVGTTSVRCLETASQAGEIQPFFGDTDIFIFPGYRFRTVDLLITNFHLPESTLLMLVSAFAGYEQMMAAYKEAVAQCYRFFSYGDAMFLSKKTRQNGAD

SEQ ID NO: 63281 - protein, 344 aa, Amphritea balenae
  misc_feature (1)..(344): tr|A0A3P1SRB9|A0A3P1SRB9_9GAMM S-adenosylmethionine:tRN A ribosyltransferase-isomerase OS=Amphritea balenae OX= 452629 GN=queA PE=3 SV=1
MNVKDFHFELPDELIARYPLENRSDSRLLCVDGDSGAQQHRQFFEVLEFLEPGDLVVFNNTRVIPARMFGQKASGGKIEVLVERLLDEQSALCHIRSSRSPKPGAELTLDGGLKATMVARHDDLFELLFDLNEGNLIEALEQFGHMPLPPYMNREDELSDRERYQTVYNEKPGAVAAPTAGLHFDDALLAKLEAKGVNKAFVTLHVGAGTFRPVKVENIQDHKMHAEYIEVSEQVCQQVKETKARGNKVLAVGTTSVRCLETASQSGEIEPFFGDTDIFIFPGYTFKTVDMLITNFHLPESTLLMLVSAFAGYEHMMSAYKEAVAQQYRFFSYGDAMFLTKQGS

SEQ ID NO: 63282 - protein, 345 aa, Amphritea sp.
  misc_feature (1)..(345): tr|A0A430KTN8|A0A430KTN8_9GAMM S-adenosylmethionine:tRN A ribosyltransferase-isomerase OS=Amphritea sp. MCCC 1K 03512 OX=2490544 GN=queA PE=3 SV=1
MQVKDFHFDLPDELIARYPLEKRSDSRLFCVDGNSGEFEHRQFFDVLEWLEPGDLVVFNNTRVIPARMFGEKASGGKIEVLIERVLDERSALAHIRSSRSPKPGAELTLDGGLKATMVRRHDDLFELEFDLAEGHLIDALEQFGHMPLPPYMKREDELSDRERYQTVYNEKPGAVAAPTAGLHFDDALMRRLEEKGVNKAFVTLHVGAGTFRPVKVDNIQDHKMHAEYIEVSEEVCQAVRETKARGNRVLAVGTTSVRCLETASKSGEIEPFFGDTDIFIFPGYEFRTVDLLITNFHLPESTLLMLVSAFAGYEHMMAAYKEAVAQQYRFFSYGDAMFLTKQTVK

SEQ ID NO: 63283 - protein, 338 aa, Amycolatopsis acidiphila
  misc_feature (1)..(338): tr|A0A558A589|A0A558A589_9PSEU S-adenosylmethionine:tRN A ribosyltransferase-isomerase OS=Amycolatopsis acidiph ila OX=715473 GN=FNH06_24450 PE=3 SV=1
MTIPFTLPPDSEAGRPPERRGLRRDGVRLLVARPGGIEHRRFRDVAELLEPGDLVVVNTSATLPAALDAVRDNGSPAPVHVSTPLDDGDWVVEVRRTDASGPDLSLRAGERLGLPGGVTLTLVGPYLSARLWRASVSPKVSAQHYLPEHGRPIGYGYLTGRFPLRDYQTVYATEPGSAEMASAGRPFTEPLLVRLMARGVIVAPVLLHAGVSSPELHEPPNAERFAVPAATARLVDVVRAAGQRVVAVGTTVVRALESAAGPDGAMHAASGWTELVLGPDRPARVVGGLVTGLHVPEASHLLLLEAVAGRRLVEAAYAAAVERRYLWHEFGDSTLFLP

SEQ ID NO: 63284 - protein, 335 aa, Amycolatopsis australiensis
  misc_feature (1)..(335): tr|A0A1K1T5P2|A0A1K1T5P2_9PSEU S-adenosylmethionine:tRN A ribosyltransferase-isomerase OS=Amycolatopsis austral iensis OX=546364 GN=SAMN04489730_8272 PE=3 SV=1
MSVRFELPDELSASAPPEARGLARDEVRLLVAAPSGVHHTVFASLGDHLRAGDLLVVNTSGTLPAAVDAVRAGRPVAVHFATALDDGTWVVELRGPGGPLLDGRPGERVELPAGASLTLLAPVAPGAARLWRAQVSVPVPGLLAAAGRPIRYGYVPRAWPLSDYQTVFAREPGSAEMPSAARPFTTALVTRLVTDGVLFAPLLLHTGVSSPEAGEPPQAERFRVPAATAALVSWVRSRGGRVIAVGTTAARALESAVADGEVRAAEGWTDLVLGPDRPAAVVDGIVTGLHAPDASHLLLLEAVAGRELVQRAYDAAVQRRYLWHEFGDVSLLLRR

SEQ ID NO: 63285 - protein, 338 aa, Amycolatopsis balhimycina
  misc_feature (1)..(338): tr|A0A428VXV7|A0A428VXV7_AMYBA S-adenosylmethionine:tRN A ribosyltransferase-isomerase OS=Amycolatopsis balhimy cina DSM 5908 OX=1081091 GN=DMA12_43400 PE=3 SV=1
MNVRFELPDELSASAPPEARGLARDEVRLLVASPSGVHHTVFASLGEHLRPGDLLVVNTSGTLPAAVDAIRGGRPVVVHFSTSLDDGSWVVELRAPGGPLLDGRPGEHLELPRGASLTLLAPAAPGDRRLWRAEVAVEGPVPGFLAAAGRPIRYGYVPRAWPLADYQTVFAREPGSAEMPSAARPFTTELVTRLVTDGVLFAPLLLHTGVSSPEAGEPPQPERFRVPPPTAALVAWVRARGGRVIAVGTTAARALESAASAHGMVRAAEGWTNLVLGPDRPARVADGIITGLHAPDASHLLLLQAVTGAEVVQRAYDAAVEERYLWHEFGDVSLLLRR

SEQ ID NO: 63286 - protein, 338 aa, Amycolatopsis eurytherma
  misc_feature (1)..(338): tr|A0A3N2H810|A0A3N2H810_9PSEU S-adenosylmethionine:tRN A ribosyltransferase-isomerase OS=Amycolatopsis eurythe rma OX=196083 GN=EDD35_6894 PE=3 SV=1
MTIPFTLPPDSEATAPPERRGVPRDAVRLLVARPGGIEHHRFRDLPDLVEPGDLVVVNTSATVPAALDAVRGNGKPSPVHLSTTLDDGDWVVEVRLADGSGPDLSVHPGERMRLPGGVILTLVEPFTSARLWRAAVTPEVPVRDYLARHGRPIGYGYLAGRFPLRDYQNVYATEPGSAEMASAGRPFTAPLLVRLIARGVVVAPIVLHAGVSSPELHEPPAAERFTVPEATARLVELTRAAGRRVIAVGTTVVRALESAAETSGAMHAATGWTELVLGLARPPRVVTGLVTGLHAPEASHLGLLAAVAGRPLVAAAYDAALEHHYLWHEFGDSTLFLP

SEQ ID NO: 63287 - protein, 335 aa, Amycolatopsis mediterranei
  misc_feature (1)..(335): tr|G0FHN4|G0FHN4_AMYMS S-adenosylmethionine:tRNA ribosy ltransferase-isomerase OS=Amycolatopsis mediterranei (s train S699) OX=713604 GN=RAM_07815 PE=3 SV=1
MNIRFDLPAELSASAPPEARGLSRDEVRLLVASPAGVHHTAFTGLGEHLRPGDLLVVNTSGTLPAAVDARRNGRPVVVHFATRLDDGSWVVELRAPDGPLLDGRPGERLALAGDASLTLLAPAVPGTARLWRATASIEVRALLAAAGRPIRYGYVPRAWPLSDYQTVFAREPGSAEMPSAARPFTPELVTGLVTDGVLFAPLLLHTGVSSPEAAEPPQAERYRVPPTTAALVSWVRERGGRVVAVGTTAARALESAASAGRVRAAEGWTELVLGPDRPARVVDGIVTGLHAPEASHLLLLEAVAGAEVVQKAYEAAVEERYLWHEFGDVSLLLRR

SEQ ID NO: 63288 - protein, 335 aa, Amycolatopsis mediterranei; identical to SEQ ID NO: 63287
  misc_feature (1)..(335): tr|A0A0H3CXJ5|A0A0H3CXJ5_AMYMU S-adenosylmethionine:tRN A ribosyltransferase-isomerase OS=Amycolatopsis mediter ranei (strain U-32) OX=749927 GN=AMED_1539 PE=3 SV=1

SEQ ID NO: 63289 - protein, 338 aa, Amycolatopsis methanolica
  misc_feature (1)..(338): tr|A0A076MY55|A0A076MY55_AMYME S-adenosylmethionine:tRN A ribosyltransferase-isomerase OS=Amycolatopsis methano lica 239 OX=1068978 GN=AMETH_3839 PE=3 SV=1
MTIPFTLPPDSEATAPPEHRGVPRDAVRLLVARPGRIEHHRFRDLPDLVEPGDLVVVNTSATVPAALDAVRGNGNPAPVHLSTTLDDGGWVVEVRLADGSGPDLSVHPGERMRLPDGVTLTLVEPFTSARLWRAAVTPEVPVRDYLARHGRPIGYGYLAGRFPLRDYQNVYASEPGSAEMASAGRPFTAPLLVRLIARGVVVAPIVLHAGVSSPELYEPPAAERFTVPKATARLVELTRAAGRRVIAVGTTVVRALESATEPGGTMHAATGWTELVLGPARPPRVVTGLVTGLHAPEASHLGLLAAVAGRPLVTAAYDAALEHHYLWHEFGDSTLFLP

SEQ ID NO: 63290 - protein, 341 aa, Amycolatopsis niigatensis
  misc_feature (1)..(341): tr|A0A2N3WBV6|A0A2N3WBV6_9PSEU S-adenosylmethionine:tRN A ribosyltransferase-isomerase OS=Amycolatopsis niigate nsis OX=369932 GN=ATK30_2129 PE=3 SV=1
MTAPRTRFDLAEDRSASAPPEARGLARDEVRLLAAGPEGVRHAVFRDLAAFLDPGDLLVINTSGTLPAAVDAVRDDHVIAVHFSTELDDGTWVVELRAPDGPLLDGHAGERLSLPAGAVVTLREPHVAGAQRLWRAKIEVEGEVPRYLAKVGRPIRYGYVPRAWPLPNYQTVFALDPGSAEMPSAARPFTAELVTQLVSRGVLFAPILLHTGVSSPEAGEPPYGERFRVPATTAALVNWVRDQGGRVIAVGTTAVRAIESAANPGGLVTAAAGWTELVLGPDRPARAVDGLLTGLHAPQASHLLLLEAVVGPELVQRAYDAAVRREYLWHEFGDVSLLTSR

SEQ ID NO: 63291 - protein, 332 aa, Amycolatopsis pretoriensis
  misc_feature (1)..(332): tr|A0A1H5RET8|A0A1H5RET8_9PSEU S-adenosylmethionine:tRN A ribosyltransferase-isomerase OS=Amycolatopsis pretori ensis OX=218821 GN=SAMN05421837_11222 PE=3 SV=1
MNIRFDLPAELSASAPPEARGVARDGVRLLVASPAGVHHSVFSSLGSFLSAGDLLVVNTSGTLPAAVDAVRDGRPIAVHFSTALDDGSWIVELRAPGGPLLDGRAGELVSLPGGASLTLQAPFAPGSRRLWRATVSVPVQGFLASAGRPIRYGYVPGEWPLSDYQTVFAREPGSAEMPSAARPFTASLVTRLVSDGVLFAPLVLHTGVSSPEAGEPPQAERYRVPPTTAALVSWVRSQGGRVIAVGTTAARALESAAQLGTASGWTNLVLGPERPARVVDGIVTGLHAPDASHLLLLEAVAGRELVQRAYDAAVERKYLWHEFGDVSLLLRR

SEQ ID NO: 63292 - protein, 335 aa, Amycolatopsis rifamycinica
  misc_feature (1)..(335): tr|A0A066TZE6|A0A066TZE6_9PSEU S-adenosylmethionine:tRN A ribosyltransferase-isomerase OS=Amycolatopsis rifamyc inica OX=287986 GN=DV20_21465 PE=3 SV=1
MNVRFDLPPELSASAPPEARGLSRDEVRLLVASPSGVHHTAFGSLGDHLRPGDLLVVNTSGTLPAAVDARRAGHPIVVHFATALDDGSWIVELRAPGGPLLDGRPGERLSLAAGASLTLLAPATPGAARLWRAEVPVDVPGFLAAHGRPIRYGYVPRAWPLADYQTVFAREPGSAEMPSAARPFTPELVTRLVTDGVLVAPLVLHTGVSSPEAAEPPQAERFRVPATTAALVSWARTRGGRVIAVGTTAARALESSAPDGEVRAAEGWTELVLGPDRPARVVDGIVTGLHAPEASHLLLLEAVAGAPVVQRAYEAAVAERYLWHEFGDVSLLLRH

SEQ ID NO: 63293 - protein, 341 aa, Amycolatopsis rubida
  misc_feature (1)..(341): tr|A0A1I5N6K0|A0A1I5N6K0_9PSEU S-adenosylmethionine:tRN A ribosyltransferase-isomerase OS=Amycolatopsis rubida OX=112413 GN=SAMN05421854_104277 PE=3 SV=1
MTAPRTRFDLAEDRSASAPPEARGLARDEVRLLAAGPEGVRHAAFRELAAFLHPGDLVVINTSGTLPAAVDAIRDDYVITIHFSTELDDGTWVVELRAPGGPLLDGRVGERLRLPAGAVVTLREPHVADAQRLWRAKIEVEGEVPRYLAKVGRPIRYGYVPRAWPLPNYQTVFALDPGSAEMPSAARPFTAELVTQLVSRGVLFAPILLHTGVSSPEAGEPPYGERFRVPATTAALVNWVRDQGGRVIAVGTTAVRAIESAANPGGLVTAAAGWTELVLGPDRPARAVDGLLTGLHAPEASHLLLLEAVVGPELVQRAYDAAVRREYLWHEFGDVSLLASR

SEQ ID NO: 63294 - protein, 341 aa, Amycolatopsis sp.
  misc_feature (1)..(341): tr|A0A178WSN4|A0A178WSN4_9PSEU S-adenosylmethionine:tRN A ribosyltransferase-isomerase OS=Amycolatopsis sp. M39 OX=1825094 GN=queA PE=3 SV=1
MTAPRTRFDLAEDRSASAPPEARGLARDEVRLLAAGPEGVRHAAFRELAAFLHPGDLVVINTSGTLPAAVDAIRDDYVITIHFSTELDDGTWVVELRAPGGPLLDGRVGERLRLPAGAVVTLREPHVAGAQRLWRAKIEVEGEVPRYLAKVGRPIRYGYVPRAWPLPNYQTVFALDPGSAEMPSAARPFTAELVTQLVSRGVLFAPILLHTGVSSPEAGEPPYGERFRVPATTAALVNWVRDQGGRVIAVGTTAVRAIESAANPGGLVTAAAGWTELVLGPDRPAHAVDGLLTGLHAPEASHLLLLEAVVGPELVQRAYDAAVRREYLWHEFGDVSLLASR

SEQ ID NO: 63295 - protein, 334 aa, Amycolatopsis sp.
  misc_feature (1)..(334): tr|A0A427TNT7|A0A427TNT7_9PSEU S-adenosylmethionine:tRN A ribosyltransferase-isomerase OS=Amycolatopsis sp. GLM -1 OX=2267691 GN=EIY87_00865 PE=3 SV=1
MNIRFDLPAELSASAPPEARGLARDEVRLLVASPSGVHHTVFSALGAHLRPGDLLVVNTSGTLPAAVDAVRSGRPVVVHFASPLDDGGWVVELRAPGGPLLDGRPGEVLELPGGASLTLRSPVTERLWRASVAVEGPVPGFLATAGRPIRYGYVPRAWPLSDYQTVFAREPGSAEMPSAARPFTTELVTRLVTDGVLFAPLLLHTGVSSPEADEPPQPERFRVPATTAALVSWVRSRGGRVIAVGTTAARALESAFAGGEVRAAEGWTDLVLGPDHPARVVDGIVTGLHAPEASHLLLLEAVAGRDRVQRAYDAAVERRYLWHEFGDVSLLLRR

SEQ ID NO: 63296 - protein, 335 aa, Amycolatopsis tolypomycina
  misc_feature (1)..(335): tr|A0A1H4P382|A0A1H4P382_9PSEU S-adenosylmethionine:tRN A ribosyltransferase-isomerase OS=Amycolatopsis tolypom ycina OX=208445 GN=SAMN04489727_2257 PE=3 SV=1
MNVHFDLPPELSASAPPEARGLSRDEVRLLVASPSGVHHTAFGSLGDHLRPGDVLVVNTSGTLPAAVDARRAGRPIAVHFATALDDGSWVVELRAPGGPLLDGRPGERVALPEDASLTLLAPAVPGAARLWRASVSVPVPSLLAAAGRPIRYGYVPRSWPLADYQTVFAREPGSAEMPSAARPFTPELVTRLVTDGVVIAPLLLHTGVSSPEAGEPPQAERFRVPATTAALVSWVRGRGGRVIAVGTTAARALESAASGGEVRAAEGWTNLVLGPDRPARVVDGIVTGLHAPEASHLLLLEAVAGAEVVRQAYAAAVAERYLWHEFGDVSLLLRH

SEQ ID NO: 63297 - protein, 111 aa, Amycolatopsis vancoresmycina
  misc_feature (1)..(111): tr|R1H4K7|R1H4K7_9PSEU S-adenosylmethionine:tRNA ribosy ltransferase-isomerase (Fragment) OS=Amycolatopsis vanc oresmycina DSM 44592 OX=1292037 GN=H480_43055 PE=3 SV=1
MSMNVRFDLPPDLSASAPPEARGLARDGVRLLVASPESVHHTVFSALGEHLRPGDLLVVNTSGTLPAAVDARRDGRPVVVHFSTPLDDGSWVVELRAPGGPLLDDPGTVVE

SEQ ID NO: 63298 - protein, 327 aa, Amycolatopsis xylanica
  misc_feature (1)..(327): tr|A0A1H3NB36|A0A1H3NB36_9PSEU S-adenosylmethionine:tRN A ribosyltransferase-isomerase OS=Amycolatopsis xylanic a OX=589385 GN=SAMN05421504_107215 PE=3 SV=1
MTIRFELPSELNASAPPEARGLARDEVRLLVADTQGVEHTTFTDLDRFLKAGDLLVVNTSATLPAAVDTTTPGIVAHFSTELDERTWVVELRTPDGPYLKAHQGDRFGLPAGAELVLTERHGRLWHAEFAVEGRVTAFLARVGRPISYGYVPRRWPIENYQTVFGRDPGSAEMPSAGRPFTAELVTKLVSRGVLFAPILLHTGVSSLESHEPPQDEWFRVPATTARLADWVRGEGGRVIAVGTTVVRALESAAPGGSEGWTGLVLGPDRPATVVDGLVTGLHAPNASHLLLLEAVAGASVVEKAYREALEHRYLWHEFGDVSLLLNQ

SEQ ID NO: 63299 - protein, 352 aa, Amylibacter cionae
  misc_feature (1)..(352): tr|A0A2N5IF23|A0A2N5IF23_9RHOB S-adenosylmethionine:tRN A ribosyltransferase-isomerase OS=Amylibacter cionae OX =2035344 GN=queA PE=3 SV=1
MKLSDFDFDLPESLIALRPAKPRPSSRLLLAEGTALSDHHFYDLPKFLRRGDRLVLNDTKVIPARLNGKRRRMSDQGETFAAVEVTLLSLDGQGDWMALAKPGRRVRVGEEIAFSPELSATVLDKSADGLRLRFSLSGPAFDAQLAALGAMPLPPYIAAKRAADAQDAQDYQTVFAQNSGAVAAPTASLHFDQGILDALADTGVTFTKVTLHVGAGTFLPVKVDDVSDHKMHAEWGRVDEQAAAEIAQTKAQGGRVIPVGTTALRLIETAARDTGEIAPWVGETDIFIKPGFEFAVTDGLITNFHLPKSTLMMLVSALMGVDTIKSVYAHAIAEKYRFFSYGDSSLLLPERR

SEQ ID NO: 63300 - protein, 348 aa, Amylibacter kogurei
  misc_feature (1)..(348): tr|A0A2G5K5I9|A0A2G5K5I9_9RHOB S-adenosylmethionine:tRN A ribosyltransferase-isomerase OS=Amylibacter kogurei O X=1889778 GN=queA PE=3 SV=1
MKLSDFDFELPEELIALRPAKPRSASRMLVAQSNDIKHQTFADLAQFLRPNDRLVLNNTKVIPARLNGQRRRISDNGETFAGLEITLLSMDTNGHWLTLAKPAKRANIGEQIIFADGFWAMVISKSEQGMVLEFNQSGNAFDQQLAANGFMPLPPYIASKRPADEQDMSDYQTVFAKTMGAVAAPTASLHFETDQLDKLREMGVNTSEVTLHVGAGTFLPVKVDDITDHKMHSEWGEVSATAAAEIAQTHASGGRVIPVGTTALRLIETAARGGEIKPWVGDTDIFITPGFEFHATDALITNFHLPKSTLLMLVSALMGMDRMKEIYQTAIAQNYRFFSYGDASLLVP

SEQ ID NO: 63301 - protein, 372 aa, Anabaena cylindrica
  misc_feature (1)..(372): tr|K9ZQH6|K9ZQH6_ANACC S-adenosylmethionine:tRNA ribosy ltransferase-isomerase OS=Anabaena cylindrica (strain A TCC 27899 / PCC 7122) OX=272123 GN=queA PE=3 SV=1
MSDLEIQDINLDRSLSGYDYELPTELIAQNPAVPRDSSRLLVVNSPNAGREMLALNHIFRDLPELLQPGDLLVMNNTKVMPARLYGRKSTGAKVEVLLLEERQHNCWLALVKPGKHFKVGTQIVFDGNKLSVNTGLTATVLETDAATGGRLLQFDLPEHISLVQVLEDFGEIPLPPYITASTAADEQYQTVYAQEQGAIAAPTAGLHFTPELLQKLSDRSINQAFVTLHVGVGTFRPVEVDDVTTHQMHEEWIEVSAATVEQIRATQAAGGRIIAVGTTVVRALEGAAQFGDLQPYVGKVNLFIYPGFQWRVVEGLITNFHLPRSSLLMLVSALIGRKRLLKIYQQAIASQYRFYSFGDAMLILPDGVMSMN

SEQ ID NO: 63302 - protein, 380 aa, Anabaena sp.
  misc_feature (1)..(380): tr|A0A1B7VHA1|A0A1B7VHA1_9NOST S-adenosylmethionine:tRN A ribosyltransferase-isomerase OS=Anabaena sp. WA113 OX =1710889 GN=queA PE=3 SV=1
MKQQILQNQTQLEAANDINLDCLLSSYDYELPPELIAQNPAVPRDSSKLLVVNSAETGKTIPPLHHIFRDLSELLKPGDLLVMNNTKVIPARLYGCRSTGAEVEVLLLEERRHNCWLALVKPGKRFKVGSEIIFTAVDDGEQQELRATVVESDPGTGGRLLQFDLPPEVPLVQVLGKFGQIPLPPYITASTAADEQYQTVYAQEQGAIAAPTAGLHFTPSLLEKLRNYGINQAFITLHVGIGTFRPVEVKDVTTHVMHKEWIEVSSDTVEQVLATRAAGGRIIAVGTTAVRALEGAAQLGALQPFVGQTNLFIYPGYKWQVVEGLITNFHLPRSSLLMLVSALIGRKRLLDLYEQAIAAQYRFYSFGDAMLILPEGKNIQ

SEQ ID NO: 63303 - protein, 376 aa, Anabaena sp.
  misc_feature (1)..(376): tr|A0A1B7V246|A0A1B7V246_9NOST S-adenosylmethionine:tRN A ribosyltransferase-isomerase OS=Anabaena sp. AL09 OX= 1710891 GN=queA PE=3 SV=1
MKQKILQAESQDINLDCSLSGYEYELPPGRIAQNPAVPRDSSKLLVVNSPETAKTIPPLHHIFRNLPELLKPGDLLVMNNTKVIPARLYGYTSTSGSVEVLLVEERRHNCWLALVKPGKQFKIGNEIIFTSGEQGNKQTLKATVVESDSETGGRLLQFELPEQVPLLQVLGTFGQIPLPPYITASTAADEQYQTVYAAEEGAIAAPTAGLHFTPELLEKLRSCGINQAFITLHVGIGTFRPVEVKDVTTHAMHEEWIEVPADTVEQIRATQAAGGRIIAVGTTAVRALEGAAQLGDLQPFVGKTNLFIYPGYKWQVVEGLITNFHLPRSSLLMLVSALIGRERLLDLYQEAITSEYRFYSFGDAMLILPEGKSIKL

SEQ ID NO: 63304 - protein, 388 aa, Anabaenopsis circularis
  misc_feature (1)..(388): tr|A0A1Z4GKJ4|A0A1Z4GKJ4_9CYAN S-adenosylmethionine:tRN A ribosyltransferase-isomerase OS=Anabaenopsis circular is NIES-21 OX=1085406 GN=queA PE=3 SV=1
MEPAITQGNFNKVTATGVEEVNLDCSLIGYDYVLPPELIAQNPAVPRDSSRLLVVNSAATGRDSAPLHHIFRDLPELLRPGDLLVMNNTRVIPARLYGNKSTGAEIEVLLLEERQHNCWLALVKPGKRFKSGSQIIFSGKGLENDSSTPQLTATVLETDAATGGRLLQFDVPPGKSLVELLDKFGEIPLPPYITTSAAADEQYQTVYAEQPGAIAAPTAGLHFTPELLEKLRDRNIHQAFVTLHVGVGTFRPVEVEDVTTHAMHEEWIEVPAATVEQIRATKAAGGRIIAVGTTVVRSLEGAAQSGELQPFCGKTNLFIYPGYQWRVVEGLITNFHLPRSSLLMLVSALIGRQRLLKIYQEAIASRYRFYSFGDAMLILPEGREKCEV

SEQ ID NO: 63305 - protein, 347 aa, Anaerobacillus alkalidiazotrophicus
  misc_feature (1)..(347): tr|A0A1S2MBJ9|A0A1S2MBJ9_9BACI S-adenosylmethionine:tRN A ribosyltransferase-isomerase OS=Anaerobacillus alkali diazotrophicus OX=472963 GN=queA PE=3 SV=1
MEVKDFDFYLPEELIAQTPLLERTSSRLMVLDRSSGDIHHRIFSDVIDYLSEGDCLVLNDTRVLPARLYGTKEDTGANIEFLLLKQMEKNQWETLVKPAKRVRKGTIVTFGDGRLRGICKEELEHGGRIIEFQYEGIFHEILDSLGEMPLPPYITEKLEDRERYQTVYAKHRGSAAAPTAGLHFTEELLDKIASKGVEIVYITLHVGLGTFRPVSVDTIEDHEMHAEFYQMSCEAAETLNKAKKNGNKIVSVGTTSTRTLETIAQANGGKFTESSGWTNIFIYPGYKFKGINALITNFHLPKSTLIMLVSALAGTDHTLHAYKEAVKERYRFFSFGDAMLIIEGSKN

SEQ ID NO: 63306 - protein, 347 aa, Anaerobacillus alkalilacustris
  misc_feature (1)..(347): tr|A0A1S2LWP0|A0A1S2LWP0_9BACI S-adenosylmethionine:tRN A ribosyltransferase-isomerase OS=Anaerobacillus alkali lacustris OX=393763 GN=queA PE=3 SV=1
MEVKDFDFYLPEELIAQTPLLERTSSRLMVLDRSSGDIHHRIFSDVIDYLSEGDCLVLNDTRVLPARLYGTKEDTGANIEFLLLKQMEKNQWETLVKPAKRVRKGTIVTFGDGRLRGICKEELDHGGRIIEFQYEGIFHEILDSLGEMPLPPYITEKLEDRERYQTVYAKHRGSAAAPTAGLHFTEELLDKIASKGVEIVYITLHVGLGTFRPVSVDTIEDHEMHAEFYQMSREAAETLNKAKKNGNKIVSVGTTSTRTLETIAQANGGKFIESSGWTNIFIYPGYKFKGINALITNFHLPKSTLIMLVSALAGTEHTLHAYKEAVKERYRFFSFGDAMLIIEGSKN

SEQ ID NO: 63307 - protein, 347 aa, Anaerobacillus arseniciselenatis
  misc_feature (1)..(347): tr|A0A1S2L5G1|A0A1S2L5G1_9BACI S-adenosylmethionine:tRN A ribosyltransferase-isomerase OS=Anaerobacillus arseni ciselenatis OX=85682 GN=queA PE=3 SV=1
MEVKDFDFYLPEELIAQTPLMDRTASRLMVLDPKTGEIKHRKFYDVIDFLNEGDCLVLNDTRVLPARLYGTKEDTGANIEFLLLKQVQGDQWETLVKPAKKVKKGTVVTFGDGRLKGICKGELDHGGRIIEFQYDGIFHEILDAFGEMPLPPYITEQLEDQDRYQTVFAKHRGSAAAPTAGLHFTEELLEEIKAKGVQIVYITLHVGLGTFRPVSVDSIEEHEMHAEFYQMTSETAEILNETRRNGQKIITVGTTSTRTLETIAQENDGVFRESSGWTSIFIYPGYQYRGIDGLITNFHLPKSTLIMLVSALASREHTLNAYREAVKNKYRFFSFGDAMLIMEGSNK

SEQ ID NO: 63308 - protein, 342 aa, Anaerobacillus isosaccharinicus
  misc_feature (1)..(342): tr|A0A1S2KU10|A0A1S2KU10_9BACI S-adenosylmethionine:tRN A ribosyltransferase-isomerase OS=Anaerobacillus isosac charinicus OX=1532552 GN=queA PE=3 SV=1
MEVKDFDFYLPEELIAQTPLKDRTASRLLVLDSKTGGINHRIFSDVIDFLTEGDCLVLNDTRVLPARLYGTKEDTGANIEFLLLKQNENDEWETLVKPAKRVRKGTVVSFGDGRLKGICKEELDHGGRIMEFQYEGIFHEILESLGEMPLPPYITEQLEDKERYQTVFAKHRGSAAAPTAGLHFTVALLEAMKAKGIHIVYITLHVGLGTFRPVSVDDIKEHQMHAEFYQMTEETAETLNSVKKSGKKIVTVGTTSTRTLETIAHANDGVFKESSGWTSIFIYPGFEFKAINGLITNFHLPKSTLIMLVSALAGREHTLHAYEEAVKERYRFFSFGDAMLIL

SEQ ID NO: 63309 - protein, 348 aa, Anaerobacillus macyae
  misc_feature (1)..(348): tr|A0A0J6CX33|A0A0J6CX33_9BACI S-adenosylmethionine:tRN A ribosyltransferase-isomerase OS=Anaerobacillus macyae OX=157733 GN=queA PE=3 SV=1
MNVNDFDFELPERLIAQVPLKERTKSRLMVLDPAVQKLEHREFSNLEDYIKPGDCLVLNDTRVMPARLYGTKEETGAKIEVLLLKQIENDSWETLVKPAKRVKPGTEISFGDGRLTAVCTESLEHGGRVLEFKYDGVFYEVLDQLGEMPLPPYITETLDDQERYQTVFAKNRGSAAAPTAGLHFTEEMLERLENKGVHVAFITLHVGLGTFRPVSVDNILEHEMHGEFYQLTKGTAELLNRVKEEGGRIISVGTTSTRTLETVASSYNGRFEEASGWTDIFIYPGYTFKAIDGLITNFHLPQSTLIMLVSALAGREFIISAYRTAVEEEYRFFSFGDAMLILEGSTKE

SEQ ID NO: 63310 - protein, 341 aa, Anaerobacterium chartisolvens
  misc_feature (1)..(341): tr|A0A369AXE8|A0A369AXE8_9FIRM S-adenosylmethionine:tRN A ribosyltransferase-isomerase OS=Anaerobacterium chart isolvens OX=1297424 GN=queA PE=3 SV=1
MNIKEFDYCLPPELIAQEPLEERSLSRLMVLDKQTGELWHKSFTDIVHYLNKGDCLVLNNTRVIPARLLGQKEDTGAKIEFVLLKRLNGDVWEVILKPGKRARAGSRFVFGDGLLKAEIIEVIEGGNRLVRFEYEGVFEKILDSVGVMPLPPYITKKLEHPERYQTIYSEHRGSAAAPTAGLHFTGELLEEIQNKGIGIAYVTLHIGLGTFRPVKCENILEHKMHSEFYTISQEACDKINASKSLGNRVVAVGTTSCRVLETASGDDGTLFPGTGWTDIFIYPGYKFKAVDSLITNFHLPESTLIMLVSALAGRENTLAAYGKAVELGYRFFSFGDAMLIK

SEQ ID NO: 63311 - protein, 368 aa, Anaerobiospirillum thomasii
  misc_feature (1)..(368): tr|A0A2X0VG92|A0A2X0VG92_9GAMM S-adenosylmethionine:tRN A ribosyltransferase-isomerase OS=Anaerobiospirillum th omasii OX=179995 GN=queA PE=3 SV=1
MRGFILLRSDFNFDLPMELIANYPSEQRTMCKMLCLDGNSGQMEDRTFIDLKEYLRPGDLLVFNDTRVIPARLFGSKESGGKIEILIERITSPASALAHIRASKAPKAGAVLFIDGSDTRLEVTGRDGALFLIQTQDGSELLDLLEAAGHMPLPPYIEREDEKEDRERYQTVYSKVPGAVAAPTAGLHFDNEQIEDLKAMGVKTAFVTLHVGAGTFQPVREDDILKHHMHKEYVSLPSDVANAVIETHRQGNRVVAVGTTAVRSLESAAQHAIQIGSDDEIVPFFDDTSIFIYPGYKYQVVDCLITNFHLPESTLIMLVSAFAGYANTMRAYEHAIDERYRFFSYGDCMFIQKRTADTDDLPPSAIKE

SEQ ID NO: 63312 - protein, 341 aa, Anaerobium acetethylicum
  misc_feature (1)..(341): tr|A0A1D3TP07|A0A1D3TP07_9FIRM S-adenosylmethionine:tRN A ribosyltransferase-isomerase OS=Anaerobium acetethyli cum OX=1619234 GN=queA PE=3 SV=1
MNVKDFDFYLPLELIAQDPLEDRSSSRLLTLDKKTGEVEHHVFTDIIDYLNPGDCLVVNDTKVIPARLIGSKIGTEAKIEVLLLKRMENDIWECLVKPGKKARPGAEISFGDGLLTGTVMDVVEEGNRLIQFSYDGIFEEILDRLGQMPLPPYITHQLQDKNRYQTVYAKHEGSAAAPTAGLHFTPELMKKIEEKGVEIAYVTLHVGLGTFRPVKVDNILDHHMHSEFFSVEEAEAEKINKAKDQGRRVIGVGTTSCRTLESAAGQDNRLRAGSGWTEIFIYPGYEFKIIDGLVTNFHLPESTLLMLISALAGRENVMEAYKMAVAEKYRFFSFGDAMFIH

SEQ ID NO: 63313 - protein, 153 aa, Anaerobranca californiensis
  misc_feature (1)..(153): tr|A0A1M6LP83|A0A1M6LP83_9FIRM S-adenosylmethionine:tRN A ribosyltransferase-isomerase OS=Anaerobranca californ iensis DSM 14826 OX=1120989 GN=SAMN02745227_00593 PE=3 SV=1
MDKIREKGIQTAFVTLHVGLGTFRPVQVDNILEHKMHSEFYSLPQETVEAIEKCKKNNGRVIAVGTTVVRTLETVGSTESKLKAKSGWTDIFIYPGYNFKVVDGLFTNFHLPKSTLIMLVSAFAGRETTLWAYEQAVKEQYRFFSFGDSMLII

SEQ ID NO: 63314 - protein, 137 aa, Anaerobranca californiensis
  misc_feature (1)..(137): tr|A0A1M6LPG0|A0A1M6LPG0_9FIRM S-adenosylmethionine:tRN A ribosyltransferase-isomerase OS=Anaerobranca californ iensis DSM 14826 OX=1120989 GN=SAMN02745227_00594 PE=3 SV=1
MELKDFDFYLPEHLIAQQPTKRRDESRLLVLYKKEKKIEHKRFYQCIDYLNPEDLLIFNDTKVLPARLFGQKESGAKVEVMLLNEVASGKWECLAKPGKKLKAGSKVIFPLGLEGIVEEDTDFGGKKFNLINIVESF

SEQ ID NO: 63315 - protein, 340 aa, Anaerobranca gottschalkii
  misc_feature (1)..(340): tr|A0A1I0BIN8|A0A1I0BIN8_9FIRM S-adenosylmethionine:tRN A ribosyltransferase-isomerase OS=Anaerobranca gottscha lkii DSM 13577 OX=1120990 GN=queA PE=3 SV=1
MELKDFDFYLPEHLIAQQPTKKRDESRLLVLYKKEKKIEHKKFFQCIDYLNPEDLLIFNDTKVLPARLFGQKESGAKVEVMLLNEVGQGKWECLAKPGKKLKVGSKVVFPLGLEGVVEGDTDFGGKRIQFNKHSGEFLETIDKIGELPLPPYIKEKPEDYNRYQTVYAKKEGAVAAPTAGLHFTEELLNKIREKGIQTAFVTLHVGLGTFRPVQVDNILEHKMHSEFYSLPQETVEAIERCKKNNGRVIAVGTTVVRTLETVGSTEEKLKAKSGWTDIFIYPGYNFKVVDGLFTNFHLPKSTLIMLVSAFAGRETTLWAYEQAVKEGYRFFSFGDSMLII

SEQ ID NO: 63316 - protein, 341 aa, Anaerobutyricum hallii
  misc_feature (1)..(341): tr|A0A414B5E5|A0A414B5E5_9FIRM S-adenosylmethionine:tRN A ribosyltransferase-isomerase OS=Anaerobutyricum halli i OX=39488 GN=queA PE=3 SV=1
MKTSDFNFDLPQELIAQDPLEDRSSSRLMVLNKENGEITHRIFHDITEYLHPGDCLVINDTKVIPARLIGTKEDTGAHIEILLLKRKENDVWETLVKPGKKCRPGARVVFGNGELKAEIVDVLEDGNRLVHFEYEGIFEEVLDRLGQMPLPPYITHKLQDKNRYQTVYAKYEGSAAAPTAGLHFTKELLKQIEDMGVNIARVTLHVGLGTFRPVKVENVLEHHMHSEYYNVTETAAKMINDTKKNGGRIIAVGTTSTRTLESVADENGIIHPGCGNTEIFIYPGYKFKAIDCLITNFHLPESTLLMLVSALAGKEHIMAAYEEAVKEKYRFFSFGDAMFIE

SEQ ID NO: 63317 - protein, 341 aa, Anaerobutyricum hallii
  misc_feature (1)..(341): tr|A0A413PYT5|A0A413PYT5_9FIRM S-adenosylmethionine:tRN A ribosyltransferase-isomerase OS=Anaerobutyricum halli i OX=39488 GN=queA PE=3 SV=1
MKTSDFNFDLPQELIAQDPLEDRSSSRLMVLNKESGEIAHRIFHDITEYLHPGDCLVINDTKVIPARLIGTKEDTGAHIEILLLKRKENDVWETLVKPGKKCRPGARVVFGNGELKAEIVDVLEDGNRLVHFEYEGIFEEVLDRLGQMPLPPYITHKLQDKNRYQTVYAKYEGSAAAPTAGLHFTKELLKQIEDMGVNIARVTLHVGLGTFRPVKVENVLEHHMHSEYYNVTETAAKMINDTKKNGGRIIAVGTTSTRTLESVADENGIIHPGCGNTEIFIYPGYKFKAIDCLITNFHLPESTLLMLVSALAGKEHIMAAYEEAVKERYRFFSFGDAMFIQ

SEQ ID NO: 63318 - protein, 340 aa, Anaerococcus hydrogenalis
  misc_feature (1)..(340): tr|A0A133M765|A0A133M765_9FIRM S-adenosylmethionine:tRN A ribosyltransferase-isomerase OS=Anaerococcus hydrogen alis OX=33029 GN=queA PE=3 SV=1
MRTEDFDYYLPEELIAQHPADKRDFSRLMVVDRKTGQREDKHFYDIIDYLNEGDLLVMNDTRVIPARLFGHREGKEEEIEVFLLENIEKDKWEVLVRPGKKMKIGTKCIFSDELCLEVVDIKEDGNRIVEFSYEGIFQEILDRLGNMPLPPYIKEKLKDKERYQTVYSKNPGSVAAPTAGLHFTKELLKKIEKKGVKLAYITLNVGLGTFRPVKVDDVKNHKMHSEFYQISKETADLINETKKNNKRIISTGTTTTRTLESVYKKNGEIKEDSGWTDIFIYPGFEFNVIDCQITNFHLPKSTLIMLVSALASKEIILDAYKDAVEKKYRFFSFGDAMFLK

SEQ ID NO: 63319 - protein, 340 aa, Anaerococcus hydrogenalis
  misc_feature (1)..(340): tr|B6W864|B6W864_9FIRM S-adenosylmethionine:tRNA ribosy ltransferase-isomerase OS=Anaerococcus hydrogenalis DSM 7454 OX=561177 GN=queA PE=3 SV=1
MRTEDFDYNLPEELIAQHPADKRDFSRLMVVDRKTGQREDKHFYDIIDYLNEGDLLVMNDTRVIPARLFGHRPEKEEKIEVFLLENIEKDKWEVLVKPGKKMKIGTKCIFSDELSLEVVDIKEDGNRVVEFSYEGIFQEILDRLGNMPLPPYIKEKLKDKERYQTVYSKNPGSVAAPTAGLHFTKELLKKIEDKGVKLAFITLNVGLGTFRPVKVDDVKNHKMHSEYYQISKESADLINETKKNNKRIISTGTTTTRTLESVFKKNGQIKEDSGWTDIFIYPGFKFNVIDCQITNFHLPKSTLIMLVSALANKEIILDAYKDAVEKKYRFFSFGDAMFLK

SEQ ID NO: 63320 - protein, 340 aa, Anaerococcus lactolyticus
  misc_feature (1)..(340): tr|C2BDC7|C2BDC7_9FIRM S-adenosylmethionine:tRNA ribosy ltransferase-isomerase OS=Anaerococcus lactolyticus ATC C 51172 OX=525254 GN=queA PE=3 SV=1
MRTSEFDYYLPEELIAQHPTSKRDEARMMVLDRKSGEREDKYFFEIIDYLKAGDVLVMNDTRVIPARLFGHRPEKEEKIEVFLLNNTEGAKWEVLVRPGKKMKIGTEVIFSDDLSCKVVDVKDDGNRIVEFYYEGIFNEILDRLGNMPLPPYIKEKLKDNEDYQTVYSKNPGSVAAPTAGLHFTKELLEKIEEKGVKLAYLTLNVGLGTFRPVNEDEITNHKMHSEFYTLSEETSKILNEAKSEGRRIIAVGTTSIRTLESVYKKNNKICADSGWTDIFIYPGFEFKVVDAIITNFHLPKSTLIMLIAAFTSKDIILDAYKDAVNKKYRFFSFGDCMFIK

SEQ ID NO: 63321 - protein, 340 aa, Anaerococcus lactolyticus; identical to SEQ ID NO: 63320
  misc_feature (1)..(340): tr|A0A095WZS8|A0A095WZS8_9FIRM S-adenosylmethionine:tRN A ribosyltransferase-isomerase OS=Anaerococcus lactolyt icus S7-1-13 OX=1284686 GN=queA PE=3 SV=1

SEQ ID NO: 63322 - protein, 340 aa, Anaerococcus nagyae
  misc_feature (1)..(340): tr|A0A3E2TIM1|A0A3E2TIM1_9FIRM S-adenosylmethionine:tRN A ribosyltransferase-isomerase OS=Anaerococcus nagyae O X=1755241 GN=queA PE=3 SV=1
MKTDDFDYYLPEELIAQHPAEKRDHARLLVLDKETGETEDKYFYDIIDYLDPGDVLVMNDTRVIPARLFGHRESKEESIEVFLLTNIEGKTWECLVRPGKKMKIGTNVIFSEELSGEVKDIKEDGNRIIEFCYEGIFNELLDRLGNVPLPPYIKEELQEPEEYQTVYSKNPGSVAAPTAGLHFTQELLEEIESKGIKLAYLTLNVGLGTFRPVSVEDVTDHKMHSEFYTISKETADIINKAHKKGNKVIATGTTSIRTLESVYKKNGKIQGDSGWTDIFIYPGFKFEVVDAMITNFHLPKSTLVMLVSAFSSKDIILNAYEHAVNDKYRFFSFGDAMYIH

SEQ ID NO: 63323 - protein, 340 aa, Anaerococcus octavius
  misc_feature (1)..(340): tr|A0A2I1M9W1|A0A2I1M9W1_9FIRM S-adenosylmethionine:tRN A ribosyltransferase-isomerase OS=Anaerococcus octavius OX=54007 GN=queA PE=3 SV=1
MKTDDFDYYLPEELIAQHPAEKRDHARMLVLDRKTGQTEDKYFYDIIDYLNPGDVLVMNDTRVIPARLFGHREGKEESIEVFLLHNTKGKTWECLVRPGKKMKVGTKIIFSEELKAEVKDIKEDGNRIIEFFYEGIFNEILDRLGNVPLPPYIKEELDEPEEYQTVYSKNPGSVAAPTAGLHFTKELLEDIENKGIKLAYLTLNVGLGTFRPVSVEDVNDHKMHSEFYTISQETADIINEAHENGHRVIATGTTTIRTLESVYKKHGKVTEDSGWTDIFIYPGFEYKVIDAMITNFHLPKSTLVMLVAAFTSKDMILDTYKHAVDEKYRFFSFGDAMFIH

SEQ ID NO: 63324 - protein, 340 aa, Anaerococcus octavius
  misc_feature (1)..(340): tr|A0A380WTS0|A0A380WTS0_9FIRM S-adenosylmethionine:tRN A ribosyltransferase-isomerase OS=Anaerococcus octavius OX=54007 GN=queA PE=3 SV=1
MKTDDFDYYLPEELIAQHPAEKRDHARMLVLDRKTGQTEDKYFYDIIDYLNPGDVLVMNDTRVIPARLFGHREGKEESIEVFLLHNTKGKTWECLVRPGKKMKIGTKIIFSEELKAEVKDIKEDGNRIIEFFYEGIFNEILDRLGNVPLPPYIKEELDEPEEYQTVYSKNPGSVAAPTAGLHFTKELLEDIENKGIKLAYLTLNVGLGTFRPVSVEDVNDHKMHSEFYTISQETADIINEAHENGHRVIATGTTTIRTLESVYKKHGKVTEDSGWTDIFIYPGFEYKVIDAMITNFHLPKSTLVMLVAAFTSKDMILDTYKHAVDEKYRFFSFGDAMFIH

SEQ ID NO: 63325 - protein, 340 aa, Anaerococcus prevotii
  misc_feature (1)..(340): tr|C7RHH3|C7RHH3_ANAPD S-adenosylmethionine:tRNA ribosy ltransferase-isomerase OS=Anaerococcus prevotii (strain ATCC 9321 / DSM 20548 / JCM 6508 / PC1) OX=525919 GN=q ueA PE=3 SV=1
MRTEEFDYELPESLIAQHPSDKRDEARMMLLDKSTGDIEDKHFFDIIDYLKPGDVLVMNDTRVIPARLFGHREGKDESIEVFLLHNIKGKKWEVLVRPGKKMKIGVEVIFSDELKAKVIDIKEDGNRVVEFTYEGIFNEILDKLGNMPLPPYIKEKLKDPEEYQTVYSKNPGSVAAPTAGLHFTKELLKKIEEKGIKLAFLTLNVGLGTFRPVNEDDITDHKMHSEFYTISQETADIINQAKREGNRVIAVGTTSIRTLESVYKKCGKIQEDSGWTDIFIYPGFEYKVVDAIITNFHLPKSTLIMLVAAFTSKKIILNAYEYAVKEKYRFFSFGDCMFIC

SEQ ID NO: 63326 - protein, 345 aa, Anaerococcus prevotii
  misc_feature (1)..(345): tr|A0A449IA93|A0A449IA93_9FIRM S-adenosylmethionine:tRN A ribosyltransferase-isomerase OS=Anaerococcus prevotii OX=33034 GN=queA PE=3 SV=1
MKTSDFNYDLDESFIAQHPISPRDHAKLMLVSRNSKEIQHKIFYDILDELRPGDVLVVNDTRVRPARLYGHRKGKEEEIEVLLLKPLNAKVWECLVKPGKKMKLGTEIYFQDILKGTVVGITEDGSRHISFEIKGTEQDIEKVFEEIGQMPLPPYIKEKLDRQEEYQTVYSKYIGSAAAPTAGLHFTQDLLKKIGEKGVKIVPITLHVGLGTFRPVSVDNVENHHMHSELCLVSDQAAEEINKAKAEGRRVIAVGTTSMRTLESMAEDGKLTSGHKWTDIFIYPGFNFQIVDGLITNFHLPQSTLLMLVSAFSSKEIILHAYEEAKKNNYRFFSFGDAMFIRKDD

SEQ ID NO: 63327 - protein, 340 aa, Anaerococcus sp.
  misc_feature (1)..(340): tr|A0A1E9DBG6|A0A1E9DBG6_9FIRM S-adenosylmethionine:tRN A ribosyltransferase-isomerase OS=Anaerococcus sp. HMSC 068A02 OX=1739286 GN=queA PE=3 SV=1
MRTEDFDYNLPEELIAQHPADKRDFSRLMVVDRKTGKREDKHFYDIIDYLNEGDLLVMNDTRVIPARLFGHREGKEEEIEVFLLENIEDDKWEVLVRPGKKMKIGTKCIFSDELSLEVIDIKEDGNRVIEFFYNGIFQEILDRLGNMPLPPYIKEKLKDKERYQTVYSKNPGSVAAPTAGLHFTKELLKKIEEKGVKLAYITLNVGLGTFRPVKVDDVKNHKMHSEFYQISKETADLINETKKNNKRIISTGTTTTRTLESVYKKNGKIKEDSGWTDIFIYPGFEFNVIDCQITNFHLPKSTLIMLVSALASKEIILDAYKDAVDKKYRFFSFGDAMFLK

SEQ ID NO: 63328 - protein, 340 aa, Anaerococcus sp.
  misc_feature (1)..(340): tr|A0A1E8RBA0|A0A1E8RBA0_9FIRM S-adenosylmethionine:tRN A ribosyltransferase-isomerase OS=Anaerococcus sp. HMSC 065G05 OX=1739356 GN=queA PE=3 SV=1
MRTEDFDYNLPEELIAQHPADKRDFSRLMVVDRKTGKREDKHFYDIIDYLNEGDLLVMNDTRVIPARLFGHREGKEEEIEVFLLENIEDDKWEVLVRPGKKMKIGTKCIFSDELSLEVIDIKEDGNRIVEFFYNGIFQEILDRLGNMPLPPYIKEKLKDKERYQTVYSKNPGSVAAPTAGLHFTKELLKKIEEKGVKLAYITLNVGLGTFRPVKVDDVKNHKMHSEFYQISKETADLINETKKNNKRIISTGTTTTRTLESVYKKNGQIKEDSGWTDIFIYPGFEFNVIDCQITNFHLPKSTLIMLVSALASKEIILDAYKDAVDKKYRFFSFGDAMFLK

SEQ ID NO: 63329 - protein, 340 aa, Anaerococcus tetradius
  misc_feature (1)..(340): tr|A0A133KD59|A0A133KD59_9FIRM S-adenosylmethionine:tRN A ribosyltransferase-isomerase OS=Anaerococcus tetradiu s OX=33036 GN=queA PE=3 SV=1
MKTEDFDYYLPEKLIAQHPSDKRDGARMMVLDKKNGAIEDKYFYDIIDYLNPGDVLVMNDTRVIPARLFGHRKDKEESIEVFLLHNIEGKVWEVLVRPGKKMKIGAEVIFSEELSCKVIDIKEDGNRIVEFTYDGIFNEILDKLGNVPLPPYIKEKLKDPEEYQTVYSKNPGSVAAPTAGLHFTKELLKRIEDKGVKLAFLTLNVGLGTFRPVNEEDITDHKMHSEFYTLSKETASIINEGRKNGNKIIAVGTTSIRTLESVFKKCGEIREDSGWTDIFIYPGFEYKVVDSVITNFHLPKSTLIMLVAAFTSREIILNAYNYAVKEEYRFFSFGDCMFIH

SEQ ID NO: 63330 - protein, 340 aa, Anaerococcus tetradius; identical to SEQ ID NO: 63329
  misc_feature (1)..(340): tr|C2CFR1|C2CFR1_9FIRM S-adenosylmethionine:tRNA ribosy ltransferase-isomerase OS=Anaerococcus tetradius ATCC 3 5098 OX=525255 GN=queA PE=3 SV=1

SEQ ID NO: 63331 - protein, 340 aa, Anaerococcus vaginalis
  misc_feature (1)..(340): tr|C7HTY6|C7HTY6_9FIRM S-adenosylmethionine:tRNA ribosy ltransferase-isomerase OS=Anaerococcus vaginalis ATCC 5 1170 OX=655811 GN=queA PE=3 SV=1
MRTEDFDYNLPEELIAQHPADKRDFSRLMVVDRKTGQREDKHFYDIIDYLNEGDLLVMNDTRVIPARLFGHREEKEEEIEVFLLENIEDDKWEVLVRPGKKMKIGTKCIFSDELSLEVIDIKEDGNRVIEFFYDGIFQEILDRLGNMPLPPYIKEKLKDKERYQTVYSKNPGSVAAPTAGLHFTKELLKKIEEKGVKLAYITLNVGLGTFRPVKVDDVKNHKMHSEFYQISKETADLINETKKNNKRIISTGTTTTRTLESVYKKNGQIKEDSGWTDIFIYPGFEFNVIDCQITNFHLPKSTLIMLVSALASKEIILDAYKDAVDKKYRFFSFGDAMFLK

SEQ ID NO: 63332 - protein, 341 aa, Anaerocolumna aminovalerica
  misc_feature (1)..(341): tr|A0A1I5J0Z0|A0A1I5J0Z0_9FIRM S-adenosylmethionine:tRN A ribosyltransferase-isomerase OS=Anaerocolumna aminova lerica OX=1527 GN=queA PE=3 SV=1
MTKEDFNFYLPEELIAQDPLEDRSSSRLLVLDKETGELEHKVFKDIIDYLKEGDCLVINNTKVIPARLIGEREGSGAKVELLLLKRQENDVWETLVKPGKKAKTGDRISFGDGLLVGEIIKVVDEGNRLVKFYYEGIFEEILDKLGQMPLPPYITHQLKDKNRYQTVYAKHEGSAAAPTAGLHFTKELLEQIAAKEVTIANVTLHVGLGTFRPVKVENIKEHHMHSEFYHIEEEEAEKINNTKKNGGRIICVGTTSCRTVESAAGEDGMVKPGSGNTEIFIYPGYKFKVLDALITNFHLPESTLIMLVSALAGREHVLQAYDAAVKERYRFFSFGDAMLIV

SEQ ID NO: 63333 - protein, 362 aa, Anaerocolumna jejuensis
  misc_feature (1)..(362): tr|A0A1M6WL93|A0A1M6WL93_9FIRM S-adenosylmethionine:tRN A ribosyltransferase-isomerase OS=Anaerocolumna jejuens is DSM 15929 OX=1121322 GN=queA PE=3 SV=1
MKTQDFYYDLPEELIAQDPLEDRSSSRLMVLDKETGAVTHKIFRQITEYLKPGDCLVVNNTKVIPARLLGEKIHEDSQDKEKGVHGARIELLLLKRRENDIWETLVKPGKKARTGTRISFGNGLLTAEIIDQLEDGNRLVQFSYKGIFEEILDQLGEMPLPPYITHELADKNRYQTVYAKEEGSAAAPTAGLHFTKELLAEIEAMGIPIVNVTLHVGLGTFRPVKVENVLEHHMHTEFYQVSGEAAAVINDTRKKGGRVVCVGTTSCRTVESAADESGIVHPGSGDTSIFIYPGYKFKVLDALITNFHLPESTLMMLVSALAGRDNIMAAYEEAVKERYRFFSFGDAMLITTQNVANVSKNK

SEQ ID NO: 63334 - protein, 352 aa, Anaerocolumna xylanovorans
  misc_feature (1)..(352): tr|A0A1M7Y0F8|A0A1M7Y0F8_9FIRM S-adenosylmethionine:tRN A ribosyltransferase-isomerase OS=Anaerocolumna xylanov orans DSM 12503 OX=1121345 GN=queA PE=3 SV=1
MKTQDFNYDLPEELIAQDPLEDRSSSRLMVLDKKTGAVSHKVFKQITEYLRPGDCLVINNTKVIPARLLGEKIHEKEPQAGEREVHGARIELLLLKRRENDIWETLVKPGKKARTGTKISFGNGLLTGEIIDQLEDGNRLVQFSYKGIFEEILDQLGEMPLPPYITHELADKNRYQTVYAKEEGSAAAPTAGLHFTKELLAQIEAMGVPIVNVTLHVGLGTFRPVKVENVLEHHMHTEFYQVSAEAAAVINDTRKKGGRVVCVGTTSCRTVESAADENGVVHPGSGDTSIFIYPGYRFKVLDALITNFHLPESTLMMLVSALAGRDNIMAAYEEAVKERYRFFSFGDAMFIV

SEQ ID NO: 63335 - protein, 343 aa, Anaerofilum sp.
  misc_feature (1)..(343): tr|A0A1Y4H4T5|A0A1Y4H4T5_9FIRM S-adenosylmethionine:tRN A ribosyltransferase-isomerase OS=Anaerofilum sp. An201 OX=1965588 GN=queA PE=3 SV=1
MQKHDFWYDLPKELIAQEPCLPRDAARLLCLGRQSGEISHHIFHELPALLHAGDLLIVNNSKVLPARLIGHKAETGAVCELLLLREESRDVWECLARPGKKLKPGVRVVFGDGTLTAEILETREDGNKLVRFSYDTDTLYEKLDAFGKMPLPPYITKQLDDGSQYQTVYAKELGSAAAPTAGLHFTPELMETLRQKGVRFAEVTLHVGLGTFRPVKEETVEDHVMHSEWYCISEETAALINRTKQEGGRVIAVGTTSCRTLEAAAGAHGGQVCACSGDTDIFIYPGYTFRCIDGLITNFHLPESTLIMLVSAFCGYENTMNAYRVAVENKYRFFSFGDAMLIV

SEQ ID NO: 63336 - protein, 340 aa, Anaerofustis stercorihominis
  misc_feature (1)..(340): tr|A0A3E3E006|A0A3E3E006_9FIRM S-adenosylmethionine:tRN A ribosyltransferase-isomerase OS=Anaerofustis stercori hominis OX=214853 GN=queA PE=3 SV=1
MKTSDFDYNLPEELIAQTPIEKRDTSRLMVVDRDTKKIKHKHFYDLIEYLNEGDTLVLNDSKVFHARLYGVKEETGAKIETFVLKPLADNMFEVMIKPAKRLKVGSVVKFDENLSMEVLEKYEEGLAKVRFFGCSDVFSYIDKIGTVPLPPYIKEKLDDDERYQTVYSKDKGSAAAPTAGLHFTNELLEKIKQKGINICYVTLHVGLGTFRPVKEDEITNHKMHSEFFIISNDTAKMINETKKNGKDIYAVGTTTVRTLESCYQKYGDIRATNMDTNIFIYPGFEFKAIDHLITNFHLPKSTLLMLISAFYNKDDILKAYKEAIKERYRFFSFGDAMLIL

SEQ ID NO: 63337 - protein, 340 aa, Anaerofustis stercorihominis; identical to SEQ ID NO: 63336
  misc_feature (1)..(340): tr|B1C6M9|B1C6M9_9FIRM S-adenosylmethionine:tRNA ribosy ltransferase-isomerase OS=Anaerofustis stercorihominis DSM 17244 OX=445971 GN=queA PE=3 SV=1

SEQ ID NO: 63338 - protein, 109 aa, Anaeroglobus geminatus
  misc_feature (1)..(109): tr|G9YFF2|G9YFF2_9FIRM S-adenosylmethionine:tRNA ribosy ltransferase-isomerase OS=Anaeroglobus geminatus F0357 OX=861450 GN=HMPREF0080_00364 PE=3 SV=1
MPAAAAKVNRAKDEGRRVIAVGTTSIRTLESAGSNGRVEAGAGRTDIFIYPGYTFRVVDALVTNFHLPESTLLMLVSAMSKREKILRAYETAVREKYRFFSFGDAMFIH

SEQ ID NO: 63339 - protein, 238 aa, Anaeroglobus geminatus
  misc_feature (1)..(238): tr|G9YFF1|G9YFF1_9FIRM S-adenosylmethionine:tRNA ribosy ltransferase-isomerase OS=Anaeroglobus geminatus F0357 OX=861450 GN=HMPREF0080_00363 PE=3 SV=1
MILKLSDFSYELPQELIAQHPVEPRDAARLMLYDRVSGEVEHARFYDLVDALKSGDVLVFNDSRVIPARLYGTRVPTGGKVEVLLLAPVGEDMWEVLVKPGKKALPGTVISFGDDLTGTVLKRTDFGGRIVQFKYTGVFDDIIGRIGEMPLPPYIHEKLENPDDYQTVYAREKGSAAAPTAGLHFTEALLDRIRAKGVETVFVTLHVGLGTFRPVGETLKTMSCTANFTALCRQPRRK

SEQ ID NO: 63340 - protein, 339 aa, Anaerolinea thermolimosa
  misc_feature (1)..(339): tr|A0A3D1JEP7|A0A3D1JEP7_9CHLR S-adenosylmethionine:tRN A ribosyltransferase-isomerase OS=Anaerolinea thermolim osa OX=229919 GN=queA PE=3 SV=1
MKTSDFDYHLPPERIAQTPVEPRHASRLLVLHRNTGELEHTIFRNIGQFLTPGDLLVVNQTRVIPARLFARKETGGRVEVLLLRRVDSLTWEGLVGGKRLTRGKRLQVENGPAVEILSDLEGSRRLLRFETPIEEMLPHIGQMPLPPYIHEPLRDPERYQTVYATAPGSAAAPTAGLHFTPELIAELKAQGIGFTTVTLHVGLDTFAPVTEEDPREHTIHTEWCEVLPAAAEAINATRRAGRRIVAVGTTSVRTLETAARNAREGDTVAPFSGPTDLYILPGYTFRAVDAMVTNFHLPRSSLIMLVSAFAGLELTLATYRKAIEMEYRFYSFGDAMLIL

SEQ ID NO: 63341 - protein, 339 aa, Anaerolinea thermophila
  misc_feature (1)..(339): tr|E8N6F0|E8N6F0_ANATU S-adenosylmethionine:tRNA ribosy ltransferase-isomerase OS=Anaerolinea thermophila (stra in DSM 14523 / JCM 11388 / NBRC 100420 / UNI-1) OX=9265 69 GN=queA PE=3 SV=1
MKTSDFDYFLPPECIAQHPVEPRHNSRLMVLNRANDSIQHTIFWNITEYLHPGDILVVNQTRVIPARIYAHKETGGKLEILLLRRVDDHTWEALIGGKRPRKGKSFMINEHLHGTIIEELEESRRLVRFNQPVEPYLERIGQMPLPPYIHEPLRDPERYQTIFARQPGSAAAPTAGLHFTSELIERIAQMGIQFAEVTLHVGLDTFMPVHEENPLEHKIHTEWCELTEETAQKINAAKKEGGRIIAVGTTSVRTLETAAQYAREGEWVGAVSGATSLYILPGYTFRAVDAMITNFHLPRSTLIMLVSAFAGRERILNAYKVAIEQGYRFYSFGDAMLIL

SEQ ID NO: 63342 - protein, 115 aa, Anaerolineaceae bacterium
  misc_feature (1)..(115): tr|A0A1W9V967|A0A1W9V967_9CHLR S-adenosylmethionine:tRN A ribosyltransferase-isomerase (Fragment) OS=Anaeroline aceae bacterium 4572_5.1 OX=1971724 GN=B6I38_03985 PE=3 SV=1
MKTSDFNYDLPQEYIAQFPADPRDSSRLLVFNRQTGAVQHTRFHQLGEFLKPNDLLVLNQTRVIPARLFGHKIPTGGKVELLLLTKEDERTWKAFGGGSGLRAGKKIQITDGPQA

SEQ ID NO: 63343 - protein, 344 aa, Anaerolineaceae bacterium
  misc_feature (1)..(344): tr|A0A1B3WRD4|A0A1B3WRD4_9CHLR S-adenosylmethionine:tRN A ribosyltransferase-isomerase OS=Anaerolineaceae bacte rium oral taxon 439 OX=1889813 GN=queA PE=3 SV=1
MKTADFNYPLPPERIAQTPIEPRDSSRLFVYNRKTDRVEHRHFRDIGDYLNPGDLLVRNQTKVLPARIYGKKESGGKVELLLLRKRTDSEWECLIGGKKIREGAKIVLSDNLFALVLTNADSPRRVVRFEGDLNAYLSANGQMPLPPYIHEKLSDQTRYQTVYANPAFTGSAAAPTAGLHFTNELIASLEKSGVEFADVTLHVGLDTFQPVSEDDPAAHTIHKEWCEVDPASAARINRTKASGRRVIAVGTTSARTLETAAQAAIEQGLNEPVAPIRGDTGIFILPGFAFRAVDALITNFHLPKSTLIMMISAFIGRGKTIELYELAIREEYRFFSFGDAMLIL

SEQ ID NO: 63344 - protein, 51 aa, Anaerolineae bacterium
  misc_feature (1)..(51): tr|A0A3M1I9E3|A0A3M1I9E3_9CHLR S-adenosylmethionine:tRN A ribosyltransferase-isomerase (Fragment) OS=Anaeroline ae bacterium OX=2052143 GN=D6770_01640 PE=3 SV=1
DALITNFHLPRSTLIMLVSAFAGRERILEAYEIAKREGYRFYSFGDAMLIL

SEQ ID NO: 63345 - protein, 337 aa, Anaerolineae bacterium
  misc_feature (1)..(337): tr|A0A1J4ZTC6|A0A1J4ZTC6_9CHLR S-adenosylmethionine:tRN A ribosyltransferase-isomerase OS=Anaerolineae bacteriu m CG2_30_58_95 OX=1805004 GN=queA PE=3 SV=1
MRTSDFEYNLPPSFIAQTPLEPRDASRLLVLRRDTGTLEHAVFRDIGKYLHSGDLLVLNQTRVIPARLFARKPTGGRVELLLLRREDTHTWECTVGGKGLKTGIRLLLEENGPEAEIVGMLDGARRLVRFARPVELYLPRIGHVPLPPYIHEPLANPERYQTVYARDPGSAAAPTAGLHFTPSLLDELQSQGIKIAYVTLHIGLDTFAPVTEVSPEKHPIHTEWCELPQETADAIHRTRQSGGRVIAVGTTSVRTLESAAVGRDTISSYTGNTNLFILPGYKFKVVDCMITNFHLPRSTLIMLVSAFAGRERILHAYEIARREKYRFYSFGDAMFIT

SEQ ID NO: 63346 - protein, 339 aa, Anaerolineales bacterium
  misc_feature (1)..(339): tr|A0A524PQ94|A0A524PQ94_9CHLR S-adenosylmethionine:tRN A ribosyltransferase-isomerase OS=Anaerolineales bacter ium OX=2073117 GN=queA PE=3 SV=1
MRTSDFDYLLPPDRIAQRPASPRDHSRMLVLQRPTGQIEHRNFRELPEFLRSGDALVINETRVIPGRLKAHKLPGGGKVELLLLREVDPTTWEALVGGKGLSPGRSVRIQDGPSATILQDLGGPRRLVEFSEPISPLLDQIGEMPLPPYIKTPLRNHEEYQTTFARQPGSAAAPTAGLHFTDEILAQVKARGVEILRITLHVGLDTFAPVTEQDPQTHPIHTEWCSLDPHVAQSINQIKQRGGRIFAVGTTCVRTLETAASASPSDQIVAFEGPTALFIIPGFQFQLVDAMLTNFHLPRSTLLMLVSAFSGREQILHAYAQAIEHGYRFYSFGDAMLIV

SEQ ID NO: 63347 - protein, 342 aa, Anaerolineales bacterium
  misc_feature (1)..(342): tr|A0A363TAB4|A0A363TAB4_9CHLR S-adenosylmethionine:tRN A ribosyltransferase-isomerase OS=Anaerolineales bacter ium OX=2073117 GN=queA PE=3 SV=1
MRTSDFDYELPLRYIAQTPIEPRDRSRLMVLNRQSGEINHAVFKDIGEYLHPGDILVLNETRVIPARLYAHKLPSRGKVEILLLRQRDNLTWEALVGGKGLTVGKKLQVEAIREGDRAPLAQIEAVLHGAERLVRFSEPLELFFPKVGHTPLPPYIHTPINDPERYQTVYARTSGSAAAPTAGLHFTPWLMDELKSRGIKFAKVTLHVGLDTFAPVTEGDPTKHKIHSEWCQLTEQNAMAINAVKAAGGRVVAVGTTSVRTLESAAADGMLRPYEGATGLYILPGYHFNAVDAIVTNFHLPRSTLIMLVSAFATRELVSKAYEIAKNENYRFYSFGDAMLIV

SEQ ID NO: 63348 - protein, 357 aa, Anaeromassilibacillus sp.
  misc_feature (1)..(357): tr|A0A1Y4EXL5|A0A1Y4EXL5_9FIRM S-adenosylmethionine:tRN A ribosyltransferase-isomerase OS=Anaeromassilibacillus sp. An250 OX=1965604 GN=queA PE=3 SV=1
MEETKRNWSTHDFYYDLPKELIAQTPLEPRDSSRLLVLHKETGEMEHRHFYDVIDYLNPGDCLVLNDSRVLPARLYGIKDGTGAKVEFLLLTHREGDTWEVLTGPGKRAKPGTHFTFGDGLLRADVLDVVEGGNRIVEFHYEGNFYAILDQIGQMPLPHYITEDLKDKERYQNVYSKEVGSAAAPTAGLHFTPELLERIRQKGIKTAFVTLHVGLGTFRPVTVENVSDHKMHSEHYAMNKETADLINETKRNGGRVIAVGTTSCRTLESIALKEGCIRESAGWTDIFIYPGFQFRVLDGLITNFHLPESTLIMLVSALAGYDNIMRAYRTAVQEKYRFFSFGDAMFIGSMKELDDKK

SEQ ID NO: 63349 - protein, 346 aa, Anaeromassilibacillus sp.
  misc_feature (1)..(346): tr|A0A1Y4NFD8|A0A1Y4NFD8_9FIRM S-adenosylmethionine:tRN A ribosyltransferase-isomerase OS=Anaeromassilibacillus sp. An172 OX=1965570 GN=queA PE=3 SV=1
MTLKNKTSDYFYELPEELIAQTPVEPRDHSSMLVLDRETGKTQHKHFYDVSDYLKPGDCLILNDSRVLPARIFGTKKDTGAHVEFLLLKCVGNNRWETLVKPGRKAKVGAEFVFSPGVLEGKITDVLEDGNRIIDFSCEGNFYTILEELGKMPLPPYITAELKDQERYQTVYSHELGSAAAPTAGLHFTKELLKKIEEKGVKIGYVTLHVGLGTFRPVKAENITEHKMHSEHYHLPKETADLINETKKNGGRVIAVGTTSCRTLESVATFNDGKILESDGWTSIFIYPGYEFKVLDGLITNFHLPESTLIMLVSAFAGYEHVMAAYKEAVEKRYRFFSFGDAMLII

SEQ ID NO: 63350 - protein, 341 aa, Anaeromicrobium sediminis
  misc_feature (1)..(341): tr|A0A267MPR2|A0A267MPR2_9CLOT S-adenosylmethionine:tRN A ribosyltransferase-isomerase OS=Anaeromicrobium sedim inis OX=1478221 GN=queA PE=3 SV=1
MNKSDFYFDLPEELIAQTPIKERDTSKLMVVDRQTGNIDHKQFKDIIKYLKAGDCLVLNNTKVLPARLFGAKEHTGGKVEFLLLKRIEGNKWETLVKPGKKAKPGDVIVFGDGILKANILEVGQEGSRIVEFVYKGIFEEILDQLGSMPLPPYIKEKLDEKERYQTVYAKEQGSAAAPTAGLHFTKELIEDVKNKGVKIAYVTLHVGLGTFRPVKADSIYDHKMHEELYIIDKEAADIINKTKEEGGRVISVGTTSTRTLESAADELGKVKAESRWTDIFMYPGYEFKVVDGIITNFHLPESTLIMLVSAFMGRERTLNAYEEAIKNKYRFFSFGDAMFII

SEQ ID NO: 63351 - protein, 345 aa, Anaeromyxobacter dehalogenans
  misc_feature (1)..(345): sp|B8JH48|QUEA_ANAD2 S-adenosylmethionine:tRNA ribosylt ransferase-isomerase OS=Anaeromyxobacter dehalogenans ( strain 2CP-1 / ATCC BAA-258) OX=455488 GN=queA PE=3 SV= 1
MRLSDFDFALPEGLVAQAPVTPRDASRLMVLAPEEGSPAHRGFADLPELLAPGDLLVFNDTRVIPARLLGHKASGGKVELLLCEPLEGGLGRRWRAMGQASKPIREGAVLTFDGLEARVDDVEGEGFYRVTLDRQGPELEAALGRAGRIPLPPYIRRAPDAEDAARYQTIWARAPGSAAAPTAGLHFTEPLLARLAARGIRRTAVTLHVGPGTFLPIRGDDLDLHRMHGERYEVSPAAAAELAATRARGGRIVAVGTTSVRTLESAWRDGAVAAGPGRTELFIRPGHPFHAVDAMVTNFHLPRSTLLVLVCAFGGQGRVLAAYREAVARGYRFFSYGDAMLLLRR

SEQ ID NO: 63352 - protein, 345 aa, Anaeromyxobacter dehalogenans
  misc_feature (1)..(345): sp|Q2IKY3|QUEA_ANADE S-adenosylmethionine:tRNA ribosylt ransferase-isomerase OS=Anaeromyxobacter dehalogenans ( strain 2CP-C) OX=290397 GN=queA PE=3 SV=1
MRLSDFDFALPEGLVAQAPVTPRDASRLMVLAPGEGAPAHRGFADLPELLAPGDLLVFNDTRVIPARLLGHKASGGKVELLLCEPLEGGLGRRWRAMGQASKPIREGAVLAFDGLEARVDAVEGEGFYRVTLDRQGAELEAALGRAGRIPLPPYIRRAPDAEDAARYQTIWARAPGSAAAPTAGLHFTEPLLARLAARGVRRTAVTLHVGPGTFLPIRGDDLDAHRMHGERYEVSPAAAAELAAARARGGRIVAVGTTSVRTLESAWRDGEVAPGPGRTELFIRPGHPFRAVDAMVTNFHLPRSTLLVLVCAFGGQGRVLAAYREAVARGYRFFSYGDAMLLLRR

SEQ ID NO: 63353 - protein, 343 aa, Anaeromyxobacter sp.
  misc_feature (1)..(343): tr|A0A1F3BRC7|A0A1F3BRC7_9DELT S-adenosylmethionine:tRN A ribosyltransferase-isomerase OS=Anaeromyxobacter sp. RBG_16_69_14 OX=1797238 GN=queA PE=3 SV=1
MKLSDFDYDLPEALIAQEPVSPRDASRLLVVPRGSGAVEDARFTDLESLLREGDLLVFNDTRVIPARLVGVKESGGRCELLLVEPMDGEGGARWRALGQSSKPMREGALLAFGTLEAKVEEVEGDGFFAVRFDRSGAELAAAVEREGRIPLPPYIRREPGPADRERYQTVFARIPGSAAAPTAGLHFTSSALARLAARGVERTAVTLHVGPGTFLPIRTEDIARHRMHEERYRVPEEAARATAACRARGGRVVAVGTTAVRTLESAWKGGNLAVGEGRTHIFIRPGYSFEVVDALVTNLHLPRSTLLMLVCAFAGREQVMGAYELAVREGYRFFSYGDAMFLS

SEQ ID NO: 63354 - protein, 345 aa, Anaeromyxobacter sp.
  misc_feature (1)..(345): sp|B4UID2|QUEA_ANASK S-adenosylmethionine:tRNA ribosylt ransferase-isomerase OS=Anaeromyxobacter sp. (strain K) OX=447217 GN=queA PE=3 SV=1
MRLSDFDFALPEGLVAQAPVTPRDASRLMVLAPGEGAPAHRGFADLPELLAPGDLLVFNDTRVIPARLLGHKASGGKVELLLCEPLEGGLGRRWRAMGQASKPIREGAVLTFDGLEARVDGVEGEGFYRVTLDRQGPELEAALGRAGRIPLPPYIRRAPDAEDAARYQTIWARAPGSAAAPTAGLHFTEPLLARLAARGIRRTAVTLHVGPGTFLPIRGDDLDLHRMHGERYEVSPAAAEELAATRARGGRIVAVGTTSVRTLESAWRDGAVAAGPGRTELFIRPGHPFHAVDAMVTNFHLPRSTLLVLVCAFGGQGRVLAAYREAVARGYRFFSYGDAMLVLRR

SEQ ID NO: 63355 - protein, 310 aa, Anaeroplasma bactoclasticum
  misc_feature (1)..(310): tr|A0A397S1B5|A0A397S1B5_9MOLU S-adenosylmethionine:tRN A ribosyltransferase-isomerase OS=Anaeroplasma bactocla sticum OX=2088 GN=queA PE=3 SV=1
MVLDKKTKTWEHKHFTDIIDYLDSNDVLVLNDTKVIPARLIGTRDTGGVTEVLLLKDLGENVWQTLARPQRKVHIGQIISFGDGMLKAECIEKEDQGICKFKLIYDGILVEILDKLGEMPLPPYIHEKLADKDRYQTVYAKHPGSAAAPTAGLHFTPEILKKLEEKGVELIYVTLHVGLGTFRPVEEEDLTNHVMHSEYYEISKEAAERLNLAKKNGKRIVAVGTTSTRTLESAYDNGFKETCANTSIFIYPGYKFKAIDAQITNFHLPKSTLIMLVSAFAGREFILDAYKEAVKEKYRFFSFGDAMFIK

SEQ ID NO: 63356 - protein, 342 aa, Anaerorhabdus furcosa
  misc_feature (1)..(342): tr|A0A1T4LJW7|A0A1T4LJW7_9BACT S-adenosylmethionine:tRN A ribosyltransferase-isomerase OS=Anaerorhabdus furcosa OX=118967 GN=queA PE=3 SV=1
MKTSEFDFELPESLIAQHPLDDRTTSRLLVVHKNTGELEHKHFYDIVNYFKKGDVLVRNNTRVIPARLFGTKEETGAHVELLLLKQEGDLWECLVGNARVVKLGTVISFNEGELKAECIGIGDKGIRKMRMIYDGIFMEILENLGQVPLPPYITEKLDDAERYQTVYAKIKGSAAAPTAGLHFTDEIFDQLREKGVIITDVTLHVGLGTFRPMDTETIEDHIMHSELYWMSQETADLCNLAKQEGRRIISVGTTSTRTLEAIYKTYGTFKECHGETDIFIFPGYKWEAVDCIITNFHLPKSTLIMMISSFASKDLIFKAYKEAIDKEYRFFSFGDCMMITNE

SEQ ID NO: 63357 - protein, 341 aa, Anaerosphaera aminiphila
  misc_feature (1)..(341): tr|A0A1M5RFX6|A0A1M5RFX6_9FIRM S-adenosylmethionine:tRN A ribosyltransferase-isomerase OS=Anaerosphaera aminiph ila DSM 21120 OX=1120995 GN=queA PE=3 SV=1
MKTSDFNYDLPKELIAQHPLEKRSNSRLLLLNKKTGEIKHEHFYDIYDHLNKGDVLVLNDTRVLPARIHGSREGKEEHIEFLLLKRLNGGDVWECLCKPGKKVKIGTKIFFSDKLKAEVIDIAEDGNRFIEFKYDGIFEEILDELGEMPLPPYITEKLEDKERYQTVYSKVEGSAAAPTAGLHFTLELLEKLEEKGVEILYITLHVGLGTFRPVKVDDVKNHNMHSEFYVISEEVAEKINRAKSENRRIVSVGTTSVRTLETASDEDGFVKESSGWTDIFIYPGYKFKCVDALITNFHLPESTLLMLVSAFSSKDIILNAYKVAVDEKYRFFSFGDAMFLY

SEQ ID NO: 63358 - protein, 340 aa, Anaerosphaera sp.
  misc_feature (1)..(340): tr|A0A437S866|A0A437S866_9FIRM S-adenosylmethionine:tRN A ribosyltransferase-isomerase OS=Anaerosphaera sp. GS7 -6-2 OX=2487351 GN=queA PE=3 SV=1
MNTSDFNYNLPKDLIAQHPLEDRTESKLLLLNKRTGEVEHSHFYNILDYLNKGDLLVLNDTRVIPARLFGSREGKEESIEFLLLKRVEGDIWECLCKPGKKAKIGTKVFFSDKLKAEVVEISEEGNRFIEFSYNGIFEELLDELGEMPLPPYITEKLKDKERYQTVYSKIEGSAAAPTAGLHFTKELLEKIEDKGIEIAYITLHVGLGTFRPVKVDDVKNHNMHSEFYIINNDAASKINKAKSENRRVISVGTTSVRTIETASDENGFVKESKGWTDIFIYPGYNFKCVDALITNFHLPESTLIMLVSAFASRDMVLNAYKEAVEKRYRFFSFGDAMFLY

SEQ ID NO: 63359 - protein, 342 aa, Anaerosphaera sp.
  misc_feature (1)..(342): tr|A0A1E9AL53|A0A1E9AL53_9FIRM S-adenosylmethionine:tRN A ribosyltransferase-isomerase OS=Anaerosphaera sp. HMS C064C01 OX=1739304 GN=queA PE=3 SV=1
METKDFYYDLPEELIAQHPIDKRDESRLMVLDRKTGKVEHMIFHDIINLLHEGDVLVANDSKVIPARLFGNRPGKEEKIEVLLISQTEEDTWKTLVKPGKKMKIGSEIEFGHGLLRAEVVDIDDDGVRYIKFKYDGIFLEILNELGEMPLPPYIKERLEDKDRYQTVYAKNLGSAAAPTAGLHFTKELLKELEEKGVKIVYLTLHVGLGTFRPVKVTDVEKHKMHSEFYNLSEEASEIINKAKKEGRRVIAVGTTTVRTLETIAAKGEIKASHGWTDIFIYPGFEYKAVDALITNFHLPESTLIMLVSAFASKEMILNAYAEAVKERYRFFSFGDAMFILDR

SEQ ID NO: 63360 - protein, 339 aa, Anaerospora hongkongensis
  misc_feature (1)..(339): tr|A0A4R1PUV3|A0A4R1PUV3_9FIRM S-adenosylmethionine:tRN A ribosyltransferase-isomerase OS=Anaerospora hongkonge nsis OX=244830 GN=queA PE=3 SV=1
MLLSDYYYDLPAELIAQFPLEPRDHSRLMVLDRKTGVVSHQHFYNLPDYLEPGDTLVFNNTRVIPARLIGTRADTGGKVEVFLLNRLNHNEWETLVKPGKRARPGMTIKFGDELSCEILDSTDFGGRIVRFTFQGAFEAILDRLGETPLPPYIRERLEDSERYQTVYSRENGSAAAPTAGLHFTEEMLQKIQQMGINLAFVTLHIGLGTFRPVSVADITQHVMHREYYSISPEAAQIINRTKEQGKRVIAVGTTSVRTLETVGASGRIEAGSGWTDIFMYPGFQFHMIDAMVTNFHLPESTLLMLISAFADRESILSAYQEAVDKSYRFFSFGDAMLIL

SEQ ID NO: 63361 - protein, 344 aa, Anaerosporobacter mobilis
  misc_feature (1)..(344): tr|A0A1M7EMY3|A0A1M7EMY3_9FIRM S-adenosylmethionine:tRN A ribosyltransferase-isomerase OS=Anaerosporobacter mob ilis DSM 15930 OX=1120996 GN=queA PE=3 SV=1
MKTKDFDFYLPEELIAQDPLEDRSSSRLLVLNKETGDIEHQIFHNITQYLRKGDCLVINNTKVIPARLIGEKEGTGAKIELLLLKRKENDIWETLVKPGKKARVGTRVVFGDGLLIGEIVDVLDEGNRLVQFHYQGIFEEILDQLGQMPLPPYITHQLEDKNRYQTVYAKYEGSAAAPTAGLHFTKELLKQIEDMGVVIANVTLHVGLGTFRPVKVDDVQSHHMHSEFYLVEEEEAKKINDAKKHGNRVICVGTTSCRTVESASDENGMVKAGSGDTEIFIYPGYKFKVLDALITNFHLPESTLLMLVSALAGKEHIMHAYDIAVKEKYRFFSFGDAMFINTND

SEQ ID NO: 63362 - protein, 339 aa, Anaerosporomusa subterranea
  misc_feature (1)..(339): tr|A0A154BU69|A0A154BU69_ANASB S-adenosylmethionine:tRN A ribosyltransferase-isomerase OS=Anaerosporomusa subte rranea OX=1794912 GN=queA PE=3 SV=1
MKLSEFDYDLPEQLIAQHPIEPRDSSRLLVLDRASTEIRHGMFKDLLEYISPGDTLVFNDTRVIPARLMGRRADTGGQVEVFLLSEKTEGEWEVLVKPGKRAKPGMVIEFGPELSCEVLSGTDFGGRVVRFAFSGIFAEILDRLGETPLPPYIHERLSDSERYQTVYSRQRGSAAAPTAGLHFTPALLSQIKEKGARLAFITLHVGLGTFRPVAAEDITDHVMHREYFSVSEEAAEAVNQAKEQGGRVIAVGTTSIRTLETAVRNGRLSAGSGWTEIFIYPGYQFQLVDGIITNFHLPKSTLIMLISAFAGRERVLAAYKEAVQREYRFFSFGDAMLLL

SEQ ID NO: 63363 - protein, 357 aa, Anaerostipes caccae
  misc_feature (1)..(357): tr|B0MJ32|B0MJ32_ANACD S-adenosylmethionine:tRNA ribosy ltransferase-isomerase OS=Anaerostipes caccae (strain D SM 14662 / NCIMB 13811 / L1-92) OX=411490 GN=queA PE=3 SV=1
MLYYPIEKKLEKTGAIMKTSDFTFDLPEELIAQDPLTDRSSSRLLVLDKETGEIRHEGFRNIAGYLKRGDCLVLNDTKVIPARLIGEKEGTGAKIEVLLLKRKQDNTWETLVKPGRKAKPGTRISFGQGKLVGEVTDIVDEGNRLVKFEFDGIFEEVLDELGQMPLPPYITHQLKDKNRYQTVYAKHEGSAAAPTAGLHFTKELLKEIEEKGIRLAYVTLHVGLGTFRPVKVEDVTEHHMHSEFYVVDEEAAEKINKTRKEGGRIISVGTTSTRTLESAADENGFIEPKSGWTEIFIYPGYKFKVIDGLITNFHLPESTLLMLVSALAGKEHILKAYDEAVKERYRFFSFGDAMFIM

SEQ ID NO: 63364 - protein, 342 aa, Anaerostipes hadrus
  misc_feature (1)..(342): tr|A0A174C8N0|A0A174C8N0_ANAHA S-adenosylmethionine:tRN A ribosyltransferase-isomerase OS=Anaerostipes hadrus O X=649756 GN=queA PE=3 SV=1
MKVSDFTFDLPEELIAQDPLEDRSSSRLLTLDKNTGEIGHDIFHNIVNYLKPGDCLVLNNTKVIPARLIGAKEETGGKVEVLLLKRKQDNVWETLVKPGKKARPGARISFGDGKLVGEVIDVVDEGNRLVKFEYEGIFEEVLDELGQMPLPPYITHQLKDKNRYQTVYAKYDGSAAAPTAGLHFTKELLQQIKDMGVNIAYVTLHVGLGTFRPVKVDDVLDHHMHSEFYRIEEDDAKLINETKKNGGRVISVGTTSTRTLESVAEEDGTLHAKSGWTDIFIYPGYKFKVIDGLITNFHLPESTLLMLVSALAGREHILNAYNIAVKERYRFFSFGDAMFIHP

SEQ ID NO: 63365 - protein, 342 aa, Anaerostipes hadrus
  misc_feature (1)..(342): tr|A0A173T2A2|A0A173T2A2_ANAHA S-adenosylmethionine:tRN A ribosyltransferase-isomerase OS=Anaerostipes hadrus O X=649756 GN=queA PE=3 SV=1
MKVSDFTFDLPEELIAQDPLEDRSSSRLLTLDKNTGEIGHDVFHNIVNYLKPGDCLVLNNTKVIPARLIGAKEETGGKVEVLLLKRKQDNVWETLVKPGKKARPGARISFGDGKLVGEVIDVVDEGNRLVKFEYEGIFEEVLDELGQMPLPPYITHQLKDKNRYQTVYAKYDGSAAAPTAGLHFTKELLQQIKDMGVNIAYVTLHVGLGTFRPVKVDDVLEHHMHSEFYRIEEEDAELINETKKNGGRVISVGTTSTRTLESVAEEDGTLHAKSGWTDIFIYPGYKFKVIDGLITNFHLPESTLLMLVSALAGREHILNAYNIAVKERYRFFSFGDAMFIHP

SEQ ID NO: 63366 - protein, 341 aa, Anaerostipes rhamnosivorans
  misc_feature (1)..(341): tr|A0A4P8IAQ5|A0A4P8IAQ5_9FIRM S-adenosylmethionine:tRN A ribosyltransferase-isomerase OS=Anaerostipes rhamnosi vorans OX=1229621 GN=queA PE=3 SV=1
MKTSDFTFELPEELIAQNPLADRSSSRLLVLDKESGEIRHEVFKNVVSYLKKGDCLVLNDTKVLPARLIGEKEGTGAKIEVLLLKRRQDNVWETLVKPGRKAKPGTRISFGGGRLVGEVTDIVDEGNRLVRFEFEGIFEEVLDELGQMPLPPYITHQLEDKNRYQTVYAKHEGSAAAPTAGLHFTKDLLKEIEEKGVRLAYVTLHVGLGTFRPVKVEDVTDHHMHSEFYSVDETAAQAINQTREDGRRIISVGTTSTRTLESAADMDGHIKPKSGWTDIFIYPGYEFKVIDALITNFHLPESTLLMLVSALAGKEHILAAYEEAVRERYRFFSFGDAMFIQ

SEQ ID NO: 63367 - protein, 341 aa, Anaerostipes sp.
  misc_feature (1)..(341): tr|R6RM81|R6RM81_9FIRM S-adenosylmethionine:tRNA ribosy ltransferase-isomerase OS=Anaerostipes sp. CAG:276 OX=1 262699 GN=queA PE=3 SV=1
MKTSDFTFDLPEELIAQDPLTDRSSSRLLVLDKETGEIRHEGFRNIAGYLKRGDCLVLNDTKVIPARLIGEKEGTGAKIEVLLLKRKQDNTWETLVKPGRKAKPGTRISFGQGKLVGEVTDIVDEGNRLVKFEFDGIFEEVLDELGQMPLPPYITHQLKDKNRYQTVYAKHEGSAAAPTAGLHFTKELLKEIEEKGIRLAYVTLHVGLGTFRPVKVEDVTEHHMHSEFYVVDEEAAEKINKTRKEGGRIISVGTTSTRTLESAADENGFIEPKSGWTEIFIYPGYKFKVIDGLITNFHLPESTLLMLVSALAGKEHILKAYDEAVKERYRFFSFGDAMFIM

SEQ ID NO: 63368 - protein, 341 aa, Anaerostipes sp.
  misc_feature (1)..(341): tr|A0A1Q9K1D7|A0A1Q9K1D7_9FIRM S-adenosylmethionine:tRN A ribosyltransferase-isomerase OS=Anaerostipes sp. 992a OX=1261637 GN=queA PE=3 SV=1
MNLHDFYFDLPEELIAQDPLEDRSSSRMLVLDKKTGERQHKIFKDVIDYLNPGDCLVLNNTRVLPARLIGAKEGTGAKIEVLLLKRKQDNVWETLVKPGKKARPGARIVFGDNLLVGEVIDVVEEGNRLIRFEYEGIFEEVLDQLGEMPLPPYITHQLKDKERYQTVYAKHNGSAAAPTAGLHFTKELLKKIQEKGIKIANVTLHVGLGTFRPVKVENILDHHMHSEFYSIEEEDAKCINDTKQAGGRIISVGTTSTRTLESVADENGMVRAGSGWTEIFIYPGYQFKVIDGLITNFHLPESTLLMLVSALAGREHILEAYQEAVKERYRFFSFGDAMLII

SEQ ID NO: 63369 - protein, 343 aa, Anaerotignum lactatifermentans
  misc_feature (1)..(343): tr|A0A1M6VJI0|A0A1M6VJI0_9FIRM S-adenosylmethionine:tRN A ribosyltransferase-isomerase OS=Anaerotignum lactatif ermentans DSM 14214 OX=1121323 GN=queA PE=3 SV=1
MKTSEFYFDLPEELIAQEPLKDRSSSRLLVADKNTESISHRHFRDIKEYLKAGDCLVINDTRVLPARLHGERVGTGAHIEVLLLVRKSIDTWEVLVRPGKKARPGDKISFGDGRLTAEVLETIEGGNRIIKFYYEGVFENILDELGEMPLPPYITHKLEDKERYQTVYAKHDGSAAAPTAGLHFTPELLKEIEEMGVKIAHVTLHVGLGTFRPVKAEDILDHEMHSEYYVVEEDQAAIMNEARKNGGRIIAVGTTSTRTLESVTDENGVVHAGSGWTKIFIYPGYTFKAVDCMITNFHLPESTLIMLVSALMGKDFIMRVYEEAVKERYRFFSFGDACLFLTK

SEQ ID NO: 63370 - protein, 343 aa, Anaerotignum lactatifermentans
  misc_feature (1)..(343): tr|A0A1Y3U4X0|A0A1Y3U4X0_9FIRM S-adenosylmethionine:tRN A ribosyltransferase-isomerase OS=Anaerotignum lactatif ermentans OX=160404 GN=queA PE=3 SV=1
MKTSEFYFDLPEELIAQEPLKDRSSSRLLVADKNTESISHRHFRDVKEYLKAGDCLVINDTRVLPARLHGERVGTGAHIEVLLLVRKSIDTWEVLVRPGKKARPGDKISFGDGRLTAEVLETIEGGNRIIKFYYEGVFENILDELGEMPLPPYITHKLEDKERYQTVYAKHDGSAAAPTAGLHFTPELLKEIEEMGVKIAHVTLHVGLGTFRPVKAEDILDHEMHSEYYVVEEDQAAIMNEARKNGGRIIAVGTTSTRTLESVTDENGVVHAGSGWTKIFIYPGYTFKAVDCMITNFHLPESTLIMLVSALMGKDFIMRVYEEAVKERYRFFSFGDACLFLTK

SEQ ID NO: 63371 - protein, 344 aa, Anaerotignum neopropionicum
  misc_feature (1)..(344): tr|A0A136WFJ7|A0A136WFJ7_9FIRM S-adenosylmethionine:tRN A ribosyltransferase-isomerase OS=Anaerotignum neopropi onicum OX=36847 GN=queA PE=3 SV=1
MKTSDFYFDLPEELIAQEPLADRASSRLLVVNKETGVWEHKYFRNIMDYLRAGDCLVINNTRVLPARLYGERVGTGAAMEILLLTRKDLDTWEVLVRPGKKAKPGDKISFGNGKLVAEVLEVIEGGNRILRFTYEGVFEAILAELGEMPLPPYITHRLEDKERYQTVYAKHEGSAAAPTAGLHFTPELLEEIKAMGIKIAHVTLHVGLGTFRPVKVEDVLAHEMHSEYYVVEQEQADIINETKRNGGRIFSVGTTSTRTLESAADENGIVQAKSGWTQIFIYPGYQFKIIDCLITNFHLPESTLIMLVSALVGKDLTMAAYGEAVKEKYRFFSFGDACLFLTKP

SEQ ID NO: 63372 - protein, 344 aa, Anaerotignum propionicum
  misc_feature (1)..(344): tr|A0A0X1U850|A0A0X1U850_ANAPI S-adenosylmethionine:tRN A ribosyltransferase-isomerase OS=Anaerotignum propioni cum DSM 1682 OX=991789 GN=queA PE=3 SV=1
MKTSDFYYDLPEELIAQEPLEDRASSRLLVVEKDTGKWHHKHFRDIKEYLRNGDCLVINDTRVLPARLYGERVGTGAVMEILLLTRKDLDTWEVLVRPGKKAKPGDKISFGKGKLVAEVLEVIEGGNRIIRFTYEGVFEAILDELGEMPLPPYITHRLEDKERYQTVYAKHEGSAAAPTAGLHFTPELLKEIEGMGVKIAHVTLHVGLGTFRPVKAEDILEHEMHSEYYVVEQEQADIINQAKKNGGRIFSVGTTSTRTLESVTDENGLVQAKSGWTQIFIYPSYTFKIVDCLITNFHLPESTLIMLVSALMGKDLTMEVYAEAVKEKYRFFSFGDACLFLTKP

SEQ ID NO: 63373 - protein, 345 aa, Anaerotignum sp.
  misc_feature (1)..(345): tr|A0A401LDU2|A0A401LDU2_9FIRM S-adenosylmethionine:tRN A ribosyltransferase-isomerase OS=Anaerotignum sp. KCTC 15736 OX=2358141 GN=queA PE=3 SV=1
MKTSDFYFDLPEELIAQEPLADRASSRLMVVHKDSGKREHRHFRDIKEYLRAGDCLVINNTKVLPARLYGERVGTGAAMEILLLVRKDMDTWEVLVRPGKKARPGDRISFGGGKLIAEVLEVIEGGNRIIKFEYEGVFENILEELGEMPLPPYITHKLEDKNRYQTVYAEHEGSAAAPTAGLHFTPELLKEIEDMGVRIAHVTLHVGLGTFRPVKVEDVLEHEMHSEYYVVEPEQAAIMNETKKNGGRIIAVGTTSTRTLESVTDENGVIQPKSGWTKIFIYPGYTFKAVDCLVTNFHLPESTLIMLVSALMGKELVMESYAEAVKERYRFFSFGDACLFLAKEK

SEQ ID NO: 63374 - protein, 342 aa, Anaerotruncus colihominis
  misc_feature (1)..(342): tr|B0PB28|B0PB28_9FIRM S-adenosylmethionine:tRNA ribosy ltransferase-isomerase OS=Anaerotruncus colihominis DSM 17241 OX=445972 GN=queA PE=3 SV=1
MKTSDFFFELPERQIAQTPIEPRDHSRMLYLDRQTGAVKHLHFYDLPDYLDAGDTLIVNTSRVIPARLYGVKEYSGGHMQFLLLEQKERDIWEVMVKPGKKAKTGARFVFGDGLLVGEVLQTVEGGNRLVRMYYEGPSIYPVLEKIGNMPLPPYITAELSDRERYQTIYSKQPGSAAAPTAGLHFTPELIDRLREKGINLANVVLHVGIGTFRPVRVEDVTKHHMHSEHYYLPQETADLINETHARGKRVIGVGTTSCRTVESVASKCGEIKADEGDTSIFIYPGYTFKVLDGLITNFHLPESTLIMLVSAFAGYEHTMRAYQIAVGENYRFFSFGDAMLIL

SEQ ID NO: 63375 - protein, 342 aa, Anaerotruncus colihominis; identical to SEQ ID NO: 63374
  misc_feature (1)..(342): tr|A0A174Q1K4|A0A174Q1K4_9FIRM S-adenosylmethionine:tRN A ribosyltransferase-isomerase OS=Anaerotruncus colihom inis OX=169435 GN=queA PE=3 SV=1

SEQ ID NO: 63376 - protein, 343 aa, Anaerotruncus sp.
  misc_feature (1)..(343): tr|A0A498CU56|A0A498CU56_9FIRM S-adenosylmethionine:tRN A ribosyltransferase-isomerase OS=Anaerotruncus sp. 22A 2-44 OX=2321404 GN=queA PE=3 SV=1
MLKTSDFYFDLPQEQIAQTPIEPRDHSRMLHLFRETGELEHRHFYDLPDYLEAGDTLVVNTSRVIPARLFGAKEGTGGHMQFLLLDQKEKDVWEVMVKPGKKAKTGARFVFGDGLLVGEILATVEGGNRLVRMHYEGANIYPILEKIGNMPLPPYITAELEDNERYQTVYSKQLGSAAAPTAGLHFTTELMDKLRQKGVNIAEVILHVGIGTFRPVKVEDVTKHHMHSEHYHLPKETADLINETHARGKRVIGVGTTSCRTVESVATKLGEVCEDDDDTSIFIYPGYRFKVLDGLITNFHLPESTLIMLVSAFAGYEHTMRAYETAVKENYRFFSFGDSMLIL

SEQ ID NO: 63377 - protein, 343 aa, Anaerotruncus sp.
  misc_feature (1)..(343): tr|R5XUU7|R5XUU7_9FIRM S-adenosylmethionine:tRNA ribosy ltransferase-isomerase OS=Anaerotruncus sp. CAG:528 OX= 1262700 GN=queA PE=3 SV=1
MKTSDFFYELPENLIAQTPIEPRNASRLMILHKKTGELEHRIFKDLGEYLRPGDCLVLNDTRVIPARIYGVKEGTGAVVEFLLVSQKENDVWECLCKPGKRAKIGTKFSFGEGKLIGEIIDINEDDGNRFVKFSCDGSIYAVLDEIGAMPLPPYIKEKLKDKERYQTVYSKELGSAAAPTAGLHFTPEMLDEIRKSGVKTAYVTLHVGLGTFRPVKVDDVTKHKMHTEHYIMPQKTADMINETKKNGGRVICVGTTSCRTVESVATKNGCVCADEDDTSIFIYPGYEFKCMDALITNFHLPESTLIMLVSAFAGFDNIMNAYNTAVAEKYRFFSFGDAMFIED

SEQ ID NO: 63378 - protein, 343 aa, Anaerovibrio lipolyticus
  misc_feature (1)..(343): tr|A0A1M6GJJ1|A0A1M6GJJ1_9FIRM S-adenosylmethionine:tRN A ribosyltransferase-isomerase OS=Anaerovibrio lipolyti cus DSM 3074 OX=1120997 GN=queA PE=3 SV=1
MKLTEFDYNLPEELIAQTPVEPRNSSRLMVLDPVDETIEHRHFYDLKEYLEPGDTLIFNDTRVLPARLLGWREGTGGKVEVFLLRRIDGDTWETLVKPGRKAREGQVVRFSDELTCIVQDSTDFGGRIVKFNYEGIFEEILDRLGETPLPPYIHEKLEDSERYQTVYSREKGSAAAPTAGLHFTKEQMAELKDMGVNLGFVTLHVGLGTFRPVSVDNIEEHVMHKEYYSISQETAELIKATKAAGKRVIAVGTTSIRTLESAATSVGEINGRTDWTNIFIYPGYEFKIVDGIITNFHLPKSTLIMLISAFAGREFVLKAYETAVEEKYRFFSFGDAMMIKRKG

SEQ ID NO: 63379 - protein, 343 aa, Anaerovibrio lipolyticus; identical to SEQ ID NO: 63378
  misc_feature (1)..(343): tr|A0A0B2JW44|A0A0B2JW44_9FIRM S-adenosylmethionine:tRN A ribosyltransferase-isomerase OS=Anaerovibrio lipolyti cus OX=82374 GN=queA PE=3 SV=1

SEQ ID NO: 63380 - protein, 343 aa, Anaerovibrio sp.
  misc_feature (1)..(343): tr|A0A1X1Q7I4|A0A1X1Q7I4_9FIRM S-adenosylmethionine:tRN A ribosyltransferase-isomerase OS=Anaerovibrio sp. JC8 OX=1240085 GN=queA PE=3 SV=1
MKLTEFDYNLPEELIAQTPVEPRNSSRLMVLDPVEETIEHRHFYDLKEYLEPGDTLIFNDTRVLPARLLGWREGTGGKVEVFLLRRIDGDTWETLVKPGRKAREGQIVRFSDELTCTVQDSTDFGGRIVKFNYEGIFEEILDRLGETPLPPYIHEKLEDSERYQTVYSREKGSAAAPTAGLHFTKEQMAELKDMGINLGFVTLHVGLGTFRPVSVDNIEEHVMHKEYYSIPQETADLIKATKAAGKRVIAVGTTSIRTLESAATGVGEIAGRTDWTNIFIYPGYEFKIVDGIITNFHLPKSTLIMLISAFAGREFVLKAYEKAVEEKYRFFSFGDAMMIKRRG

SEQ ID NO: 63381 - protein, 341 aa, Anaerovirgula multivorans
  misc_feature (1)..(341): tr|A0A239DR43|A0A239DR43_9FIRM S-adenosylmethionine:tRN A ribosyltransferase-isomerase OS=Anaerovirgula multivo rans OX=312168 GN=queA PE=3 SV=1
MKTKDFDFQLPEELIAQRPLEKRDHSKLMVLDKTTGEMNHTHFYDIINYLNPRDCLVLNDTRVIPARLIGEKESTGGKIEFLLLKRIDLNTWETLVKPGKKAKIGSKFQFGNGLLVAEVMDIREEGSRIVKFLYEGIFEDILDQLGKMPLPPYITESLEDNERYQTVYSKHTGSAAAPTAGLHFTEELLNKIEGKGVKIVYITLHVGLGTFRPVKVEDLQNHKMHAEYYMIDSETAKTINETKCQGGKIIAVGTTSCRTLESAAIEKGILNESSGWTDIFIYPGYQFKIIDQLITNFHLPESTLIMLVSALAGKDNVLRAYEVAVEQKYRFFSFGDSMFIK

SEQ ID NO: 63382 - protein, 361 aa, Ancylobacter aquaticus
  misc_feature (1)..(361): tr|A0A4R1ICG3|A0A4R1ICG3_ANCAQ S-adenosylmethionine:tRN A ribosyltransferase-isomerase OS=Ancylobacter aquaticu s OX=100 GN=queA PE=3 SV=1
MRVDLFDFDLPPERIALRPVSPRDAARMLVVRPGATPELADAQVRDLPDLLAPGDALVVNDTRVFPARLDGIRRRAASQGEGVQVEAMLHKRLGPDSWLALARPGKRLAVGDRIEFSAAQGAVTLAAHIEGKGEGGEVTLRFAASGPALDAAIAAIGHIPLPPYIAAKRPDDAQDRADYQTMFAAHEGSVAAPTAGLHFTPELIARLAARGVETHRVTLHVGAGTFLPVKADDTSDHRMHAEWGEVSADTAAALNAVKARGGRVVTVGTTATRLIESAASEAGRLAAWRGETDIFITPGSDFRFIDGMLTNFHLPRSTLVMLVAAFVGHDTQKRAYAHAIAQGYRFYSYGDACLLLPKARP

SEQ ID NO: 63383 - protein, 361 aa, Ancylobacter aquaticus
  misc_feature (1)..(361): tr|A0A431QTV2|A0A431QTV2_ANCAQ S-adenosylmethionine:tRN A ribosyltransferase-isomerase OS=Ancylobacter aquaticu s OX=100 GN=queA PE=3 SV=1
MRVDLFDFDLPPERIALRPVSPRDAARMLVVRPGAVPELTDAQVRDLPELLAPGDALVVNDTRVFPARLDGIRRRSSSQGEGVKVEAMLHKRLGPDAWLALARPGKRLAPGDTIEFAAAEGTDRLAAHIEAKGEGGEVTLRFAAAGPALDTAIAAIGHIPLPPYIAAKRADDAQDRADYQTMFAAHEGSVAAPTAGLHFTPELIARLAARGVETHRVTLHVGAGTFLPVKADDTQDHRMHAEWGEVSPEAAASLNAVKARGGKVVTVGTTATRLIESAASEDGRLSAWRGETDIFITPGTRFRFIDGMLTNFHLPRSTLVMLVAAFVGHDTQKRAYAHAIASGYRFYSYGDACLLLPQARP

SEQ ID NO: 63384 - protein, 361 aa, Ancylobacter rudongensis
  misc_feature (1)..(361): tr|A0A1G4QPL9|A0A1G4QPL9_9RHIZ S-adenosylmethionine:tRN A ribosyltransferase-isomerase OS=Ancylobacter rudongen sis OX=177413 GN=queA PE=3 SV=1
MRVDLFDFDLPPERIALRPVSPRDAARMLVVRPGSVPELTDAQVRDLPELLAPGDALVVNDTRVFPARLDGIRRRSSSQGEGVKVEAMLHKRLGPDAWLALARPGKRLAPGDTIEFASPNGGAVLAARVEGKGEGGEVTLRFAAAGPALDSAIAAIGHIPLPPYIAAKRADDAQDRADYQTMFAAHEGSVAAPTAGLHFTPELIARLAARGVETHRVTLHVGAGTFLPVKADDTQDHRMHAEWGEVSPEAAASLNAVKARGGKVVTVGTTATRLIESAASGDGRLSAWRGETDIFITPGTRFRFIDGMLTNFHLPRSTLVMLVAAFVGHDTQKGAYAHAIASGYRFYSYGDACLLLPQARP

SEQ ID NO: 63385 - protein, 349 aa, Ancylomarina sp.
  misc_feature (1)..(349): tr|A0A4V1MZT6|A0A4V1MZT6_9BACT S-adenosylmethionine:tRN A ribosyltransferase-isomerase OS=Ancylomarina sp. SHSM -M15 OX=2501299 GN=queA PE=3 SV=1
MKLSKFKFNLPQELIALHPAYNRDESRLMVLHKDTGEIEHRIFKDVIEYFDDKDVMVFNNTKVFPARLYGNKEKTGAEIEVFLLRELNREQRLWDVLVDPARKIRIGNKLYFGDDDLLVAEVIDNTTSRGRTLRFLFDGPYDEFKEALYSLGETPLPKFINREVEAEDAERFQTIFAKHEGAVAAPTAGMHFSRELMKRLEIKGINFAEITLHVGLGNFRDVDVEDLTKHRMDSEQIFINDKAVEIVNRAKEGKHKVCAVGTTVVRTLESSVSTMGTLKPFEGWTNKFLFPPYDFSIPDAMISNFHLPYSTLMMMVAAFGGYDKVMECYKLAIKEKYRFGTYGDAILII

SEQ ID NO: 63386 - protein, 351 aa, Ancylomarina sp.
  misc_feature (1)..(351): tr|A0A425Y860|A0A425Y860_9BACT S-adenosylmethionine:tRN A ribosyltransferase-isomerase OS=Ancylomarina sp. M1P OX=2283627 GN=queA PE=3 SV=1
MKLSKFKFNLPQELIALHPAYNRDESRLMVLHKDTGEIEHRIFKDVIEYFDDKDVMVFNNTKVFPARLSGNKEKTGAEIEVFLLRELNREQRLWDVLVDPARKIRIGNKLYFGDDDSLVAEVIDNTTSRGRTLRFLFDGSYEEFKEALYGLGETPLPRSIIEKRKVEEEDAERFQTIFAKHEGAVAAPTAGMHFSRELMKRLEIKGVDFAEVTLHVGLGNFRDVDVEDLTKHRMDSEQIFINDEAVSIVNKAKEGKHKVCAVGTTTVRTLESSVSTMGTLKPFEGWTNKFLFPPYDFSIPDAMISNFHLPYSTLMMMVAAFGGYDKVMECYEIAIKEKYRFGTYGDAILII

SEQ ID NO: 63387 - protein, 411 aa, Ancylomarina subtilis
  misc_feature (1)..(411): tr|A0A4Q7VJE2|A0A4Q7VJE2_9BACT S-adenosylmethionine:tRN A ribosyltransferase-isomerase OS=Ancylomarina subtilis OX=1639035 GN=queA PE=3 SV=1
MEVRTEDTIMNPQCIQISDFTYDLPDEKIAKYPLGNREESKLLVYRNGEIQERGFRNLPEEITEGTTMVFNNTKVIQARLIFYKETGARIEIFCLEPLNPADYNLAFQAKGVCTWKCIIGNLRKWKSGVLKMSFIFEGKEEYLCAEHIENLDGAHEIKFTWDNQELSFSEVLELTGKIPIPPYLNRDTENTDLVRYQTVYSKHEGSVAAPTAGLHFTDSVFNRLHENGVKRAELTLHVGAGTFKPVKAEQIGDHEMHTEHIQVNKDSLQQIIDAENGIVAVGTTSVRTLESLYWLGVKLLTGKENPYLLEQWDAYNLDGTYSRVDAYQAIIDFMKKENLSLFNAATQIIIAPGYEFKIISGLVTNFHQPQSTLLLLISALVGERWRDIYDYALNNKFRFLSYGDSSLLMKS

SEQ ID NO: 63388 - protein, 349 aa, Ancylomarina subtilis
  misc_feature (1)..(349): tr|A0A4Q7VM27|A0A4Q7VM27_9BACT S-adenosylmethionine:tRN A ribosyltransferase-isomerase OS=Ancylomarina subtilis OX=1639035 GN=queA PE=3 SV=1
MKLSKFKFNLPQELIALHPAYNRDESRLMVLHKDTGEIEHRIFKDVIEYFDDKDVMVFNNTKVFPARLYGNKEKTGAEIEVFLLRELNREQRLWDVLVDPARKIRIGNKLYFGDDDLLVAEVIDNTTSRGRTLRFLFDGPYDEFKEALYSLGETPLPKFINREVEAEDAERFQTIFAKHEGAVAAPTAGMHFSRELMKRLEIKGIDFAEITLHVGLGNFRDVDVEDLTKHRMDSEQIFIDDKAVEIVNRAKEGKHKVCAVGTTVVRTLESSVSTMGTLKPFEGWTNKFLFPPYDFSIPDAMISNFHLPYSTLMMMVAAFGGYDKVMECYQIAIKEKYRFGTYGDAILII

SEQ ID NO: 63389 - protein, 406 aa, Anditalea andensis
  misc_feature (1)..(406): tr|A0A074KZ53|A0A074KZ53_9BACT S-adenosylmethionine:tRN A ribosyltransferase-isomerase OS=Anditalea andensis OX =1048983 GN=queA PE=3 SV=1
MPEVSKIKLSDYQYILPDERVAKFPLAKRDESKLLHFEDGKISHVRFKELPDLIPSDSLVVFNNTKVIPARIFFIKPTGAKIEIFLLKPVEPTTEINVVMLSRGPVIWETMIGNLKRWKEGETLKGELVLDGNVVSIEATLVNRDSRLVSFTWSGSMAFCHVIEACGEVPLPPYLNRAAVAEDKPRYQTVYSKKQGAVAAPTAGLHFTPQTLTDISDKGILLDYLTLHVSAGTFQPIKEESVDQHPMHSEQVIATRTNIQNILEAKKNILAVGTTSMRSLESLYWYGVKLIEGEDDLFFIPKLYPYREYKNLPNVKESFKAILDHMNDRDLDEITGSTEIFIMPGYDFKVCNGLVTNFHQPGSTLILLVAAFTQGNWRKIYDEAMSGSYRFLSYGDSSLLWYNKIA

SEQ ID NO: 63390 - protein, 349 aa, Anditalea andensis
  misc_feature (1)..(349): tr|A0A074L1K8|A0A074L1K8_9BACT S-adenosylmethionine:tRN A ribosyltransferase-isomerase OS=Anditalea andensis OX =1048983 GN=queA PE=3 SV=1
MKLSDFKFDVPRKLISLYPQSNRDESRLMVVHKKTGQIEHKVFKDIIDYFDEGDVFVTNNTKVFPARLYGNKEKTGAKIEVFLLRELNQELRLWDVLVDPARKIRVGNKLYFGDSDLVAEVIDNTTSRGRTIRFLFDGTDEEFYKTIDTLGETPILKEFIERPIETEDRERYQTIYAEHVGAVAAPTAGMHFTHHLMRKLEIKGVEVSPITLHIGLGTFRQVDVEDLTKHKMDSENYDIPSETVELVNRALDAKKKVVSVGTTSLKTIESSVTANGRLKQSSGWTDKFIIPPYDFKIANALVTNFHLPESTLLMTTSAFGGYDLIMKAYQEAIKEKYKFFSYGDAMLII

SEQ ID NO: 63391 - protein, 341 aa, Andreesenia angusta
  misc_feature (1)..(341): tr|A0A1S1V8Y7|A0A1S1V8Y7_9FIRM S-adenosylmethionine:tRN A ribosyltransferase-isomerase OS=Andreesenia angusta O X=39480 GN=queA PE=3 SV=1
MKKSDFNFELPEELIAQTPLEDRTGSRLLIANSETGELIHGKFTDILEYLEEGDTLVMNNTKVIPARIYGKKMDTGAGIEFLLLKDLGDNRWETLVKPGKKAKVGAEIEFGDGLLACRVEDILEDGTRIVKFEYEGIFNEMLESLGEMPLPPYITERLEDRGRYQTVYAEVEGSAAAPTAGLHFTDELLEAARSKGVNIAYVTLHVGLGTFRPVKEDDIDDHIMHSEYYEIGEETARIVNETKKRGNRVIAVGTTSVRTLESCADENNMAEAKSEETDIFIYPGYEFKLVDRIITNFHLPESTLIMLVSAKLGSENTLKAYREAVDQRYRFFSFGDAMFII

SEQ ID NO: 63392 - protein, 341 aa, Andreprevotia lacus
  misc_feature (1)..(341): tr|A0A1W1XLA8|A0A1W1XLA8_9NEIS S-adenosylmethionine:tRN A ribosyltransferase-isomerase OS=Andreprevotia lacus D SM 23236 OX=1121001 GN=queA PE=3 SV=1
MQVADFDYHLPEHLIAQFPPEVRGASRLLHVDGAKLADGMFADLPKLLRVGDILVFNDTKVIKARLFGEKASGGKIEALVERVLDEHRALAHVRASKAPKPGTVLHFNGGASAVMVERRGDLFLLEFAGEQTVLELLEHAGELPLPPYITHTPDDDDAKRYQTVYARDPGAVAAPTAGLHFTEDLLHTLRGMGVHTAFLTLHVGAGTFQPVRVDDVADHVMHHERYSIPAATVDAIKAAKAAGGRVIAVGTTSLRALEAASQHGLLAEPEGDTDIFITPGYQFHAVDRLITNFHLPKSTLLMLVSAFAGYDVMRSAYAHAVAQGYRFFSYGDAMLLEPAQS

SEQ ID NO: 63393 - protein, 342 aa, Aneurinibacillus aneurinilyticus
  misc_feature (1)..(342): tr|U1YBK4|U1YBK4_ANEAE S-adenosylmethionine:tRNA ribosy ltransferase-isomerase OS=Aneurinibacillus aneurinilyti cus ATCC 12856 OX=649747 GN=queA PE=3 SV=1
MNVNDFDFHLPEELIAQNPLQERTGSRLLVLDKRTGDMEHRTFTDLKRYLKAGDTLVLNDTRVIPARLFGVKEGTGAHIEVLLLKPLGDDRWETLVRPGKRVKPGTRIVFGEHLLVAECEGNTEVGGRIVRFEYEGIFNELLDQLGEMPLPPYIKEQLEDNERYQTVYAKHRGSAAAPTAGLHFTEEYLEELKAMGVQLAFVTLHVGLGTFRPVAADVVEEHEMHSEFYTLTEENARMINETKARGGRIIAVGTTSCRTLETIGQKHGGKLVAAEGWTNIFIYPGYKFHVIDGLVTNFHLPKSTLVMLVSALAGRENILRAYNEAVNQKYRFFSFGDAMLIL

SEQ ID NO: 63394 - protein, 342 aa, Aneurinibacillus danicus
  misc_feature (1)..(342): tr|A0A511V2D2|A0A511V2D2_9BACL S-adenosylmethionine:tRN A ribosyltransferase-isomerase OS=Aneurinibacillus dani cus OX=267746 GN=queA PE=3 SV=1
MDVNDFDFYLPETLIAQNPLPDRTSSRLLVLDKRTGEVEHRTFTDLKRYLKAGDTLVLNDTRVIPARLFGVKEGTGAHIEVLLLKPLGEDRWETLVRPGKRVKPGTRIVFGDGLLIAECEESTDVGGRVVRFEYDGIFNELLDQLGEMPLPPYIKAQLEDNERYQTVYAKHRGSAAAPTAGLHFTEEYLEELKAMDVNLAFVTLHVGLGTFRPVSVDTVEEHEMHSEFYTLTEENARIINETKTNGGRIIAVGTTSCRTLETIGRKYGGKLVAEEGWTSIFIYPGYEFSVIDGLVTNFHLPKSTLVMLVSALAGRENILRAYDEAVRQEYRFFSFGDAMLIL

SEQ ID NO: 63395 - protein, 342 aa, Aneurinibacillus migulanus
  misc_feature (1)..(342): tr|A0A0K2WC13|A0A0K2WC13_ANEMI S-adenosylmethionine:tRN A ribosyltransferase-isomerase OS=Aneurinibacillus migu lanus OX=47500 GN=queA PE=3 SV=1
MNVNDFDFHLPEELIAQNPLQERTGSRLLVLNKRTGDMEHRTFTDLKHYLKAGDTLVLNDTRVIPARLFGVKEGTGAHIEVLLLKPLGEDRWETLVRPGKRVKPGTRIVFGDHLLIAECEESTEVGGRIVRFEYEGIFNELLDQLGEMPLPPYIKAQLEDSERYQTVYAKHRGSAAAPTAGLHFTEEYLEELKAMGVQLAFVTLHVGLGTFRPVAADTVEEHEMHSEFYTLTEENARMINETKARGGRIIAVGTTSCRTLETIGQKHGGKLVAAEGWTSIFIYPGYEFRVIDGLVTNFHLPKSTLVMLVSALAGRENILRAYNEAVEQKYRFFSFGDAMLIL

SEQ ID NO: 63396 - protein, 342 aa, Aneurinibacillus migulanus
  misc_feature (1)..(342): tr|A0A0D1W364|A0A0D1W364_ANEMI S-adenosylmethionine:tRN A ribosyltransferase-isomerase OS=Aneurinibacillus migu lanus OX=47500 GN=queA PE=3 SV=1
MNVNDFDFHLPEELIAQNPLQERTGSRLLVLNKRTGDMEHRTFTDLKHYLKAGDTLVLNDTRVIPARLFGVKEGTGAHIEVLLLKPLGEDRWETLVRPGKRVKPGTRIVFGDHLLIAECEESTEVGGRIVRFEYEGIFNELLDQLGEMPLPPYIKAQLEDSERYQTVYAKHRGSAAAPTAGLHFTEEYLEELKAMGVQLAFVTLHVGLGTFRPVAADTVEEHEMHSEFYTLTEENARMINETKARGGRIIAVGTTSCRTLETIGQKHGGKLVAAEGWTSIFIYPGYEFSVIDGLVTNFHLPKSTLVMLVSALAGRENILRAYNEAVEQKYRFFSFGDAMLIL

SEQ ID NO: 63397 - protein, 342 aa, Aneurinibacillus soli
  misc_feature (1)..(342): tr|A0A0U5ATC2|A0A0U5ATC2_9BACL S-adenosylmethionine:tRN A ribosyltransferase-isomerase OS=Aneurinibacillus soli OX=1500254 GN=queA PE=3 SV=1
MNVQDFDFYLPEELIAQNPLADRTGSRLLVLDKESGAVAHRQFTGLKEYVKAGDTLVLNDTRVIPARLFGVKEGTGAHIEVLLLKPLGDDKWETLVRPGKRVREGARIQFGDGLLVAECLGSTDIGGRIMKFEYDGIFNELLDQLGEMPLPPYIKAQLSDRERYQTVYAKHSGSAAAPTAGLHFTEDYLEEIKALGVNLAFVTLHVGLGTFRPVSADTIEEHEMHSEFYSLNEENARIINETKARGNRIIAVGTTSCRTLETIGKKYNGELRAEEGWTGIFIYPGYEFSVIDGMVTNFHLPKSTLVMLISALAGREHVLRAYKEAVEEEYRFFSFGDAMLIL

SEQ ID NO: 63398 - protein, 342 aa, Aneurinibacillus sp.
  misc_feature (1)..(342): tr|A0A109QIJ6|A0A109QIJ6_9BACL S-adenosylmethionine:tRN A ribosyltransferase-isomerase OS=Aneurinibacillus sp. XH2 OX=1450761 GN=queA PE=3 SV=1
MNVNDFDFYLPEELIAQNPLPERTASRLLVLNKQTGAVEHRQFTDLKGYLKAGDTLVLNDTRVIPARLFGVKEGTGAHIEVLLLKPLGDDCWETLVKPGKRVKPGTRILFGDGLLTAECLDSTEVGGRMIRFEYKGIFNELLDQLGEMPLPPYIKAQLNDSERYQTVYAKHRGSAAAPTAGLHFTKEYLAELKAMGINLAFLTLHVGLGTFRPVMAETVEEHEMHSEYYMLNEENARIINETKARGGRIVAVGTTSCRTLETIGKKHGGKLVAEEGWTNIFIYPGYTFSVIDGLVTNFHLPKSTLVMLVSALAGRENILRAYEEAIRLKYRFFSFGDAMLIL

SEQ ID NO: 63399 - protein, 342 aa, Aneurinibacillus thermoaerophilus; identical to SEQ ID NO: 63398
  misc_feature (1)..(342): tr|A0A1G7YA34|A0A1G7YA34_ANETH S-adenosylmethionine:tRN A ribosyltransferase-isomerase OS=Aneurinibacillus ther moaerophilus OX=143495 GN=queA PE=3 SV=1

SEQ ID NO: 63400 - protein, 342 aa, Anoxybacillus amylolyticus
  misc_feature (1)..(342): tr|A0A160F3Z9|A0A160F3Z9_9BACI S-adenosylmethionine:tRN A ribosyltransferase-isomerase OS=Anoxybacillus amyloly ticus OX=294699 GN=queA PE=3 SV=1
MKVDLFDFYLPEELIAQTPLSDREASRLMVLNKRTGEINHETFRAILSYLQAGDCLVLNDTRVLPARLYGEKEGTGAKVEVLLLKQLDGDRWETLVKPAKRVKEGTIITFGDGRLQAVCEGTLEHGGRVLTFHYNGIFYEILESLGEMPLPPYIKEQLEDRERYQTVYARERGSAAAPTAGLHFTEQLLDDIRQKGVHIAFITLHVGLGTFRPVNVENVEEHDMHAEFYQMSEETARLLNDVKQRGGRIIAVGTTSTRTLETIATRHNGTFVAERGWTDIFIYPGYEFRAIDGMVTNFHLPKSTLIMLVSALAGRENVLHAYEEAVKERYRFFSFGDAMLII

SEQ ID NO: 63401 - protein, 342 aa, Anoxybacillus amylolyticus
  misc_feature (1)..(342): tr|A0A4R1GKE8|A0A4R1GKE8_9BACI S-adenosylmethionine:tRN A ribosyltransferase-isomerase OS=Anoxybacillus amyloly ticus OX=294699 GN=queA PE=3 SV=1
MKVDLFDFHLPEELIAQTPLPDRAASRLMVLDKRTGAIRHETFRNIISYLNPSDCLVLNDTRVMPARLYGEKEETGGTVEVLLLKQLDGDRWETLVKPGKRVKPGTKLTFGEGKLEAVCLDTLEHGGRVLEFSYDGLFYEVLAELGEMPLPPYIKEKLDDPERYQTVYAREIGSAAAPTAGLHFTEELLDAIREKGVHIVFITLHVGLGTFRPVQVDEVEKHDMHAEFYQMSEETAETLNRVREQGGRIIAVGTTSTRTLETIAGKHNGRFVAESGWTDIFIYPGYEFKGIDGLVTNFHLPKSTLIMLVSALAGRENILHAYQVAVKERYRFFSFGDAMLII

SEQ ID NO: 63402 - protein, 343 aa, Anoxybacillus ayderensis
  misc_feature (1)..(343): tr|A0A0D0HRZ4|A0A0D0HRZ4_9BACI S-adenosylmethionine:tRN A ribosyltransferase-isomerase OS=Anoxybacillus ayderen sis OX=265546 GN=queA PE=3 SV=1
MKIDLFDFYLPEELIAQTPLPNREASRLMVLHKQTGEVTHEPTFRSILSYLKEGDCLVLNDTRVLPARLYGEKEGTGAHIEVLLLKQLSGDQWETLVKPAKRVKVGTTLSFGDGRLRAECVAELEHGGRILSFSYDGIFLEVLESLGEMPLPPYIKEQLDDRERYQTVYAREAGSAAAPTAGLHFTEQLLEDVKKKGVHLAFITLHVGLGTFRPVNVENIEEHDMHAEFYQMTEETANLLNDVKAKGGRIIAVGTTSTRTLETIASRHDGTFVAESGWTDIFIYPGYTFRAIDGMITNFHLPKSTLIMLVSALAGREHVLRAYEEAVKERYRFFSFGDAMLII

SEQ ID NO: 63403 - protein, 343 aa, Anoxybacillus ayderensis
  misc_feature (1)..(343): tr|A0A1X6MG10|A0A1X6MG10_9BACI S-adenosylmethionine:tRN A ribosyltransferase-isomerase OS=Anoxybacillus ayderen sis OX=265546 GN=queA PE=3 SV=1
MKVDLFDFHLPEELIAQTPLPNREASRLMVLHKQTGEVTHEPTFRSILSYLKEGDCLVLNDTRVLPARLYGEKEGTGAHIEVLLLKQLDGDQWETLVKPAKRVKVGTTLSFGDGRLRAECVAELEHGGRILSFSYDGIFLEVLESLGEMPLPPYIKAQLDDRERYQTVYAREAGSAAAPTAGLHFTQQLLDDVQKKGVHLAFITLHVGLGTFRPVNVEHIEEHDMHAEFYQMTEETANLLNDVKAKGGRIIAVGTTSTRTLETIASRHDGTFVAESGWTDIFIYPGYTFRAIDGMITNFHLPKSTLIMLVSALAGREHVLRAYEEAVKERYRFFSFGDAMLII

SEQ ID NO: 63404 - protein, 345 aa, Anoxybacillus flavithermus
  misc_feature (1)..(345): tr|B7GFN0|B7GFN0_ANOFW S-adenosylmethionine:tRNA ribosy ltransferase-isomerase OS=Anoxybacillus flavithermus (s train DSM 21510 / WK1) OX=491915 GN=queA PE=3 SV=1
MNMKIDLFDFYLPEELIAQTPLPNRDASRLMVLDKQTGEVTHESTFRSILSYLKEGDCLVLNDTRVLPARLYGEKEETGAHIEVLLLKQLDGDQWETLVKPAKRVKVGTIISFGDGRLRAECVAELEHGGRILSFSYDGIFLEVLESLGEMPLPPYIKAQLHDRERYQTVYAREAGSAAAPTAGLHFTEQLLEDVRKKGVHLAFITLHVGLGTFRPVNVENIEEHDMHAEFYQMSEQTAQLLNDVKAQGGRIIAVGTTSTRTLETIASRHDGTFVAESGWTDIFIYPGYTFRAIDGIITNFHLPKSTLIMLVSALAGREHVLRAYEEAVKERYRFFSFGDAMLII

SEQ ID NO: 63405 - protein, 343 aa, Anoxybacillus flavithermus
  misc_feature (1)..(343): tr|A0A178T6E4|A0A178T6E4_9BACI S-adenosylmethionine:tRN A ribosyltransferase-isomerase OS=Anoxybacillus flavith ermus OX=33934 GN=queA PE=3 SV=1
MKVDLFDFYLPEELIAQTPLPNREASRLMVLDKKTGEVTHEPTFRSILSYLKEGDCLVLNDTRVLPARLYGEKEETGAHIEVLLLKQLDGDQWETLVKPAKRVKVGTIISFGDGRLRAECVAELEHGGRILSFSYDGIFLEVLESLGEMPLPPYIKAQLHDRERYQTVYAREAGSAAAPTAGLHFTEQLLEDVRKKGVHLAFITLHVGLGTFRPVNVENIEEHDMHAEFYQMSEQTAQLLNDVKAQGGRIIAVGTTSTRTLETIASRHDGTFVAESGWTDIFIYPGYTFRAIDGMITNFHLPKSTLIMLVSALAGREHVLRAYEEAVRERYRFFSFGDAMLII

SEQ ID NO: 63406 - protein, 343 aa, Anoxybacillus gonensis
  misc_feature (1)..(343): tr|A0A0A2SFH1|A0A0A2SFH1_9BACI S-adenosylmethionine:tRN A ribosyltransferase-isomerase OS=Anoxybacillus gonensi s OX=198467 GN=queA PE=3 SV=1
MKVDLFDFYLPEELIAQTPLPNREASRLMVLHKQTGEVTHEPTFRSILSYLKEGDCLVLNDTRVLPARLYGEKEGTGAHIEVLLLKQLDGDRWETLVKPAKRVKIGTTISFGDGRLRAECVAELEHGGRILSFSYDGIFLEVLESLGEMPLPPYIKAQLDDRERYQTVYAREAGSAAAPTAGLHFTQQLLEDVQKKGVHLAFITLHVGLGTFRPVNVEHIEEHDMHAEFYQMTEETANLLNDVKAKGGRIIAVGTTSTRTLETIASRHDGTFVAESGWTDIFIYPGYTFRAIDGMITNFHLPKSTLIMLVSALAGRENVLRAYEEAVKERYRFFSFGDAMLII

SEQ ID NO: 63407 - protein, 343 aa, Anoxybacillus gonensis
  misc_feature (1)..(343): tr|M5QTG3|M5QTG3_9BACI S-adenosylmethionine:tRNA ribosy ltransferase-isomerase OS=Anoxybacillus gonensis OX=198 467 GN=queA PE=3 SV=1
MKVDLFDFHLPEELIAQTPLPNREASRLMVLHKQTGEVTHEPTFRSILSYLKEGDCLVLNDTRVLPARLYGEKEGTGAHIEVLLLKQLDGDRWETLVKPAKRVKIGTTISFGDGRLRAECVAELEHGGRILSFSYDGIFLEVLESLGEMPLPPYIKAQLDDRERYQTVYAREAGSAAAPTAGLHFTQQLLEDVQKKGVHLAFITLHVGLGTFRPVNVEHIEEHDMHAEFYQMTEETANLLNDVKAKGGRIIAVGTTSTRTLETIASRHDGTFVAESGWTDIFIYPGYTFRAIDGMITNFHLPKSTLIMLVSALAGRENVLRAYEEAVKERYRFFSFGDAMLII

SEQ ID NO: 63408 - protein, 343 aa, Anoxybacillus kamchatkensis
  misc_feature (1)..(343): tr|A0A4S3L3Z0|A0A4S3L3Z0_9BACI S-adenosylmethionine:tRN A ribosyltransferase-isomerase OS=Anoxybacillus kamchat kensis OX=196180 GN=queA PE=3 SV=1
MKVDLFDFHLPEELIAQTPLPNREASRLMVLHKQTGEVTHEPTFRSILSYLKKGDCLVLNDTRVLPARLYGEKEGTGAHIEVLLLKQLDGDRWETLVKPAKRVKIGTTISFGDGRLRAECVAELEHGGRILSFSYDGIFLEVLESLGEMPLPPYIKAQLDDRERYQTVYAREAGSAAAPTAGLHFTQQLLEDVQKKGVHLAFITLHVGLGTFRPVNVEHIEEHDMHAEFYQMTEETANLLNDVKAKGGRIIAVGTTSTRTLETIASRHDGTFVAESGWTDIFIYPGYTFRAIDGMITNFHLPKSTLIMLVSALAGRENVLRAYEEAVKERYRFFSFGDAMLII

SEQ ID NO: 63409 - protein, 343 aa, Anoxybacillus kamchatkensis; identical to SEQ ID NO: 63407
  misc_feature (1)..(343): tr|A0A346DHS6|A0A346DHS6_9BACI S-adenosylmethionine:tRN A ribosyltransferase-isomerase OS=Anoxybacillus kamchat kensis G10 OX=1212546 GN=queA PE=3 SV=1

SEQ ID NO: 63410 - protein, 343 aa, Anoxybacillus pushchinoensis
  misc_feature (1)..(343): tr|A0A1I0T932|A0A1I0T932_9BACI S-adenosylmethionine:tRN A ribosyltransferase-isomerase OS=Anoxybacillus pushchi noensis OX=150248 GN=queA PE=3 SV=1
MKVDLFDFYLPEELIAQTPLPNREASRLMVLNKQTGEVTHEPTFRSILSYLHEGDCLVLNDTRVLPARLYGEKEGTGAHIEVLLLKQLDGDHWETLVKPAKRVKVGTVISFGDGRLRAECVAELEHGGRVLSFSYDGIFLEVLESLGEMPLPPYIKAQLDDRDRYQTVYAREAGSAAAPTAGLHFTEQLLDDVKKKGVHLAFITLHVGLGTFRPVSVENVEEHDMHAEFYQMTEGTAQLLNDVKAKGGRIIAVGTTSTRTLETIAFRHQGTFVAESGWTDIFIYPGYTFRAIDGMITNFHLPKSTLIMLVSALAGRENVLRAYEEAVKARYRFFSFGDAMLII

SEQ ID NO: 63411 - protein, 343 aa, Anoxybacillus sp.
  misc_feature (1)..(343): tr|A0A167U486|A0A167U486_9BACI S-adenosylmethionine:tRN A ribosyltransferase-isomerase OS=Anoxybacillus sp. B7M 1 OX=1490057 GN=queA PE=3 SV=1
MKIDLFDFHLPEELIAQTPLANREASRLLMLNKNTGETKHHETFRAILSYLNEGDCLVLNDTRVLPARLYGEKSDTGAKIEVLLLKQVEGDRWETLVKPAKRVKEGTSILFGDGRLKATCRQELEHGGRILEFAYDGVFYEVLESLGEMPLPPYIKEQLDDQERYQTVYARERGSAAAPTAGLHFTEQLLEDIRQKGVHLAFITLHVGLGTFRPVNVENIEEHDMHAEFYQMTEGTARLLNEVKEKGGRIIAVGTTSTRTLETIASRHNGTFIAESGWTDIFIYPGYQFQAIDGMITNFHLPKSTLIMLVSALAGRENVLRAYKEAVEKRYRFFSFGDAMLII

SEQ ID NO: 63412 - protein, 343 aa, Anoxybacillus sp.
  misc_feature (1)..(343): tr|A0A094M8P3|A0A094M8P3_9BACI S-adenosylmethionine:tRN A ribosyltransferase-isomerase OS=Anoxybacillus sp. KU2 -6(11) OX=1535751 GN=queA PE=3 SV=1
MKVDLFDFYLPEELIAQTPLPNREASRLMVLNKQTGEVTHEPTFRSILSYLKEGDCLVLNDTRVLPARLYGEKEGTGAHIEVLLLKQLDGDQWETLVKPAKRVKIGTMLSFGDGRLRAECVAELEHGGRILSFSYDGIFLEVLESLGEMPLPPYIKAQLDDRERYQTVYAREAGSAAAPTAGLHFTEQLLEDVRKKGVHLAFITLHVGLGTFRPVNVENIEEHDMHAEFYQMTEQTAQLLNDVKAKGGRIIAVGTTSTRTLETIASRHDGMFVAESGWTDIFIYPGYTFRAIDGMITNFHLPKSTLIMLVSALAGREHVLRAYEEAVKERYRFFSFGDAMLII

SEQ ID NO: 63413 - protein, 343 aa, Anoxybacillus suryakundensis
  misc_feature (1)..(343): tr|A0A0K6GQZ0|A0A0K6GQZ0_9BACI S-adenosylmethionine:tRN A ribosyltransferase-isomerase OS=Anoxybacillus suryaku ndensis OX=1325335 GN=queA PE=3 SV=1
MKVDLFDFYLPEELIAQTPLPNREASRLMVLDKRTGKVTHEPTFRSILSYLKEGDCLVLNDTRVLPARLYGEKEGTGAHIEVLLLKQLDGDQWETLVKPAKRVKIGTTLSFGDGRLRAECVAELEHGGRILSFSYDGIFLEVLESLGEMPLPPYIKAQLHDRERYQTVYAREAGSAAAPTAGLHFTEQLLEDVRKKGVHLAFITLHVGLGTFRPVNVENIEEHDMHAEFYQMSEGTAQLLNDVKAKGGRIIAVGTTSTRTLETIASRHDGTFVAESGWTDIFIYPGYTFRAIDGMITNFHLPKSTLIMLVSALAGREHVLRAYEEAVKERYRFFSFGDAMLII

SEQ ID NO: 63414 - protein, 343 aa, Anoxybacillus thermarum
  misc_feature (1)..(343): tr|A0A0D0QZL8|A0A0D0QZL8_9BACI S-adenosylmethionine:tRN A ribosyltransferase-isomerase OS=Anoxybacillus thermar um OX=404937 GN=queA PE=3 SV=1
MKVDLFDFHLPEELIAQTPLPNRESSRLMVLNKRTGEIAHEPTFRSILSYLKEGDCLVLNDTRVLPARLYGEKEGTGAHIEVLLLKQVDGDQWETLVKPAKRVKVGTTLSFGDGRLRAECVAELEHGGRILSFSYEGMFLEVLESLGEMPLPPYIKAQLDDRERYQTVYAREAGSAAAPTAGLHFTQQLLEDVQKKGVHIVFITLHVGLGTFRPVNVEHIEEHDMHAEFYQMTEETANLLNDVKAKGGRIIAVGTTSTRTLETIASRHDGTFVAESGWTDIFIYPGYTFRAIDGMITNFHLPKSTLIMLVSALAGREHVLRAYEEAVKERYRFFSFGDAMLII

SEQ ID NO: 63415 - protein, 342 aa, Anoxybacillus vitaminiphilus
  misc_feature (1)..(342): tr|A0A327Y922|A0A327Y922_9BACI S-adenosylmethionine:tRN A ribosyltransferase-isomerase OS=Anoxybacillus vitamin iphilus OX=581036 GN=queA PE=3 SV=1
MKVDLFDFYLPEELIAQTPLPDREASRLMVLDKKTGKTKHETFRAILSYLKEGDCLVLNDTRVLPARLYGEKEDTGAKIEVLLLKQTEGDRWETLVKPAKRVKIGTTVSFGDGRLKATCIDTLEHGGRVLEFAYNGVFYEVLESLGEMPLPPYIKEQLDDRERYQTVYARERGSAAAPTAGLHFTEQLLDDIRAKGVHIAFITLHVGLGTFRPISVENVEEHDMHAEFYQMTEGTARLLNEVKQKGGRIIAVGTTSTRTLETIASKHNGTFVAESGWTDIFIYPGYEFKAIDGMVTNFHLPKSTLIMLVSALAGRENVLRAYEEAVKERYRFFSFGDAMLII

SEQ ID NO: 63416 - protein, 340 aa, Anoxybacter fermentans
  misc_feature (1)..(340): tr|A0A3Q9HQ93|A0A3Q9HQ93_9FIRM S-adenosylmethionine:tRN A ribosyltransferase-isomerase OS=Anoxybacter fermentan s OX=1323375 GN=queA PE=3 SV=1
MKVVEFDFDLPEELIAQTPIEPRDHSRLLVVFKNRDGWKEGIFKDIVNYLNPGDLLVFNDTKVIPARLYGNKKTGAVIEVLLLTSLSDDKWEVLVRPGKKMRIGDEVIFGNGLLKGKVIDYTDFGGRVMEFSYKGDFDQIIDQLGEMPLPPYITAELKNPDRYQTVYAARRGSAAAPTAGLHFTEQLIEDLRDKGIQTAYVTLHVGLGTFRPVKVDEVEDHVMHSEFYEVSSKTADLINSIRAKGGRVIAVGTTTTRTLETVADENGIIHPGSGWTDIFIYPGYKFKAIDGLITNFHLPKSTLIMMVSALIGREKVMQAYQYAIKKRYRFFSFGDAMLII

SEQ ID NO: 63417 - protein, 349 aa, Anseongella ginsenosidimutans
  misc_feature (1)..(349): tr|A0A4R3KNW5|A0A4R3KNW5_9SPHI S-adenosylmethionine:tRN A ribosyltransferase-isomerase OS=Anseongella ginsenosi dimutans OX=496056 GN=queA PE=3 SV=1
MKLSQFGFKLPESLIAHSPAGHRDESRLMVVHKDSGKIEHKVFKDVIDYFDEKDVLILNNTKVFPARLYGTKEKTAAKIEVFLLRELNREMRLWDVLVDPARKIRVGNKLYFGENDLLVAEVVDNTTSRGRTIRFLFDGTDEEFREAIEILGETPLPKYIKRRPTPEDKDRYQTIYAKHEGAVAAPTAGLHFSRELMKRLELKGVDFAEVTLHVGLGTFRQVEVEDLTKHKMDSEHFMISPEHAEMVNKALAAKQRICAVGTTSMRAIESAVSANKKLKPANDWTSKFIFPPYEFSIANSMVTNFHTPESTLLMMVAAFGGYDLIMQAYNIAVKEKYRFYSYGDAMLII

SEQ ID NO: 63418 - protein, 349 aa, Antarcticibacterium flavum
  misc_feature (1)..(349): tr|A0A5B7X8A9|A0A5B7X8A9_9FLAO S-adenosylmethionine:tRN A ribosyltransferase-isomerase OS=Antarcticibacterium f lavum OX=2058175 GN=queA PE=3 SV=1
MKLSNFNFELPKELLAEYPAENRDEARLMVLNRKEQTIEHKLFKDVLDYFEPKDVMVLNNTKVFPARLYGNKEKTGARIEVFLLRELNAETKLWDVLVDPARKIRIGNKLYFGEDESLVAEVIDNTTSRGRTLRFLYDGSYAEFRKKLEELGETPLPKYIKREVEPEDQERYQTIYAKKEGAVAAPTAGLHFSKHLLKRLEIKGVDFAEVTLHVGLGTFNPVEVEDLSKHKMDSEEAFIEKAATDTINKAIAEKRRICAVGTTVMRVLESSVSSNHTLNEFSGWTNKFIFPPYDFSIANCMITNFHTPKSTLMMMVSAFAGHDFMKKAYAEAIKENYKFYTYGDAMLIL

SEQ ID NO: 63419 - protein, 349 aa, Antarcticibacterium sp.
  misc_feature (1)..(349): tr|A0A5B8YL05|A0A5B8YL05_9FLAO S-adenosylmethionine:tRN A ribosyltransferase-isomerase OS=Antarcticibacterium s p. PAMC 28998 OX=2585771 GN=queA PE=3 SV=1
MKLSQFGFDLPEELLAEYPAENRDEARLMVLNRKEQTIEHKLFKDVLEYFEPNDVMVLNNTKVFPARLYGNKEKTGARIEVFLLRELNAETKLWDVLVDPARKIRIGNKLYFGDDESLVAEVIDNTTSRGRTLRFLYDGSYAEFRKKLEDLGETPLPKYIKREVQPEDQERYQTIYAKKEGAVAAPTAGLHFSKHLLKRLEIKGVEFAEVTLHVGLGTFNPVEVEDLSKHKMDSEEAFIEEKAVLTINKAIKERRRICAVGTTSMRVLESAVSSNHTLNEFSGWTNKFIFPPYDFSIANAMITNFHTPKSTLMMMVSAFAGHDFMKKAYAEAIKEKYKFYTYGDAMLII

SEQ ID NO: 63420 - protein, 352 aa, Antarctobacter heliothermus
  misc_feature (1)..(352): tr|A0A239ANM1|A0A239ANM1_9RHOB S-adenosylmethionine:tRN A ribosyltransferase-isomerase OS=Antarctobacter heliot hermus OX=74033 GN=queA PE=3 SV=1
MKLSDFDFDLPDRLIATRPARPRSSARLLVAEGDAITDAHVFDIAEWLRPGDRLILNDTKVIPARLQGIRKRVSDAGETEARIEVTLLEPQADGTWAALIKPLKKVRDGEDIRFSNDLSAILEAREAGQGKLRFNLSGEDFDAALNAAGAMPLPPYIAAKRAADDRDREDYQTVWARNTGAVAAPTASLHFDDALLAALASKGVTFTHVTLHVGAGTFLPVKVEDVTSHKMHGEWGEVTETAATEIAATRAAGGRIIPVGTTALRLIETAARSGQIAPFRGVTDIFIYPGFTFNVTDALMTNFHLPKSTLMMLVSALMGPERIRAIYDHAVAGDYRFFSYGDASLLLPPQRG

SEQ ID NO: 63421 - protein, 351 aa, Antarctobacter heliothermus
  misc_feature (1)..(351): tr|A0A222E5X0|A0A222E5X0_9RHOB S-adenosylmethionine:tRN A ribosyltransferase-isomerase OS=Antarctobacter heliot hermus OX=74033 GN=queA PE=3 SV=1
MKLSDFDFDLPDRLIATRPARPRSSARLLVAEGDAITDAHVFDIARWLRPGDRLILNDTKVIPARLQGVRKRVSDAGETEARIEVTLLEPQADGTWAALIKPLKKVRDGEEVIFSNDLSAVLEAREDGRGSLRFNLSGEDFDAALNAAGAMPLPPYIAAKRAADDRDREDYQTVWARNTGAVAAPTASLHFDDALLAALTAKGVSFTHVTLHVGAGTFLPVKVEDVTSHKMHGEWGEVTETAAAEIAATRAAGGRIIPVGTTALRLIETAARGGRIAPFQGVTDIFIYPGFTFNVTDALMTNFHLPKSTLMMLVSALMGSERIRAIYEHAVAEDYRFFSYGDASLLLPHRD

SEQ ID NO: 63422 - protein, 351 aa, Antricoccus suffuscus
  misc_feature (1)..(351): tr|A0A2T0ZZ63|A0A2T0ZZ63_9ACTN S-adenosylmethionine:tRN A ribosyltransferase-isomerase OS=Antricoccus suffuscus OX=1629062 GN=CLV47_1084 PE=3 SV=1
MIAPNIHFPSPDSTTAPRPPEARGLARDGVRLMVATGESTAHARFRDLPSYVETGDLLVVNNSGTLAAELDAHWRGAPIVVHVATRLDNGHWVIELRSAPDAAEPVLDAEAGDTVDLPAGARLDLLAPYPRENSSPTGHGNRLWQVALIGEASLTNLMALFGRPIAYGYLDKRYPLPAYQTVFGIRPGSAEMASAARPFTTELVTRLISSGVGIVPITLHTGVSSQDAGEFPQAEPFDVPRSTAQAINRTRANGRRVIAVGTTATRAVESAVTADNVVVARSDWTERIVTPADPPRIVDGLITGWHNPEASHLLLVEAVAGRELTQRAYDAAIAHEYLWHEFGDSALLLPR

SEQ ID NO: 63423 - protein, 380 aa, Aphanizomenon flosaquae
  misc_feature (1)..(380): tr|A0A1B7VMJ7|A0A1B7VMJ7_APHFL S-adenosylmethionine:tRN A ribosyltransferase-isomerase OS=Aphanizomenon flos-aq uae LD13 OX=1710894 GN=queA PE=3 SV=1
MKQQILPNQTQLEAVNDINLDCLLSNYDYELPPELIAQNPAVPRDSSKLLVVNSAETGKTIPPLHHIFRDLSELLKPGDLLVMNNTKVIPARLYGCRSTGAEVEVLLLEERRHNCWLALVKPGKRFKVGSEIIFTAVDDGEKQELRATVVESDPETGGRLLQFDLPPEVPLVQVLGKFGQIPLPPYITASTAADEQYQTVYAQEQGAIAAPTAGLHFTPSLLEKLRNYGINQAFITLHVGIGTFRPVEVEDVTTHAMHKEWIEVSSDTVEQVLATRAAGGRIIAVGTTAVRALEGAAQLGALQPFVGQTNLFIYPGYKWQVVEGLITNFHLPRSSLLMLVSALIGRKRLLDLYEQAIAAQYRFYSFGDAMLILPEGKNIQ

SEQ ID NO: 63424 - protein, 291 aa, Aphanizomenon flosaquae
  misc_feature (1)..(291): tr|A0A1B7WJT9|A0A1B7WJT9_APHFL S-adenosylmethionine:tRN A ribosyltransferase-isomerase (Fragment) OS=Aphanizome non flos-aquae WA102 OX=1710896 GN=AN484_25045 PE=3 SV= 1
MKQQILQNQTQLEAANDINLDCLLSSYDYELPPELIAQNPAVPRDSSKLLVVNSAETGKTIPPLHHIFRDLSELLKPGDLLVMNNTKVIPARLYGCRSTGAEVEVLLLEERRHNCWLALVKPGKRFKVGSEIIFTAVDDGEQQELRATVVESDPGTGGRLLQFDLPPEVPLVQVLGKFVQIPLPPYITASTAADEQSQTVYAQDQGAIAAPAAGLHFTPSLLEKMRNYGINQAFITLHVGIGTFRPVEVKDVTTHVMHKEWIEVSSDTVEQVLATRAAGGRIIAVGTTAVR

SEQ ID NO: 63425 - protein, 364 aa, Aphanocapsa feldmannii
  misc_feature (1)..(364): tr|A0A524RTZ1|A0A524RTZ1_9CYAN S-adenosylmethionine:tRN A ribosyltransferase-isomerase OS=Aphanocapsa feldmanni i 277cI OX=2507554 GN=queA PE=3 SV=1
MQADGPRCDDRLSSYSYELPEKAIAQMAVEPRHSARLMALDAAGGWRDRIVADLPGLLRPGDLLVLNDTRVLKARLHIRRSDGGAGELLLLEPRSEDTWLSLVKPGRRIRVGDQLQLTTPGGPIGIAVVDADQASGGRLLRFPLRGMDAMEQLLNSCGHMPLPPYIRDSSQADARYQTTYAEKPGAVAAPTAGLHLSHELRHWLAAAGVRSATLTLHVGLGTFRPLDTEDLSRLELHSERVEVSRQLVDAVRTTRAAGGRVIAVGTTSCRALEGAAQAHGGQLDAFSGRVKLCIRPGYRFRVVQGLLTNFHLPCSSLLLLVSALIGRERLLEHYADALASGYRFYSYGDAMWIDPEAVLPEARP

SEQ ID NO: 63426 - protein, 364 aa, Aphanocapsa feldmannii
  misc_feature (1)..(364): tr|A0A524RGH5|A0A524RGH5_9CYAN S-adenosylmethionine:tRN A ribosyltransferase-isomerase OS=Aphanocapsa feldmanni i 288cV OX=2507555 GN=queA PE=3 SV=1
MQADGPRCDDRLSSYSYELPEKAIAQMAVEPRHSARLMALDAAGGWRDRIVADLPGLLRPGDLLVLNDTRVLKARLRIRRSDGGAGELLLLEPRSEDTWLSLVKPGRRIRVGDQLQLTTPGGPIGIAVVDADQASGGRLLRFPLRGMDAMEQLLNSCGHMPLPPYIRDSSQADARYQTTYAEKPGAVAAPTAGLHLSHELRHWLAAAGVRSATLTLHVGLGTFRPLDTEDLSRLELHSERVEVSRQLVDAVRTTRAAGGRVIAVGTTSCRALEGAAQAHGGQLDAFSGRVKLCIRPGYRFRVVEGLLTNFHLPCSSLLLLVSALIGRERLLEHYADALASGYRFYSYGDAMWIDPEAVLPEARP

SEQ ID NO: 63427 - protein, 373 aa, Aphanothece cf.
  misc_feature (1)..(373): tr|A0A2T1EZ90|A0A2T1EZ90_9CHRO S-adenosylmethionine:tRN A ribosyltransferase-isomerase OS=Aphanothece cf. minut issima CCALA 015 OX=2107695 GN=queA PE=3 SV=1
MPDPADLRLSSYDFALPQERIAQRPVEPRHAARLLAVDPAGVGPAPHARHLSAWDLQHELRPGDLLVVNDTRVLRARLEARRSGGGAVELLVLEPWPAGAGLWLCLARPAKKLRPGDRLEVVAEGQPPLTVEVVGSDPATGGRIVQFPLECADAAALEPLLVQYGAIPLPPYIHEHDASDNERYQTRYAARPGAVAAPTAGLHLSDELLAAIRERGVGVATTTLHVGLGTFRPIETEDLSALELHSEWVEVSPQLVEAVAACRAAGGRVIAIGTTSVRSLEAVAQLHGGELRPHTGPVNLVIQPGYRFAVVQGLLTNFHLPKSSLLLLVSALIGRERLLALYGEAIGRRYRFFSYGDAMWIAPEAVLPGARPA

SEQ ID NO: 63428 - protein, 365 aa, Aphanothece hegewaldii
  misc_feature (1)..(365): tr|A0A2T1LST1|A0A2T1LST1_9CHRO S-adenosylmethionine:tRN A ribosyltransferase-isomerase OS=Aphanothece hegewaldi i CCALA 016 OX=2107694 GN=queA PE=3 SV=1
MTSDQLLSGYDYTLPSELIAQNPVNPRDHSRLLIIDSLNTHKHGIFQDLTNWLLPGDLLVLNNTQVIPARLYGRKATGAPVEILLLEERINNCWLALVKPGKRFKIGSEVWFYPFNHPEQSESNILKAKVIDRDLATGGRLLQFQIPPHQSFLTLLEQFGQIPFPPYVTASEADPSQYQTVYAQELGSVAAPTAGLHFTEELLQKLQEMGVNLAYVTLHVGVGTFRPVEVEDITQHIMHQEWIELPQKTVDLIQETKAKGSRVIAVGTTATRTLEGAMKEIKAAGGDHLAAFRGKTDLFIYPGYQWQVIDGLITNFHLPKSSLLMLVSALIGRERLLALYAEAIKEKYRFYSFGDAMLILPSAVI

SEQ ID NO: 63429 - protein, 390 aa, Aphanothece sacrum
  misc_feature (1)..(390): tr|A0A401IHN6|A0A401IHN6_APHSA S-adenosylmethionine:tRN A ribosyltransferase-isomerase OS=Aphanothece sacrum FP U1 OX=1920663 GN=queA PE=3 SV=1
MFKLSGSRAVDPDEKDCLPGKSSVICDPMMNDQLLASYDYHLPPELIAQTPVTPRDSSRLLVVNSATTQVHSQFRDLTEWLLPGDLLVFNNTRVIPARLYGRKSTGAPVEILLLEEKSPFCWLALVKPGKRFTLGSQIEFADESGQIKLMATVLERDEETGGRLLKFEINSHELFWQILEQVGLIPFPPYVTESEAQPSQYQTVYAQEPGAVAAPTAGLHFTEDLLERLSQKGIGQAYLTLHVGVGTFRPVEISDITQHKMHQEWVEVPEITVNKIVETKKQGGRVIAVGTTVVRSLEGAAKVAKSEGKDGLIPFRAKTDLFIYPGYKWQVVEGMITNFHLPCSSLLMLVSALIGRERLMSLYQEAIKQKYRFYSFGDGMLILPEGKSNK

SEQ ID NO: 63430 - protein, 349 aa, Apibacter adventoris
  misc_feature (1)..(349): tr|A0A2S8A6Z8|A0A2S8A6Z8_9FLAO S-adenosylmethionine:tRN A ribosyltransferase-isomerase OS=Apibacter adventoris OX=1679466 GN=queA PE=3 SV=1
MKTSDFDFKLPQELLAERPSETRDEARLMVVHKKTGEIEHKLFKDVIDYFDEGDVFILNNTKVFPARLYGNKEKTGAQIEVFLLRELDAESRIWDVLVDPARKIRIGNKLFFTDDDSLVAEVVDNTTSRGRTLRFLFDGSYEEFRRKLKELGETPLPKYIKRKPDADDIERYQTIYAKEEGAVAAPTAGLHFSKHLLKRLEIKGIEFAEITLHVGLGTFASVEVEDLSKHKMESEQVIISEDTCKIVNHAIETKHRVCAVGTTSMRAIETSVSANNRLNPYNGWTNKFIFPPYDFGIADAMITNFHTPKSTLMMMIAAFADYDLVMKAYKEAVKEKYKFYSYGDAMLIL

SEQ ID NO: 63431 - protein, 349 aa, Apibacter mensalis
  misc_feature (1)..(349): tr|A0A0X3ANI9|A0A0X3ANI9_9FLAO S-adenosylmethionine:tRN A ribosyltransferase-isomerase OS=Apibacter mensalis OX =1586267 GN=queA PE=3 SV=1
MKTSDFDFKLPPELLADRPSKNRDEARLMVIHKNTGEIEHKLFKDVIDYFNEGDVFILNNTKVFPARLYGNKEKTGAQIEVFLLRELDAESRIWDVLVDPARKIRIGNKLFFTEDDSLVAEVVDNTTSRGRTLRFLFDGSYEEFRRKLKELGETPLPKYIKRKPDADDAERYQTIYAKEEGAVAAPTAGLHFSKHLLKRLEIKGIEFAEITLHVGLGTFASVEVEDLSKHKMESEQISISEKTCKIVNHAIETKHRVCAIGTTSMRAIETSVSANKRLNPFEGWTNKFIFPSYDFGIADSMITNFHTPKSTLMMMVSAFAGYDLIMKAYKEAIKENYKFYSYGDAMLII

SEQ ID NO: 63432 - protein, 349 aa, Apibacter sp.
  misc_feature (1)..(349): tr|A0A2S8ACS3|A0A2S8ACS3_9FLAO S-adenosylmethionine:tRN A ribosyltransferase-isomerase OS=Apibacter sp. wkB309 OX=1679467 GN=queA PE=3 SV=1
MKTSDFDFKLPPELLADRPSKNRDEARLMVVHKNTGEIEHKLFKDVIDYFDEGDVFILNNTKVFPARLYGNKEKTGAQIEVFLLRELDAESRIWDVLVDPARKIRIGNKLFFTEDDSLVAEVVDNTTSRGRTLRFLFDGSYEEFRRKLKELGETPLPKYIKRKPDSEDAERYQTIYAKEEGAVAAPTAGLHFSKHLLKRLEIKGIEFAEITLHVGLGTFASVEVEDLSKHKMESEQISISEKTCKIVNHAIETKHRVCAVGTTSMRAIETSVSANKRLNPYEGWTNKFIFPSYDFGIADSMITNFHTPKSTLMMMVSAFAGYDLIMKAYKEAIKENYKFYSYGDAMLII

SEQ ID NO: 63433 - protein, 349 aa, Apibacter sp.
  misc_feature (1)..(349): tr|A0A563DIA7|A0A563DIA7_9FLAO S-adenosylmethionine:tRN A ribosyltransferase-isomerase OS=Apibacter sp. AL1 OX= 2509005 GN=queA PE=3 SV=1
MKTSDFDFKLPPELLAERPSENRDESRLMVVHKNSGQIEHKLFKDVIDYFDEGDVFILNNTKVFPARLYGNKEKTGAQIEVFLLRELDAESRIWDVLVDPARKIRIGNKLFFTDDDSLVAEVIDNTTSRGRTLRFLFDGSYEEFRIKLKELGETPLPKYIKRKPDAEDIERYQTIYAKNEGAVAAPTAGLHFSKHLLKRLEIKGIDFAEITLHVGLGTFASVEVEDLSKHKMESEQVSISEKTCEIVNHAIENKRRVCAVGTTSMRAIETSVSANNRLNPYDGWTNKFIFPPYDFGIANCMITNFHTPKSTLMMMISAFAGYDLVMKAYKEAVNEGYKFYSYGDAMLII

SEQ ID NO: 63434 - protein, 357 aa, Aquabacter spiritensis
  misc_feature (1)..(357): tr|A0A4R3LNF8|A0A4R3LNF8_9RHIZ S-adenosylmethionine:tRN A ribosyltransferase-isomerase OS=Aquabacter spiritensi s OX=933073 GN=queA PE=3 SV=1
MRVDAFDFELNPELIALRPAEPRAAARLLLVRPGESPELEDARVGALPRVLRPGDAVVVNDTKVIPARLDGTRSRVNGARVSVEATLVKRVSEAVWTALARPGKRLAVGDRIVFARGAAQLVADIVHKGEAGEIDLAFACAGPALDAALDQVGHMPLPPYIAARRPEDAQDRTDYQPVFARIDGSVAAPTASLHFTPALMDEIRAAGASFHTVTLHVGPGTFLPVKVEDTSGHRMHAEWGEVSAETAAALNAARARGGRILAVGSTATRLVEAAAAGGTISPFRGETDIFITPGYAFRAVDLMMTNFHLPRSTLVMLVAAFVGHDVQKRAYAHAIAAGYRFYSYGDACLLHRAGGAA

SEQ ID NO: 63435 - protein, 359 aa, Aquabacterium commune
  misc_feature (1)..(359): tr|A0A4R6RHH3|A0A4R6RHH3_9BURK S-adenosylmethionine:tRN A ribosyltransferase-isomerase OS=Aquabacterium commune OX=70586 GN=queA PE=3 SV=1
MSLSAPPAFTLADFDFELPEALIAQHPAAERSASRLLDGRALPVTDRIFRELPELLQPGDLLVFNNTRVIKARLYGAKASGGAVEALVERVLPGTNEVWAHMRASKSPKPGAKVRFADAFDAEVLGRCGPDNGLFHLRLDGDPFALLDAHGHVPLPPYITHADEEDDVRRYQTVFAKEPGAVAAPTAALHFDEALLARMRERGIATAEVTLHVGAGTFQPVRTDNLAEHKMHSEWFEVPQATADAIRATRAAGGRIVSVGTTTLRALESAALQASPEDIVQVGSRDTDIFITPGFDFKVVDVLVTNFHLPKSTLMMLVSALAGYEHIRTLYAHAIDQRYRFFSYGDAMLIQRPSLSDRA

SEQ ID NO: 63436 - protein, 355 aa, Aquabacterium olei
  misc_feature (1)..(355): tr|A0A2U8FP49|A0A2U8FP49_9BURK S-adenosylmethionine:tRN A ribosyltransferase-isomerase OS=Aquabacterium olei OX =1296669 GN=queA PE=3 SV=1
MASLAPSADRAYTLADFDFDLPESLIAQHPAPERSASRLLDGRGTQPVDRVFRELPDLLQTGDLLVFNNTRVIKARLFGAKATGGAVEALIERVLPGTHEVWAHMRASKSPKPGARVRFADAFDADVLGRCGPDNGLFHLRFEGDPFALLEQHGHVPLPPYITHADEEDDVRRYQTVFAKEPGAVAAPTAALHFDEGVLAGLAARGIRTAEVTLHVGAGTFQPVRTDNLAEHKMHSEWFDVPQATAEAIRATRAAGGRIVAVGTTTLRALESAARGAPPEDILEAGQRDTDIFITPGFDFRVVDVLITNFHLPKSTLMMLVSALAGYDHIRALYAHAIAQRYRFFSYGDAMLIQR

SEQ ID NO: 63437 - protein, 217 aa, Aquabacterium sp.
  misc_feature (1)..(217): tr|A0A521Z3R1|A0A521Z3R1_9BURK S-adenosylmethionine:tRN A ribosyltransferase-isomerase (Fragment) OS=Aquabacter ium sp. OX=1872578 GN=queA PE=3 SV=1
HLRFEADPLVLLEQHGHVPLPPYITHADDADDVRRYQTVFASQPGAVAAPTAALHFDEAVLARLAAKGIRTAEVTLHVGAGTFQPVRTDNLAEHKMHSEWFNVPESTVAAIEATKAAGGRVVSVGTTTLRALESAALNTPEGHILQAGSRDTAIFITPGFQFKVVDVLVTNFHLPKSTLMMLVSALAGYEHVKQIYRHAIAQRYRFFSYGDAMLIQR

SEQ ID NO: 63438 - protein, 352 aa, Aquabacterium sp.
  misc_feature (1)..(352): tr|A0A0A0DMZ9|A0A0A0DMZ9_9BURK S-adenosylmethionine:tRN A ribosyltransferase-isomerase OS=Aquabacterium sp. NJ1 OX=1538295 GN=queA PE=3 SV=1
MSSSLTPTTYTLSDFDFELPPELIAQHPAAERSASRLLDGRGAQPVDRVFRELPDLLQPGDLLVFNNTRVIKARLYGHKASGGAVEALVERVLPGNEVWAHLRASKSPKPGSMVRFADAFDAEVLGRGGPDGGLFHLRFAGDPLTLLEQHGHVPLPPYITHADEEDDVRRYQTVFASAPGAVAAPTAALHFDEALLDRLKARGIQTAEVTLHVGAGTFQPVRTDNLAEHKMHSEWFEVPASTVAAIEATKAAGGRVVSVGTTTLRALESAALHAPAGHILQAGSRDTDIFITPGFQFKVVDVLITNFHLPKSTLMMLVSALAGYEHIRQLYQHAIARGYRFFSYGDAMLIQR

SEQ ID NO: 63439 - protein, 358 aa, Aquamicrobium aerolatum
  misc_feature (1)..(358): tr|A0A1I3PFK9|A0A1I3PFK9_9RHIZ S-adenosylmethionine:tRN A ribosyltransferase-isomerase OS=Aquamicrobium aerolat um DSM 21857 OX=1121003 GN=queA PE=3 SV=1
MRVDLFDFELPDERIAVRPAEPRHAARLLVVKPDQSFEDKVVFDLPSLLRRGDALVFNDTKVIPAQLTGLRRREGSVAQVDATLHMRTAPDRWKAFMRPAKRLAVGDRIQFGHDGNSCFLGTLDATVAEKGEAGEVTLAFDLSGPVLDEALHAVGKIPLPPYIAGKRAEDARDRSDYQTIFAREEGAVAAPTAGLHFTPELMAALDAAGVERHFVTLHVGAGTFLPMKVDDTTDHRMHAEIGHVSEETAAALNGVKARGGRIISVGTTSLRLMESSVADDGTFRAWSGSTDIFITPGHRFRTADILMTNFHLPRSTLFMLVSAFSGLETMHAAYKHAIDSNYRFYSYGDSSLLFRNES

SEQ ID NO: 63440 - protein, 358 aa, Aquamicrobium defluvii
  misc_feature (1)..(358): tr|A0A011U7I3|A0A011U7I3_9RHIZ S-adenosylmethionine:tRN A ribosyltransferase-isomerase OS=Aquamicrobium defluvi i OX=69279 GN=queA PE=3 SV=1
MRVDLFDFELPDERIALRPAEPRDSARLLKILPGAPPEDLTVRDLPSLLRAGDVLVFNDTKVIPAQLKGMRRRAEAVAQVDATLHMRVGPDRWLAFVRPGKRIAEGDRIHFGHDGNSCFLGQLDATVLEKREGGEVLLGFDVSGPFLDEALHSVGHIPLPPYIASKRSDDERDRCDYQTIYAREEGAVAAPTAGLHFTPELFAALDEKGVERRFVTLHVGAGTFLPVKTDDTDEHRMHAESGSVSAETATALNAARARGGRIVAVGTTSLRLLESAAAEDGTVKEWSGATDIFITPGYRFRTADMLMTNFHLPRSTLFMLVSAFSGLDTMRAAYAHAISTGYRFYSYGDASLLFRQMT

SEQ ID NO: 63441 - protein, 357 aa, Aquamicrobium sp.
  misc_feature (1)..(357): tr|A0A4U6CB31|A0A4U6CB31_9RHIZ S-adenosylmethionine:tRN A ribosyltransferase-isomerase OS=Aquamicrobium sp. LC1 03 OX=1120658 GN=queA PE=3 SV=1
MRVDLFDFDLPEDRIALRPAEPRDSAKLLIVRPGEAPEDRIVRDLPSLLRAGDALVFNDTKVIPAQLRGIRRRGEAIAHVDATLHMRVDADRWKAFVRPAKRLAEGDRISFGHEENACMIGALDATVMEKGEAGEVLLAFDISGPFLDEALHAVGHIPLPPYIASKRADDERDRADYQTIYAREEGAVAAPTAGLHFTPDLMSRLEDAGIERHFVTLHVGAGTFLPVKADDTADHRMHAERGYVPAATARALNEVRARGGRIVCVGTTSLRLLESAAAPDGALGEWSGATDIFITPGYRFRTADMLMTNFHLPRSTLFMLVSAFAGLETMREAYHHAIDTGYRFYSYGDASLLFREK

SEQ ID NO: 63442 - protein, 342 aa, Aquaspirillum sp.
  misc_feature (1)..(342): tr|A0A1U9JNS8|A0A1U9JNS8_9NEIS S-adenosylmethionine:tRN A ribosyltransferase-isomerase OS=Aquaspirillum sp. LM1 OX=1938604 GN=queA PE=3 SV=1
MQLSDFDFELPEALIAQFPPEVRGNSRLLHVDGLNCHDDHFSQLIHYLRAGDVLVFNDTRVLKARLFGQKLSGGQVEVLVERVLDSQQVLAHVRASKSPKPGSRLLLEGRWEAEMVERQNELFRLRFSGDTPVLDILDASGKLPLPPYITRTPDAPDDERYQTVYARHQGAVAAPTAGLHFTDAQLDALRGHGVELAFVTLHVGAGTFQPVRVDNIAEHRMHSEIYHVPDDTVAAIARAHAQGRQVTAVGTTSLRALESAARSGSLLAGQGETDIFITPGYRFRVVDRLLTNFHLPKSTLMMLVSAFAGLQPIRAAYQHAIAGQYRFFSYGDAMLLEKAASA

SEQ ID NO: 63443 - protein, 340 aa, Aquibacillus sp.
  misc_feature (1)..(340): tr|A0A516KKD1|A0A516KKD1_9BACI S-adenosylmethionine:tRN A ribosyltransferase-isomerase OS=Aquibacillus sp. TKL6 9 OX=2594883 GN=FN924_17665 PE=3 SV=1
MNEAMFKIPDHLHATEPVEFTKGSRDQVSLMVTDSPSGQCEHTQFPLLINFLKKGDLLVFNNSRTIPALMIGNIGENRAEVRLSHRVNDSQWRALVLTEEIELGDTIIFSKNLLAVVSEGCENTPLYTLSFSQSGSSLVDVFYQIGKPIHYEYIKKDIPLDAYQTVYGTVPGSVELASAGRPFTWAMLQQLKDAGINIAFLQLHTGLSYFENNLWPNPVQQPELFHVPERTARLVHETKKRGGRIIAVGTTVVRALESAGKNRTIKALNGSTNLYIHQAYNLKVIDGLLTGFHEPEASHLDMLSAFLHPDILKSTYEEALSKQYLWHEFGDINLILAGCL

SEQ ID NO: 63444 - protein, 342 aa, Aquibacillus sp.
  misc_feature (1)..(342): tr|A0A516KH46|A0A516KH46_9BACI S-adenosylmethionine:tRN A ribosyltransferase-isomerase OS=Aquibacillus sp. TKL6 9 OX=2594883 GN=queA PE=3 SV=1
MDINDFDYHLPEELIAQVPLKDRASSRLLVLNREKKTMSHQHFSDIKSFLRKGDCLVLNDTKVLPARLYGIKEDTGAKVEVLLLTQLEKDNWEVLVKPAKKIKVGTTLTFGDDRLTAVCLEEKEHGGRILSFQYEGIFLEVLNELGEMPLPPYIKEQLPDRDRYQTVYAREEGSAAAPTAGLHFTTELMDELKDIGVEFAYITLHVGLGTFRPVNVDRIEEHDMHSEFYMMSQETADQLNRVKERNGRIISVGTTSTRTLETIARDQKGSFKESRGWTNIFIYPPYEFKAIDGLITNFHLPKSTLIMLVSALAGRDFILSAYEEAVKERYRFFSFGDAMLIL

SEQ ID NO: 63445 - protein, 357 aa, Aquicella lusitana
  misc_feature (1)..(357): tr|A0A370GYI0|A0A370GYI0_9COXI S-adenosylmethionine:tRN A ribosyltransferase-isomerase OS=Aquicella lusitana OX =254246 GN=queA PE=3 SV=1
MQLNDFHFPLPTELIARYPLETRSASRLLCINTIQNDLVHREFSSLIDLIDEGDLLVFNDTKVIPARLLGQKITGGKVEVLVERVLDDQRILALVRASKAPKIGDLFIFTPDVRLEVLGRRDQFYELGYLDTTHSILEMIESIGHIPLPPYMRRMADDLDKIRYQTVYARHKGSVAAPTAGLHFDDILLQQLREKNVAMGYLTLHIGAGTFAPVRSERITEHKMHAEYLEVPAELCHQIEAAKSRGNRVIAVGTTSMRALETASQSGTIAPYHGETSIFIYPGYQFRCVDALITNLHLPCSTLLMLVCAFGGYERIMHAYREAVAQSYRFYSYGDAMWIDSPLQKHKQTNVPDFRAI

SEQ ID NO: 63446 - protein, 345 aa, Aquicella siphonis
  misc_feature (1)..(345): tr|A0A5E4PEG3|A0A5E4PEG3_9COXI S-adenosylmethionine:tRN A ribosyltransferase-isomerase OS=Aquicella siphonis OX =254247 GN=queA PE=3 SV=1
MQLSDFNFDLPPELIARYPLEKRSASRLICLESRSNSICHRYFPAILELIEEGDLLVFNDTRVIPARLRGRKSTGGEVEILVERILDEKRILAQVRSSKPLRLGSYLSLTNYQFLEVTDRQNQFYELRYNNERESILEMIESIGQIPLPPYMQRSAEEEDRERYQTVYARHKGSVAAPTAGLHFDQDLLRHLQDKKIEMGYLTLHIGAGTFAPVRVNQIQEHVMHPEYLEVSPELCANILAAKARGKRVIAVGTTSLRALETAMQSGTAQPYRGETSIFIYPGYQFRCVDALITNLHLPRSTLLMLVCAFGGYAKVMQAYQDAVRHAYRFYSYGDAMWIEKAESF

SEQ ID NO: 63447 - protein, 351 aa, Aquicoccus porphyridii
  misc_feature (1)..(351): tr|A0A5A9ZU99|A0A5A9ZU99_9RHOB S-adenosylmethionine:tRN A ribosyltransferase-isomerase OS=Aquicoccus porphyridi i OX=1852029 GN=queA PE=3 SV=1
MKLSDFDFDLPEGLIATRPASPRSSARLLVAEGARITDAVVRDLPDWLRPGDRLILNDTKVIPARLSGQRVRQGAGGESRAGMEVTLLEPRPDGRWAALIKPLRKLGMGERIEFGAGFDARCVEKSDGQAVLEFNLAGDDFDAALERAGAMPLPPYIEARRKADARDKHDYQTVWARKRGAVAAPTASLHFDDPLLERLAAKGVQFTHVTLHVGAGTFLPVKVDDVRQHRMHAEWGEVSEDAAREISETRANGGRIIPVGTTALRLIETAARDGGAIAPWEGETDIFIYPGFRFRVTDALMTNFHLPKSTLMMLVAALMGREPVMRIYAHAVEERYRFFSYGDASLLIPGG

SEQ ID NO: 63448 - protein, 379 aa, Aquicoccus sp.
  misc_feature (1)..(379): tr|A0A4U7J411|A0A4U7J411_9RHOB S-adenosylmethionine:tRN A ribosyltransferase-isomerase OS=Aquicoccus sp. SCR17 OX=2541728 GN=queA PE=3 SV=1
MNLSDFDFDLPEGLIATRPARPRSSARLLVAEGAGPEITDSVVSEITRFLRPGDRLVLNDTRVIPARLSGLRHRSGAQGESAARIEVTLLEPGADGTWSALVKPLKKLREGEEVVFSDALSARLVAREAGEARLAFNLKGEDFDAALAEAGAMPLPPYIAARRPADERDREDYQTIWARHSGAVAAPTASLHFDEGVMAALAAHGVETTHVTLHVGAGTFLPVKVEDVTTHRMHSEWGVVSAQAAEEIAATRAAGGRIIPVGTTALRLIETAARATGEIAPWEGDTDIFIYPGFRFNVTDALMTNFHLPKSTLMMLVSALMGQKQIRNIYSHAVEERYRFFSYGDASLLVPDPRAAGDRDQETRRDPRGRAGPTSGDAR

SEQ ID NO: 63449 - protein, 334 aa, Aquifex aeolicus
  misc_feature (1)..(334): sp|O67043|QUEA_AQUAE S-adenosylmethionine:tRNA ribosylt ransferase-isomerase OS=Aquifex aeolicus (strain VF5) O X=224324 GN=queA PE=3 SV=1
MRIEEFDYELPEELIAKYPAVPRHSARLMVLNRKDQSIKHDTFINLPDYLEEGDLLVFNNTKVIPARLYGRKPTGGRVEVVLTDFIKPDEWKALIGGKKIRPGLVIEVAPDFKVEVLEHIEEGKFRVKLLGEEPLKLIDKYGHIPIPPYLKREEEPIDRVYYQTIFAKEKGAVASPTASLHFSEELLEKLKEKGINFAFITLHVSYGTFKPVKVERVEEHRVDPEYVKIPKETVEKIKETKEKGKRVVAVGTTVVRALETKPFEPFEGWTDLYIYPGFKFKVVDAMITNFHLPRSSLLILVSAFAGREFILKAYREAVEKRYRFYSYGDGMLIL

SEQ ID NO: 63450 - protein, 296 aa, Aquifex sp.
  misc_feature (1)..(296): tr|A0A432Q028|A0A432Q028_9AQUI S-adenosylmethionine:tRN A ribosyltransferase-isomerase (Fragment) OS=Aquifex sp . OX=313370 GN=DSY32_00580 PE=3 SV=1
KHDTFINLPEYLEEGDLLVFNNTKVIPARLYGRKPTGGKVEVVLSDFIKPEEWNALIGGKKIRPGLVIEVAPDFKVEVLEHIEEGKFRVKLIGEEPLKLIDKYGHIPIPPYLKREEEPIDRVYYQTIFAKEKGAVASPTASLHFSEELLKKLKEKGINFAFITLHVSYGTFKPVKVERVEEHRVDPEYVKIPEETVEKIKETKEKGKRVVAVGTTVVRALETKPFEPFEGWTDLYIYPGFEFKVVDAMITNFHLPRSSLLILVSAFAGREFILKAYKEAVEKRYRFYSYGDGMLIL

SEQ ID NO: 63451 - protein, 334 aa, Aquifex sp.
  misc_feature (1)..(334): tr|A0A432Q0H0|A0A432Q0H0_9AQUI S-adenosylmethionine:tRN A ribosyltransferase-isomerase OS=Aquifex sp. OX=313370 GN=queA PE=3 SV=1
MRIEEFDYELPEELIAKYPVVPRHNARLMVLNRKEKSIKHDIFINLPEYLEEGDLLVFNNTKVIPARLYGRKPTGGKVEVVLTDFIKPDEWKALVGGKKIKPGLIIEVAHDFKVEILEHIEEGKFRVKLHGKDPLKLIDKYGHIPIPPYIKREEEPIDRVYYQTIFAQERGAVASPTASLHFSEELMEKLKKKGIETAFITLHVSYGTFKPVKVKNIEEHKVDPEYVKIPRETVKKIRETKERGNKVIAVGTTVVRALETKPYEPFEGWTDLYIYPGFEFKVVDAMITNFHLPKSSLLILVSAFAGKDFILKAYNEAVKKKYRFYSYGDGMLIL

SEQ ID NO: 63452 - protein, 352 aa, Aquificaceae bacterium
  misc_feature (1)..(352): tr|A0A432F5X3|A0A432F5X3_9AQUI S-adenosylmethionine:tRN A ribosyltransferase-isomerase OS=Aquificaceae bacteriu m OX=2053503 GN=queA PE=3 SV=1
MKLSDFSYDLPVHLIAQEALQDRTASRLLVVENKANDTASCEDKVFSDLLDMIAPHDLLVFNNTRVIPARLHGKKLTGGKVEVLVERLLSDKTLLAHVKASKSPKKGSVLTLEGEIRIEVLGRQGALFELSVLNDAPILELLEQYGHIPLPPYIERDDTEDDRERYQTVFAKTPGAVAAPTAGLHFTDELLEQLKKKGVETAQVTLHVGAGTFQPVRVNDLSDHIMHAEWVEVDESVCEAVKACKQRGGKVIAVGTTSVRSLESAAKGGELTPFRGDTRLFITPGCRFNVVDRMVTNFHLSESTLLMLVSAFSGYETIKQAYQHAITAEYRFFSYGDAMLLSRREGVQEVSL

SEQ ID NO: 63453 - protein, 334 aa, Aquificaceae bacterium
  misc_feature (1)..(334): tr|A0A350D2K9|A0A350D2K9_9AQUI S-adenosylmethionine:tRN A ribosyltransferase-isomerase OS=Aquificaceae bacteriu m OX=2053503 GN=queA PE=3 SV=1
MRVEDFDYHLPEELIAKYPITPRHNAKLMVLNRKDQSIRHDMFWNLPLYLEEGDLLVFNNSKVLPARLYGKKPTGGKVEVLLTDFITKEEWYALIGGKNIKEGLQIYVGEGLIVEVLEHVEGGKFKVKLLSEDPLKALDKYGKIPIPPYLKREEEPIDRVYYQTVFAQIEGSVAAPTASLHFSKELLKRLEEYGIKKAFITLHVSYGTFKPVKVDEVELHRVDPEYVSVPKETIELIKETKKRGKRVIAVGTTVVRALETAGFEPFEGWTELYIYPGYSFKVVDALITNFHLPRSSLLFLVCAFGGREFILRAYQEAVKERYRFYSYGDGMLIL

SEQ ID NO: 63454 - protein, 285 aa, Aquificae bacterium
  misc_feature (1)..(285): tr|A0A3M1BQQ4|A0A3M1BQQ4_9BACT S-adenosylmethionine:tRN A ribosyltransferase-isomerase (Fragment) OS=Aquificae bacterium OX=2202151 GN=queA PE=3 SV=1
LQEGDLLVFNNSKVLPARLYGRKPTGGRVEVLLTDFISREEWYALIGGRGIREGLSIEVAEDLRVEILEHLEEGRFRVRLHSPDPIKALDRHGKIPIPPYLKREEEPLDRVYYQTVFAQMEGSVAAPTASLHFSEELLKRLEEHGIKRTFITLHISYGTFKPVRVQEVELHRVDPEYVKVSEEAVRAIREAKALGRRVVAVGTTVVRALETAGYEPFEGWTDLYVYPGYSFRVVDALITNFHLPRSSLLFLVCAFGGREFILRAYEEAVREKYRFYSYGDGMLIL

SEQ ID NO: 63455 - protein, 334 aa, Aquificae bacterium
  misc_feature (1)..(334): tr|A0A3M2AEZ8|A0A3M2AEZ8_9BACT S-adenosylmethionine:tRN A ribosyltransferase-isomerase OS=Aquificae bacterium O X=2202151 GN=queA PE=3 SV=1
MRVEEFDYYLPEELIAKYPAQPRHSARLMVLDRKDKSIKHDIFWNLPLYLQEGDLLVFNNTKVLPARLYGKKPTGGKVEVLLTDYINKHEWYGLVGGKGIKPGLVIEVAQDLRVEVLEQVEKAKFRLRLLSEDPLKALDKHGKIPIPPYLKREEEAIDRVYYQTVFAQVEGSTAAPTASLHFSEELLQRLEDHRIKKTFVTLHVSYGTFKPVKVSNVEEHRVDPEYVKVPKETVELIKETKEKGKRVVAVGTTVVRALETAGYEPYEGWTDLYIYPGYDFKVVDALITNFHLPRSSLLFLVCAFGGKDFVLKAYEVAVKERYRFYSYGDGMLIL

SEQ ID NO: 63456 - protein, 407 aa, Aquiflexum balticum
  misc_feature (1)..(407): tr|A0A1W2H8E4|A0A1W2H8E4_9BACT S-adenosylmethionine:tRN A ribosyltransferase-isomerase OS=Aquiflexum balticum D SM 16537 OX=758820 GN=queA PE=3 SV=1
MESVKNIQEIKLSDYEYTLPEERIAKFPLEKRDESKLIQYNKGEISHHQFFDLPELIQTGSMLVFNNTKVIPARLIFQRETGAKIEIFLLKPIEPTTIISEIMLNTGSVIWETMIGNLKKWKDHEILQGQVLINGEAIIISASIVDKEKKTVKFDWNGENIPFVSIVEAAGEVPLPPYLNRKATDEDRPRYQTVYSKKEGAVAAPTAGLHFTEEILEKLQKKEVKEEFVTLHVSAGTFQPIKDESVSEHPMHSEQVIIDLKTISNLVKHQDKIIAVGTTSMRTLESIYWYGTKLLLEKEEKFIIPKLYPYADYDQLPSRSESFQAVLHYMEEKNIHEITGSTEIFIMPGYQFRVCDGLITNFHQPSSTLVLLVAAFTKGDWRSIYEEAMQNDYRFLSYGDSSLIWNG

SEQ ID NO: 63457 - protein, 349 aa, Aquiflexum balticum
  misc_feature (1)..(349): tr|A0A1W2H361|A0A1W2H361_9BACT S-adenosylmethionine:tRN A ribosyltransferase-isomerase OS=Aquiflexum balticum D SM 16537 OX=758820 GN=queA PE=3 SV=1
MKLSDFKFDVPKKLISLYPAANRDESRLMVIHRKTGQIEHRLFKEIIEYFGEGDVFVMNNTKVFPARLYGNKEKTGAKIEVFLLRELNQELRLWDVLVDPARKIRVGNKLYFGDSDLVAEVIDNTTSRGRTIRFLFDGTDEEFYKTIDTLGETPILKEFIDRKVEAEDRERYQTIFAKHVGAVAAPTAGLHFTPHLLKRLELKGVEISPITLHVGLGTFRQVDVEDLTKHKMDSENYDIPEATVELVNKALDNKKRVVSVGTTTLKTIESSVTANGRLKASSGWTDKFIIPPYEFKIANSLITNFHLPESTLLMTASAFGGYDLIMKAYQEAIKEKYRFFSYGDAMLIL

SEQ ID NO: 63458 - protein, 349 aa, Aquimarina aggregata
  misc_feature (1)..(349): tr|A0A162CLK4|A0A162CLK4_9FLAO S-adenosylmethionine:tRN A ribosyltransferase-isomerase OS=Aquimarina aggregata OX=1642818 GN=queA PE=3 SV=1
MKLSHFHFDLPQELLAEYPAENRDEARLMVLNRKEQTIEHKYFKDLIDYFEPNDVMVVNNTKVFPARLYGNKEKTGARIEVFLLRELNSETRLWDVLVDPARKIRIGNKLYFGDDESLVAEVIDNTTSRGRTLRFLYDGSYDEFRQKLTDLGETPLPKYIKRDTEPEDEERYQTIYAKNEGAVAAPTAGLHFSKHLMKRLEIKGVDFAEVTLHVGLGTFNPVEVEDLSKHKMDSEEAYITAHATNIINNGITQKRKICAVGTTVMRALESSVSSEHTLNEFRGWTNKFIFPPYDFSIANCMITNFHTPKSTLLMMVSAFAGHDFLKKAYEEAVKEKYKFYSYGDAMLII

SEQ ID NO: 63459 - protein, 349 aa, Aquimarina algiphila
  misc_feature (1)..(349): tr|A0A554VNL7|A0A554VNL7_9FLAO S-adenosylmethionine:tRN A ribosyltransferase-isomerase OS=Aquimarina algiphila OX=2047982 GN=queA PE=3 SV=1
MKLSHFNFDLPQELLAEYPAENRDESRLMVLNRKEQTIEHKQFKDLIDYFEPNDVMVVNNTKVFPARLYGNKEKTGARIEVFLLRELNSETRLWDVLVDPARKIRIGNKLYFGDDESLVAEVIDNTTSRGRTLRFLYDGSYDEFRQKLNDLGETPLPKYIKREAEPEDEERYQTIYAKNEGAVAAPTAGLHFSKHLMKRLEIKGVDFSEITLHVGLGTFNPVEVEDLSKHKMDSEEAYVTAKAAETINNGITNKRRICAVGTTVMRALESSVSSDRTLNEFRGWTNKFIFPPYDFSIANCMITNFHTPKSTLLMMVSAFAGHDFIKEAYEEAVKEKYKFYSYGDAMLII

SEQ ID NO: 63460 - protein, 349 aa, Aquimarina amphilecti
  misc_feature (1)..(349): tr|A0A1H7MLL5|A0A1H7MLL5_9FLAO S-adenosylmethionine:tRN A ribosyltransferase-isomerase OS=Aquimarina amphilecti OX=1038014 GN=queA PE=3 SV=1
MKLSHFNFDLPQDLLAEYPSENRDEARLMVLNRKDQTIEHKQFKDLIDYFEPNDVMVLNNTKVFPARLYGNKEKTGARIEVFLLRELNSETRLWDVLVDPARKIRIGNKLYFGDDESLVAEVIDNTTSRGRTLRFLYDGSYDEFRQKLTDLGETPLPKYIKRDAEPEDEERYQTIYAKNEGAVAAPTAGLHFSKHLMKRLEIKGVDFAEITLHVGLGTFNPVEVEDLSKHKMDSEEAYVTARATDTINNGITNKQRICAVGTTVMRALESSVSSDNTLNEFRGWTNKFIFPPYDFSIANSMITNFHTPKSTLLMMVSAFAGHDFIKEAYEEAVKEKYKFYSYGDAMLII

SEQ ID NO: 63461 - protein, 349 aa, Aquimarina atlantica
  misc_feature (1)..(349): tr|A0A023BX46|A0A023BX46_9FLAO S-adenosylmethionine:tRN A ribosyltransferase-isomerase OS=Aquimarina atlantica OX=1317122 GN=queA PE=3 SV=1
MKLSHFNFNLPQDLLAEYPAENRDESRLMVLNRKDQTIEHKQFKDLIDYFEPNDVMVVNNTKVFPARLYGNKEKTGARIEVFLLRELNSETRLWDVLVDPARKIRIGNKLYFGDDESLVAEVIDNTTSRGRTLRFLYDGSYDEFRQKLNDLGETPLPKYIKRDAEPEDEERYQTIYAKNEGAVAAPTAGLHFSKHLMKRLEIKGVDFAEITLHVGLGTFNPVEVEDLSKHKMDSEEAYVTANAANTINNGIANKRRICAVGTTVMRALESSVSSERTLNEFRGWTNKFIFPPYDFSIANCMITNFHTPKSTLLMMVSAFAGHDFIKEAYEEAVKEKYKFYSYGDAMLII

SEQ ID NO: 63462 - protein, 349 aa, Aquimarina brevivitae
  misc_feature (1)..(349): tr|A0A4Q7NXS9|A0A4Q7NXS9_9FLAO S-adenosylmethionine:tRN A ribosyltransferase-isomerase OS=Aquimarina brevivitae OX=323412 GN=queA PE=3 SV=1
MKLSHFNFNLPQDLLAEYPAENRDEARLMVLNRKDQTIEHKMFKDLIDYFEPQDVMVLNNTKVFPARLYGNKEKTGARIEVFLLRELNSETRLWDVLVDPARKIRIGNKLYFGDDESLVAEVIDNTTSRGRTLRFLYDGSYDEFREKLNELGETPLPKYIKRDTEPEDEQRYQTIYAKNEGAVAAPTAGLHFSKHLLKRLEIKGIDFAEITLHVGLGTFSPVEVEDLSKHKMDSEEAFITKQATEVINKGIEEKRRICAVGTTVMRALESSVSSDHTLNEFRGWTNKFIFPPYEFSIANSMITNFHTPKSTLLMMVSAFAGHDFVKEAYAEAVKEKYKFYSYGDAMLII

SEQ ID NO: 63463 - protein, 349 aa, Aquimarina sp.
  misc_feature (1)..(349): tr|A0A2D9Y517|A0A2D9Y517_9FLAO S-adenosylmethionine:tRN A ribosyltransferase-isomerase OS=Aquimarina sp. OX=187 2586 GN=queA PE=3 SV=1
MKLSHFNFNLPQELLAEYPAENRDEARLMVLNRKNQTIEHKMFKDLIDYFEPKDVMVLNNTKVFPARLYGNKEKTGARIEVFLLRELNSETRLWDVLVDPARKIRIGNKLYFGDDESLVAEVIDNTTSRGRTLRFLYDGSYDEFRQKLNDLGETPLPKYIKRETEPEDEERYQTIYAKNEGAVAAPTAGLHFSKHLMKRLEIKGIDFAEITLHVGLGTFSPVEVEDLSKHKMDSEEAYITKQATEVINNGITNKRRICAVGTTVMRALESSVSSDRTLNEFRGWTNKFIFPPYDFSIANCMITNFHTPKSTLLMMISAFAGHDFVKEAYAEAVKEKYKFYSYGDAMLIL

SEQ ID NO: 63464 - protein, 349 aa, Aquimarina sp.; identical to SEQ ID NO: 63458
  misc_feature (1)..(349): tr|A0A3A9VCZ3|A0A3A9VCZ3_9FLAO S-adenosylmethionine:tRN A ribosyltransferase-isomerase OS=Aquimarina sp. AD10 O X=1714849 GN=queA PE=3 SV=1

SEQ ID NO: 63465 - protein, 349 aa, Aquimarina spongiae
  misc_feature (1)..(349): tr|A0A1M6DYX8|A0A1M6DYX8_9FLAO S-adenosylmethionine:tRN A ribosyltransferase-isomerase OS=Aquimarina spongiae O X=570521 GN=queA PE=3 SV=1
MKLSHFNFNLPQELLAEYPAENRDEARLMVLNRKDQTIEHKQFKDLIDYFEPNDVMVVNNTKVFPARLYGNKEKTGARIEVFLLRELNSETRLWDVLVDPARKIRIGNKLYFGDDESLVAEVIDNTTSRGRTLRFLYDGSYDEFRQKLTDLGETPLPKYIKRDTEPEDETRYQTIYAKNEGAVAAPTAGLHFSKHLMKRLEIKGVDFAEITLHVGLGTFNPVEVEDLSKHKMDSEEAFITAQATNVINSGIANKQRICAVGTTVMRALESSVSSEKTLNEFRGWTNKFIFPPYDFSIANSMITNFHTPKSTLLMMVSAFAGHDFVKEAYEEAVKEKYKFYSYGDAMLIL

SEQ ID NO: 63466 - protein, 352 aa, Aquimixticola soesokkakensis
  misc_feature (1)..(352): tr|A0A1Y5SNX0|A0A1Y5SNX0_9RHOB S-adenosylmethionine:tRN A ribosyltransferase-isomerase OS=Aquimixticola soesokk akensis OX=1519096 GN=queA PE=3 SV=1
MKLSDFDFALPDDLIATRPAKPRPSARLLVATPQALHDARVYDLVTWLQRGDRLVLNDTRVLPARLSGKRGRDTAQGYQEARIEVTLLEPQPQAGQWMALIKPAKKLALGEEVRFSDDLCATLIRKDGGEAILDFNLTGEDFDLALAQAGSMPLPPYIAAKRPADEADKQDYQTVWAARSGAVAAPTASLHFDEDLLAQLAQKGVEFTHVTLHVGAGTFLPVKVENVDDHKMHAEWGEVTPQAAGEIAATKAAGGRVIPVGTTALRLIESAARDSGQIAPFLGTTDIFIKPGFEFRVADALMTNFHLPKSTLMMLVSAVMGAERVREIYAHAIAQRYRFFSYGDASLLLPKG

SEQ ID NO: 63467 - protein, 357 aa, Aquimonas voraii
  misc_feature (1)..(357): tr|A0A1G6RPD5|A0A1G6RPD5_9GAMM S-adenosylmethionine:tRN A ribosyltransferase-isomerase OS=Aquimonas voraii OX=2 65719 GN=queA PE=3 SV=1
MKKTDFDFDLPPELIAQAPLPERSASRLLHLQADGGYTDRHVRDLPELLQPGDLLVFNDTRVIPARLFGHKDSGGRVEILIERITGTHEARAQLGVSKSPKAGVRITLDAGGEFEVLGREGEFYLLRLLGDEALEKLLLRAGRLPLPPYIQREPGQDDAERYQTVFAKHVGAVAAPTAGLHFDEPLLAQLRARGVQMGHITLHVGAGTFQPMRADSVHEHTMHSEWLNVGADLVEQIRRTRTAGKRVVAVGTTVVRALETAMREGEVQPFAGDTQIFIFPGYRIRSVDALITNFHLPQSTLMMLVSAFCGRERILDAYRHAVEQRYRFFSYGDAMLLEPEAQAAVIWDSGFGIRSEQ

SEQ ID NO: 63468 - protein, 342 aa, Aquisalibacillus elongatus
  misc_feature (1)..(342): tr|A0A3N5BCS5|A0A3N5BCS5_9BACI S-adenosylmethionine:tRN A ribosyltransferase-isomerase OS=Aquisalibacillus elon gatus OX=485577 GN=queA PE=3 SV=1
MNIEDFDFELPEELIAQTPLMNRAESRLMVLNREHEQIDHRYFYQIIDYLNPGDCLVLNNTKVLPARLFGQKEDTGGKVETLLLNQLEGDEWEVLIKPAKKVKVGTRLTFGDGLLKAECVGIKDHGGRVIRFEYEGIFLEVLDKLGEMPLPPYIKEQLDDRDRYQTVYAEEVGSAAAPTAGLHFTQELLEQIKAKGVHIAYITLHVGLGTFRPVQVDNIEEHDMHAEFYQMTQETADLLNEAKQGPNKIVAVGTTSVRTLETIARDENGQFKETSGWTDIFIYPPYDFKAIDGMITNFHLPKSTLIMLVSAFANKDFILNAYHKAVQERYRFFSFGDAMIIL

SEQ ID NO: 63469 - protein, 347 aa, Aquisalimonas asiatica
  misc_feature (1)..(347): tr|A0A1H8PKX2|A0A1H8PKX2_9GAMM S-adenosylmethionine:tRN A ribosyltransferase-isomerase OS=Aquisalimonas asiatic a OX=406100 GN=queA PE=3 SV=1
MRRRDFHFDLPQELIAERPLERRTDSRLLCLDGATGALADRQFAELESLLRPGDLLVLNDTRVIPARLFGHKASGGRVEVLLERVIGDRRVLAHLRVSRAPAAGARLHLDGGAEAEVEGRDGACFVLAVHGVDDLFAYLDAHGHVPLPPYIQRADEAVDHDRYQTVFAREPGAVAAPTAGLHFDAAMLERLAGAGVEQAQVTLHVGAGTFQPVRAEKVEDHHMHSELLQVPERTCEQVRACRERGGRVVAVGTTVVRALESAARDGELSPFRGETDIFIYPGYRFRVVDALVTNFHLPESSLIMLVSAFAGHRHVMAAYDHAVAQRYRFFSYGDAMFIHPPSAEARA

SEQ ID NO: 63470 - protein, 348 aa, Aquisphaera giovannonii
  misc_feature (1)..(348): tr|A0A5B9W5G9|A0A5B9W5G9_9BACT S-adenosylmethionine:tRN A ribosyltransferase-isomerase OS=Aquisphaera giovannon ii OX=406548 GN=queA PE=3 SV=1
MLASEFDFDLPVELIAQHPAAAREHSRLMVVRRDGGRIEHRRFDELPALLDGRDILARNCTKVIPARLIGRREATGGKWEGLFLREVEGGAWEILAATRGRPAPGERVVVDHGGGEGLRLALESRGEEGRWIVRPLGPPAASTLALLERHGQIPLPPYIRKGRAGEEDRERYQTVFARAPGSVAAPTAGLHFSDATFRDLAAKGVAWVDLTLHVGVGTFRPIEAERIEDHVMHAEWAELTAEAARALNARRAAGGRVVAVGTTSTRTLETAAAGGEIAPFSGPTGLFIRPGHAFRGLDALVTNFHLPRSSLLVLVSALAGVDLIREAYREAVARRYRFYSYGDAMLIL

SEQ ID NO: 63471 - protein, 343 aa, Aquitalea magnusonii
  misc_feature (1)..(343): tr|A0A3G9GAI1|A0A3G9GAI1_9NEIS S-adenosylmethionine:tRN A ribosyltransferase-isomerase OS=Aquitalea magnusonii OX=332411 GN=queA PE=3 SV=1
MLLSDFDYHLPDHLIAQHPPAVRGASRLLHVAGPTLSDGQFADFASLLAPGDVMVFNDTRVIKARLFGEKASGGKIEALIERVLDEHTALAHVRSSKSPKPGTRLIFAERWEAEMLGREGELFKLRFLAEDNLFDILDASGKLPLPPYIERTAEGEDDERYQTVYAREKGAVAAPTAGLHFTEEMLAALQAKGVELAYVTLHVGAGTFQPVRVENIADHKMHSEIYDVPQRTYDLIQAAHARGSKVLAVGTTSMRALESAARSGELVAGRGETDIFITPGYRFRVVDRLLTNFHLPKSTLLMLVSAFAGYAEMRAAYAHAVQQEYRFFSYGDAMLLERKDEQG

SEQ ID NO: 63472 - protein, 343 aa, Aquitalea magnusonii
  misc_feature (1)..(343): tr|A0A0F3KNT2|A0A0F3KNT2_9NEIS S-adenosylmethionine:tRN A ribosyltransferase-isomerase OS=Aquitalea magnusonii OX=332411 GN=queA PE=3 SV=1
MLLSDFDYHLPDHLIAQHPPAVRGASRLLHVAGSTLSDGQFADFASLLRPGDVMVFNDTRVIKARLFGEKASGGKIEALIERVLDEHTALAHVRSSKSPKPGTRLIFAERWEAEMLGREGELFKLRFLAEDNLFDILDASGKLPLPPYIERTAEGEDDERYQTVYAREKGAVAAPTAGLHFTEEMLAALQAKGVELAYVTLHVGAGTFQPVRVENIADHKMHSEIYDVPQRTYDLIQAAHARGSKVLAVGTTSMRALESAARSGELVAGRGETDIFITPGYRFRVVDRLLTNFHLPKSTLLMLVSAFAGYAEMRAAYAHAVQQEYRFFSYGDAMLLERKDEQG

SEQ ID NO: 63473 - protein, 343 aa, Aquitalea sp.
  misc_feature (1)..(343): tr|A0A454JIJ7|A0A454JIJ7_9NEIS S-adenosylmethionine:tRN A ribosyltransferase-isomerase OS=Aquitalea sp. MWU14-2 217 OX=2480983 GN=queA PE=3 SV=1
MLLSDFDYHLPEHLIAQHPPAVRGASRLLHVAGTSLADGQFADFAAHVSAGDVMVFNDTRVIKARLFGEKASGGKIEALVERVLDAHTVLAHVRSSKSPKPGTRLIFAERWEAEMVERDDALFKLRFLAEDNVFDILEASGKLPLPPYIERSAEGDDDERYQTVYAREQGAVAAPTAGLHFNEEMLAALQAKGVELAYVTLHVGAGTFQPVRVENIAEHKMHSEIYEVPQRTYDLIQAAHARGNKVLAVGTTSMRALESAARSGELVAGRGETDIFITPGYRFRVVDRLLTNFHLPKSTLLMLVSAFAGYPEMRAAYAHAVQQQYRFFSYGDAMLLERKDEQG

SEQ ID NO: 63474 - protein, 343 aa, Aquitalea sp.
  misc_feature (1)..(343): tr|A0A3N7DXK8|A0A3N7DXK8_9NEIS S-adenosylmethionine:tRN A ribosyltransferase-isomerase OS=Aquitalea sp. FJL05 O X=2153366 GN=queA PE=3 SV=1
MLLSDFDYHLPEHLIAQHPPAVRGASRLLHVAGTSLTDGQFADFASQLKAGDVMVFNDTRVIKARLFGEKASGGKIEALVERVLDAHTVLAHVRSSKSPKPGTRLIFAERWEAEMVERDDALFKLRFLAEDNVFDILEASGKLPLPPYIERSAEGDDDERYQTVYAREQGAVAAPTAGLHFTEAMLAALQAKGVELAYVTLHVGAGTFQPVRVENIAEHKMHSEIYEVPQRTFELIQSARARGNQVLAVGTTSMRALESAARSGELVAGRGETDIFITPGYRFRVVDRLLTNFHLPKSTLLMLVSAFAGYPEMRAAYAHAVEQQYRFFSYGDAMLLERKDEQG

SEQ ID NO: 63475 - protein, 349 aa, Arachidicoccus ginsenosidivorans
  misc_feature (1)..(349): tr|A0A5B8VR12|A0A5B8VR12_9BACT S-adenosylmethionine:tRN A ribosyltransferase-isomerase OS=Arachidicoccus ginsen osidivorans OX=496057 GN=queA PE=3 SV=1
MKLSQFRFDLPLNLIAQNPPKRREDSRLMVVERNTGRIEHKQFKDVLDYFDDKDVFVVNNTKVFPARMYGRKEKTGAKIEVFLLRELNKQNRLWDVIVDPARKIRVGNKLYFGENDELVAEVIDNTTSRGRTIRFLWDSDEASFRKMLEFMGETPLPKYIKRKPTEEDKERYQTVYAKYEGAVAAPTAGMHFSKELIKRLEIQGIKFAELTLHTSLGTFRPIEVEDLSKHKMDAEYFRIEDETCKIVNAAKTTGHRVCSIGTTTMRALESSFTAQGLLKPNEGWTNVFVHPPHKFSIADSLITNFHLPKTSLLIMVCAFTGYDLAMEAYQVAIKEKYNFFTYGDAMLVI

SEQ ID NO: 63476 - protein, 421 aa, Arachidicoccus ginsenosidivorans
  misc_feature (1)..(421): tr|A0A5B8VLH9|A0A5B8VLH9_9BACT S-adenosylmethionine:tRN A ribosyltransferase-isomerase OS=Arachidicoccus ginsen osidivorans OX=496057 GN=queA PE=3 SV=1
MTAQPHANSSLVHPEELSIESFDYDLPEDRIAKYPLAVRDQSKLLIYNSNDSRQIQEKIYQQLDEQLPADCLLVFNNTKVVEARLIFKKDTGSKIELFCLEPGGAYPDITTAMLQKGTVLWKCLVGGAKKWKTGALKMRLEHNGQTIELQAEKQEKQGDSFLIRFSWIPESLSFAEMLHLTGQLPLPPYLNRATEQNDLKTYQTVYADKDGSVAAPTAGLHFTPSLLQKLSDKGIKEAFVTLHVGAGTFKPVKADKMKDHEMHAEFMEVPLDFLETLYEQAKNKRKILAVGTTSLRTLESLYWMGVKLLTDQLDPFVVEQWQPYRLPQNKTLTEALLAVTDSLKQAGKKTLVTQTRIIIAPGYQLRVADGILTNFHQPHSTLLLLIAAIVGQEWKNIYQYALTHDFRFLSYGDGSLLWKNT

SEQ ID NO: 63477 - protein, 349 aa, Arachidicoccus rhizosphaerae
  misc_feature (1)..(349): tr|A0A1H3WG39|A0A1H3WG39_9BACT S-adenosylmethionine:tRN A ribosyltransferase-isomerase OS=Arachidicoccus rhizos phaerae OX=551991 GN=queA PE=3 SV=1
MKLSQFRFDLPLNLIAQNPPKNREDARLMVVERSTGRIEHKQFKDVLDYFDDKDVFVVNNTKVFPARMYGRKEKTGAKIEVFLLRELNKQNRLWDVIVDPARKIRVGNKLYFGENDELVAEVIDNTTSRGRTIRFLWDSDEASFRKMLEFMGETPLPKYIKRKPTEEDKERYQTVYAKYEGAVAAPTAGMHFSKELIKRLEIQGVKFAELTLHTSLGTFRPIEVEDLSKHKMDAEYFRIDDETCRIVNAAKTSGHRICSVGTTTMRALESSFTAQGLLKPNEGWTNVFVHPPHTFSIADSLISNFHLPKTSLLIMVCAFTGYDLAMEAYQTAIKEKYNFFTYGDAMLVI

SEQ ID NO: 63478 - protein, 429 aa, Arachidicoccus rhizosphaerae
  misc_feature (1)..(429): tr|A0A1H3XV05|A0A1H3XV05_9BACT S-adenosylmethionine:tRN A ribosyltransferase-isomerase OS=Arachidicoccus rhizos phaerae OX=551991 GN=queA PE=3 SV=1
MTDKNEQPGNTARRVHPEELSIEDFDYPLPDSRIAKYPLTTRDQSKLLIFNKNNQKDITERIYRDLDEELPKGSLLVFNNTKVVEARLLFKKQTGSTIELFCLEPAGNYPDITTAMLSRGEVLWKCLVGGAKKWKSGPLTLEVAGPHPANTVTVTANKIEKQGDSFIIQLNWTPVELSFAEILHLSGQLPLPPYLNRATEAQDLETYQTVYAKQDGSVAAPTAGLHFTKDLLKRLADKGIKEAFVTLHVGAGTFKPVKADKMKDHEMHAEFMEIPCTFIETLLQQAKLKPEAKILAVGTTSLRTLESLYWMGVKLLTAQKDPYIISQWEPYQLEQGISLVDSLAALWQALQNDGKSALITHTQIIIAPGYNLRVADAILTNFHQPHSTLLLLIAAVVGNHWKSIYEYALGHDFRFLSYGDGSLLWQVKP

SEQ ID NO: 63479 - protein, 403 aa, Arachidicoccus sp.
  misc_feature (1)..(403): tr|A0A386HSS6|A0A386HSS6_9BACT S-adenosylmethionine:tRN A ribosyltransferase-isomerase OS=Arachidicoccus sp. KI S59-12 OX=2341117 GN=D6B99_16080 PE=3 SV=1
MHPKQLSINDFTYELPDQKIAKFPLETRDESKLLIYKNGEIADDIYAYLPSYLPEKSFLVFNNTKVVEARLLFEKESGSTVELFCLEPADDYSDITTAMLQKQKVLWKCLIGGAKKWKEGLLRKVIPNHQNKYLNAQKVEKRKDYFLIEFTWEDPDLSFAEILHLLGQIPVPPYLNRKAEEKDKETYQTVYAKYEGSVAAPTAGLHFTETLLQNLKNRNIHSSFVTLHVGAGTFKPVKADSMQAHEMHAEFIDVSLLFLEELLHNISEKIVVVGTTSMRTVESLYWMGVKVLSKIEDYTMVSQWEPYELPQHFSATESLNALIGVLKDKNATRLLARTQIIIAPGYPLQIVDGLITNFHQPKSTLLLLVAAVVGNDWKKIYQHALNQDYRFLSYGDGSLLWKN

SEQ ID NO: 63480 - protein, 403 aa, Arachidicoccus sp.
  misc_feature (1)..(403): tr|A0A191TKJ1|A0A191TKJ1_9BACT S-adenosylmethionine:tRN A ribosyltransferase-isomerase OS=Arachidicoccus sp. BS 20 OX=1850526 GN=A9P82_07875 PE=3 SV=1
MHPKHLSINDFTYDLSDEKIAKFPLQKRDESKLLIYESGKIEQSVYKNLPEFLSENTLLVFNNTKVVEARLLFKNINGANIELFCLEPADDYSDITTAMLQKGKVFWKCLVGNAKKWKEDLLEKTISSGGKSFILQVRKVEKQNDYFLIEFLWNIDEYSFAEVLHFAGQIPLPPYLHREAEEKDKETYQTVYAKHDGSVAAPTAGLHFTENLLQQLKNKNIQTDFVTLHVGAGTFKPVKSDTMEAHEMHAEFIDVSVELINSLIDNLSGKIVSVGTTSLRTLESLYWLGVKVLSNIFPLEISQWEVYDLPQNISASDALNALKNYLGKNEQQRLLTKTQIIIAPNYELRIANGLITNFHQPKSTLLLLVAAFIGDDWKNVYDYALQNDFRFLSYGDGSLLWRK

SEQ ID NO: 63481 - protein, 354 aa, Arboricoccus pini
  misc_feature (1)..(354): tr|A0A212R694|A0A212R694_9PROT S-adenosylmethionine:tRN A ribosyltransferase-isomerase OS=Arboricoccus pini OX= 1963835 GN=queA PE=3 SV=1
MDVSLFDFDLPSDLIAQTPAVNRDAARLLTIGATLADRAIVELPDLLRPGDLLIVNDTRVLPVRFEGHRAASGERPALVFAATLVEPSGTDHWWALCRPAKRLRAGDPVRLGQTLLARVAGKDDEGRVLLAFELEGQALLAGIKAEGAMPLPPYIHRPAGATAADRLRYQTVFAARDGAVAAPTAALHFTEALLARLAAAGIERASLTLHVGMGTFQPVKAEDTAGHIMHEEWYELPAATVAAIERTRAQGGRVVAVGTTVLRTLESALDDQGRIVARSGRTGIFITPGWQFRTADLLLTNFHLPRSTLFMLVSAFGGMDRLKAAYAHAIKERYRFFSYGDACLIERAEASLPG

SEQ ID NO: 63482 - protein, 334 aa, Archangium gephyra
  misc_feature (1)..(334): tr|A0A2W5SN22|A0A2W5SN22_9DELT S-adenosylmethionine:tRN A ribosyltransferase-isomerase OS=Archangium gephyra OX =48 GN=DI536_34515 PE=3 SV=1
MPSPRPAPTSLLLGEGEPRVVDFRELPDQLREGDLLVMNDAATFPGSVHFEHRHLRLEARLFEKTPRGFKAVLFGPGDFHTRTEARTPPPLLDPGEHLRLAGLDAEVIDVSPTSPRLVELAFTAHDDAQWAALYEHGHVIQYAHRAERLPLWSVQNVYGARPWAAEQPSAGHALTFELLRRLHVATLTHATGLSATGDPALDAALPFPERYEIPTATLDAVNAATRVIAVGTSVVRALEAWAMTGERAGVASEPIEPDTPLHVVDGLLTGIHSPGESHYRLLGAFLSPERLRAVCELANRKHLRTHENGDLALLWCDREVTSADAPAETRNVRS

SEQ ID NO: 63483 - protein, 341 aa, Archangium gephyra
  misc_feature (1)..(341): tr|A0A0G3A677|A0A0G3A677_9DELT S-adenosylmethionine:tRN A ribosyltransferase-isomerase OS=Archangium gephyra OX =48 GN=AA314_08901 PE=3 SV=1
MNAARWPREQPDSGRLLHVAPRSGRIDDVRMAELPRMLRPGDLLVLNDAATLPAALHGHTEAGAPIELRLVAREEEGTWTAVLFGAGDWRTRTEDRPLPPPVSPGERLVLGGLGARVVAVLPPSPRLLRVSFEAQGAALWAALYRAGRPVQYAHVERPLALWHIQTAYAARPWAVETPSAGLPLTWALLLDLKRRGVRLASLTHAAGLSSTGDAVLDAALPRPERFDVPAASVEAIHATRASGGRVVAVGTTVVRALEGRAAQTGGRLEAGEGVTDLLLGPGFVPRVVDGLLSGMHEPGTSHFTLLQAFAPAELLRAATVLAEAHGYLGHEFGDSCLLLDP

SEQ ID NO: 63484 - protein, 359 aa, Archangium sp.
  misc_feature (1)..(359): tr|A0A1Q3HWM0|A0A1Q3HWM0_9DELT S-adenosylmethionine:tRN A ribosyltransferase-isomerase OS=Archangium sp. Cb G35 OX=1920190 GN=BO221_02180 PE=3 SV=1
MRGPGGCRSRRSGTPGGRMNAARWPREQPDSGRLLHVAPRSGRLDDVRMSELPRMLRPGDLLVLNDAATLPAALHGRTEAGAPIELRLVAREEEGTWTAVLFGAGDWRMRTEDRPLPPSVSPGERLVLGGLGARVVAVLPPSPRLLRVSFEARGAALWSALYRAGRPVQYAHVERPLALWHIQTAYAARPWAVETPSAGLPLTWALLLDLKRRGVRLASLTHAAGLSSTGDAVLDAALPRPERFDVPAATVEAVHATRAAGGRVVAVGTTVVRALEGRAAQTGGRLEAGEGVTDLLLGPGFVPRVVDGLLSGMHEPGTSHFTLLQAFAPVELLRAATVFAEARGYLGHEFGDSCLLLDP

SEQ ID NO: 63485 - protein, 361 aa, Archangium sp.
  misc_feature (1)..(361): tr|A0A1Q3HFN2|A0A1Q3HFN2_9DELT S-adenosylmethionine:tRN A ribosyltransferase-isomerase OS=Archangium sp. Cb G35 OX=1920190 GN=queA PE=3 SV=1
MSSLLSDYDFELPEAQIAQAPLASRDASRLLVVSRSSGAREHRHFSGLTGLLREGDLLVVNDARVIPARLLGSKAGTGGRVELLVVRPSAPTLTSQALGGATEALEWICLGQASKGLKPGARVSFPEGLEAEVLEALGGGEYRVRFHAAPGTSLAELLDKAGRLPLPPYITRAPEAADAERYQTVYARASGAVAAPTAGLHFTQATFEALAARGIHRVEVTLDVGPGTFLPVREENLEKHHMHPERYFVPEATAQAVNAAKAEGRRVVAVGTTVVRTLESATDPDSGALRAGTGETTLFIRPGFRFRQVDVLLTNFHLPRSTLVVLVSALLGRERTLDAYREAVAAGYRFFSYGDAMLVTE

SEQ ID NO: 63486 - protein, 341 aa, Archangium violaceum
  misc_feature (1)..(341): tr|A0A084SKJ8|A0A084SKJ8_9DELT S-adenosylmethionine:tRN A ribosyltransferase-isomerase OS=Archangium violaceum Cb vi76 OX=1406225 GN=Q664_38045 PE=3 SV=1
MNAARWPREQPDSGRLLHVAPRSGRLDDVRMSDLPRMLRPGDLLVLNDAATLPAALHGRTEAGAPIELRLVAREEEGTWTAVLFGAGDWRMRTEDRPLPPPVSPGERLVLGGLGARVVAVLPPSPRLLRVRFEAQGAALWSALYRAGRPVQYAHVERPLALWHIQTAYAARPWAVETPSAGLPLTWALLLDLKRRGVRLASLTHAAGLSSTGDAVLDAALPRPERFDVPAATVEAIQTTRDSGGRVVAVGTTVVRALEGRAAQTGGRLEAGEGVTDLLLGPGFVPRVVDGLLSGMHEPGTSHFTLLQAFAPVELLRAATVFAEARGYLGHEFGDSCLLLDP

SEQ ID NO: 63487 - protein, 361 aa, Archangium violaceum
  misc_feature (1)..(361): tr|A0A084T1T1|A0A084T1T1_9DELT S-adenosylmethionine:tRN A ribosyltransferase-isomerase OS=Archangium violaceum Cb vi76 OX=1406225 GN=queA PE=3 SV=1
MSSLLSDYDFELPEAQIAQAPLASRDASRLLVVSRSSGVREHRHFSDLTGLLREGDLLVVNDARVIPARLLGSKAGTGGRVELLVVRPSAPTLTSQALGGATEALEWICLGQASKGLKPGARVSFPEGLEAEVLEALGGGEYRVRFHAAPGTSLAERLDKAGRLPLPPYITRAPEAADAERYQTVYARASGAVAAPTAGLHFTQATFEALAARGIHRVEVTLDVGPGTFLPVREENLEKHHMHPERYFVPEATARAVNAAKAEGRRVVAVGTTVVRTLESATDPDSGALRTGTGETTLFIRPGFRFRQVDVLLTNFHLPRSTLVVLVSALLGRERTLEAYREAVAAGYRFFSYGDAMLVTE

SEQ ID NO: 63488 - protein, 416 aa, Arcicella aurantiaca
  misc_feature (1)..(416): tr|A0A316DKR6|A0A316DKR6_9BACT S-adenosylmethionine:tRN A ribosyltransferase-isomerase OS=Arcicella aurantiaca OX=591202 GN=queA PE=3 SV=1
MQNIKLSDYTYDLPDERIAKFPLPKRDESKLQVYQQGKITHTVFKNITDYLPKNSLLVFNNTKVIPARIHFQKSTGAVIQIFLLHPVLPTPVINLAMEVTDSCVWECMIGNRKRWKKGDVLSQTLTIDGQEVKVNAEIFDEEKNYVKFRYEVENSEIPKPTTSYLLPHTYELPFSKLIQSLGQIPLPPYLNREAETADYETYQTVYSEKKGAVAAPTAGLHFTDEVLKNLENQGIKQEFLTLHVGAGTFQPIKVENIIEHKMHNEQVVISRENVENLLANLGNIIPVGTTSMRTLESLYWYGVKLISDKNSPFFIEKLYPYQHENVPSAEESLKAILEKMIANNDSEITGETEIFIFPSYQFKLCKGIITNYHQPESTLILLIAALIGEDWRRVYEEAMTKDYRFLSYGDSSLLLP

SEQ ID NO: 63489 - protein, 362 aa, Arcicella aurantiaca
  misc_feature (1)..(362): tr|A0A316EFG9|A0A316EFG9_9BACT S-adenosylmethionine:tRN A ribosyltransferase-isomerase OS=Arcicella aurantiaca OX=591202 GN=queA PE=3 SV=1
MIPSEKTANIIRMKLSEFRFDLPNNLISLYPTENRGESRMMVVNRKTQTIEHRMFTDILDYFDDGDVMVTNDTKVFPARLFGQKEKTGAKIEVFLLRELNREHRLWDVLVDPARKIRVGNKLYFGDSDLVAEVIDNTTSRGRTIRFLYDGDHDALMKQIHLLGETPLPDEIRFKRNVEPSDEERFQTIYADKVGAVAAPTAGMHFSKIIMKRLELKGINFTPLTLHVGLGTFRQVDVEDLTKHKTDSENFNITQETCDVVNAGIDAKKRICAIGTTSMRALESSVSADGHLKPIEGWTDKFIFPPYDFRIPNALLTNFHLPESVLIMMTSAFGGFELVREAYEVAIKEKYKFFTYGDAMLII

SEQ ID NO: 63490 - protein, 341 aa, Arcobacter anaerophilus
  misc_feature (1)..(341): tr|A0A4V1LQE6|A0A4V1LQE6_9PROT S-adenosylmethionine:tRN A ribosyltransferase-isomerase OS=Arcobacter anaerophil us OX=877500 GN=queA PE=3 SV=1
MQLDPLKTSSYDYTLPKELIATHPVYPADSAKLLVYDRKKDKIIHTTFKDLYDFIPKDASIFLNDTKVIKARIYGNKDSGGKVELLFNKPLFMDRYLVMIRGKVRVGTKIFFENNLNAEVLEVNEDGSRVVNFFKDDEKLDFLSLVEILNKIGHLPLPPYMNREDEEKDNQDYQTLFAKNYGAVAAPTASLHFTEELLEKINKNFPVNYLTLHVGAGTFKPVDVEEILSHPMHSEYFEIDAKAKKALDEAKKVLAVGTTVTRTVEYYARTNKIQGECDLFLNPLNKPIKVDYLLTNFHLPKSTLIMLIASFIGLEKTLEVYNEAIKQKYRFFSYGDGMLIL

SEQ ID NO: 63491 - protein, 340 aa, Arcobacter aquimarinus
  misc_feature (1)..(340): tr|A0A4Q0UTG3|A0A4Q0UTG3_9PROT S-adenosylmethionine:tRN A ribosyltransferase-isomerase OS=Arcobacter aquimarinu s OX=1315211 GN=queA PE=3 SV=1
MLDPLKTSSYDYDLPKELIATHPVSPADSARLLVYDRKTNKITHSTFKNLMDFLPDDLSIFLNDTKVIKARIFGTKETGGKIELLLNKPLFMDRYLVMIGGKVKVGTKLFFDENLTALVLEINEDGSRVVEFFQNDKKLDFLEVVEILNKIGHLPLPPYMNRADEKKDEQDYQTLFAKNYGAVAAPTASLHFTPELLEKINNKYNVNYLTLHVGAGTFKPVDAEDILNHPMHSEYFEIGIDAKKALDNASKVLAVGTTVTRTVEYYVRTNKIQGECDLFLNPANKPIKVDCLLTNFHLPKSTLIMLIASFVGLEKTLEIYHEAIKEKYRFYSYGDGMLIL

SEQ ID NO: 63492 - protein, 343 aa, Arcobacter bivalviorum
  misc_feature (1)..(343): tr|A0A345IXB1|A0A345IXB1_9PROT S-adenosylmethionine:tRN A ribosyltransferase-isomerase OS=Arcobacter bivalvioru m OX=663364 GN=queA PE=3 SV=1
MKSNLDPLKTSSYDYHLPKELIATKPVYPADSAKLLVYNRQTDTITHTTFKSLMEFLPENLSIFLNDTKVIKARIFGQKQSGGKVELLFNKPLFMDRYLVMIRGKVKVGTKLFFPMDLEAEVLEVNEDGSRIVNFIQKDKKLDFLTLVEILNEIGHLPLPPYMNREDEEKDNEDYQTLFAKNYGAVAAPTASLHFTEELLEKINNKYKVDYLTLHVGAGTFKPVDSEEILEHPMHSEYFEIGIEAKKALDEAQKVLAVGTTVTRTIEYYARTNKIQGECDLFLNPVNKPIKVDHLLTNFHLPKSTLIMLIASFVGLEKTLEIYEEAIKERYRFYSYGDGMLII

SEQ ID NO: 63493 - protein, 340 aa, Arcobacter butzleri
  misc_feature (1)..(340): sp|A8EU90|QUEA_ARCB4 S-adenosylmethionine:tRNA ribosylt ransferase-isomerase OS=Arcobacter butzleri (strain RM4 018) OX=367737 GN=queA PE=3 SV=1
MLDPLKTSSYDYNLPKNQIATYPVTPADSAKLLIFNRSTNTIIHSTFKDILEFLPNDLSIFLNDTKVIKARIFGVKDSGGQIELLLNKPLFMDRYLVMIRGKVRVGTKLLFDENLSAIVEEVDEDGSRIVEFFQDEKKLDFLSLVEILNKIGHLPLPPYMNREDEKQDEQNYQTLFAKNYGAVAAPTASLHFTPELLKNLEEKYGLNYLTLHVGAGTFKPVDVEDILSHPMHSEYFEIGIDAKKNLDKANKVLAVGTTVTRTIEYYARTNKIQGECDLFLNPANKPIKVDYLLTNFHLPKSTLIMLVASFIGLEKTLEIYETAIKENYRFYSYGDGMLII

SEQ ID NO: 63494 - protein, 340 aa, Arcobacter butzleri
  misc_feature (1)..(340): tr|A0A0M1UMF7|A0A0M1UMF7_9PROT S-adenosylmethionine:tRN A ribosyltransferase-isomerase OS=Arcobacter butzleri E D-1 OX=944546 GN=queA PE=3 SV=1
MLDPLKTSSYEYNLPKNQIATYPVTPADSAKLLVFNRSTNTIIHSTFKDILEFLPNDLSIFLNDTKVIKARIFGLKDSGGQIELLLNKPLFMDRYLVMIRGKVRVGTKLLFDENLSAIVEEVNEDGSRIVEFFQEEKKLDFLSLVEILNKIGHLPLPPYMNREDEKQDEQNYQTLFAKNYGAVAAPTASLHFTPQLLKNLEEKYGLNYLTLHVGAGTFKPVDVEDILSHPMHSEYFEIGIDAKKNLDKANKVLAVGTTVTRTIEYYARTNKIQGECDLFLNPANKPIKVDYLLTNFHLPKSTLIMLVASFIGLEKTLEIYETAIKENYRFYSYGDGMLII

SEQ ID NO: 63495 - protein, 345 aa, Arcobacter canalis
  misc_feature (1)..(345): tr|A0A2G1CYD2|A0A2G1CYD2_9PROT S-adenosylmethionine:tRN A ribosyltransferase-isomerase OS=Arcobacter canalis OX =1912871 GN=queA PE=3 SV=1
MTKNSLDPLKTSSYDYTLPKELIATHPVSPADSARLLVYDRKTDKIIHSTFKNLLDFIPNNVNIFLNDTKVIKARIFGHKDSGGKVELLLNKPLFMNRYLVMIRGKVKVGTVLTFDKNLKAEVLEVSEDGSRVVKFFLNEKENLEFLELVDILNDIGHLPLPPYMNREDEEKDNENYQTLFAKKYGAVAAPTASLHFTPELFKKLENKFNIDYLTLHVGAGTFKPVDTEEILNHPMHSEYFEINESSKKSLDNSKKVLAVGTTVTRTIEYYARTNKIQGECDLFLNPSNTPIKVNHLLTNFHLPKSTLIMLIASFVGLEKTLEIYEEAINEKYRFYSYGDGMLII

SEQ ID NO: 63496 - protein, 340 aa, Arcobacter cibarius
  misc_feature (1)..(340): tr|A0A5J6RH46|A0A5J6RH46_9PROT S-adenosylmethionine:tRN A ribosyltransferase-isomerase OS=Arcobacter cibarius O X=255507 GN=queA PE=4 SV=1
MSDFLKTSSYDFFLPQNQIATTPAIPADSAKLLVYDRKNDKIIHTVFKNIMDFLPEELTIFLNDTKVIKARIFGQKISGAKIELLLNKPLFMDRFLVMIRGKVKVDTKLIFDESLTAVVLELNEDGSRVVEFFKDDKKLDFNSLVEILNKIGHIPLPPYMNREDTKDDETNYQTLFAKNYGAVAAPTASLHFTSELLEKLEKKYGLNYLTLHVGAGTFKPVDVEDILSHPMHSEYFEINKNCKDKIDNAKNILAVGTTVTRTLEFYARKNMICGECDLFLNPSNKPIIVNHLLTNFHLPKSTLIMLVASFIGLEKTLEIYDIAIKNNYRFYSYGDAMLII

SEQ ID NO: 63497 - protein, 340 aa, Arcobacter cloacae
  misc_feature (1)..(340): tr|A0A4Q0V2X5|A0A4Q0V2X5_9PROT S-adenosylmethionine:tRN A ribosyltransferase-isomerase OS=Arcobacter cloacae OX =1054034 GN=queA PE=3 SV=1
MLDPLKTSSYDYDLPKELIATHPVSPADCARLLVYDRKTDKITHSTFKNLMDFLPDDLSIFLNDTKVIKARIFGTKETGGKIELLLNKPLFMDRYLVMIGGKVKVGTKLFFDENLTALVLEINEDGSRVVEFFQNEKKLDFLEVVEILNKIGHLPLPPYMNRADEKKDEQDYQTLFAKNYGAVAAPTASLHFTPELLEKINNKYNVNYLTLHVGAGTFKPVDAEDILNHPMHSEYFEIGIDAKKALDNASKVLAVGTTVTRTVEYYVRTNKIQGECDLFLNPANKPIKVDCLLTNFHLPKSTLIMLIASFVGLEKTLEIYHEAIKEKYRFYSYGDGMLIL

SEQ ID NO: 63498 - protein, 340 aa, Arcobacter cloacae
  misc_feature (1)..(340): tr|A0A4Q0ZE56|A0A4Q0ZE56_9PROT S-adenosylmethionine:tRN A ribosyltransferase-isomerase OS=Arcobacter cloacae OX =1054034 GN=queA PE=3 SV=1
MLDPLKTSSYDYDLPKELIATHPVSPADSARLLVYDRKTDKITHSTFKNLMDFLPDDLSIFLNDTKVIKARIFGTKETGGKIELLLNKPLFMDRYLVMIGGKVKVGTKLFFDENLTALVLEINEDGSRIVEFFQNEKKLDFLEVVEILNKIGHLPLPPYMNRADEKKDEQDYQTLFAKNYGAVAAPTASLHFTPELLEKINNKYNVNYLTLHVGAGTFKPVDAEDILNHPMHSEYFEIGIDAKKALDNASKVLAVGTTVTRTVEYYVRTNKIQGECDLFLNPANKPIKVDCLLTNFHLPKSTLIMLIASFVGLEKTLEIYHEAIKEKYRFYSYGDGMLIL

SEQ ID NO: 63499 - protein, 343 aa, Arcobacter cryaerophilus
  misc_feature (1)..(343): tr|A0A494TCK1|A0A494TCK1_9PROT S-adenosylmethionine:tRN A ribosyltransferase-isomerase OS=Arcobacter cryaerophi lus D2610 OX=1032071 GN=queA PE=3 SV=1
MIDVLKTSSYDFNLPASQIATFPVNPPSSAKMLVYNREKNEIFHSTFENILEFLPQDLTIFLNDTKVIKARIFGQKYTGAKLELLLNKPLFMDRYLVMIKGKVKIGTKIFFDENLIAEVLELNEDGTRVVSFFKDENSNKRVDFLSLVEILNKIGHIPLPPYMQRDDKKEDEVNYQTLFAKKYGAVAAPTASLHFTKELLEEIEKKYGLNYLTLHVGAGTFKPVDVEDILSHPMHSEYFEIGIDAKKNLDNAKKVLAVGTTVTRTIEYYARTNKIQGECDLFLNPMNKPIKVDYLLTNFHLPKSTLIMLVASFIGLEKTLELYNIAIKENYRFYSYGDGMLII

SEQ ID NO: 63500 - protein, 343 aa, Arcobacter cryaerophilus
  misc_feature (1)..(343): tr|A0A5B7XC49|A0A5B7XC49_9PROT S-adenosylmethionine:tRN A ribosyltransferase-isomerase OS=Arcobacter cryaerophi lus ATCC 43158 OX=1032070 GN=queA PE=3 SV=1
MIDVLKTSSYDFNLPHSQIATFPVNPASSAKMLVYNRDKNEIFHSTFENILEFLPEDLTIFLNDTKVIKARIFGKKSTGAKLELLLNKPLFMDRYLVMIKGKVKVGTKIFFDENLIAEVLELNEDGTRVIEFFQDENSKKRVDFLSLVEILNKIGHIPLPPYMQREDKKEDELNYQTLFAKNYGAVAAPTASLHFTTELLEKIEKKYGLNYLTLHVGAGTFKPVDVEDILSHPMHSEYFEIGIDAKKNLDNAKKVLAVGTTVTRTIEYYSRTNKIQGECDLFLNPVNKPIKVDYLLTNFHLPKSTLIMLVASFIGLEKTLELYNIAIKNNYRFYSYGDGMLII

SEQ ID NO: 63501 - protein, 340 aa, Arcobacter defluvii
  misc_feature (1)..(340): tr|A0A4V1LC34|A0A4V1LC34_9PROT S-adenosylmethionine:tRN A ribosyltransferase-isomerase OS=Arcobacter defluvii O X=873191 GN=queA PE=3 SV=1
MLDPLKTSSYDYDLPKELIATKPVSPADSARLLVYNRKENKITHTTFKNLIEVLPSDLSIFLNDTKVIKARIFGEKESGGKIELLLNKPLFMDRYLVMIRGKVKIGTKLFFDKDLIAEVIELNEDGTRVVKFFKEDKNLDFLELVEILNKIGHLPLPPYMNREDEKEDEKDYQTLFAKNYGAVAAPTASLHFTPELLEKINNKYDVNYLTLHVGAGTFKPVDVDEILNHPMHSEYFEIGIEAKKALDNAKKVLAVGTTVTRTIEYYARTNKIQGECDLFLNPSNQPIKVDYLLTNFHLPKSTLIMLIASFVGLEKTLEIYHEAIKEKYRFYSYGDGMLII

SEQ ID NO: 63502 - protein, 344 aa, Arcobacter ebronensis
  misc_feature (1)..(344): tr|A0A4Q1ANE5|A0A4Q1ANE5_9PROT S-adenosylmethionine:tRN A ribosyltransferase-isomerase OS=Arcobacter ebronensis OX=1462615 GN=queA PE=3 SV=1
MKNKELNPLKTSSYDYSLPKELIATHPVYPADSAKLLVYNRVENKITHTTFKNLLDFIPKDSSIFLNDTKVIKARIFGTKESGGRVELLFNKPLFMDRYLVMIRGKVKVGTKLFFEYDLSVEVLEVNEDGSRVVHFFQKDKKLDFLSLVEILNKIGHLPLPPYMNREDEDKDNQDYQTLFAKNYGAVAAPTASLHFTEELLEKINQNFPINYLTLHVGAGTFKPVDVDEILSHPMHSEYFEIGIEAKKALDKAKKVLAVGTTVTRTIEYYARTNKIQGECDLFLNPLNKPIKVDYLLTNFHLPKSTLIMLIASFVGLEKTLEIYNEAIKERYRFYSYGDGMLII

SEQ ID NO: 63503 - protein, 344 aa, Arcobacter ebronensis
  misc_feature (1)..(344): tr|A0A4Q0YI33|A0A4Q0YI33_9PROT S-adenosylmethionine:tRN A ribosyltransferase-isomerase OS=Arcobacter ebronensis OX=1462615 GN=queA PE=3 SV=1
MKNKELDPLKTSSYDYSLPKELIATHPVYPADSAKLLVYNRAENKITHTTFKNLLDFIPKDSSIFLNDTKVIKARIFGTKESGGRVELLFNKPLFMDRYLVMIRGKVKVGTKLFFEYDLSAEVLEVNEDGSRVVYFFQKDKKLDFLSLVEILNKIGHLPLPPYMNREDEDKDNQDYQTLFAKNYGAVAAPTASLHFTEELLEKINQNFPINYLTLHVGAGTFKPVDVDEILSHPIHSEYFEIGLEAKKALDKAKKVLAVGTTVTRTIEYYARTNKIQGECDLFLNPLNKPIKVDYLLTNFHLPKSTLIMLIASFVGLEKTLEIYNEAIKERYRFYSYGDGMLII

SEQ ID NO: 63504 - protein, 340 aa, Arcobacter ellisii
  misc_feature (1)..(340): tr|A0A347U8M7|A0A347U8M7_9PROT S-adenosylmethionine:tRN A ribosyltransferase-isomerase OS=Arcobacter ellisii OX =913109 GN=queA PE=3 SV=1
MLDPLKTSSYDYDLPKELIATKPVSPADSARLLVYNRKEKKITHTIFKNLMEVLPPDLSIFLNDTKVIKARIFGEKESGGKVELLLNKPLFMDRYLVMIRGKVKIGTKLFFDEDLIAEVIELNEDGTRVVKFFKKEKNLDFLELVDILNKIGHLPLPPYMNREDEKEDEKDYQTLFAKNYGAVAAPTASLHFTPELLEKINNKYDVNYLTLHVGAGTFKPVDVDEILNHPMHSEYFEIGIEAKKALDNAKKVLAVGTTVTRTVEYYARTNKIQGECDLFLNPSNQPIKVDYLLTNFHLPKSTLIMLIASFVGLEKTLEIYQEAIKEKYRFYSYGDGMLII

SEQ ID NO: 63505 - protein, 345 aa, Arcobacter halophilus
  misc_feature (1)..(345): tr|A0A2N1J2J9|A0A2N1J2J9_9PROT S-adenosylmethionine:tRN A ribosyltransferase-isomerase OS=Arcobacter halophilus OX=197482 GN=queA PE=3 SV=1
MTKSKLDPLKTSSYDYKLPKKLIATHPVSPADSARLLVYDRQKDKIIHTTFKNLLDYIPEDVSIFLNDTKVIKARIFGHKQSGGKVELLLNKPLFMNRYLVMIRGKVKKGTVLTFKKGLKAEVLEINEDGSRVVSFYLEDKKNLEFLQLVDILNQIGHLPLPPYMNREDEEQDNKNYQTLFAKNYGAVAAPTASLHFTPELLKKLEDKFSIDYLTLHVGAGTFKPVDAEDILNHPMHSEYFEIGIKAKASLDNAKKVLAVGTTVTRTAEYYARTNKIQGECDLFLNPSNKPLKVDHLLTNFHLPKSTLIMLIASFIGLEKTLEVYEEAIKQEYRFYSYGDGMLII

SEQ ID NO: 63506 - protein, 350 aa, Arcobacter marinus
  misc_feature (1)..(350): tr|A0A347TL03|A0A347TL03_9PROT S-adenosylmethionine:tRN A ribosyltransferase-isomerase OS=Arcobacter marinus OX =505249 GN=queA PE=3 SV=1
MKKMMTKNSLLDPLKTSSYDYTLPKELIATHPVSPADSARLLVYDRKTDKIIHSTFKNLLDFIPNDVNIFLNDTKVIKARIFGHKDSGGKVELLLNKPLFMNRYLVMIRGKVKVGTVLTFDKNLKAEVLEVSEDGSRVVKFFLNEKENLEFLELVDILNDIGHLPLPPYMNREDEEKDNENYQTLFAKKYGAVAAPTASLHFTPELFKKLENKFNIDYLTLHVGAGTFKPVDTEKILNHPMHSEYFEINENSKKSLDNSKKVLAVGTTVTRTIEYYARTNKIQGECDLFLNPSNTPIKVNHLLTNFHLPKSTLIMLIASFVGLEKTLEIYEEAINEKYRFYSYGDGMLII

SEQ ID NO: 63507 - protein, 347 aa, Arcobacter marinus
  misc_feature (1)..(347): tr|A0A1T5C084|A0A1T5C084_9PROT S-adenosylmethionine:tRN A ribosyltransferase-isomerase OS=Arcobacter marinus OX =505249 GN=queA PE=3 SV=1
MMTKNSLLDPLKTSSYDYTLPKELIATHPVSPADNARLLVYDRKTNKITHTTFKNLLDFIPKDVAIFLNDTKVIKARIFGHKDSGGKVELLLNKPLFMNRYLVMIRGKVKVGTVLTFDKNLKAEVLEVSEDGSRVVKFFLNEKENLEFLELVDILNDIGHLPLPPYMNREDEEKDNENYQTLFAKNYGAVAAPTASLHFTPELFKKLQDKFNLDYLTLHVGAGTFKPVDAEDILNHPMHSEYFEINESSKNLLDNSKKVLAVGTTVTRTIEYYARTNKIQGECDLFLNPSNTPIKVNHLLTNFHLPKSTLIMLIASFVGLEKTLEIYEEAISEKYRFYSYGDGMLII

SEQ ID NO: 63508 - protein, 344 aa, Arcobacter molluscorum
  misc_feature (1)..(344): tr|A0A2G1DKD4|A0A2G1DKD4_9PROT S-adenosylmethionine:tRN A ribosyltransferase-isomerase OS=Arcobacter molluscoru m LMG 25693 OX=870501 GN=queA PE=3 SV=1
MKKNKLDPLKTSSYDYNLPKELIATQPVSPADKARLLVYDRKNDKITHTTFKKLLDFIPNDVSIFLNDTKVIKARIFGTKQSGGKIELLMNKPLFMNRFLVMIRGKVKIGTILNFEENLSAKVLEINEDGTRVVKFFENNKELEFLELVEILNKIGHLPLPPYMNREDKEEDNKNYQTLFAKNYGAVAAPTASLHFTPELLKKLEDKFNIEYLTLHVGAGTFKPVDVEDILNHPMHSEYFEISAKAKKELDNAKKVLAVGTTVTRTVEYYARTNKIQGECDLFLNPSNTPIKVDHLLTNFHLPKSTLIMLIASFVGLEKTLEIYEEAIKEKYRFYSYGDGMLII

SEQ ID NO: 63509 - protein, 348 aa, Arcobacter mytili
  misc_feature (1)..(348): tr|A0A345J5W8|A0A345J5W8_9PROT S-adenosylmethionine:tRN A ribosyltransferase-isomerase OS=Arcobacter mytili LMG 24559 OX=1032238 GN=queA PE=3 SV=1
MKKMMKKSNLDPLKTSSYDYDLPKELIATHPASPADSARLLVYNRKTNTITHTTFKELLNFIPEDSSIFLNDTKVIKARIFGQKDSGGKVELLLNKPLFMNRYLVMIRGKVKVGTILYFDKELKAEVLEVNEDGSRIVQFFKEEKKLDFLSLVDILNEIGHLPLPPYMNREDEEQDNKDYQTLFAKNYGAVAAPTASLHFTPQLFDKLQEKFEVNYLTLHVGAGTFKPVDAEDILNHPMHSEYFEIGIEAKKALDNAKKVLAVGTTVTRTVEYYARTNMIQGECDLFLNPANTPIKVDYLLTNFHLPKSTLIMLIASFVGLEKTLEIYNEAIKEKYRFYSYGDGMLII

SEQ ID NO: 63510 - protein, 345 aa, Arcobacter nitrofigilis
  misc_feature (1)..(345): tr|D5V1V2|D5V1V2_ARCNC S-adenosylmethionine:tRNA ribosy ltransferase-isomerase OS=Arcobacter nitrofigilis (stra in ATCC 33309 / DSM 7299 / LMG 7604 / NCTC 12251 / CI) OX=572480 GN=queA PE=3 SV=1
MMKNNLDPLKTSSYDYFLPKELIASKPLYPADSARLLVYNRNSDTITHTTYKYLLDFLPENLDIFLNDTKVIKARIYGKKDSGGKTELLFNKPLFMDRYQVMIKGKVQKGTKLFFDENLSAEVLELNNEDGTRTVKFFKDEKQLDFLSLIDILNKIGHLPLPHYMNREDEKEDEKDYQTLFAKNYGAVAAPTASLHFTDELLEKLHNKHNINYLTLHVGAGTFKPVDAEDILNHPMHSEYFEISRESLEALKEKNKTLAVGTTVTRTIEYYARTNKIQGECDLFLNPANKPIKVDHLLTNFHLPKSTLIMLIASFVGLEKTLEIYETAVKDKYRFFSYGDGMLII

SEQ ID NO: 63511 - protein, 341 aa, Arcobacter pacificus
  misc_feature (1)..(341): tr|A0A5C2H6P4|A0A5C2H6P4_9PROT S-adenosylmethionine:tRN A ribosyltransferase-isomerase OS=Arcobacter pacificus OX=1080223 GN=queA PE=3 SV=1
MLDPLKTSSYDYELPKELIATKPVSPADSARLLVYDRKTDTITHTTFKNLLEVLPKNISIFLNDTKVIKARIFGQKQSGGKIELLLNKPLFMDRYLVMTRGRVRSIGTEIFFDEGLVAKVVEINEDGSRVVEFYKDGKKLDFLSLVEILNKIGHLPLPPYMNREDNKQDEKDYQTLFAKNYGAVAAPTASLHFTDELFEKINQNFPVNYLTLHVGAGTFKPVDAEDILEHPMHSEYFEIGINVKKELDNAKKVLAVGTTVTRTVEYYARTNKIQGECDLFLNPANTPIKVDHLLTNFHLPKSTLIMLIASFVGLEKTLEIYHEAVKEKYRFFSYGDGMLII

SEQ ID NO: 63512 - protein, 340 aa, Arcobacter skirrowii
  misc_feature (1)..(340): tr|A0A2U2C0M6|A0A2U2C0M6_9PROT S-adenosylmethionine:tRN A ribosyltransferase-isomerase OS=Arcobacter skirrowii OX=28200 GN=queA PE=3 SV=1
MSDFLKTSSYDFTLPQELIATTPAVPADSAKLLVYDRKNNTITHTIFKNILDFLPQDLTIFLNDTKVIKARVFGKKETGANIELLLNKPLFMDRFLVLIKGKVKVGTILTFDEKLKAKVLELNEDGTRVVEFYLDNKKLDFTSLIEILNKIGHIPLPPYMNREDTKEDETNYQTLFAKNHGAVAAPTASLHFTPELLNKLEEKYGLNYLTLHVGAGTFKPVDVEDILSHPMHSEYFEISSECKTKIDKAKNILAVGTTVTRTLEFYARKNMICGECDLFLNPSNKPIIVNHLLTNFHLPKSTLIMLVASFIGLEKTLEIYNEAIKNNYRFYSYGDAMLII

SEQ ID NO: 63513 - protein, 340 aa, Arcobacter skirrowii
  misc_feature (1)..(340): tr|A0A4Q0UDK0|A0A4Q0UDK0_9PROT S-adenosylmethionine:tRN A ribosyltransferase-isomerase OS=Arcobacter skirrowii CCUG 10374 OX=1032239 GN=queA PE=3 SV=1
MSDFLKTSSYDFTLPQELIATTPAIPADSAKLLVYNRANNTITHTIFKNILDFLPQDLTIFLNDTKVIKARVFGKKETGANIELLLNKPLFMDRFLVLIKGKVKIGATLTFDEKLKAKVLELNEDGTRVVEFYLDNKKLDFTSLIEILNKIGHIPLPPYMNREDNKDDEKNYQTLFAKNYGAVAAPTASLHFTSELLEELEKKYGLNYLTLHVGAGTFKPVDVEDILSHPMHSEYFEISIDCKTKIDKAKNILAVGTTVTRTLEFYARKNMICGECDLFLNPSNKPIIVNHLLTNFHLPKSTLIMLVASFIGLEKTLEIYNEAIKNNYRFYSYGDAMLII

SEQ ID NO: 63514 - protein, 340 aa, Arcobacter sp.
  misc_feature (1)..(340): tr|A0A2D5JFQ2|A0A2D5JFQ2_9PROT S-adenosylmethionine:tRN A ribosyltransferase-isomerase OS=Arcobacter sp. OX=187 2629 GN=queA PE=3 SV=1
MLDPLKTSSYDYDLPKELIASKPVHPADSAKLLVYNRETNTITHSTFKNLMDFLPEDISVFLNDTKVIKARIFGKKLSGGKVELLLNKPLFMDRYLVMIRGKVSIGMLLYFEEDIIVKVLEINEDGTRVVEFYQNEKKLDFLTLVETLNKIGHLPLPHYMNREDNEEDNTNYQTLFAKNYGAVAAPTASLHFTQELLEKINDKYDVNYLTLHVGAGTFKPVDAEDILSHPMHSEYFEIGREAKESLDKASKVLAVGTTVTRTIEYYARKNMISGECDLFLNPANEPIKVDHLLTNFHLPKSTLIMLIASFVGLEKTLEIYEEAIKEEYRFFSYGDGMLII

SEQ ID NO: 63515 - protein, 340 aa, Arcobacter sp.
  misc_feature (1)..(340): tr|A0A1Y5DTV8|A0A1Y5DTV8_9PROT S-adenosylmethionine:tRN A ribosyltransferase-isomerase OS=Arcobacter sp. 31_11_ sub10_T18 OX=1856277 GN=queA PE=3 SV=1
MLDPLKTSSYDYSLPKELIATHPVHPADSAKLLVYNRADDSITHTTFKEILNFLPKDISIFLNDTKVIKARIFGTRPSGGKAELLFNKPMPNDEYLCLIRGKVHVGTKITFENNLSAVVTQLNGDGSRLVKFYQEDKELDFLELVDILNSIGHLPLPPYMNREDEEIDNIDYQTLFAKNYGAVAAPTASLHFTPTLLEQLNSNFEVNYLTLHVGAGTFKPVDAVDILDHPMHSEYFEISKESNNALKADKNILAVGTTVTRTIEYNARNQKTFGECDLFLNPSNKPIRVNHLLTNFHLPKSTLIMLIASFVGIEKTMEIYDIAIKEKYRFFSYGDGMLII

SEQ ID NO: 63516 - protein, 340 aa, Arcobacter suis
  misc_feature (1)..(340): tr|A0A443TLJ9|A0A443TLJ9_9PROT S-adenosylmethionine:tRN A ribosyltransferase-isomerase OS=Arcobacter suis OX=12 78212 GN=queA PE=3 SV=1
MLDPLKTSSYDYDLPKELIATHPVSPADSARLLVYNRTTNSITHTTFKNLMDFLPSNLSVFLNDTKVIKARIFGIKETGGKIELLLNKPLFMDRYLVMIGGKVRIGTKLFFDENLIAEVLEVNEDGSRVVQFFQNDKKLDFLTLVDILNKIGHLPLPPYMNRADEKEDEKDYQTLFAKNYGAVAAPTASLHFTPELLEKINARYDVNYLTLHVGAGTFKPVDVDDILNHPMHSEYFEIGIEAKKALDNAPKVLAVGTTVTRTVEYYARTNKIQGECDLFLNPANKPIKVDYLLTNFHLPKSTLIMLVASFVGLEKTLEIYHEAIKENYRFYSYGDGMLII

SEQ ID NO: 63517 - protein, 343 aa, Arcobacter thereius
  misc_feature (1)..(343): tr|A0A1C0B6R8|A0A1C0B6R8_9PROT S-adenosylmethionine:tRN A ribosyltransferase-isomerase OS=Arcobacter thereius O X=544718 GN=queA PE=3 SV=1
MSDNLKTSSYDFYLPTSQIASKAVNPADSAKLLVYNRATNEITHTIFKDIMDFLPEDLTIFLNDTKVIKARIFGKKLTGANIELLLNKALFMNRFLVYIKGKVNLGTKLFFDKNLCANIIEINEDGSRVVEFYKKDYEKIKLDFSSLVEILNEIGHIPLPPYINRADTKEDEKDYQTLFAKKYGAVAAPTASLHFTPELLQKIEDKYGLNYLTLHVGAGTFKPVDVEDILSHPMHSEYFEISSQCKDKIDKAKNILAVGTTVTRTLEYYARKNMICGECDLFLNPANKPIIVNHLLTNFHLPKSTLIMLVASFIGLEKTLELYEIAIKNNYRFYSYGDAMLII

SEQ ID NO: 63518 - protein, 343 aa, Arcobacter thereius; identical to SEQ ID NO: 62502
  misc_feature (1)..(343): tr|A0A1C0AXQ8|A0A1C0AXQ8_9PROT S-adenosylmethionine:tRN A ribosyltransferase-isomerase OS=Arcobacter thereius O X=544718 GN=queA PE=3 SV=1

SEQ ID NO: 63519 - protein, 343 aa, Arcobacter trophiarum
  misc_feature (1)..(343): tr|A0A4Q0ZXX5|A0A4Q0ZXX5_9PROT S-adenosylmethionine:tRN A ribosyltransferase-isomerase OS=Arcobacter trophiarum LMG 25534 OX=1032241 GN=queA PE=3 SV=1
MRDVLKTSSYDFELPSSQIATFPITPADSAKMLVFCREKNEIFHSTFRDILEFLPEELSIFLNDTKVVKARVFGKKSTGANIELLLNKPLFMDRYLVLIKGKVKVGTKIFFDEGLIAEVLELNEDGTRVVEFFQDENSKKRLNFLSLVDILNKIGHIPLPPYMNRDDEKDDETNYQTLFAKNYGAVAAPTASLHFTPLLLKKLEERYGLNYLTLHVGAGTFKPVDVEDILSHPMHSEYFEIGIEAKKNLDNAKKVLAVGTTVTRTIEYYERTNKIQGECDLFLNPMNKPIKVDYLLTNFHLPKSTLIMLVASFIGLEKTLELYDIAIKENYRFYSYGDGMLII

SEQ ID NO: 63520 - protein, 340 aa, Arcobacter venerupis
  misc_feature (1)..(340): tr|A0A443TWJ2|A0A443TWJ2_9PROT S-adenosylmethionine:tRN A ribosyltransferase-isomerase OS=Arcobacter venerupis OX=1054033 GN=queA PE=3 SV=1
MLDPLKTSSYDYDLPKELIATHPVSPADSARLLVYNRATNSIIHTTFKNLMNFLPNELSIFLNDTKVIKARIFGTKDTGGKIELLLNKPLFMDRYLVMIGGKVRVGTKLFFDENLNAEVLEVNEDGSRVVQFFQNDKKLDFLELVDILNKIGHLPLPPYMNRSDDKKDEQDYQTLFAKNYGAVAAPTASLHFTPELLEKINTKYEVNYLTLHVGAGTFKPVDVDDILNHPMHSEYFEIGIEAKKALDNAPKVLAVGTTVTRTVEYYSRTNKIQGECDLFLNPVNKPIKVDYLLTNFHLPKSTLIMLVASFVGLEKTLEIYHEAIKENYRFYSYGDGMLII

SEQ ID NO: 63521 - protein, 349 aa, Arcticibacter pallidicorallinus
  misc_feature (1)..(349): tr|A0A2T0U547|A0A2T0U547_9SPHI S-adenosylmethionine:tRN A ribosyltransferase-isomerase OS=Arcticibacter pallidi corallinus OX=1259464 GN=queA PE=3 SV=1
MKLSQFKFNLPDSLIAHNPSDQRDEARLMVLDRNTGAIEHKIFKDVINYFEEKDVMILNNTKVFPARMYGNKEKTGATIEVFLLRELNKELRLWDVLVDPARKIRVGNKLYFGENDLLVAEVVDNTTSRGRTIRFLFDGTDEEFRRNIEILGETPLPKYIKRKATAEDKERYQTIFAKNEGAVAAPTAGLHFSRELMKRLELKGVDFAEVTLHVGLGTFRPVEVEDLTKHKMDSEQIIIEPKTADLVNKAIDEKRRICAVGTTSMRTIESAVSANKRLKATNDWTSKFIFPPYEFSIANTMITNFHTPESTLLMMISAFGGYENVMNAYEVAVKEKYRFYSYGDAMLII

SEQ ID NO: 63522 - protein, 349 aa, Arcticibacter svalbardensis
  misc_feature (1)..(349): tr|R9GUZ8|R9GUZ8_9SPHI S-adenosylmethionine:tRNA ribosy ltransferase-isomerase OS=Arcticibacter svalbardensis M N12-7 OX=1150600 GN=queA PE=3 SV=1
MKLSQFKFDLPDSLIATTPSDQRDEARLMVLDRNTGAIEHKIFKDVINYFDEKDVMILNNTKVFPARMYGNKEKTGATIEVFLLRELNKELRLWDVLVDPARKIRVGNKLYFGDNDLLVAEVVDNTTSRGRTIRFLFDGTNEEFRRNIEILGETPLPKYIKRKATAEDKERYQTIFAKNEGAVAAPTAGMHFSRELMKRLELKGVEFAEVTLHVGLGTFRAVEVEDLTKHKMDSEQFIIDQPTADMVNNALDEKRKICAVGTTSMRAVESAVSAGKKLKPANDWTSKFIFPPYEFSIANSMITNFHTPESTLLMMISAFGGYESVMNAYEVAVKEKYRFYSYGDAMLII

SEQ ID NO: 63523 - protein, 405 aa, Arcticibacterium luteifluviistationis
  misc_feature (1)..(405): tr|A0A2Z4GGK1|A0A2Z4GGK1_9BACT S-adenosylmethionine:tRN A ribosyltransferase-isomerase OS=Arcticibacterium lute ifluviistationis OX=1784714 GN=queA PE=3 SV=1
MTIPSEIRIEDFNYSLPESQIAKYPLSPRDSSKLLVFKNKEIRSEAFSSLASEVPENAHLVFNNTKVIPARLFFRKQTGALIEIFLLEPILPSKVISQVMESTESTTWMCMIGNKKKWKDEVLSLDIPFENGTTINVKAELVNREENTISFKWTDKISFAELVKVFGEIPLPPYLNRKTEEKDKETYQTVYSESDGAVAAPTAGLHFTDSTFKSLKKRGIKTSFITLHVGAGTFQPVKTENALEHHMHSEQIVFSKDFLKSLLKHDGPVIPVGTTSMRSLESLYWFALKIRGNKEAHIPFKIEKLYPYGFEENDLPSKKEAIEVILEYMENQNFETLIGDTEIYIFPGYKPRLCEGIITNFHQPKSTLLLLISSLIGDKWKELYDFALENDYRFLSYGDSSLILP

SEQ ID NO: 63524 - protein, 350 aa, Arcticibacterium luteifluviistationis
  misc_feature (1)..(350): tr|A0A2Z4GBL9|A0A2Z4GBL9_9BACT S-adenosylmethionine:tRN A ribosyltransferase-isomerase OS=Arcticibacterium lute ifluviistationis OX=1784714 GN=queA PE=3 SV=1
MKLSQFKFDLPQNLIAMHPGEERDGAKMMVVHRDSGKIEHKMFKDIVDYFGEGDVMVTNNTKVFPARLYGSKEKTGAKIEVFLLRELNREMRLWDVLVDPARKIRVGNKLYFGESDLVAEVIDNTTSRGRTIRFLFDGDHEEMMQTIHELGETPIPKEVIDRDVTELDRERFQTIFAEEEGAISAPTAGMHFTKNVMRRMEIEGVTFTPITLHIGIGTFRGVDVEDLTKHKTDSENFAIPQKTCDIVNEALDNNKRICAIGSTALKSLESSVSAKDRLNPVDNGWTDKFIFPPFDFKIGNAVLTNFHLPQSIVLMSACAFGGYDLITRAYQEAIKEEYKFFTYGDVMLIL

SEQ ID NO: 63525 - protein, 366 aa, Ardenticatenia bacterium
  misc_feature (1)..(366): tr|A0A2U2SPE8|A0A2U2SPE8_9CHLR S-adenosylmethionine:tRN A ribosyltransferase-isomerase OS=Ardenticatenia bacter ium OX=2099665 GN=queA PE=3 SV=1
MWKTSDFDYELPPERIAQTPIEPRDAARLMVVHRKGGRFEHRIFRDLPHYLRPGDVLVINDSRVIPARLFAHKPSGGQVEILLLRQLDGTRWEALVGGKRIRKGGRLLIQRGNIHLEAQVAEELEGPRRVLEFDTPIGPLLRDLGHTPLPPYIQQPLQDPERYQTVYARVEGSAAAPTAGLHFTPELLATLRAQGVLLARVTLHIGIDTFKPVTTEYVAEHTLHSEWASISPETAQLINQARLEGGRVIAVGTTAVRTLETAALHAAGITAPLQNVGAQNEGLSEAHPGISWHPITAFEGPTDLFIYPGFRFRAVDALITNFHLPRSSLLMLVSAFAGYELTRRAYQVAIVEGYRFYSFGDAMLIL

SEQ ID NO: 63526 - protein, 349 aa, Arenibacter algicola
  misc_feature (1)..(349): tr|A0A221UXS7|A0A221UXS7_9FLAO S-adenosylmethionine:tRN A ribosyltransferase-isomerase OS=Arenibacter algicola OX=616991 GN=queA PE=3 SV=1
MKLSHFNFELPNELLAEYPAENRDESKLMVVHRATGKIEHKMFKDLIDYFDEGDVMVLNNTKVFPARLYGNKEKTGARIEVFLLRELNEEQRLWDVLVDPARKIRIGNKLYFGDDETLVAEVIDNTTSRGRTLRFLYDGSYTDFRRKLKELGETPLPKYIKRKVEAEDEKRYQTIYAKHEGAVAAPTAGLHFSKHLLKRLEIKGIDFAEVTLHVGLGTFNPVEVEDLSKHKMDSEELIIDEKATEIVNSAKLKKRRICAVGTTAMRALESAVSSQQTLNTFDGWTNKFVFPPYDFSIANAMVTNFHLPKSTLLMMVSAFMGHDLMKKAYKEAILEGYKFYSYGDAMLII

SEQ ID NO: 63527 - protein, 349 aa, Arenibacter echinorum
  misc_feature (1)..(349): tr|A0A327RNV3|A0A327RNV3_9FLAO S-adenosylmethionine:tRN A ribosyltransferase-isomerase OS=Arenibacter echinorum OX=440515 GN=queA PE=3 SV=1
MKLSHFNFELPNELLAEYPAENRDESKLMVIHRDTGKIEHKMFKDLIDYFDEGDVMVLNNTKVFPARLYGNKEKTGARIEVFLLRELNEEQRLWDVLVDPARKIRIGNKLYFGDDETLVAEVIDNTTSRGRTLRFLYDGSYTDFRRKLKELGETPLPKYIKRKVEAEDEKRYQTIYAKHEGAVAAPTAGLHFSKHLLKRLEIKGIDFAEVTLHVGLGTFNPVEVEDLSKHKMDSEELIIDEKATEIVNSAKLKKRRICAVGTTAMRALESAVSSQQTLNTFDGWTNKFVFPPYEFSIATAMVTNFHLPKSTLLMMVSAFMGHDLMKKAYKEAILEGYKFYSYGDAMLII

SEQ ID NO: 63528 - protein, 349 aa, Arenibacter nanhaiticus
  misc_feature (1)..(349): tr|A0A1M6HLJ3|A0A1M6HLJ3_9FLAO S-adenosylmethionine:tRN A ribosyltransferase-isomerase OS=Arenibacter nanhaitic us OX=558155 GN=queA PE=3 SV=1
MKLSHFNFELPDGLLAEYPSENRDESKLMVVHRDTGKIEHKMFKDLINYFDEGDVMVLNNTKVFPARLYGNKEKTGARIEVFLLRELNEEQRLWDVLVDPARKIRIGNKLYFGDDDTLVAEVIDNTTSRGRTLRFLYDGSYTDFRRKLKELGETPLPKYIKRDVEPEDEKRYQTIYAKHEGAVAAPTAGLHFSKHLLKRLEIKGIDFAEVTLHVGLGTFNPVEVEDLSKHKMDSEELIIEEKATEIVNNAKLKKRRVCAVGTTAMRALESAVSSKQTLNTFEGWTNKFVFPPYDFSIANAMITNFHLPKSTLLMMVSAFMGHDLMKKAYKEAVLEEYKFYSYGDAMLII

SEQ ID NO: 63529 - protein, 349 aa, Arenibacter palladensis
  misc_feature (1)..(349): tr|A0A543W8R2|A0A543W8R2_9FLAO S-adenosylmethionine:tRN A ribosyltransferase-isomerase OS=Arenibacter palladens is OX=237373 GN=queA PE=3 SV=1
MKLSHFNFELPNELLAEYPAENRDESKLMVIHRDTGKIEHKMFKDLIDYFDEGDVMVLNNTKVFPARLYGNKEKTGARIEVFLLRELNEEQRLWDVLVDPARKIRIGNKLYFGDDETLVAEVIDNTTSRGRTLRFLYDGSYTDFRRKLKELGETPLPKYIKRKVEAEDEKRYQTIYAKHEGAVAAPTAGLHFSKHLLKRLEIKGIDFAEVTLHVGLGTFNPVEVEDLSKHKMDSEELIIDEKATEIVNSAKLKKRRICAVGTTAMRALESAVSSQQTLNTFDGWTNKFVFPPYDFSIANAMVTNFHLPKSTLLMMVSAFMGHDLMKKAYKEAILEGYKFYSYGDAMLII

SEQ ID NO: 63530 - protein, 349 aa, Arenibacter palladensis
  misc_feature (1)..(349): tr|A0A1M5GGU6|A0A1M5GGU6_9FLAO S-adenosylmethionine:tRN A ribosyltransferase-isomerase OS=Arenibacter palladens is OX=237373 GN=queA PE=3 SV=1
MKLSHFNFELPNELLAEYPAENRDESKLMVVHRATGKIEHKMFKDLIDYFDEGDVMVLNNTKVFPARLYGNKEKTGARIEVFLLRELNEEQRLWDVLVDPARKIRIGNKLYFGVDETLVAEVIDNTTSRGRTLRFLYDGSYTDFRRKLKELGETPLPKYIKRKVEAEDEKRYQTIYAKHEGAVAAPTAGLHFSKHLLKRLEIKGIDFAEVTLHVGLGTFNPVEVEDLSKHKMDSEELIIDEKATEIVNAAKLKKRRICAVGTTAMRALESAVSSQQTLNTFDGWTNKFVFPPYDFSIANAMVTNFHLPKSTLLMMVSAFMGHDLMKKAYKEAILEGYKFYSYGDAMLII

SEQ ID NO: 63531 - protein, 349 aa, Arenibacter sp.
  misc_feature (1)..(349): tr|A0A318IFY2|A0A318IFY2_9FLAO S-adenosylmethionine:tRN A ribosyltransferase-isomerase OS=Arenibacter sp. ARW7G 5Y1 OX=2135619 GN=queA PE=3 SV=1
MKLSHFNFELPNELLAEYPAENRDESKLMVVHRDTGKIEHKMFKDLIDYFDEGDVMVLNNTKVFPARLYGNKEKTGARIEVFLLRELNEEQRLWDVLVDPARKIRIGNKLYFGDDETLVAEVIDNTTSRGRTLRFLYDGSYTDFRRKLKELGETPLPKYIKRKVEAEDEKRYQTIYAKHEGAVAAPTAGLHFSKHLLKRLEIKGIDFAEVTLHVGLGTFNPVEVEDLSKHKMDSEELIIDEKATEIVNGAKVKKRRICAVGTTAMRALESAVSSQQTLNTFDGWTNKFVFPPYDFSIANAMVTNFHLPKSTLLMMVSAFMGHDLMKKAYKEAILEGYKFYSYGDAMLII

SEQ ID NO: 63532 - protein, 349 aa, Arenibacter sp.
  misc_feature (1)..(349): tr|A0A372GU83|A0A372GU83_9FLAO S-adenosylmethionine:tRN A ribosyltransferase-isomerase OS=Arenibacter sp. P308M 17 OX=2303391 GN=queA PE=3 SV=1
MKLSHFNFELPNELLAEYPAENRDESKLMVIHRSTGKIEHKMFKDLIDYFDEGDVMVLNNTKVFPARLYGNKEKTGARIEVFLLRELNEEQRLWDVLVDPARKIRIGNKLYFGDDETLVAEVIDNTTSRGRTLRFLYDGSYADFRRKLKELGETPLPKYIKRKVEAEDEKRYQTIYAKHEGAVAAPTAGLHFSKHLLKRLEIKGIDFAEVTLHVGLGTFNPVEVEDLSKHKMDSEELIIDERATEIVNAAKLKKRRICAVGTTAMRALESAVSSQQTLNTFDGWTNKFVFPPYDFSIANAMVTNFHLPKSTLLMMVSAFMGHDLMKKAYKEAILEGYKFYSYGDAMLII

SEQ ID NO: 63533 - protein, 349 aa, Arenibacter troitsensis
  misc_feature (1)..(349): tr|A0A1X7I0V1|A0A1X7I0V1_9FLAO S-adenosylmethionine:tRN A ribosyltransferase-isomerase OS=Arenibacter troitsens is OX=188872 GN=queA PE=3 SV=1
MKLSHFNFELPNELLAEYPAENRDESRLMVIHRDTGKIEHKMFKDLIDYFDEGDVMVLNNTKVFPARLYGNKEKTGARIEVFLLRELNEEQRLWDVLVDPARKIRIGNKLYFGDDETLVAEVIDNTTSRGRTLRFLYDGSYTDFRRKLKELGETPLPKYIKRKVEAEDEKRYQTIYAKHEGAVAAPTAGLHFSKHLLKRLEIKGIDFAEVTLHVGLGTFNPVEVEDLSKHKMDSEELIIDEKATEIVNAAKLKKRKVCAVGTTAMRALESAVSSQQTLNTFDGWTNKFVFPPYDFSIANAMVTNFHLPKSTLLMMVSAFMGHDLMKKAYKEAILEGYKFYSYGDAMLIL

SEQ ID NO: 63534 - protein, 347 aa, Arenicella xantha
  misc_feature (1)..(347): tr|A0A395JMD8|A0A395JMD8_9GAMM S-adenosylmethionine:tRN A ribosyltransferase-isomerase OS=Arenicella xantha OX= 644221 GN=queA PE=3 SV=1
MNIADFTYDLPDELIAQFPSPQRGASRLLKLMQGRGIEDSQFPDLVDELQSGDLLVLNNTKVIPARLHGQKETGGRVEILLERITGANQFVAQIRASKAPKPGQVLHVDGDDSARLMVTGRRDTFFELESNQQGSLFDWFERVGHMPLPPYIDRNDTAGDADRYQTVFAKEQGAVAAPTAGLHYDDALLARIRAKGVDIATVTLHVGAGTYQPVRVTKVEDHVMHSEYVDVNQQVCDQIKLTKERGGRIVAVGTTVVRSLETAAQATGDELIAPFQGDTDIFIYPGYQFKVIDLLQTNFHLPESTLLMLVSAFAGTEPIQQAYQHAIAQGYRFFSYGDAMLLEKSTA

SEQ ID NO: 63535 - protein, 359 aa, Arenimonas caeni
  misc_feature (1)..(359): tr|A0A2P6MCR3|A0A2P6MCR3_9GAMM S-adenosylmethionine:tRN A ribosyltransferase-isomerase OS=Arenimonas caeni OX=2 058085 GN=queA PE=3 SV=1
MKKSDFHFELPPGLIAQAPLAERSASRLLVVPPGDAPYEDRQVRDLVDYLREGDLLVFNDTRVIPARLFGSKETGGRVEILLERLLGGHEVLAQVGASKTPKPGGRITLDEGTVLEVLGREGGFHRLRFLTDEPLEKLLLRAGRMPLPPYIQREAGSADLERYQTVFARHAGAVAAPTAGLHFDQALLAALEGRGVRFGHVTLHVGAGTFQPMRVDSLHEHRMHSEWLNVGADLCQQVARTRAAGGRVVAVGTTVVRALETASREGELRPYAGETNIFIFPGYRFRSVDALVTNFHLPESTLMMLVSAFAGRERILAAYQHAVRQEYRFFSYGDAMLLFPAAEPPAGGPPGPTSQDATP

SEQ ID NO: 63536 - protein, 374 aa, Arenimonas composti
  misc_feature (1)..(374): tr|A0A091BCG4|A0A091BCG4_9GAMM S-adenosylmethionine:tRN A ribosyltransferase-isomerase OS=Arenimonas composti T R7-09 = DSM 18010 OX=1121013 GN=queA PE=3 SV=1
MKKSDFRYDLPQELIAQQPLPERSAARMLVVGPDAPPYADRQVRDLPDYLRPGDLLVFNDTRVIPARLHGAKESGGRVEVMIDRLLGGHEVIAQVRASKSPKAGGRIVLDEGTAIEVLGREGEFYRLRFDTAEPLEELLQRAGRLPLPPYIEREAEDADRERYQTLFARHSGAVAAPTAGLHFDAPLLEALRARGVEFGHVTLHVGAGTFQPMRAESVHEHVMHAEWLNVGAELCAQVAKIRAAGGRVIAVGTTVVRALETAMRDGVLKPFAGETRIFIFPGQRVRSIDALLTNFHLPESTLLMLVSAFAGRERILAAYAHAVRERYRFFSYGDAMLLFPPAAPVPPVGAPSGAMDGSRNGIAPEGAPTTGGSR

SEQ ID NO: 63537 - protein, 344 aa, Arenimonas donghaensis
  misc_feature (1)..(344): tr|A0A087MJX1|A0A087MJX1_9GAMM S-adenosylmethionine:tRN A ribosyltransferase-isomerase OS=Arenimonas donghaensi s DSM 18148 = HO3-R19 OX=1121014 GN=queA PE=3 SV=1
MKKSDFHFDLPPELIAQAPLAERSASRLLVVPPGDAGYQDRHVRDLPAYLQPGDLLVFNDTRVIPARLFGTKDSGGRVEILLERLLGGHEVLAQVGASKSPKPGGRITLDEGTTLEVLGREGEFYRLRFLTDEPLEKLLLRAGRMPLPPYIQREAGREDLERYQTLFARHTGAVAAPTAGLHFDQPLLAALQAKCVQFGHVTLHVGAGTFQPMRVESIREHTMHSEWLNVGADLCQQVARTRAAGGRVVAVGTTVVRALETAARDGALKPYAGDTNIFIFPGHRISTVDALVTNFHLPESTLMMLVSAFAGRERVLAAYAHAVRERYRFFSYGDAMLLFPDQPA

SEQ ID NO: 63538 - protein, 344 aa, Arenimonas malthae
  misc_feature (1)..(344): tr|A0A091AYH7|A0A091AYH7_9GAMM S-adenosylmethionine:tRN A ribosyltransferase-isomerase OS=Arenimonas malthae CC -JY-1 OX=1384054 GN=queA PE=3 SV=1
MKKSDFHFDLPPELIAQEPLAERSASRLLVVPPEAPPYADRHVRDLPEYLRAGDLLVFNDTRVIPARLFGTKDTGGRVEILLERLVGGHEVLAQVGASKSPKPGGRITLDEGTAIEVLGREGEFYRLRFLTEEPLEKLLLRAGRMPLPPYIQREAGQADLERYQTLFARHTGAVAAPTAGLHFDQPLLAALEARGVQFGHVTLHVGAGTFQPMRVDSIHEHVMHSEWLNVGAGLCQQVARTRAAGGRVVAVGTTVVRALETAARGGELKPYAGDTNIFIFPGHHIRTVDALVTNFHLPESTLMMLVSAFAGRERVLAAYAHAVREKYRFFSYGDAMLLFPEAAA

SEQ ID NO: 63539 - protein, 344 aa, Arenimonas metalli
  misc_feature (1)..(344): tr|A0A091AQU4|A0A091AQU4_9GAMM S-adenosylmethionine:tRN A ribosyltransferase-isomerase OS=Arenimonas metalli CF 5-1 OX=1384056 GN=queA PE=3 SV=1
MKKSDFHFDLPPELIAQAPLAERSASRMLVVGPDAPPYADRQVRDLPEYLQAGDLLVFNDTRVIPARLFGTKDSGGRVEILLERLVGGREVLAQVGASKSPKPGGRITIDEGTALEVLGREGEFYRLRFLTDEPLEKLLLRAGRMPLPPYIQREAGHDDLERYQTLFARHTGAVAAPTAGLHFDQPLLAALQARGVQTGHVTLHVGAGTFQPMRVESLHEHKMHSEWLNVGAELCQQVARTRAAGGRVVAVGTTVVRALETAAQDGELRPYAGDTNIFLFPGKRIRTVDALLTNFHLPESTLMMLVSAFAGRERILAAYAHAVREKYRFFSYGDAMLLYPEAAP

SEQ ID NO: 63540 - protein, 342 aa, Arenimonas oryziterrae
  misc_feature (1)..(342): tr|A0A091AXB2|A0A091AXB2_9GAMM S-adenosylmethionine:tRN A ribosyltransferase-isomerase OS=Arenimonas oryziterra e DSM 21050 = YC6267 OX=1121015 GN=queA PE=3 SV=1
MKKSDFHFDLPPELIAQAPLPVRSDSRLLVVPPSPAAFADHGMRELPAFLRAGDLLVFNDTRVIPARLFGVKETGGRVEILLERITGAHEVRAQIGASKSPKPQSRITLDEGTKLTVLGRDGEFYRLRFDTDEPMDKVLLRAGRMPLPPYIAREADISDDERYQTVFAKNQGAVAAPTAGLHFDEPLLDRLRAQGVEFGHVTLHVGAGTFQPMRAESLDEHVMHREWLNVGAELCAQVARVRAAGGRVIAVGTTVVRALESALQGGELKPFAGDTQIFIFPGYRIRSIDAMVTNFHLPESTLLMLVSAFAGRERILEAYAHAVREKYRFFSYGDAMLLYPSA

SEQ ID NO: 63541 - protein, 312 aa, Arenimonas sp.
  misc_feature (1)..(312): tr|A0A352QN66|A0A352QN66_9GAMM S-adenosylmethionine:tRN A ribosyltransferase-isomerase (Fragment) OS=Arenimonas sp. OX=1872635 GN=DC063_00110 PE=3 SV=1
  misc_feature (62)..(62): Xaa can be any naturally occurring amino acid
MKKSDFHFDLPPELIAQEPLAERSASRLLVVPPDAPPYADRHVRDLPEYLRAGDLLVFNDTXRLVGGHEVLAQVGASKSPKPGGRITLDEGTAIEVLGREGEFYRLRFLTDEPLEKLLLRAGRMPLPPYIQREAGQADLERYQTLFARHTGAVAAPTAGLHFDQPLLAALEAKGVQFGHVTLHVGAGTFQPMRVESIHEHVMHSEWLNVGAELCQQVARTRAAGGRVIAVGTTVVRALETAARGGELKPYAGDTNIFLFPGHHIRTVDALVTNFHLPESTLMMLVSAFAGRERVLAAYAHAVREKYRFFSYG

SEQ ID NO: 63542 - protein, 344 aa, Arenimonas sp.
  misc_feature (1)..(344): tr|A0A5B2ZAG3|A0A5B2ZAG3_9GAMM S-adenosylmethionine:tRN A ribosyltransferase-isomerase OS=Arenimonas sp. 3729k OX=2608255 GN=queA PE=3 SV=1
MKKSDFHYELPPELIAQEPLAERSASRLLVMPSDAPPYQDRHVRDLPQLLRAGDLLVFNDTRVIPARLHGQKDSGGRVEILIERLLGGQEVLAQVGASKTPRAGGRITLDEGTAIEVLGREGEFHRLRFLGTEPPEAVLQRAGQLPLPPYIRRTPGAADAERYQTVFARHAGAVAAPTAGLHFDQALLAALEARGVRFGHVTLHVGAGTFQPMRVESVHEHRMHSEWLNVGAELCAQVARTRASGGRVIAVGTTVVRALETAAADGELKPFAGDTSIFIFPGHRIRTIDALLTNFHLPESTLLMLVSAFAGRERILAAYRHAVRERYRFFSYGDAMLLFPGEDP

SEQ ID NO: 63543 - protein, 349 aa, Arenitalea lutea
  misc_feature (1)..(349): tr|A0A1M6F923|A0A1M6F923_9FLAO S-adenosylmethionine:tRN A ribosyltransferase-isomerase OS=Arenitalea lutea OX=1 178825 GN=queA PE=3 SV=1
MKLSHFGFELPSELLAEYPAENRDESRLMVLNRKDQTIEHKMFKDIIDYFDEDDVLMLNNTKVFPARLYGNKEKTGARIEVFLLRELNEEQRLWDVLVDPARKIRIGNKLYFGDDDTLVAEVIDNTTSRGRTLRFLYDGSYREFRIKLNELGETPLPKYIKRDVEPQDEERYQTIFAKNEGAVAAPTAGLHFSKHLLKRLEIKGVKFAEVTLHVGLGTFNPVEVEDLSKHKMDSEELTIDSKAVEIVNTAIKEKRRVCAVGTTVMRAVESSVSSSGLLNEFDGWTNKFIFPPYEFSIPNAMITNFHTPKSTLLMMVSAFAGHEFIKRAYDEAIKEGYKFYSYGDAMLII

SEQ ID NO: 63544 - protein, 343 aa, Armatimonadetes bacterium
  misc_feature (1)..(343): tr|A0A399WWN9|A0A399WWN9_9BACT S-adenosylmethionine:tRN A ribosyltransferase-isomerase OS=Armatimonadetes bacte rium OX=2033014 GN=queA PE=3 SV=1
MTLSDFDYDLPEEAIAQAPAEPRDSSRLMVIDPYEKRVEHRIFRDIVHELEPDDVLVVNDTRVSALRVYGTKATGGRVELLLMQNIGDSAFEALVSPGRRLQPGAVIRIGGGRAIVEDVKPDGRRIVRFDDATPWREALAQLGETPLPPYIHDRTADPDRYQTVYSAIPGSSAAPTAGLHFTEEVLERIREKGVRIARVTLDVSLDTFRPIRSEDPADHKMHGERWTVSEEAAETINDCKGSVIAVGTTSVRTLESAAVDTRRVAAGSGVTTLFITPGYEFQAVDGLITNFHMPRTTMLLLVAALCGREMLMASYETALSEGYRFLSFGDSMFIKPRRTHEKR

SEQ ID NO: 63545 - protein, 257 aa, Armatimonadetes bacterium
  misc_feature (1)..(257): tr|A0A1Q7QJ74|A0A1Q7QJ74_9BACT S-adenosylmethionine:tRN A ribosyltransferase-isomerase OS=Armatimonadetes bacte rium 13_1_40CM_3_65_7 OX=1805024 GN=AUI83_10200 PE=3 SV =1
MWEAVLRPGGRVRIGTRLAVSPHLAGEIIARRAEGVRLIRFASDRPVLEVAREIGEMPVPPYVHEPLRRPEDYQTVYASADGAVAAPTAGLHFTPALLTRIEGRGVRIATLTLHIGLGTFRPVTVEDVRHHRMDPEWYEVSAAAADVLTAARRRPVDAAQGRGRIVAVGTSAVRTLETVTVDDGTARPGRGWSELFIYPGYRFKATDVLITNFHLPKTTLLMLVCAFAGRDLIMWAYQEAIAEKYRFYSFGDAMLIL

SEQ ID NO: 63546 - protein, 345 aa, Aromatoleum aromaticum
  misc_feature (1)..(345): sp|Q5P721|QUEA_AROAE S-adenosylmethionine:tRNA ribosylt ransferase-isomerase OS=Aromatoleum aromaticum (strain EbN1) OX=76114 GN=queA PE=3 SV=2
MSLTLDDFDYLLPPELIAQAPLAERCASRLLVLDGERLDDRGFCDLPELVQPGDLLVFNDTRVIHARLYGTKETGGHIEVLIERAIGPHEALAQVRASKSPRAGSRLRLADAFDVTVLGRVGEFFHLRFPDSHDVLDLLEHHGKLPLPPYIDRSADEHDESRYQTVYARERGSVAAPTAGLHFDQPMLAELAKKGVHGAWLTLHVGAGTFQPVRVNDLGEHRMHRERYVIPQETVAAIAATRAAGRRVIAVGTTSLRALEGAAQDGPLEAGTGETELFILPGYRFQVVDALITNFHLPKSTLLMLVSAFAGLEPMRRAYTHAVGHSYRFFSYGDAMFITHRNDAI

SEQ ID NO: 63547 - protein, 401 aa, Arsenicibacter rosenii
  misc_feature (1)..(401): tr|A0A1S2VFH8|A0A1S2VFH8_9BACT S-adenosylmethionine:tRN A ribosyltransferase-isomerase OS=Arsenicibacter roseni i OX=1750698 GN=BLX24_21650 PE=3 SV=1
MEELSNKQFLYDLPDERIARFPLAVRDQSKLLVYQGGKISHERFYALAEWVPPHSYLVFNNTKVIPARLLFSRATGAVIELFLLNPVPADRSMSEAMQDTATTVWQCMIGNRKRWKDDEVLQMQIPAGDRTIVLSAAREHKEDSLIRFSWQPAEESFAHVIQLAGQMPLPPYLKRDATRADDDTYQTVYSKEEGAVAAPTAGLHFTDRVFADLAEKNIGHDFLTLHVGAGTFQPIKTDNVREHQMHVEQVVYTRQNVEHFIAHAGHLLPVGTTSMRSLESLYWMGVKLIRQDTDPFRLDQHYAYSVPEPERPAPVQALGAVLTYMDKAHKEQVIAHTGIYIMPGYRFMMCRGIITNFHQPNSTLILLVAALLGEGWRTVYDEALANDYRFLSYGDSSLLLP

SEQ ID NO: 63548 - protein, 347 aa, Arsenicibacter rosenii
  misc_feature (1)..(347): tr|A0A1S2VMT7|A0A1S2VMT7_9BACT S-adenosylmethionine:tRN A ribosyltransferase-isomerase OS=Arsenicibacter roseni i OX=1750698 GN=queA PE=3 SV=1
MKLSEFKFDLPESLIAKYPAERGESRLMVVHRKTKKIEHKMFGDILSYFDDGDVMVINNTKVFPARLYGNKEKTGAKIEVFLLRELNRDMKLWDVLVDPARKIRVGNKLYFGDSDLVAEVIDNTTSRGRTIRFLFDGSHEEFMKAVDELGETPLPREIKRKTEDADRERYQTVFAEHIGAVAAPTAGTHFTKAMMKRMEIKGVHFAPVTLHVGLGTFRPVDVEDLTKHKTDSENYRIEDTAARIVNKALDETKRVCAVGTTSLKALESSVSANSRLKAVEGWTDKFIFPPYEFKIANSLLTNFHLPESILIMMTSAFGGYDLVMEAYETAIKEKYKFFSYGDAMLIL

SEQ ID NO: 63549 - protein, 359 aa, Arsenicitalea aurantiaca
  misc_feature (1)..(359): tr|A0A433XFL0|A0A433XFL0_9RHIZ S-adenosylmethionine:tRN A ribosyltransferase-isomerase OS=Arsenicitalea auranti aca OX=1783274 GN=queA PE=3 SV=1
MRVDEFDFELPDSLIALHPVEPRDAARLLVVDPATGLADRHVRDLVDILAPGDVLVVNDTRVLPAALTGERIRGESRAAVSFNLHKRVDAHTWRAFARPAKRLGLLDRLELGEGEGPKLGATLAGKGDTGEVTIEFDLGGAELDEAIKAHGAMPLPPYIGSKRKPEARDAVDYQTVYAAVDGAVAAPTAGLHFTETLLQALSDRSVGLERVTLHVGAGTFLPVKVEDTAEHRMHAEWGEITEATVHRLNARIAAGGRIIAVGTTSLRLLETAARATGRLAPFSGETDIFITPGFRFRVADMLMTNFHLPRSTLFMLVSAFSGLDTMRDAYRHAIEDGYRFYSYGDASLLMRDRSRDEDE

SEQ ID NO: 63550 - protein, 356 aa, Arsenophonus endosymbiont
  misc_feature (1)..(356): tr|A0A3B0MET4|A0A3B0MET4_9GAMM S-adenosylmethionine:tRN A ribosyltransferase-isomerase OS=Arsenophonus endosymb iont of Trialeurodes vaporariorum OX=235567 GN=queA PE= 3 SV=1
MRVSDFAFKLPDELIAHYPLAKRSHCRLLSLNGSTGELAHGIFTDIVDKLESGDLLVFNNTQVIPARLYGRKMSGGKIEVLIERILGSHRVLAHIRASKAPKVGNELLLGDDESVKAIMLARHDTLFEIDFQDKRDVLAILNDIGHMPLPPYIDRPDEEVDRTLYQTVYGQRPGAVAAPTAGLHFDESLLAALQQKGVAMAFVTLHVGAGTFQPVRVENVAEHTMHAEYVEVSQQAVDAILACKARGKRVIAVGTTSIRSLESAACTCKEGIIGPFFDDTRIFIYPGFHFKIVDALITNFHLPESTLIMLVSAFAGYQNTMNAYQQAIAKKYRFFSYGDAMFITQNPKAESEKVAN

SEQ ID NO: 63551 - protein, 352 aa, Arsenophonus nasoniae
  misc_feature (1)..(352): tr|D2TW96|D2TW96_9GAMM S-adenosylmethionine:tRNA ribosy ltransferase-isomerase OS=Arsenophonus nasoniae OX=638 GN=queA PE=3 SV=1
MRVSDFAFKLPDELIAHYPLAKRSHCRLLSLDGSTGELAHGIFTDIVDKLESGDLLVFNNTQVIPARLYGRKISGGKIEVLIERMLDPHRVLAHVRASKAPKVGAELLLGDDESVKAIMLARHDTLFEIGFQDKRDVLAILNDIGHIPLPPYIARPDEEIDRTLYQTVYGQRPGAVAAPTAGLHFDQSLLAALRQKGVAMAFVTLHVGAGTFQPVRVENVAEHTMHAEYVEVSQEVVDAILACKARGKRVIAVGTTSIRSLESAACACKEAIIAPFFDDTRIFIYPGFHFQIVDALITNFHLPESTLIMLVSAFAGYQNTMNAYKKAIAEKYRFFSYGDAMFITHNPKAVSE

SEQ ID NO: 63552 - protein, 356 aa, Arsenophonus sp.
  misc_feature (1)..(356): tr|A0A2A2GW23|A0A2A2GW23_9GAMM S-adenosylmethionine:tRN A ribosyltransferase-isomerase OS=Arsenophonus sp. ENCA OX=1987579 GN=queA PE=3 SV=1
MRVSDFAFKLPDELIAHYPLAKRSHCRLLSLNGSTGELAHGIFTEIVDKLESGDLLVFNNTQVIPARLYGRKMSGGKIEVLIERILGNHRVLAHIRASKAPKVGTELLLGDDESVKAIMLARHDTLFEIDFQDKRDVLAILNDIGHMPLPPYIDRPDEEVDRTLYQTVYGQRPGAVAAPTAGLHFDESLLAALQQKGVAMAFVTLHVGAGTFQPVRVENVAEHTMHAEYVEVSQQAVDAILACKARGKRVIAVGTTSIRSLESAASACKEGIIAPFFDDTRIFIYPGFHFQIVDALITNFHLPESTLIMLVSAFAGYQNTMNAYQQAIAEKYRFFSYGDAMFITHNPKAESEKVVN

SEQ ID NO: 63553 - protein, 341 aa, Arsukibacterium ikkense
  misc_feature (1)..(341): tr|A0A0M2V8N6|A0A0M2V8N6_9GAMM S-adenosylmethionine:tRN A ribosyltransferase-isomerase OS=Arsukibacterium ikken se OX=336831 GN=queA PE=3 SV=1
MQVKDFSFELPEQLIARFPKAERSASRLLAMDKQSGALSHHIFKDLTDFLQPGDLLVFNNTKVIPARLFGQKASGGKVEVLVERLLDDQRFLAHVRASKAPKPGSMLLLENSAEVRMNQRHDELFELEMLSDEPVLAMLERLGHMPLPPYIDRPDNEEDKARYQTVYNEKPGAVAAPTAGLHFDQPLLAKLADKGIEFGYVTLHVGAGTFQPVRVDNVLEHQMHAEYIEVSQQVVDAVAACKARGNKVVAVGTTSVRSLESAAQQGGGKLISYYGDTQIFIYPGYKFQVIDALITNFHLPESTLIMLVSAFSSREHVMNAYDTAIAEQYRFYSYGDAMFIS

SEQ ID NO: 63554 - protein, 341 aa, Arsukibacterium sp.
  misc_feature (1)..(341): tr|A0A0M2VFE6|A0A0M2VFE6_9GAMM S-adenosylmethionine:tRN A ribosyltransferase-isomerase OS=Arsukibacterium sp. M J3 OX=1632859 GN=queA PE=3 SV=1
MHVKDFSFELPEQLIAHFPKAERSTSRLLAMDKHSGVLSQHIFKELVDLLQPGDLLVFNNTKVIPARLFGQKVSGGKVEVLVERMLDDKRFLAHVRASKAPKAGTILLLENAAEVKMIQRHDELFELEMVSDEPVLAMLERLGHMPLPPYIDRPDTAEDKARYQTVYNEKPGAVAAPTAGLHFDQPLLDKLQAKGVEFAFITLHVGAGTFQPVRVDNVLEHKMHAEYIEVPQQVVAAVAACKARGNKVVAVGTTSVRSLESAAQQGGGKLIAYNGDTQIFIYPGYEFKVIDALITNFHLPESTLIMLVSAFSCREHVMNAYQTAINEEYRFYSYGDAMFIS

SEQ ID NO: 63555 - protein, 375 aa, Arthrospira maxima
  misc_feature (1)..(375): tr|B5W7M7|B5W7M7_LIMMA S-adenosylmethionine:tRNA ribosy ltransferase-isomerase OS=Arthrospira maxima CS-328 OX= 513049 GN=queA PE=3 SV=1
MLGLTEVVDKLDRTLQGYDYELPPDRIAQNPVIPRDSSRLLVVDSPPSHQHRLFRDLPDLLQPEDLLILNNTRVLPARLYGRKSTSAAIEILLLQEQAPNCWLALVKPGKRFKIGDRLEFPSKSGREILYATVIDTNPGTGGRLLKFEVPQGQSLVSILDQFGEIPFPPYVTDSQAVAEQYQTIYGTRPGAVAAPTAGLHFTEELFQRLSDHHIDHAFLTLHVGLGTFRPVEVEDITTHQMHAEWVELRPETVDKINQTRARGGRIIAVGTTVVRTLEGIAAAQNSLDGCIQPYCGEINLFIYPGYRWRVIDGLITNFHLPRSSLLMLVSALIGRERLMKLYQDALEQPPNDFGNRYRFYSFGDAMLILPSAVQK

SEQ ID NO: 63556 - protein, 375 aa, Arthrospira platensis; identical to SEQ ID NO: 63555
  misc_feature (1)..(375): tr|K1WDP6|K1WDP6_ARTPT S-adenosylmethionine:tRNA ribosy ltransferase-isomerase OS=Arthrospira platensis C1 OX=4 59495 GN=queA PE=3 SV=1

SEQ ID NO: 63557 - protein, 441 aa, Arthrospira platensis
  misc_feature (1)..(441): tr|D5A2R5|D5A2R5_ARTPN S-adenosylmethionine:tRNA ribosy ltransferase-isomerase OS=Arthrospira platensis (strain NIES-39 / IAM M-135) OX=696747 GN=queA PE=3 SV=1
MLAVSRRLSEKFLTPCSSFPYPLFCISYFDKAILISLRDITPFNRGKLPVLIWGIIPKFTSESAILVLGMTEVVDKLDRTLQGYDYELPPDRIAQNPVIPRDSSRLLVVDSPQSHQHRLFRDLPDLLQPQDLLILNNTRVLPARLYGRKSRSAAIEILLLQEQAPNCWLALVKPGKRFKIGDRLEFQSKSGGEILYATVIDTNPSTGGRLLKFEVPQGQSLVSILDQFGEIPFPPYVTDSQALAEQYQTIYGDRPGAVAAPTAGLHFTEQLFQRLSQQHIDHAFVTLHVGLGTFRPVEVEDITTHQMHAEWVELPPETVEKINQTRARGGRIIAVGTTVVRTLEGIAAAQNSGDRSIQPYCGEINLFIYPGYRWRVIDGLITNFHLPRSSLLMLVSALIGRERLMKLYQDALEQPPNDFGNRYRFYSFGDAMLILPAAVQK

SEQ ID NO: 63558 - protein, 375 aa, Arthrospira sp.; identical to SEQ ID NO: 63555
  misc_feature (1)..(375): tr|A0A328V1M2|A0A328V1M2_9CYAN S-adenosylmethionine:tRN A ribosyltransferase-isomerase OS=Arthrospira sp. O9.13 F OX=1982223 GN=queA PE=3 SV=1

SEQ ID NO: 63559 - protein, 365 aa, Asaccharobacter celatus
  misc_feature (1)..(365): tr|A0A369P4U1|A0A369P4U1_9ACTN S-adenosylmethionine:tRN A ribosyltransferase-isomerase OS=Asaccharobacter celat us OX=394340 GN=queA PE=3 SV=1
MRTDDFDYNLPEELIAQEPAAVRDECRLLVMDRESGEVEDRIFKDIVDYLRPGDLLVANETRVMPARLLGAKRGTGGAAEVFLLRECGGPEPRTNRVAFWEVLVRPGKRLKPGAGAVVDFTDAAGEVALSAEIIDWARDGQRGERVARLSTTLPSLDEALHAVGHTPLPPYIRDYAGDEELYQTVYSRRESSAAAPTAGLHFTPELIERLRERGIGWATVELEVGLDTFRVVDEDDPEKHVIHTEFYTVPQATVDAVNATHAAGGRVIAVGTTSVRSLESAWDPEADDGRGALVARDREATSLYILPGYEFHVVDALITNFHVPRSTLMMLVSAFSTRENILAAYQHAIDERYRLLSFGDAMFLH

SEQ ID NO: 63560 - protein, 365 aa, Asaccharobacter celatus
  misc_feature (1)..(365): tr|A0A369P108|A0A369P108_9ACTN S-adenosylmethionine:tRN A ribosyltransferase-isomerase OS=Asaccharobacter celat us OX=394340 GN=queA PE=3 SV=1
MRTDDFDYNLPEELIAQEPAAVRDECRLLVMDRVSGEVEDRIFKDIIDYLQPGDLLVANETRVMPARLLGTKRGTGGAAEVFLLRECGGPEPRTNRVAFWEVLVRPGKRLKPGAGAVVDFTNAAGDVVLSAEIIDWARDGQRGERVARLSTTLPSLDEALHAVGHTPLPPYIRDYAGDEELYQTVYSRRESSAAAPTAGLHFTPELIERLRERGIGWATVELEVGLDTFRVVDEDDPEKHVIHTEFYTVPQATVDAVNATHAAGGRVIAVGTTSVRSLESAWDPEADDGRGALVARDREATSLYILPGYEFHVVDALITNFHVPRSTLMMLVSAFSTRENILAAYQHAIDERYRLLSFGDAMFLH

SEQ ID NO: 63561 - protein, 341 aa, Asaccharospora irregularis
  misc_feature (1)..(341): tr|A0A1M5JA11|A0A1M5JA11_9FIRM S-adenosylmethionine:tRN A ribosyltransferase-isomerase OS=Asaccharospora irregu laris DSM 2635 OX=1121321 GN=queA PE=3 SV=1
MKTSDFYFDLPEELIAQVPIKDRSSSRLMVLDKKSGQIEHKIFKDILDYLNPGDCLVLNNTRVIPARLIGEKVDTGGKIEFLLLKRTEEDTWQTLVKPGKRAKVGTKFSFGDGKLIGEVIGLAEEGSRIVKFYYEGIFEEVLDELGNMPLPPYITERLEEKERYQTVYSKHNGSAAAPTAGLHFTDELLQKIKDKGVEIAFVTLHVGLGTFRPVKVDDVLNHEMHSEYYMVTEEAAQKINLAKSNGKNVICVGTTSCRTIESAADENGNIKESSGWTNIFIYPGYKFKLVDKLITNFHLPESTLIMLVSALCGKDNVLNAYNVAVEEKYRFFSFGDAMIIK

SEQ ID NO: 63562 - protein, 345 aa, Asaia bogorensis
  misc_feature (1)..(345): tr|A0A0P0YEI0|A0A0P0YEI0_9PROT S-adenosylmethionine:tRN A ribosyltransferase-isomerase OS=Asaia bogorensis NBRC 16594 OX=1231624 GN=queA PE=3 SV=1
MQISDFDFDLPRENIALEPARPRDSARLLRVAAGQPLAETRISDLPSLLEPGDLLIANDTAVIRAQLAARRGEAKIGITLDRILSDGSWHALAKNARKLKPGDTLHFGTDPVTAEVVENEGDGAISMRFSAEGEAFDDFLKRAGVLALPPYIDRPTGPTAQDDSDYATIFERYKGAVAAPTAGLHFTPEVLAALDARGVKRHTLTLHVGAGTFLPVRDEIATHKMHAEWGRIDAQTAQLINDTRASGRKIVAVGTTSLRLLESAADEQGIVLPWEGETSIFIKPGYRFRAVDRLMTNFHLPRSTLFMLVCALAGTETMREAYRHAIANGFRFYSYGDACLLDRAP

SEQ ID NO: 63563 - protein, 345 aa, Asaia platycodi
  misc_feature (1)..(345): tr|A0A060QH10|A0A060QH10_9PROT S-adenosylmethionine:tRN A ribosyltransferase-isomerase OS=Asaia platycodi SF2.1 OX=1382230 GN=queA PE=3 SV=1
MQISDFDFDLPRENIALEPARPRDSARLLRVAAGQNLAETRISDLPSLLEPGDLLIANDTAVIRAQLAARRGEAKIGITLDRILSDGSWHALAKNARKLKPGDTLHFGSDSVTAEVVENEGDGAISMRFSAEGEAFDDFLKRAGVLALPPYIDRPTGPTAQDDSDYATIFERYKGAVAAPTAGLHFTPEVLAALDARGVKRHTLTLHVGAGTFLPVRDEIATHKMHAEWGRIDAQTAQLINDTRASGRKIVAVGTTSLRLLESAADERGVVHPWEGETSIFIKPGYRFRAVDRLMTNFHLPRSTLFMLVCALAGTETMREAYRHAIAEGFRFYSYGDACLLDRAP

SEQ ID NO: 63564 - protein, 345 aa, Asaia sp.
  misc_feature (1)..(345): tr|A0A433WZF7|A0A433WZF7_9PROT S-adenosylmethionine:tRN A ribosyltransferase-isomerase OS=Asaia sp. W19 OX=2067 395 GN=queA PE=3 SV=1
MQISDFDFDLPRENIALEPARPRDSARLLRVAASQPLSEARISDLPSLLEPGDLLVANDTAVIRAQLAARRGEAKIGITLDRILSDGSWHALAKNARKLRPGDTLHFGSDPVTAEVVENEGDGAISMRFSAEGKAFDDFLKRAGVLALPPYIDRPTGPTAQDDSDYATIFERHKGAVAAPTAGLHFTPDLLAALDARGVKRHTLTLHVGAGTFLPVRDEIASHKMHAEWGRIDAQTAQRINDTRASGKKIVAVGTTSLRLLESAADEHGIVHPWEGETSIFIKPGYRFRAVDRLMTNFHLPRSTLFMLVCALAGTETMRDAYRHAIAEGFRFYSYGDACLLDRAP

SEQ ID NO: 63565 - protein, 342 aa, Asanoa ferruginea
  misc_feature (1)..(342): tr|A0A3D9ZEV8|A0A3D9ZEV8_9ACTN S-adenosylmethionine:tRN A ribosyltransferase-isomerase OS=Asanoa ferruginea OX= 53367 GN=DFJ67_1920 PE=3 SV=1
MVTATADPLDFVLPDKLLAHEPPEARGVPRDGVRMLVSTPSAQKHLLFRDLPSVLTAGDVLVVNTSATLAAAVPTVDGHVVHFSTCRSDGTWLVEPRVAGPAGAPTLGPLTSAVAGQRFVLRGGGSVTLLAPYSQGRLWVASLSFEDVRGYLSRHGAPIRYSYVPRSWPLSAYQTVFATEPGSAEMPSAARPFTDRVVTRLVSAGVLVVPIVLHTGVASAEGHERPYPEWFSVPAATARAVSSARRVIAVGTTVVRALETTGGSAGSGWTDLVVTPERGVRVVDGLLTGFHEPRASHLDLLSAVAGVGLVSASYRAALAAGYRWHEFGDVNLLLSDRDVREV

SEQ ID NO: 63566 - protein, 332 aa, Asanoa hainanensis
  misc_feature (1)..(332): tr|A0A239MNV7|A0A239MNV7_9ACTN S-adenosylmethionine:tRN A ribosyltransferase-isomerase OS=Asanoa hainanensis OX =560556 GN=SAMN05421812_10657 PE=3 SV=1
MTATGSPIDFVLPDELSAHEPPEARGVPRDGVRMLVSTPYAQAHRIFRELPDVLCPGDVLVVNTSATLPAAAPTLDGQAVHFSTANPDGTWLVEPRGALAPTAATGQRIDLRGGGSVTLLAPYSRGRLWVASLSFADVRTYLNSHGSPIRYDYVPREWPLSAYQTVFATEPGSAEMPSAARPFTDRVVTRLVAAGVQVVPIVLHTGVASAEAHERPYPEWFEVPNTTARVLAGARRVIAVGTTVVRALETTGGAAGSGWTDLVVTPERGVRVVDGLLTGFHPPRASHLDLLAAVAGPDLVARSYREALAAGYRWHEFGDVNLLLSERAVAAV

SEQ ID NO: 63567 - protein, 332 aa, Asanoa ishikariensis
  misc_feature (1)..(332): tr|A0A1H3L4R3|A0A1H3L4R3_9ACTN S-adenosylmethionine:tRN A ribosyltransferase-isomerase OS=Asanoa ishikariensis OX=137265 GN=SAMN05421684_0507 PE=3 SV=1
MTATGSPIDFVLPDELSAHEPPEARGVPRDGVRMLVSTPYAQSHRIFRELPDVLCPGDVLVVNTSATVPAAVPTLGGPAVHFSTANPDGTWLVEPRGPLASTAAAGQRLDLRGGGSVTLLSPYSRGRLWVASLSFGDVHAYLRSHGSPIRYDYVPKAWPLSAYQTVFATQPGSAEMPSAGRPFTDRVVTRLVAAGVQVVPIVLHTGVASAEAHERPYPEWFSVPATTARVLAGARRVIAVGTTVVRALETTGGAAGSGWTDLVVTPERGVRVVDGLLTGFHEPRASHLDLLAAVAGPDLVARSYREALAAGYRWHEFGDVNLLLSERASAAV

SEQ ID NO: 63568 - protein, 356 aa, Ascidiaceihabitans donghaensis
  misc_feature (1)..(356): tr|A0A2R8BCW0|A0A2R8BCW0_9RHOB S-adenosylmethionine:tRN A ribosyltransferase-isomerase OS=Ascidiaceihabitans do nghaensis OX=1510460 GN=queA PE=3 SV=1
MALMKLSDFDFDLPEALIATRPAVPRTSARLLVAQADQITNSTVSDLTSWLRPGDRLVLNNTRVIPARLSGTRARQSAQGATEARIEVTLLEPRADGAWSALLKPLKKVKIGEKIRFSDALTAVLEGTGDGQGYLRFNLLGDDFDAALSKAGAMPLPPYIAAKRPADAQDHTDYQTVFAKHSGAVAAPTASLHFDEALLQKLRDMGVTFSYVTLHVGAGTFLPVKVDDILTHKMHAEWGCVEAAAVQEIEATKAAGGRVIPVGTTALRLIETAAQSGRLRAFEGDTDIFIYPGFTFRVADGLMTNFHLPKSTLMMLVSALMGQDAIRNIYAHAISDGYRFFSYGDSSLLFPKPPTD

SEQ ID NO: 63569 - protein, 353 aa, Asticcacaulis benevestitus
  misc_feature (1)..(353): tr|V4PQZ0|V4PQZ0_9CAUL S-adenosylmethionine:tRNA ribosy ltransferase-isomerase OS=Asticcacaulis benevestitus DS M 16100 = ATCC BAA-896 OX=1121022 GN=queA PE=3 SV=1
MLISDFDFDLPDDRIALRPVEPREAARLLRVEADGALIDSRVGDIADCLRAGDLLIVNDTRVLPTQLDGLRIRPDSQVVIEATLVKSTGPAQWQAFLKPGRKVKPGDDLLFKSDATELRAHVSAKDDNGLYTLDFQHSPQELMERLHIVGGMPLPPYIRSKRHEDEQDKSDYQTIFARDEGSVAAPTAGLHFTPAVLEKLTTKGVGIEHITLHVGAGTFLPVKVDDTKDHVMHAEFGMITQASADRINAVRAAGGRIVCVGTTSLRLLESACDDAGVIHPFAAETAIFITPGVKVRSCDMLMTNFHLPKSTLFMLVCALAGTETMKKAYAHAIATGYRFFSYGDASLLSNTSR

SEQ ID NO: 63570 - protein, 356 aa, Asticcacaulis biprosthecum
  misc_feature (1)..(356): tr|F4QR80|F4QR80_9CAUL S-adenosylmethionine:tRNA ribosy ltransferase-isomerase OS=Asticcacaulis biprosthecum C1 9 OX=715226 GN=queA PE=3 SV=1
MLVSDFDFDLPDDLIALRPAEPRESARLLRIDAQGGLTDARVGDIAAFLKSGDLLVVNDTKVLPAQLHGIRRRDGADVAIEATLIKATGATQWQAFLKPGRKVRIGDDLHFGSDIKLQATVAAKAEDGRYTLDFHHTPEVLVERLHVIGAMPLPPYIRSKRREDDQDKRDYQTVFANEEGSVAAPTAGLHFTSQLLEVLQSQGVGIERITLHVGAGTFLPMKVEDTRDHIMHAELGVISAESAARINAARIAGGRIVCVGTTSLRLLESACDPQGTIHAFASETAIFITPGVVVRSCDLVLTNFHLPKSTLFMLVSALAGTDTMKAAYRHAIETGYRFFSYGDACLIDNISKNQET

SEQ ID NO: 63571 - protein, 348 aa, Asticcacaulis excentricus
  misc_feature (1)..(348): tr|E8RS18|E8RS18_ASTEC S-adenosylmethionine:tRNA ribosy ltransferase-isomerase OS=Asticcacaulis excentricus (st rain ATCC 15261 / DSM 4724 / VKM B-1370 / CB 48) OX=573 065 GN=queA PE=3 SV=1
MKVSDFDFDLPEDRIALRPVTPREAARLLRVDGVVREDWRVGDLPSLLKAGDLLVINNTRVLPTQLKGTRVREGQTVAFEATLIKSLDGQRWQAFLKPGRRIREGDTLRFDDLSARVLSKDEDGVYVLRFEQAASEVLNGLHRLGGMPLPPYIRSKRPEDEQDKSDYQTVFARDEGSVAAPTAGLHFTPELLQALRDKGVLFEEVTLHVGAGTFLPVKVEDTKDHRMHAEFGVVSADSAARINAARVAGGRIIAIGTTALRLIESACDADGRIHPFSGDTDIFITPGVPVRSADMLWTNFHLPKSTLFMLVCAFAGTEAMKAAYAHAINSGYRFFSYGDASLLTNKSR

SEQ ID NO: 63572 - protein, 348 aa, Asticcacaulis excentricus
  misc_feature (1)..(348): tr|A0A3G9G9P6|A0A3G9G9P6_9CAUL S-adenosylmethionine:tRN A ribosyltransferase-isomerase OS=Asticcacaulis excentr icus OX=78587 GN=queA PE=3 SV=1
MKVSDFDFDLPEDRIALRPVTPREAARLLRVDGEVREDWRVGDLPSLLKAGDLLVINNTRVLPTQLKGTRERDGQSVTFEATLIKSLDGQSWQAFLKPGRRIREGDTLRFDDLSARVLSKDEDGVYVLRFDQAASEVLNGLHRLGGMPLPPYIRSKRPEDEQDKRDYQTVFARDEGSVAAPTAGLHFTPELLQALRDKGVLFEEVTLHVGAGTFLPVKVEDTKDHRMHAEFGVVSADSAARINAARAAGGRIIAIGTTALRLIESACDTKGHIHPFSGDTDIFITPGVPVRSADMLWTNFHLPKSTLFMLVCAFAGTEAMKAAYAHAIDSGYRFFSYGDASLLMNRSK

SEQ ID NO: 63573 - protein, 347 aa, Asticcacaulis sp.
  misc_feature (1)..(347): tr|V4QI08|V4QI08_9CAUL S-adenosylmethionine:tRNA ribosy ltransferase-isomerase OS=Asticcacaulis sp. YBE204 OX=1 282363 GN=queA PE=3 SV=1
MKVSDFDFHLPEDRIALRPMAPREAARLLEVADTLNDRHVADLPSLLRAGDLLILNNTKVLPTQLKGTRDRGGQTASFEATLIKSLDGQSWQAFLKPGKRIREGDRVAFGDLTADILSKNEDGVYVLRFTQSPSEVINGLHRLGGMPLPPYIRSKRAEDAQDLTDYQTVFARDEGSVAAPTAGLHFTPELLETIRAKGVLTEEITLHVGAGTFLPVKVEDTDEHKMHAEFGIITADSAARINAVRQAGGRLICVGTTALRLLESACDDQGVIHPFAAETSIFITPGVRVNSADVLLTNFHLPKSTLFMLVCAFAGTERMKSAYDHAIETGYRFFSYGDACLLTNTSR

SEQ ID NO: 63574 - protein, 362 aa, Asticcacaulis sp.
  misc_feature (1)..(362): tr|V4NN01|V4NN01_9CAUL S-adenosylmethionine:tRNA ribosy ltransferase-isomerase OS=Asticcacaulis sp. AC402 OX=12 82361 GN=queA PE=3 SV=1
MLVSDFDFDLPDDRIALRPAEPRESARLLRVDAAGNLSDAHIGDIGRFLRPGDLLVVNDTRVLPVQLHGFRRRDGSDVSVEATLIKATGGSQWQAFLKPGRKVRIGDSLLFRSDFSTVELQATVAGKEDDGLYALNFLHVPADLLERLHIIGAMPLPPYIRSKRLEDDQDKRDYQTIFANQEGSVAAPTAGLHFTSSLLEQLQSDGIAIERITLHVGAGTFLPVKVDDTNDHVMHAEFGVITQASADRINAARTAGGRIVCVGTTSLRLLESACDADGMIQPFAAETSIFITPGVRVRSCDLLMTNFHLPKSTLFMLVCALAGTQVMKAAYRHAVDSGYRFFSYGDACLLTNTSDISESSGL

SEQ ID NO: 63575 - protein, 353 aa, Asticcacaulis taihuensis
  misc_feature (1)..(353): tr|A0A1G4PQS9|A0A1G4PQS9_9CAUL S-adenosylmethionine:tRN A ribosyltransferase-isomerase OS=Asticcacaulis taihuen sis OX=260084 GN=queA PE=3 SV=1
MLISEFDFDLPENRIALRPTEPREAARLLRVDEHGALTDSHIGDIADFLKSGDLLVVNDTRVLPTQLDGQRLRDDSVVMIEATLVKSTGASQWQAFLKPGRKVKAGDQLLFKSDATELKAVVSAKDDNGLYTLDFQHGPQELLERLHLVGGMPLPPYIRSKRHEDEQDKSDYQTIFARDEGSVAAPTAGLHFTPALLEKLAAKGIAIERITLHVGAGTFLPVKVEDTDDHVMHAEFGIITPESAARINAARAAGGRIICVGTTSLRLLESACDSQGAIHPFAAETAIFITPGVTIRSCDLLMTNFHLPKSTLFMLVCALAGTEVMKRAYAHAIETGYRFFSYGDACLLSNTSR

SEQ ID NO: 63576 - protein, 361 aa, Atelocyanobacterium thalassa
  misc_feature (1)..(361): tr|D3ENS1|D3ENS1_ATETH S-adenosylmethionine:tRNA ribosy ltransferase-isomerase OS=Atelocyanobacterium thalassa (isolate ALOHA) OX=1453429 GN=queA PE=3 SV=1
MNDDYSLSSYNYYLPSDLIAQSPLVPRDSSRLLVINSLDTHIHSFFHELPKWLLPGDLLVFNNTQVIPARLYGQKTTGAKVEVLLLEEKEPFSWLALVKPGKRFKIGSEILFKEKLDDLNQDFLIKATVVDQDEETGGRILKFDVSSRKIFWEALERIGHLPLPPYISNCNAHSSQYQTIYAQKPGAVAAPTAGLHFTQELLQKLQKKGIEQAYITLHVGLGTFRPVSTDDIKQHTMHQEWVEVPSETIQKIHKTKINGGRVIAVGTTVVRALEGMANETSMDTEYGVKSFSGKTDIFIYPGYSWRLIDGMITNFHLPKSSLLMLVSALIGRKRLLELYKIAIEQKYRFYSFGDGMLVLLS

SEQ ID NO: 63577 - protein, 354 aa, Atlantibacter hermannii
  misc_feature (1)..(354): tr|A0A447LK74|A0A447LK74_ATLHE S-adenosylmethionine:tRN A ribosyltransferase-isomerase OS=Atlantibacter hermann ii OX=565 GN=queA PE=3 SV=1
MRVADFSFELPESLIAHYPLPGRSSCRLLSLDGPTGALTHGTFTDLLEKLNPGDLLVFNNTRVIPARMFGRKASGGKIEVLVERMLDDKRVLAHVRASKAPKPGAELLLGEDESVKATMTARHDALFEIEFDDARAVLDILNDIGHMPLPPYIDRPDEEADRELYQTVYSEKPGAVAAPTAGLHFDEPLLEKLRQKGVEMAFVTLHVGAGTFQPVRVDSIEDHIMHSEYAEVPQDVVDAVLACKARGNRVIAVGTTSVRSLESAAKAAKNDLIEPFFNDTQIFIYPGYQYSVIDALITNFHLPESTLIMLVSAFAGYKHTMNAYHEAVKAEYRFFSYGDAMFITYNPSAKDERP

SEQ ID NO: 63578 - protein, 354 aa, Atlantibacter hermannii; identical to SEQ ID NO: 63577
  misc_feature (1)..(354): tr|H5V4K7|H5V4K7_ATLHE S-adenosylmethionine:tRNA ribosy ltransferase-isomerase OS=Atlantibacter hermannii NBRC 105704 OX=1115512 GN=queA PE=3 SV=1

SEQ ID NO: 63579 - protein, 355 aa, Atlantibacter subterranea
  misc_feature (1)..(355): tr|A0A427UWS3|A0A427UWS3_9ENTR S-adenosylmethionine:tRN A ribosyltransferase-isomerase OS=Atlantibacter subterr anea OX=255519 GN=queA PE=3 SV=1
MRVADFSFELPESLIAHYPLPGRSSCRLLSLDGPSGALTHGTFTDLLEKLNPGDLLVFNNTRVIPARMFGRKASGGKIEVLVERMLDDKRVLAHVRASKAPKPGAELLLGEDESVKATMTARHDALFEIEFNDARAVLDILNDIGHMPLPPYIDRPDEESDRELYQTVYSARPGAVAAPTAGLHFDEPLLEKLRQKGVEMAFVTLHVGAGTFQPVRVDSIEDHIMHSEYAEVPQDVVDAVLACKARGNRVIAVGTTSVRSLESAAQAAKNDLIEPFFDDTQIFIYPGYQYKVIDALVTNFHLPESTLIMLVSAFAGYRHTMNAYQQAVNAQYRFFSYGDAMFITYNPSAITEQIG

SEQ ID NO: 63580 - protein, 345 aa, Atopobacter sp.
  misc_feature (1)..(345): tr|A0A421BFV7|A0A421BFV7_9LACT S-adenosylmethionine:tRN A ribosyltransferase-isomerase OS=Atopobacter sp. AH10 OX=2315861 GN=queA PE=3 SV=1
MTYTTEDFDFDLPEELIAQTPLKDRSSSRLLEVNVADHSYKDRVFTDILDLLNKGDVLVLNDTKVLPARLHGVKEGTGAHIELLLLHQEEGDVWEVLAKPAKRVKVGSVIDFGDGVLKAKVIEEMEQGGRKVEFAYQGVFLERLDELGEMPLPPYIKEKLKDQSRYQTVYAREEGSAAAPTAGLHFTKDLLHQIEAKGVEIAYVTLHVGLGTFRPVSVDNIEDHVMHSEYYHVDQATVDCLNRAKEEGRRIVACGTTSIRTLESIASLFPDHLEKTSGWTNIFIKPGYQFRLVDAFITNFHLPKSTLVMLVSAYAGRDFILEAYRHAVDEKYRFFSFGDAMFLHR

SEQ ID NO: 63581 - protein, 387 aa, Atopobium deltae
  misc_feature (1)..(387): tr|A0A133XXM8|A0A133XXM8_9ACTN S-adenosylmethionine:tRN A ribosyltransferase-isomerase OS=Atopobium deltae OX=1 393034 GN=queA PE=3 SV=1
MRTDDFDYDLPDELIAQAPVEPRDSCRLLILHRHDGSVKHKIFRDIIDFLEPGDLLVANKTRVMPARLVGRKKQTGGVAETLLLRRREDLDAMGSIWECLVNPGKRLKPSAVIEYRAGGLHAPEQAAVVLTGEILDFLDENRGGRLVKFTPAQGLTLDQAIHSAGHVPLPPYITDYQGDPEKYQTVYAMHEEHSAAAPTAGLHFTSELIEKIKQKGIAWQTVELEVGIDTFRLVTEDDPTKHAMHTERYHVSQQVIDAVHVTKQAGHRVIAVGTTAVRSLESAWDPQAPVAAHPVSARHFEQCADAATQTGKGDVVARENATTKLFLMPGSTYHVVDALITNFHVPRSTLMMLVSALATRDQIMTAYEQAVEKRYRMLSFGDAMFIE

SEQ ID NO: 63582 - protein, 387 aa, Atopobium minutum
  misc_feature (1)..(387): tr|A0A1H4NNW3|A0A1H4NNW3_9ACTN S-adenosylmethionine:tRN A ribosyltransferase-isomerase OS=Atopobium minutum OX= 1381 GN=queA PE=3 SV=1
MRTDDFDYNLPDELIAQAPVEPRDSCRLLVLHRSDGRVEHKIFRDIVDLLQPGDLLVANKTRVMPARLVGRKQHTGGVSETLLLRRREDVDALGSVWECLVNPGKRLKPGAIIEYRAGGLHAPQISPVVLTGEIMDFVDDNRGGRLVKFVPAADLSLDEAIHRAGHVPLPPYITEYDGDPEKYQTVYAMKEEHSAAAPTAGLHFTPELIDKIKAKGCRWATVELEVGIDTFRLVTEDDPTQHAMHTERYHVPQDVIDAVHATKAAGHRVIAVGTTAVRSLESAWERNIDVSDPAVTALHFEKAAESAAVTGTGDVVARHDASTNLFLMPGSTFHVVDAMITNFHVPRSTLMMLVSAFANRDQIMDAYEQAIVQRYRMLSFGDAMFIE

SEQ ID NO: 63583 - protein, 387 aa, Atopobium minutum; identical to SEQ ID NO: 63582
  misc_feature (1)..(387): tr|N2BUM0|N2BUM0_9ACTN S-adenosylmethionine:tRNA ribosy ltransferase-isomerase OS=Atopobium minutum 10063974 OX =997872 GN=queA PE=3 SV=1

SEQ ID NO: 63584 - protein, 387 aa, Atopobium parvulum
  misc_feature (1)..(387): tr|C8W767|C8W767_ATOPD S-adenosylmethionine:tRNA ribosy ltransferase-isomerase OS=Atopobium parvulum (strain AT CC 33793 / DSM 20469 / JCM 10300 / VPI 0546) OX=521095 GN=queA PE=3 SV=1
MRTDDFDYNLPEERIAQTPAEPRDSCRLLVLHREDGRIEHKRFTDIVEYLDPGDLVVVNQTRVMPARLVGKKQNTGGVSETLLLKRREDIDALGSVWECLVNPGKRLKPGAVIEYRAGGLHAPDSAPVVLTGTIVDFVDDNRGGRLVRFEAQGERTLDEAIHEAGHVPLPPYITQYEGDPEKYQTVYAMQDEHSAAAPTAGLHFTPKLIETIKAKGVQWASVELEVGIDTFRLVTEDDPTKHVIHTERYHVAPEVVEAVKATKAAGHKVIAIGTTSVRSLESTWDSQLPADEPPVVAHRFEEAEDSAAVTHKGDMVARENATTNLYLMPGSTFHVVDTMVTNFHVPRSTLMMLVSAFATREQIMNAYQSAIDEKYRFLSFGDAMIII

SEQ ID NO: 63585 - protein, 387 aa, Atopobium rimae
  misc_feature (1)..(387): tr|B9CK41|B9CK41_9ACTN S-adenosylmethionine:tRNA ribosy ltransferase-isomerase OS=Atopobium rimae ATCC 49626 OX =553184 GN=queA PE=3 SV=1
MRTDDFDYDLPDELIAQTPAEPRDSCRLLVLHRDDGSIEHRHFRDIVEYLDPGDLIVANKTRVMPARLVGRKRETGGVSETLLLKRREDLDPLGHLWECLVSPGKRLKPGAIIEYRAGGLHAPLTSPVVLCGEIVDFVEGSKGGRLVRFEAPGTQALDEAIHAAGHVPLPPYITDYEGDPEKYQTVYAMQDEHSAAAPTAGLHFTPELIEDIKTHGITWESVELEVGIDTFRLVEEDDPTQHVIHTERYHVSQGVIDAIRTTKAEGHRVIAIGTTSVRSLESAWDGDACASNPAITARYFEDASGSARITKTGDLVARENATTNLYLMPGSTFHVVDAMVTNFHVPRSTLMMLVSAFASRESIMSAYDAAIKERYRFLSFGDAMLIV

SEQ ID NO: 63586 - protein, 387 aa, Atopobium sp.
  misc_feature (1)..(387): tr|Z4X0X4|Z4X0X4_9ACTN S-adenosylmethionine:tRNA ribosy ltransferase-isomerase OS=Atopobium sp. ICM42b OX=11906 20 GN=queA PE=3 SV=1
MRTDDFDYNLPEERIAQAPAEPRDSCRLLVLHREDGRIEHKHFTDIVEYLEPGDLVVVNQTRVMPARLVGKKQNTGGVSETLLLKRREDIDALGGVWECLVNPGKRLKPGAVIEYRAGGLHAPDSAPVVLTGTIVDFVDDNRGGRLVRFEAQGDRTLDEAIHEAGHVPLPPYITQYEGDPEKYQTVYAMQDEHSAAAPTAGLHFTPELIETIKAKGVQWASVELEVGIDTFRLVTEDDPTKHVIHTERYHVAPEVVEAVKATKAAGHKVIAIGTTSVRSLESAWDNQIPSAEPPVVARRFEEAEDSAAVTHKGDMVARENATTNLYLMPGSTFHVVDTMVTNFHVPRSTLMMLVSAFATREQIMDAYQSAIDEKYRFLSFGDAMIII

SEQ ID NO: 63587 - protein, 387 aa, Atopobium sp.
  misc_feature (1)..(387): tr|Z4WXY7|Z4WXY7_9ACTN S-adenosylmethionine:tRNA ribosy ltransferase-isomerase OS=Atopobium sp. BS2 OX=936550 G N=queA PE=3 SV=1
MRTDDFDYNLPEERIAQAPAEPRDSCRLLVLHREDGRIEHKHFTDIVEYLEPGDLVVVNQTRVMPARLVGKKQNTGGVSETLLLKRREDIDALGSVWECLVNPGKRLKPGAVIEYRAGGLHAPDSAPVVLTGTIVDFVDDNRGGRLVRFEAQGDRTLDEAIHEAGHVPLPPYITQYEGDPEKYQTVYAMQDEHSAAAPTAGLHFTPELIETIKAKGVQWASVELEVGIDTFRLVTEDDPTKHVIHTERYHVAPEVVEAVKATKAAGHKVIAIGTTSVRSLESAWDSQIPAAEPPVVARRFEEAEDSAALTHKGDMVARENATTNLYLMPGSTFHVVDTMVTNFHVPRSTLMMLVSAFATREQIMDAYQSAIDEKYRFLSFGDAMIII

SEQ ID NO: 63588 - protein, 389 aa, Atopobium vaginae
  misc_feature (1)..(389): tr|A0A135PAC6|A0A135PAC6_9ACTN S-adenosylmethionine:tRN A ribosyltransferase-isomerase OS=Atopobium vaginae OX= 82135 GN=queA PE=3 SV=1
MIVRTDDFDYVLPQERIAQHPIEPRDACKLLVLHRTTGEIEHRHFRDIADYMHEGDLIVANKTRVLPARLVGLKHGGSAACETLLLKRREDLDPMGSVWECLVNPGKRLKLGACIDYRAGGLHAPATADIVLRAEIMDYLENNRGGRLVKFTPAQGLSLDEAIHQAGHVPLPPYITNYEGDPEKYQTVYSMKEEHSAASPTAGLHFTPELIERIKQKGVQWKTVELEVGIDTFRLVEEDDPTQHVMHTERYHVPQDVVDAVHATKAAGHKVIAIGTTSVRSLESAFDCNAVCSDPALCALNFEHAQDSCLLTHRGDIVKRENATTDLYIMPGYTWHVVDCMVTNFHVPRSTLMMMVSSFASRELIMKAYQEAIEHEYRFLSFGDAMIML

SEQ ID NO: 63589 - protein, 387 aa, Atopobium vaginae
  misc_feature (1)..(387): tr|E1L269|E1L269_9ACTN S-adenosylmethionine:tRNA ribosy ltransferase-isomerase OS=Atopobium vaginae PB189-T1-4 OX=866774 GN=queA PE=3 SV=1
MRTDDFDYELPEDHIAQAPVTPRDSCKLLVLHRDTGEIEHKHFFDIIDYFDEGDLIVANKTRVLPARLIGKKKPSGITCETLLLRRREDLDPMGSIWECLVNPGRRMKPGVCLEYREGGLHAPDSAPVVLTARMLDFIEENRGGRLVKFTPAAGLSLDSAIHKAGHVPLPPYITRYEGDPEKYQTVYSMHEEHSAASPTAGLHFTNELIERIKQKGVQWKTVELEVGIDTFRLVEEDDPTQHEMHTERYHVPQDVVDAVHATKAAGKRVIAIGTTSVRSLESAFDTTCACATPPVCAQRFESCPDAAAVCGHGDIVACANATTSLYIMPGYTWHVVDCMVTNFHVPRSTLMMMVSSFASRDQIMDAYANAIEHNYRFLSFGDAMIML

SEQ ID NO: 63590 - protein, 345 aa, Atopostipes suicloacalis
  misc_feature (1)..(345): tr|A0A1M4XAP1|A0A1M4XAP1_9LACT S-adenosylmethionine:tRN A ribosyltransferase-isomerase OS=Atopostipes suicloaca lis DSM 15692 OX=1121025 GN=queA PE=3 SV=1
MNNFKTDDFDFSLPEELIAQVPLKNRSASRLMVLDHNQQTIEDKTFLDIIDELKPNDALVMNNTRVLPARLFGTKIETGAHLEVLLLKNIEGDRWETLMKPAKKAKIGTTIRFGDGRLTAKVVEELEEGGRILDFSYEGIFLEILEELGEMPLPPYITEKLDEADRYQTVYAKENGSAAAPTAGLHFTDEVLEQLKEKGVKLAFLTLHVGLGTFRPVNAENVEDHKMHSEFYQLSEETANLLNETKANGGRVIAVGTTSIRTLETIANKFDGKLEADSGWTDIFIKPGYTFKFVDAFLTNFHLPKSTLIMLVSAFAGREFVLKAYHHAVDEQYRFFSFGDAMFVQ

SEQ ID NO: 63591 - protein, 384 aa, Aulosira laxa
  misc_feature (1)..(384): tr|A0A1Z4U437|A0A1Z4U437_9CYAN S-adenosylmethionine:tRN A ribosyltransferase-isomerase OS=Aulosira laxa NIES-50 OX=1541988 GN=queA PE=3 SV=1
MEQQLTPAALTPNSNNDVVNTELDRSLSAYDYELPTELIAQNPAIPRDSSRLLVVNSRSIHHIFHDLPHLLKEGDLLVMNNTSVIPARLYGRKATGAEIEVLLLEERQYNCWLALVKPGKRFKVGSKIIFEPRGAFKQGSKGAGGDEKVNSSLSLTATVLETDPATGGRLLQFDVPGGVPLVQLLDVFGEVPLPPYITASEATDEQYQTVYAQHPGAIAAPTAGLHFTPELLEKLRDRGINQAFITLHVGVGTFRPVEVEDVTTHQMHEEWIEVPAATVEQIRATKAAGGRVIAVGTTAVRSLEGAAQSGELQPFCGKTNLFIYPGYQWRVVDGLITNFHLPRSSLLMLVSALIGRERLLNIYQEAIAARYRFYSFGDAMLILP

SEQ ID NO: 63592 - protein, 363 aa, Aurantimonas coralicida
  misc_feature (1)..(363): tr|A0A0P0YZR1|A0A0P0YZR1_9RHIZ S-adenosylmethionine:tRN A ribosyltransferase-isomerase OS=Aurantimonas coralici da OX=182270 GN=queA PE=3 SV=1
MRVDLFDFELPPERIALRPVSPRESARLLCVDPAGGLADQTVGDLPSLLTPGDVLVFNDTKVIPAQLEGLRRRPGSVEGEGVAQISATLHMREAPDRWLAFVRPGKRVKIGDRIAFGHGGNACLAGTLEATVETRGEGGEASLRFDLSGPALDEAIAAVGHIPLPPYIASKRPDDSQDRTDYQTVYAREDGAVAAPTAGLHFTPDLFARLAARDIATEYLTLHVGAGTFLPVKAEDTADHRMHSEIGRVTEESAERLNAARREGRRIVSVGTTSLRLLESAADVEGTIRPFSDPTDIFITPGYRFRAVDRLMTNFHLPRSTLFMLVSAFSGIDTMKSAYAHAIANEYRFYSYGDACLLDRATA

SEQ ID NO: 63593 - protein, 363 aa, Aurantimonas manganoxydans
  misc_feature (1)..(363): tr|Q1YHY4|Q1YHY4_AURMS S-adenosylmethionine:tRNA ribosy ltransferase-isomerase OS=Aurantimonas manganoxydans (s train ATCC BAA-1229 / DSM 21871 / SI85-9A1) OX=287752 G N=queA PE=3 SV=1
MRVDLFDFELPPERIALRPVSPRESARLLCVDPARGLADQTVGDLPSLLTPGDVLVFNDTKVIPAQLEGLRRRPGSVDGEGVAQISATLHMREAPDRWLAFVRPGKRVKVGDRIAFGHGGNACLAGTLEATVETRGEGGEASLRFDLSGPALDEAIAAVGHIPLPPYIASKRPDDSQDRSDYQTVYAREDGAVAAPTAGLHFTPDLFARLAARDIAAEYLTLHVGAGTFLPVKAEDTADHRMHSEIGRVTEESAERLNAARREGRRIVSVGTTSLRLLESAADADGTIRPFSGPTDIFITPGYRFRAVDRLMTNFHLPRSTLFMLVSAFSGIDTMKSAYAHAIGNEYRFYSYGDACLLDRAAA

SEQ ID NO: 63594 - protein, 363 aa, Aurantimonas manganoxydans; identical to SEQ ID NO: 63593
  misc_feature (1)..(363): tr|A0A0P0Z5I7|A0A0P0Z5I7_9RHIZ S-adenosylmethionine:tRN A ribosyltransferase-isomerase OS=Aurantimonas manganox ydans OX=651183 GN=queA PE=3 SV=1

SEQ ID NO: 63595 - protein, 362 aa, Aurantimonas sp.
  misc_feature (1)..(362): tr|A0A1X0SW43|A0A1X0SW43_9RHIZ S-adenosylmethionine:tRN A ribosyltransferase-isomerase OS=Aurantimonas sp. 22II -16-19i OX=1317114 GN=queA PE=3 SV=1
MRVDLFDFELPEERIALRPAVPREAARLLHVGQAGALSDHHVGDLPDLLAPGDVLVFNDTRVIPARLSGVRRREGAAAGEGVARIEATLHMRMAPDRWKAFLRPAKRVKLDDRIVFGAEADAACLLAGLAATVEERGEGGEATLRFELEGPALDEAIAAVGHMPLPPYIASKRAEDAADLADYQTIFARESGAVAAPTAGLHFTPELMARIKARGLLREFLTLHVGAGTFLPVKADDTDEHRMHAEIGVIDEATAARLNAVRQNGGRLVAVGTTSLRLLESATGEDGVIRPFAGPTDIFITPGYRFRAVDRLVTNFHLPRSTLFMLVSAFSGLEAMRAAYAHAVEAGYRFYSYGDACLLERV

SEQ ID NO: 63596 - protein, 363 aa, Aurantimonas sp.
  misc_feature (1)..(363): tr|A0A0Q6EM29|A0A0Q6EM29_9RHIZ S-adenosylmethionine:tRN A ribosyltransferase-isomerase OS=Aurantimonas sp. Leaf 443 OX=1736378 GN=queA PE=3 SV=1
MRVDLFDFDLPEARIALRPAVPREAARLLHVRPGAGLDDRRVGDLPALLRDGDVMVFNDTRVIPAQLEGVRSRAAASGGDGTARISATLHMRIGPDRWKAFLRPAKRVALGDRVRFGARNEACALAGLDAKIVEKGEAGEATLRFDLSGPDLDAAIAGVGHIPLPPYIASKRPDDAQDRTDYQTIFAREDGAVAAPTAGLHFTPDLLSALDARGIVRETVTLHVGAGTFLPVKAEDTAEHVMHEEIGAIDAETAEGLNAARAAGRRIVAVGTTSLRLLESAADESGRIAPFRAPTGIFITPGYRFRAVDALMTNFHLPRSTLFMLVCAFSGLETMRAAYAHAIAEGYRFYSYGDACLLERAPS

SEQ ID NO: 63597 - protein, 335 aa, Aureibacillus halotolerans
  misc_feature (1)..(335): tr|A0A4R6UDB5|A0A4R6UDB5_9BACI S-adenosylmethionine:tRN A ribosyltransferase-isomerase OS=Aureibacillus halotol erans OX=1508390 GN=EV213_101204 PE=3 SV=1
MNAFQKQLIPKDASIPPEKAGKSRSKVRLLHFDSLTKQMKHKQFERLPEVFRKGDVVVLNTSRTIPAVLHTMKGEEIRLSRQCRKGVWDVLFVKPPKRVFHRFPGGLTGKIVGRGSESPLIQMAFSLQGAVFFEHLYRHGDVVRYEHLSHPWSLRYFQTVYANEPGSVEMPSAGRAFTWKLINDLQRKGVKVESICLHAGLSYYGNDSWPSPALHPEPFTVSQKTVETIKHAKENGGRVVAVGTTVVRALESAHSPGGVLQPTKGETALYVTAESALSVVDGLLTGFHEFEASHLDMLTAFVTKEDLEAMYQEALKERYLWHEFGDMNLILPSKA

SEQ ID NO: 63598 - protein, 347 aa, Aureibacillus halotolerans
  misc_feature (1)..(347): tr|A0A4R6TWW0|A0A4R6TWW0_9BACI S-adenosylmethionine:tRN A ribosyltransferase-isomerase OS=Aureibacillus halotol erans OX=1508390 GN=queA PE=3 SV=1
MKVSEFDFHLPERLIAQQPLLDRTGSRLLTVDRETGKTEHRTFVDLLDKVRPGDCLVFNQSKVLPARLIGTKNETGATIELLLLKQTEKTDQWEVLAKPAKRVKPGTILSFGEHELSCTCDEVLEDGKRLVTFSYRGLFLEVLEKLGSMPLPPYIKERLDEPDRYQTVYAKTAGSAAAPTAGLHFTTPFLNQLQDAGVSLAFLTLHVGLGTFRPVSVDEVESHDMHGEFYELDEKTAALLNNTRKAGGRLIAVGTTSARTLETIADESGHFKASSGWTSIFIYPGYEFRGIDGLLTNFHLPKSTLLMLVSAFASKEIILHAYQEAVEQEYRFFSFGDAMLLLRGDNE

SEQ ID NO: 63599 - protein, 349 aa, Aureicoccus marinus
  misc_feature (1)..(349): tr|A0A2S7T716|A0A2S7T716_9FLAO S-adenosylmethionine:tRN A ribosyltransferase-isomerase OS=Aureicoccus marinus O X=754435 GN=queA PE=3 SV=1
MKLSNFNFELPQELLAEYPAENRDESKLMVIHRETGKIEHKMFKDLIDYFDEGDVMCLNNTKVFPARLFGNKEKTGARIEVFLLRELNEEQRLWDVLVDPARKIRIGNKLYFGEDESLVAEVIDNTTSRGRTLRFLYDGSYIDFRRKMRELGETPLPKYIKRDVEPEDEQRYQTIYAKHEGAVAAPTAGLHFSKHLLKRLEIKGIDFAEVTLHVGLGTFNPVEVEDLSKHKMDSEELVIDERATEIVNNAKAQKRKVCAVGTTVMRGLESAVSSERSLNTFEGWTNKFIFPPYEFSIADAMITNFHLPKSTLLMMVSAFMGHDLMKKAYKQAILEGYRFYSYGDAMLIL

SEQ ID NO: 63600 - protein, 349 aa, Aureimonas altamirensis
  misc_feature (1)..(349): tr|A0A1M6JA68|A0A1M6JA68_9RHIZ S-adenosylmethionine:tRN A ribosyltransferase-isomerase OS=Aureimonas altamirens is DSM 21988 OX=1121026 GN=queA PE=3 SV=1
MRVDLFDFDLPEERIALRPALPRESAKLLHVPSHGAFEDRRVGDLPDLLRPGDCLVFNDTRVIPARLAGVRRRGDTMARVEVTLHMRLGADEWRAFVKPAKRIDAGETLEFGDGALTATIADKRDGGEVTLRFDRSGAALDAAIAEVGILPLPPYIAARRAVDAQDSADYQTIYAREEGAVAAPTAGLHFTPELMAHLQERGVETAFVTLHVGAGTFLPVKADDTAQHRMHAEIGEIDATTADRLNAARKEGRRIVAVGTTSLRLLESAADEDGTLHPFRKATDIFITPGYRFRAVDALWTNFHLPRSTLFMLVSAFSGLERMRAAYEHAIAGGYRFYSYGDACLLERA

SEQ ID NO: 63601 - protein, 349 aa, Aureimonas altamirensis
  misc_feature (1)..(349): tr|A0A0B1Q2D6|A0A0B1Q2D6_9RHIZ S-adenosylmethionine:tRN A ribosyltransferase-isomerase OS=Aureimonas altamirens is OX=370622 GN=queA PE=3 SV=1
MRVDLFDFDLPEERIALRPALPRESAKLLHVPSHGDFEDRRVGDLPGLLRPGDCLVFNDTRVIPARLAGIRRRGDTAARVEVTLHMRLGADEWRAFVKPAKRIDAGEMLEFGGGALTATIADKRDGGEVTLRFDKSGAALDAAIAEVGILPLPPYIAARRPVDAQDSADYQTIYAREEGAVAAPTAGLHFTPELMARLREQGVETAFVTLHVGAGTFLPVKADDTAQHRMHAEIGEIDAATADRLNDVRKQGRRIVAVGTTSLRLLESAADEDGTVHPFRKATDIFITPGYRFRAVDALWTNFHLPRSTLFMLVSAFSGLERMRAAYEHAIAGGYRFYSYGDACLLERA

SEQ ID NO: 63602 - protein, 359 aa, Aureimonas flava
  misc_feature (1)..(359): tr|A0A3A1WE37|A0A3A1WE37_9RHIZ S-adenosylmethionine:tRN A ribosyltransferase-isomerase OS=Aureimonas flava OX=2 320271 GN=queA PE=3 SV=1
MQVDLFDFELPEERIALRPALPRESARLLRVAASGPFEDRLVGDLPTVLRDGDVLVFNDTKVIPARMSGERLRQRPDGPSRVGVDATLHMRIAADRWKAFMRPGKRINVGDAVEFVPAVGDGAPLVAQVMEKGEGGEVELLFALGGPALDAAIAAVGRLPLPPYIASKRAVDGADLRDYQTVFAREEGAVAAPTAGLHFTPELMASLSARGIAQEYVTLHVGAGTFLPVKADDTREHRMHSEIGVVTEDVAWRLQAARDAGRRIVAVGTTSLRLLESAARETGHVEPFAAATDIFITPGYEFRAVDALMTNFHLPRSTLFMLVSAFSGLDRMRAAYAHAVRDGYRFYSYGDACLLERTA

SEQ ID NO: 63603 - protein, 348 aa, Aureimonas frigidaquae
  misc_feature (1)..(348): tr|A0A0P0Z491|A0A0P0Z491_9RHIZ S-adenosylmethionine:tRN A ribosyltransferase-isomerase OS=Aureimonas frigidaqua e OX=424757 GN=queA PE=3 SV=1
MRVDLFDFDLPEERIALRPALPRESARLLRVAPAGPFEDRTVADLPALLRPDDCLVFNDTRVIPARLAGLRQRGDTTARVEVTLHMRVAPDRWRAFLKPAKRVAKDETITFGPDLSAHVIDKADGGEVTLAFDRSGPALDTAIATTGFLPLPPYIAARRPVDDQDRQDYQTIYAREDGAVAAPTAGLHFTPELMAALKARGLETLFVTLHVGAGTFLPVKADDTAAHVMHSEIGEIDAGTAERLNAARAAGRRIVAVGTTSLRLLESAADETGRLHPFRAATDIFITPGYRFRAVDALVTNFHLPRSTLFMLVSAFSGLERMRAAYDHAIAGQYRFYSYGDACLLERS

SEQ ID NO: 63604 - protein, 352 aa, Aureimonas jatrophae
  misc_feature (1)..(352): tr|A0A1H0MFE1|A0A1H0MFE1_9RHIZ S-adenosylmethionine:tRN A ribosyltransferase-isomerase OS=Aureimonas jatrophae OX=1166073 GN=queA PE=3 SV=1
MRVDLFDFDLPEERIALRPALPRESAKLLFVPSSGPLADWHVRDLPDLLRPDDVIVLNDTRVIPAQLHGTRRRGDAVAKVDVTLHMRTAPDIWQAFVRPAKKLAIGETVEFGDGQLVAHVGSKGEAGEVELRFDRTGPDLDAAVAVVGVLPLPPYIASRRPVDAADASDYQTSFAREPGAVAAPTAGLHMTHALRDELAGRGIAAEFVTLHVGAGTFLPVKADNTSEHRMHSEIGIVDSDVAARLTAYRRAGRRIVAIGTTSLRLLESAASEDGSIQAFSGATDIFITPGYRFRAVDALLTNFHLPRSTLFMLVSAFRGRDRMQAAYRHAIGAEYRFYSYGDACLLERKDLP

SEQ ID NO: 63605 - protein, 359 aa, Aureimonas phyllosphaerae
  misc_feature (1)..(359): tr|A0A1I2FFM6|A0A1I2FFM6_9RHIZ S-adenosylmethionine:tRN A ribosyltransferase-isomerase OS=Aureimonas phyllospha erae OX=1166078 GN=queA PE=3 SV=1
MQVDLFDFELPEERIALRPALPRESARLLYVPASGPFADCRVGDLPDFLREGDVLVFNDTKVIPAQLTGERIRAGSDGSSRVAVDATLHMRIALDRWKAFMRPGKRIKVGDLVVFSSGTATDPGLEAVVLEKGEGGEVNLRFTLAGPELDAAISVVGHLPLPPYIASKRAVDDDDLRDYQTVFAREEGAVAAPTAGLHFTPELLAELEYRGVMQEFVTLHVGAGTFLPVKADDTTEHRMHSEIGVVTKDVAERLQTARDDGRRIVAVGTTSLRLLESAARATGRIEPFSDATDIFITPGFQFRAVDALMTNFHLPRSTLFMLVSAFSGLDRMRAAYDHAIAGGYRFYSYGDACLLERSA

SEQ ID NO: 63606 - protein, 359 aa, Aureimonas sp.
  misc_feature (1)..(359): tr|A0A0Q5HBE9|A0A0Q5HBE9_9RHIZ S-adenosylmethionine:tRN A ribosyltransferase-isomerase OS=Aureimonas sp. Leaf32 4 OX=1736336 GN=queA PE=3 SV=1
MQVDLFDFELPEERIALRPALPRESAKLLHVSASGHFIDRRVGDLPDLLREGDVLVFNDTKVIPAQLTGERVRIGADGPSRVPVDATLHMRVKLDRWKAFMRPGKRIKVGDRVEFSSQTTANSSLDALVVEKGEGGEVDLRFALAGPELDAAIATVGHLPLPPYIASKRAVDDADLRDYQTVFAREEGAVAAPTAGLHFTPELLAKLDQRGVAQEYVTLHVGAGTFLPVKADDTTEHRMHSEIGVVTVGVADRLQTARDGGRRIVAVGTTSLRLLESAARATGRIESFSGATDIFITPGFKFRAVDALMTNFHLPRSTLFMLVSAFSGLDRMRAAYDHAIDSGYRFYSYGDACLLERSV

SEQ ID NO: 63607 - protein, 360 aa, Aureimonas sp.
  misc_feature (1)..(360): tr|A0A0S2EPX4|A0A0S2EPX4_9RHIZ S-adenosylmethionine:tRN A ribosyltransferase-isomerase OS=Aureimonas sp. AU20 O X=1349819 GN=queA PE=3 SV=1
MRVDLFDFDLPEERIALRPALPRESARLLHVPASGGLGDRRIADLPSLLRAGDVLVFNDTRVIPARLNGERRREGLPAGQGVAQIEATLHMRLDAGRWAAFVRPAKRVSVGDRITFQGADGTTLRSEVEERGDGGETVLRFDSSGPELDAAIASVGHLPLPPYIASKRPEDEQDRADYQTIYAKHDGAVAAPTAGLHFTPELLESLASAGVGFEYVTLHVGAGTFLPVKAEDTLAHRMHHEFGSIDPGTARRLSAARDAGRRIVAVGTTSLRVLESAAESGRIEPFHAATDIFITPGYEFRAVDALLTNFHLPRSTLFMLVSAFSGLDRMRHAYAHAIETGYRFYSYGDACLLERPKAVS

SEQ ID NO: 63608 - protein, 360 aa, Aureimonas ureilytica
  misc_feature (1)..(360): tr|A0A147DBD3|A0A147DBD3_9RHIZ S-adenosylmethionine:tRN A ribosyltransferase-isomerase OS=Aureimonas ureilytica OX=401562 GN=queA PE=3 SV=1
MRVDLFDFDLPEERIALRPALPRESARLLLVPEQGPLSDKRVGDLPGLLRAGDVLVFNDTKVIPARLNGLRRRDGLPEGQGVAEIEATLHLRLDGGRWKAFVRPAKRVAVRDVIRFQGVGQVILSGMVEERGEGGEVTLAFDRSGPDLDAAIAEIGHLPLPPYIASKRGEDEQDRTDYQTIYARHDGAVAAPTAGLHFTPQLMEALRAAGVEFEYVTLHVGAGTFLPVKADDTSAHRMHHEFGSIDIATAERLARAKAEGRRVVAVGTTSLRVLESAAQGGVIAPFHATTDIFITPGYAFRAVDALLTNFHLPRSTLFMLVSAFSGLDRMRDAYRHAIETGYRFYSYGDACLLERSEATS

SEQ ID NO: 63609 - protein, 360 aa, Aureimonas ureilytica
  misc_feature (1)..(360): tr|A0A175R6Y7|A0A175R6Y7_9RHIZ S-adenosylmethionine:tRN A ribosyltransferase-isomerase OS=Aureimonas ureilytica OX=401562 GN=queA PE=3 SV=1
MRVDLFDFDLPEERIALRPALPRESARLLLVPEEGPMSDKRVGDLPGLLRAGDILVFNDTRVIPARLNGLRRRDGLPEGQGVAEIEATLHLRLDGGRWKAFVRPAKRVAVGDVIRFQGVRQVILLAKVEERGEGGEITLAFDRSGPDLDAAIAEIGHLPLPPYIASKRGEDEQDRTDYQTIYARHDGAVAAPTAGLHFTPQLMEALRAAGAQFEYVTLHVGAGTFLPVKADDTSAHRMHHEFGSIDIATAERLARAKADGRRVVAVGTTSLRVLESAAQGGVIAPFHATTDIFITPGYAFRAVDALLTNFHLPRSTLFMLVSAFSGLDRMRDAYRHAIETGYRFYSYGDACLLERSEATS

SEQ ID NO: 63610 - protein, 349 aa, Aureitalea marina
  misc_feature (1)..(349): tr|A0A2S7KTE8|A0A2S7KTE8_9FLAO S-adenosylmethionine:tRN A ribosyltransferase-isomerase OS=Aureitalea marina OX= 930804 GN=queA PE=3 SV=1
MKLSNFNFELPMDLLAEYPATNRDEARLMVLNRAEKTIEHKMFKDLIDYFEEDDVLVLNNTKVFPARLFGNKEKTGARIEVFLLRELNPETRLWDVLVDPARKIRIGNKLYFGEDESLVAEVIDNTTSRGRTLRFLFDGSYEEFRNKLSELGETPLPKYIKREVEPEDAERYQTIFAKEEGAVAAPTAGLHFSKHLMKRLEIKGTRFAEITLHVGLGTFNPVEVEDLSKHKMDSEEITIASDAVHTINQALVQKRRVCAVGTTVMRALESSVSSNSTLNEYQGWTNKFIFPPYDFSIANAMVTNFHTPKSTLLMMVSAFAGHEFIKEAYAEAIKEKYKFYSYGDAMLIL

SEQ ID NO: 63611 - protein, 349 aa, Aureitalea sp.
  misc_feature (1)..(349): tr|A0A2S0I119|A0A2S0I119_9FLAO S-adenosylmethionine:tRN A ribosyltransferase-isomerase OS=Aureitalea sp. RR4-38 OX=2094025 GN=queA PE=3 SV=1
MKLSNFNFNLPAELLAEYPAPNRDEARLMVLNRADHSIEHKMFKDLIDYFEEEDVLVLNNTKVFPARLFGNKEKTGARIEVFLLRELNPETRLWDVLVDPARKIRIGNKLYFGEDESLVAEVIDNTTSRGRTLRFLFDGSYEEFRNKLTELGETPLPKYIKREVEPEDAERYQTIFAKEEGAVAAPTAGLHFSKHLLKRLEIKGVNFAEVTLHVGLGTFSPVEVEDLSKHKMDSEEIIIPQKAVDTINTGIVQKRRICSVGTTVMRALESSVSSNNTLNAYSGWTNKFIFPPYDFSIANSMVTNFHTPKSTLLMMVAAFAGHEFIKEAYAEAIKEKYRFYTYGDAMLII

SEQ ID NO: 63612 - protein, 350 aa, Auricoccus indicus
  misc_feature (1)..(350): tr|A0A1Q1G0W6|A0A1Q1G0W6_9STAP S-adenosylmethionine:tRN A ribosyltransferase-isomerase OS=Auricoccus indicus OX =1849491 GN=queA PE=3 SV=1
MNVEQFDFDLPDDLIAQTPLKERSESRLLTLDYANQRIEHRQFFHIQNYLKAGDALVLNNTKVIPARLFGMKETGAAIEILLLEDISEDTWKALVKPAKRIKIGDKILFGEGVLTAECVAVQDEGIRQLKLQYDGILQNILDKLGTMPLPPYIKETLDDASRYQTVYAKTPGSAAAPTAGLHFTTELLEQLTAQGVDIYYVTLHVGLGTFRPVSVDNVDDHTMHSEYYEIDEVTAKALNDKKRAGKRIISVGTTSTRTLETVYSMYNEFRASSGYTDIFIYPGYEYKAIDGLITNFHLPKSTLMMLVSALAGRELIMKAYSEAIQERYRFFSFGDAMFIYKGEQHGGNNV

SEQ ID NO: 63613 - protein, 363 aa, Avibacterium avium
  misc_feature (1)..(363): tr|A0A379AR92|A0A379AR92_AVIAV S-adenosylmethionine:tRN A ribosyltransferase-isomerase OS=Avibacterium avium OX =751 GN=queA PE=3 SV=1
MRVSDFYFDLPDALIARYPKADRTASRLLQLNGENGELFHRTFADVVDLINEGDLLIFNNIRVIPARMYGRKASGGKIEVLVERILSEDRFLAHIRSSKAPKEGAELFLGEDKLGEGKGIKMIMKARHDTLFELEMAEKSTALLDVLQQIGHMPLPPYIDRPDEDADKERYQTVYNKVPGAVAAPTAGLHFDNELLEKLKAKGVNFAFVTLHVGAGTFQPVRVENIEDHKMHAEYVEVPQETVDAILRTKANGKRVIAVGTTSVRSIESAALFSQENQSGQLLAPYFSDTSIFLYPGKKFLVVDALITNFHLPESTLIMLVSAFAGYKHTMQAYESAVQNGYRFFSYGDAMFITKNPNVTGLD

SEQ ID NO: 63614 - protein, 363 aa, Avibacterium endocarditidis
  misc_feature (1)..(363): tr|A0A2S5AHT1|A0A2S5AHT1_9PAST S-adenosylmethionine:tRN A ribosyltransferase-isomerase OS=Avibacterium endocard itidis OX=380674 GN=queA PE=3 SV=1
MRVSDFYFDLPDALIARYPKADRSASRLLQLNGENGELFHRTFADVVDLINEGDLLIFNNTRVIPARMYGRKASGGKVEVLVERILSEDRFLAHIRSSKAPKEGAELFLGEDKLGEGKGIKMIMKARHDTLFELEMAEKSTALLDVLQQIGHMPLPPYIDRPDEDADKERYQTVYNKVPGAVAAPTAGLHFDNELLEKLKAKGVNFAFVTLHVGAGTFQPVRVENIEDHKMHAEYVEVPQETVDAILRTKANGKRVIAVGTTSVRSIESAALFSQENQSGQLLAPYFSDTSIFLYPGKKFLVVDALITNFHLPESTLIMLVSAFAGYKHTMQAYESAVQNGYRFFSYGDAMFITKNPNVTGLD

SEQ ID NO: 63615 - protein, 363 aa, Avibacterium gallinarum
  misc_feature (1)..(363): tr|A0A379AV76|A0A379AV76_AVIGA S-adenosylmethionine:tRN A ribosyltransferase-isomerase OS=Avibacterium gallinar um OX=755 GN=queA PE=3 SV=1
MRVSDFYFDLPDALIARYPKADRSASRLLQLNGENGELFHRTFADVVDLINEGDLLIFNNTRVIPARMYGRKASGGKIEVLVERILSEDRFLAHIRSSKAPKEGAELFLGEDKLGEGKGIKMIMKARHDTLFELEIAEKSTALLDVLQQIGHMPLPPYIDRPDEDADKERYQTVYNKVPGAVAAPTAGLHFDNELLEKLKAKGVNFAFVTLHVGAGTFQPVRVENIEDHKMHAEYVEVPQETVDAILRTKANGKRVIAVGTTSVRSIESAALFSQENQSGQLLAPYFSDTSIFLYPGKKFLVVDALITNFHLPESTLIMLVSAFAGYKHTMQAYESAVQNGYRFFSYGDAMFITKNPNVTGLD

SEQ ID NO: 63616 - protein, 363 aa, Avibacterium paragallinarum
  misc_feature (1)..(363): tr|A0A380X5D3|A0A380X5D3_AVIPA S-adenosylmethionine:tRN A ribosyltransferase-isomerase OS=Avibacterium paragall inarum OX=728 GN=queA PE=3 SV=1
MRVSDFYFDLPDELIARYPKADRTASRLLQLNGENGEISHRTFADVVDLINEGDLLIFNNTRVIPARMYGRKASGGKIEVLVERILSEDSFLAHIRSSKAPKEGTELFLGEDKLGEGKGIKMIMTARHESLFEVKIAEKNTALLDVLQQIGHMPLPPYIDRPDEEADQERYQTVYNKVPGAVAAPTAGLHFDDVLLAKLKAKGVNFAFVTLHVGAGTFQPVRVENIEDHKMHAEYVEVLQETVDAILHTKAQGKRVIAVGTTSVRSIESAALFAQEHHHSQLLEPYFSDTSIFLYPGKKFLVVDALITNFHLPESTLIMLVSAFAGYSHTMNAYQSAVQNHYRFFSYGDAMFISKNSNVTGLD

SEQ ID NO: 63617 - protein, 363 aa, Avibacterium paragallinarum
  misc_feature (1)..(363): tr|A0A2V4F4F9|A0A2V4F4F9_AVIPA S-adenosylmethionine:tRN A ribosyltransferase-isomerase OS=Avibacterium paragall inarum OX=728 GN=queA PE=3 SV=1
MRVSDFYFDLPDELIARYPKADRTASRLLQLNGENGEISHRTFADVVDLINEGDLLIFNNTRVIPARMYGRKASGGKIEVLVERILSEDSFLAHIRSSKAPKEGTELFLGEDKLGEGKGIKMIMTARHESLFEVKIAEKNTALLDVLQQIGHMPLPPYIDRPDEEADQERYQTVYNKVPGAVAAPTAGLHFDDVLLEKLKAKGVNFAFVTLHVGAGTFQPVRVENIEDHKMHAEYVEVPQETVDAILHTKAQGKRVIAVGTTSVRSIESAALFAQEHHHSQLLEPYFSDTSIFLYPGKKFLVVDALITNFHLPESTLIMLVSAFAGYSHTMNAYQSAVQNHYRFFSYGDAMFISKNSNVTGLD

SEQ ID NO: 63618 - protein, 363 aa, Avibacterium volantium
  misc_feature (1)..(363): tr|A0A447SQY4|A0A447SQY4_AVIVO S-adenosylmethionine:tRN A ribosyltransferase-isomerase OS=Avibacterium volantiu m OX=762 GN=queA PE=3 SV=1
MRVSDFYFDLPDELIARYPKADRTASRLLQLNGENGELFHRTFADVVDLINEGDLLIFNNTRVIPARMYGRKASGGKIEVLVERILSEDRFLAHIRSSKAPKEGAELFLGEDKLGEGKGIKMIMKARHDTLFELEMAEKSTALLDVLQQIGHMPLPPYIDRPDEDADKERYQTVYNKVPGAVAAPTAGLHFDNELLEKLKAKGVNFAFVTLHVGAGTFQPVRVENIEDHKMHAEYVEVPQETVDAILRTKANGKRVIAVGTTSVRSIESAALFSQENQSGQLLAPYFSDTSIFLYPGKKFLVVDALITNFHLPESTLIMLVSAFAGYKHTMQAYESAVQNGYRFFSYGDAMFITKNPNVTGLD

SEQ ID NO: 63619 - protein, 344 aa, Azoarcus communis
  misc_feature (1)..(344): tr|A0A2U8H197|A0A2U8H197_9RHOO S-adenosylmethionine:tRN A ribosyltransferase-isomerase OS=Azoarcus communis OX= 41977 GN=queA PE=3 SV=1
MPLTLNDFDYELPPELIAQAPLAERSASRLLIVGETLDDRQFSDLPDYVRPGDLLVFNDTRVLHARLHGIKASGGQIEVLIERPIGPHEALAQIRSSKSPKPGSTLRLADAFDVTVLGRVGEFFHLRFPEHEDLVQLLERHGKLPLPPYIQRAAGDADESRYQTVYARAPGSVAAPTAGLHFDQSVLDRVAARGASCAWLTLHVGAGTFQPVRVDDLGEHRMHCERYVIPQETVDAIAATRAAGGRVIAVGTTSMRALEAAAQEGPLAAGSGETEIFILPGFRFRVVDALVTNFHLPKSTLLMLVSAFAGMDTMRQAYRHAIAQGYRFFSYGDAMLLTRNDNAV

SEQ ID NO: 63620 - protein, 344 aa, Azoarcus communis
  misc_feature (1)..(344): tr|A0A323V2I1|A0A323V2I1_9RHOO S-adenosylmethionine:tRN A ribosyltransferase-isomerase OS=Azoarcus communis SWu b3 = DSM 12120 OX=1121029 GN=queA PE=3 SV=1
MSLTLDDFDYHLPPELIAQAPLAERSASRLLVVGDKLSDQVFADLPDFVGPKDLLVFNDTRVLHARLHGSKASGGQIEVLIERPVGPHEALAQIRASKSPKPGTTLRLADAFDVTVIGRVGEFFHLRFPTDENLVDLLERHGKLPLPPYIQRAAGNEDENRYQTVFARNPGSVAAPTAGLHFDEATLAAIRARGARCAWLTLHVGAGTFQPVRVDDLGEHRMHRERYVIPQETVDAIAATRAAGGRVIAVGTTSMRALEAAAQDGPLAAGSGETEIFILPGFRFQVVDALVTNFHLPKSTLLMLVSAFAGMQTIRAAYRHAIDQKYRFFSYGDAMLLTRNDHAV

SEQ ID NO: 63621 - protein, 344 aa, Azoarcus indigens
  misc_feature (1)..(344): tr|A0A4R6E114|A0A4R6E114_9RHOO S-adenosylmethionine:tRN A ribosyltransferase-isomerase OS=Azoarcus indigens OX= 29545 GN=queA PE=3 SV=1
MSLTLNDFDYFLPPELIAQAPLPTRSASRLLEVQLENLVDRSFSDLPALVRPGDLFVFNDTRVIHARLHGVKASGGQVEVLIERAVGPHEALAQIRASKSPKAGSRLRLAGAFDVEVLGRSGEFYHLRFPAEQALFDLLERHGSLPLPPYIERKPGEDDEARYQTVFARHPGSVAAPTAGLHFDDAVMAGLKARGADFAWLTLHVGAGTFQPVRVDDLSEHRMHREHYVIPQETADAIARTRAAGGRVIAVGTTSLRALEGAAQGGELRAGAAETEIFILPGFRFQVADALITNFHLPKSTLLMLVSAFAGMAPIRRAYAHAVAQRYRFFSYGDAMFLSRNDEL

SEQ ID NO: 63622 - protein, 345 aa, Azoarcus sp.
  misc_feature (1)..(345): sp|A1K3X0|QUEA_AZOSB S-adenosylmethionine:tRNA ribosylt ransferase-isomerase OS=Azoarcus sp. (strain BH72) OX=6 2928 GN=queA PE=3 SV=1
MTLSLQDFDYDLPPDLIAQAPLAERSASRLLVVDGDVLADRRFVDLPDFIRPGDLLVFNDTRVLHARLFGVKATGGQVEVLVERPIGAHEALAQIRASKSPKPGSTLRLADAVDVTVLGRSGEFFHLRFPDDENVVDVLERYGKLPLPPYIQRAAGDADEARYQTVFARAPGSVAAPTAGLHFDDAVLDRLRARGAGCAWVTLHVGAGTFQPVRVDDLAQHRMHSERYVIPQETVEAIARTRANGGRVVAVGTTSMRALEAAAQAGPLAAGSGETDIFILPGFRFRVADMLVTNFHLPKSTLLMLVSAFSGTDVIRRAYAHAVASRYRFFSYGDAMLLTRNDHAI

SEQ ID NO: 63623 - protein, 344 aa, Azoarcus sp.
  misc_feature (1)..(344): tr|A0A558DI28|A0A558DI28_9RHOO S-adenosylmethionine:tRN A ribosyltransferase-isomerase OS=Azoarcus sp. PHD OX=1 628740 GN=queA PE=3 SV=1
MPLTLNDFDYELPPELIAQAPLAERSASRLLIVGEDLDDRQFSDLPDYIRPGDLLVFNDTRVLHARLHGTKTSGGQIEVLIERPVGPHEALAQIRASKSPKPGSTLRLADAFDVTVLGRVGEFFHLRFPDDEDLVQLLERHGKLPLPPYIQRAAGDADESRYQTVYARSPGSVAAPTAGLHFDESVLKRVAERGAKCAWLTLHVGAGTFQPVRVDDLGEHRMHCERYVIPQETVDAIAATRAAGGRVIAVGTTSMRALEAAAQEGPLAAGSGETEIFILPGFRFRVVDALVTNFHLPKSTLLMLVSAFAGMDTMRQAYRHAIAQRYRFFSYGDAMLLTRNDNAV

SEQ ID NO: 63624 - protein, 345 aa, Azoarcus tolulyticus
  misc_feature (1)..(345): tr|A0A1N6V0B7|A0A1N6V0B7_9RHOO S-adenosylmethionine:tRN A ribosyltransferase-isomerase OS=Azoarcus tolulyticus OX=34027 GN=queA PE=3 SV=1
MSLTLDDFDYLLPPEQIAQAPLAERCASRLLVLAGGELADRGFCDLPSLVEPGDLLVFNDTRVIHARLYGTKETGGQVEVLIERAIGPHEALAQVRASKSPRAGARLRLADAFDVTVLGRAGEFFHLRFPEDEDLHALLERHGKLPLPPYIDRAADDHDESRYQTVYAREPGSVAAPTAGLHFDQQMLADLARQGVNGAWVTLHVGAGTFQPVRVNDLGEHHMHRERYVIPQETVDAIARTKAAGKRVIAVGTTSLRALEGAAQDGELGAGVGETELFILPGYRFRVADALITNFHLPKSTLLMLVSAFAGMEPIRRAYAHAVREGYRFFSYGDAMFITRRNDAI

SEQ ID NO: 63625 - protein, 354 aa, Azobacteroides pseudotrichonymphae
  misc_feature (1)..(354): sp|B6YR69|QUEA_AZOPC S-adenosylmethionine:tRNA ribosylt ransferase-isomerase OS=Azobacteroides pseudotrichonymp hae genomovar. CFP2 OX=511995 GN=queA PE=3 SV=1
MRLSKFKFHLPQELIALFPSVDRDESRLMVVYHKTGRVEHVIFKDIIQYFNEKDTFIFNDTSVIPARLNGNKEKTGARVEVFLLRELDPIQRIWDVLVDPARKIRIGNKLYFENEDSDTIVAEIIDNTTSRGRIIRFLYDGPYESFKKILYNLGNMPIPDYLDRKVTKEDRERYQTIYAKNEGAVVAPAAGLHFSHELMKRLELKGCELTFITVHSGMGNFRAIDVEDLFKYKSESERIVINTETATKINQAKQNRKQICAVGTSVLRTIEDRENVVTSQGYLNPFTGWTNKFIFPPYNFITSTSLITGFHLPLSSMLLQVAAFGGFDLIMDVYKQAIEAKYRFGVYGDAMLII

SEQ ID NO: 63626 - protein, 349 aa, Azomonas agilis
  misc_feature (1)..(349): tr|A0A562J007|A0A562J007_9GAMM S-adenosylmethionine:tRN A ribosyltransferase-isomerase OS=Azomonas agilis OX=11 6849 GN=queA PE=3 SV=1
MRVADFSFDLPESLIARYPLSERRASRLLVLDGVTGALEHHQFVDVLDYVQPGDLMVFNDTRVIPARLFGQKATGGKLEILIERVLDEQRALAHVRSSKSPKPGSRLLLDGCAEAEVLSRQEALFELRFNEPLLPLLDRIGHMPLPPYMERLDEDSDRERYQTVYARHAGAVAAPTAGLHFDPSLLESLMTKGVETAFVTLHVGAGTFQPVRVERLEEHLMHTEWLNVSAEVVEAVKACKARGGRVIAVGTTSVRSLESAARDGELKPFTGNTDIFLYPGKPFHVVDVLITNFHLPESTLIMLVSAFAGYSETLKAYAEAIAQGYRFYSYGDAMLVLRNPNARGPEDHS

SEQ ID NO: 63627 - protein, 347 aa, Azonexus fungiphilus
  misc_feature (1)..(347): tr|A0A495VNJ5|A0A495VNJ5_9RHOO S-adenosylmethionine:tRN A ribosyltransferase-isomerase OS=Azonexus fungiphilus OX=146940 GN=queA PE=3 SV=1
MSLTVDDFDFPLPPELIAQHPAAERSGSRLLHLCGQRPVDRKFAELPTLLAPGDLLVFNDTKVIKARFFGVKETGGQVEIMLERIVDARHAICQIRASKAPKTGCLLRLADAFTVRMSGRAGTDGDFFALELVDRDDFWELAETYGKLPLPPYIAHPAEGADEARYQTVYAREPGAVAAPTAGLHFDEAMLDTLRAQGVGTAFVTLHVGAGTYRPVRVDKIADHRMHSERYEVPAATAAAIAATRAAGGRIVAVGTTSLRTLESAAADDGSVNTGSGETDIFITPGYRFKVVDRLITNFHLPKSTLMMLVSAFAGYDAIRAAYAHAVAGRYRFFSYGDAMLLERTQP

SEQ ID NO: 63628 - protein, 348 aa, Azonexus hydrophilus
  misc_feature (1)..(348): tr|A0A1R1HZX8|A0A1R1HZX8_9RHOO S-adenosylmethionine:tRN A ribosyltransferase-isomerase OS=Azonexus hydrophilus OX=418702 GN=queA PE=3 SV=1
MSLTVDDFDFPLPPELIAQHPAPERRGSRLLHICGQQHVDRKFADLPTLLRAGDLLVFNDTRVIKARFFGVKETGGQVEIMLERIVDATHAICQIRASKAPKTGCLLRLADAFTVRMTGRAGADGDFFALELVDRNNFWEVSEQYGKLPLPPYIEHPAEGADETRYQTVYAREPGAVAAPTAGLHFDEAMLATLRNQGVGTAFVTLHVGAGTYRPVRVEKIADHRMHSERYVVPPETAAAIAATRAAGGRVIAVGTTSLRTLESAGNDDGSISAGSSETDIFITPGYRFKVVDRLITNFHLPKSTLMMLVSAFAGYDAIRAAYAHAVAERYRFFSYGDAMLLEKSDAV

SEQ ID NO: 63629 - protein, 354 aa, Azorhizobium caulinodans
  misc_feature (1)..(354): sp|A8I5Q2|QUEA_AZOC5 S-adenosylmethionine:tRNA ribosylt ransferase-isomerase OS=Azorhizobium caulinodans (strai n ATCC 43989 / DSM 5975 / JCM 20966 / NBRC 14845 / NCIM B 13405 / ORS 571) OX=438753 GN=queA PE=3 SV=1
MRVDAFDFDLPPERIALRPAEPRESARLLRVRPGAAPELEDRTIADLPDLLQPGDALVVNDTKVIPARLDGTRTRAGGSTVAIEATLIRRLSGSAWAAFAKPAKRLAVGETVVFAGASGGTLEARVLDKLESGEVHFAFALSGPELDAAIDAIGHMPLPPYIAAKRPEDDRDRTDYQPVFARVEGSVAAPTASLHFTPDLLAKIAARGVSRYTVTLHVGAGTFLPVKAEDTTDHQMHAEWGEVSPETAAELNAVKARGGRIITVGSTATRLIETAATPEGSIRPYLGETDIFITPGYAFRASDVMLTNFHLPRSTLVMLVAAFVGHETQKRAYAHAIASGYRFYSYGDACLLER

SEQ ID NO: 63630 - protein, 355 aa, Azorhizobium sp.
  misc_feature (1)..(355): tr|A0A258K2K8|A0A258K2K8_9RHIZ S-adenosylmethionine:tRN A ribosyltransferase-isomerase OS=Azorhizobium sp. 35-6 7-5 OX=1970321 GN=queA PE=3 SV=1
MRVDAFDFHLPPERIALRPAEPREAARLLVVHPDATVQDATIADLPRFLRPGDAVVVNDTKVIPARLDGTRTRPQGTTVTIEANLVKRLSEARWLALCRPAKRLAPGDEVIFRKGEATLSAQVLAKADSGEVEFAFALSGPELDGAIDTVGHMPLPPYIAARRPEDEQDQTDYQPIFARNEGSIAAPTASLHFTPALMAQVKAAGVSVHTVTLHVGLGTFLPVKAEDTADHRMHAEWGEVSPETAEALTAVKAKGGRILAVGSTATRLLESAAASGKIAPFRGDTDIFITPGYAFRAVDLMMTNFHLPKSTLVMLVAAFVGHEAQKRAYAHAIETGYRFYSYGDASLLFRAEAQP

SEQ ID NO: 63631 - protein, 355 aa, Azorhizobium sp.
  misc_feature (1)..(355): tr|A0A258JYG2|A0A258JYG2_9RHIZ S-adenosylmethionine:tRN A ribosyltransferase-isomerase OS=Azorhizobium sp. 32-6 7-21 OX=1970319 GN=queA PE=3 SV=1
MRVDAFDFHLPPERIALRPAEPREAARLLVVHPDATVQDATIADLPRFLRPGDAVVVNDTKVIPARLDGTRTRPQGTTVTIEANLVKRLSEARWLALCRPAKRLAPGDEVIFRKGEATLSAQVLAKADSGEVEFAFALSGPELDGAIDTVGHMPLPPYIAARRPEDEQDRTDYQPIFARNEGSIAAPTASLHFTPALMAQVKAAGVSVHTVTLHVGLGTFLPVKAEDTADHRMHAEWGEVSPETAEALTAVKAKGGRILAVGSTATRLLESAAASGKIAPFRGDTDIFITPGYAFRAVDLMMTNFHLPKSTLVMLVAAFVGHEAQKRAYAHAIETGYRFYSYGDASLLFRAEAQP

SEQ ID NO: 63632 - protein, 345 aa, Azospira oryzae
  misc_feature (1)..(345): tr|G8QJX3|G8QJX3_AZOOP S-adenosylmethionine:tRNA ribosy ltransferase-isomerase OS=Azospira oryzae (strain ATCC BAA-33 / DSM 13638 / PS) OX=640081 GN=queA PE=3 SV=1
MSLSVDLFDFPLPPELIAQHPARERCASRLLHVDGPHLADLRFTDLPGLLAPGDLLVFNDTRVIKARFFGQKDSGGQVEVLLERIVDERHALAQVRASKSPKAGTRITLENAFSLLCSGRQGEFFALELEGEGNLWDLAEQYGRLPLPPYIEHGVEAEDEARYQTVYARHPGAVAAPTAGLHFDEAMLERLSEQGVRRAALTLHVGAGTFQPVRVEKIDEHKMHSERFHVPEETAAAIAATRERGGRVVAVGTTSLRTLESAACGNGLVRAGSGETDIFITPGYRFQVVDRLITNFHLPRSTLLMLVSAFAGLDPIRAAYAHAVAEKYRFFSYGDAMLLEREDKS

SEQ ID NO: 63633 - protein, 107 aa, Azospira oryzae
  misc_feature (1)..(107): tr|A0A2W5HAN0|A0A2W5HAN0_9RHOO S-adenosylmethionine:tRN A ribosyltransferase-isomerase (Fragment) OS=Azospira o ryzae OX=146939 GN=DI596_14225 PE=3 SV=1
MRLSDFDFHLPPELIAQAPAPHRSASRLLHLDGVTGAVEDLWFRDLPRLVRPGDLLVFNDTRVIKARLRGRKKSGGQVEVLVERVLGTHEALAQVRASKSQREGDAL

SEQ ID NO: 63634 - protein, 344 aa, Azospira sp.
  misc_feature (1)..(344): tr|A0A2R5E5S7|A0A2R5E5S7_9RHOO S-adenosylmethionine:tRN A ribosyltransferase-isomerase OS=Azospira sp. I13 OX=1 765050 GN=queA PE=3 SV=1
MSLTVDQFDFLLPPELIAQHPASERTASRLLHVDGPRLTDRRFTDLPGLLQPGDLLVFNDTRVIKARFFGQKESGGQIEVLLERIVDERHALAQVRASKSPKPGTRLILEEAFTLVCTGRHNEFFALEVEGDGNLWDLAERHGRLPLPPYIEHGAEAEDESRYQTVYAKNPGAVAAPTAGLHFDETLLATLAAQEVRQAAVTLHVGAGTYQPVRVDLVADHKMHSERYEVPQATADAIRETRERGGKVVAVGTTSLRTLESAACGDGLVRVGAGETDIFITPGYRFQVVDRLVTNFHLPRSTLLMLVSAFAGMDAIRAAYAHAVAEKYRFFSYGDAMLLEREEH

SEQ ID NO: 63635 - protein, 339 aa, Azospirillum brasilense
  misc_feature (1)..(339): tr|A0A060DM95|A0A060DM95_AZOBR S-adenosylmethionine:tRN A ribosyltransferase-isomerase OS=Azospirillum brasilen se OX=192 GN=queA PE=3 SV=1
MKTADFDFDLPPDRIAEHPAKPRDAARLLDVAERLHDRTVRDLPALLEPGDLMVVNDTRVIPARLDGRRGEVRVEITLHKREGEREWATFARPGKRLKPGDVIAIADDFAAEVVAKDGMEVRLRFSKGGPALMEALHRHGRMPLPPYIRREADEQDAADYQTVFAAREGAVAAPTAGLHFTPELLAALDARGIRRVPVTLHVGAGTFLPVKVDDIAEHRMHSEWGEISAETAEAINVTRAAGGRIVSVGTTALRILETAGLDDRSIRAFSGDTDIFITPGYRFKIVDLLVTNFHLPRSTLFMLVCAFAGMDTMKAAYAHAIGQNYRFFSYGDASLLRRV

SEQ ID NO: 63636 - protein, 339 aa, Azospirillum brasilense
  misc_feature (1)..(339): tr|G8AKA1|G8AKA1_AZOBR S-adenosylmethionine:tRNA ribosy ltransferase-isomerase OS=Azospirillum brasilense Sp245 OX=1064539 GN=queA PE=3 SV=1
MKTADFDFDLPPDRIAEHPAKPRDAARLLDVAERLHDRTVRDLPALLEPGDLMVVNDTRVIPARLDGRRGEVRVEITLHKREGEREWATFARPGKRLKPGDVIAIADDFAAEVVAKDGMEVRLRFSKGGPELMEALHRHGRMPLPPYIRREADEQDAADYQTVFAAREGAVAAPTAGLHFTPELLAALDARGIRRVPVTLHVGAGTFLPVKVDDIAEHRMHSEWGEISAETAEAINATRAAGGRIVSVGTTALRILETAGLDDRSIRAFSGDTDIFITPGYRFKIVDLLVTNFHLPRSTLFMLVCAFAGMDTMKAAYAHAIGQNYRFFSYGDASLLRRV

SEQ ID NO: 63637 - protein, 342 aa, Azospirillum doebereinerae
  misc_feature (1)..(342): tr|A0A433J532|A0A433J532_9PROT S-adenosylmethionine:tRN A ribosyltransferase-isomerase OS=Azospirillum doeberei nerae OX=92933 GN=queA PE=3 SV=1
MKTADFDFDLPPDRIAEHPVRPRDAARLLEVGDRLHDRVVRDLPTLLQPGDLMVVNDTRVIPARLDGRRGEVAVEITLHKRLGEREWASFARPGKRLKPGDTIVIAGDFAAEVVAKDGMEVRLRFSVSGPDLMEALHRHGRMPLPPYIRRQSDESDDADYQTVFAAREGAVAAPTAGLHFTPDLLAALDSRGVRRVPVTLHVGAGTFLPVKVDDIADHKMHSEWGEISAETAEAVNAARAAGGRIVSVGTTALRILETAGRADGTLAPFSGDTSIFITPGYRFHIVDLLWTNFHLPKSTLFMLVSAFAGMERMRAAYAHAIDRNYRFFSYGDASLLHRTDPT

SEQ ID NO: 63638 - protein, 342 aa, Azospirillum humicireducens
  misc_feature (1)..(342): tr|A0A160JG75|A0A160JG75_9PROT S-adenosylmethionine:tRN A ribosyltransferase-isomerase OS=Azospirillum humicire ducens OX=1226968 GN=queA PE=3 SV=1
MKTADFDFDLPPDRIAEHPVRPRDAARLLEVGSTLRDLIVRDLPALLQPGDLMVVNDTRVIPARLDGRRGEVAVEITLHKRLGEREWATFSKPGKRLKPGDTIDIADGFSAEVIAKDGMEVRLRFSASGAELMEALHRHGRMPLPPYIRRKADEGDNADYQTVFAAREGAVAAPTAGLHFTPDLLAALDARGVRRVPVTLHVGAGTFLPVKVDDIADHKMHSEWGEICPETAAAVNETRKAGGRIVSVGTTALRILETAGQPDGTLVPFSGDTDIFITPGYRFRIVDLLWTNFHLPKSTLFMLVCAFAGYDRMRAAYGHAIDRNYRFFSYGDASLLHRTDPS

SEQ ID NO: 63639 - protein, 342 aa, Azospirillum lipoferum
  misc_feature (1)..(342): tr|A0A1X7Q5R6|A0A1X7Q5R6_AZOLI S-adenosylmethionine:tRN A ribosyltransferase-isomerase OS=Azospirillum lipoferu m OX=193 GN=queA PE=3 SV=1
MKTADFDFDLPPDRIAEHPVRPRDAARLLEVGDRLHDRVVRDLPALLQPGDLMVVNDTRVIPARLDGRRGEVAVEITLHKRLGEREWASFARPGKRLKPGDVIVIAEDFSAEVIAKDGMEVRLRFSAGGPDLMEALHRHGRMPLPPYIRRKSGADDDADYQTVFAAREGAVAAPTAGLHFTPELLAALDARGVRRVPVTLHVGAGTFLPVKVDDIAEHRMHSEWGEISPETAEAVNAARRDGGRIVSVGTTALRILETAGREDGTLAPFSGDTSIFITPGYRFRIVDLLWTNFHLPKSTLFMLVCAFAGFDRMKAAYAHAIAAEYRFFSYGDASLLHRTDPT

SEQ ID NO: 63640 - protein, 347 aa, Azospirillum lipoferum
  misc_feature (1)..(347): tr|G7Z200|G7Z200_AZOL4 S-adenosylmethionine:tRNA ribosy ltransferase-isomerase OS=Azospirillum lipoferum (strai n 4B) OX=862719 GN=queA PE=3 SV=1
MKTADFDFDLPPDRIAEHPVRPRDAARLLEVGSTLRDLPLRDLIVRDLPALLQPGDLMVVNDTRVIPARLDGRRGEVAVEITLHKRLGEREWATFSKPGKRLKPGDTIDIADGFSAEVIAKDGMEVRLRFSAGGAELMEALHRHGRMPLPPYIRRKADEGDNADYQTVFAAREGAVAAPTAGLHFTPELLAALDARGVRRVPVTLHVGAGTFLPVKVDDIADHKMHSEWGEISPETAAAVNETRKAGGRIVSVGTTALRILETAGQPDGTLVPFSGDTDIFITPGYRFRIVDLLWTNFHLPKSTLFMLVCAFAGYDRMRAAYQHAIDTNYRFFSYGDASLLHRTDPS

SEQ ID NO: 63641 - protein, 342 aa, Azospirillum oryzae
  misc_feature (1)..(342): tr|A0A1X7H732|A0A1X7H732_9PROT S-adenosylmethionine:tRN A ribosyltransferase-isomerase OS=Azospirillum oryzae O X=286727 GN=queA PE=3 SV=1
MKTADFDFDLPPDRIAEHPVRPRDAARLLEVGPTLRDFIVRDLPTLLQPGDLMVVNDTRVIPARLDGRRGEVAVEITLHKRLGEREWATFSKPGKRLKPGDTIVIAEDFSAEVIAKDGMEVRLRFSAGGAELMEALHRHGRMPLPPYIRRKSDEGDNADYQTVFAAREGAVAAPTAGLHFTPELLAALEARGVRRVPVTLHVGAGTFLPVKVDDIADHKMHSEWGEISPETAAAVNETRKAGGRIVSVGTTALRILETAGREDGTLVPFSGDTDIFITPGYRFRIVDLLWTNFHLPKSTLFMLVCAFAGYDRMRAAYGHAIDRNYRFFSYGDASLLHRTDPS

SEQ ID NO: 63642 - protein, 342 aa, Azospirillum oryzae
  misc_feature (1)..(342): tr|A0A5A9G8Z9|A0A5A9G8Z9_9PROT S-adenosylmethionine:tRN A ribosyltransferase-isomerase OS=Azospirillum oryzae O X=286727 GN=queA PE=3 SV=1
MKTADFDFDLPPDRIAEHPVRPRDAARLLEVGPTLRDFIVRDLPSLLQPGDLMVVNDTRVIPARLDGRRGEVAVEITLHKRLGEQEWATFSKPGKRLKPGDTIVIAEDFSAEVIAKDGMEVRLRFSAGGANLMEALHRHGRMPLPPYIRRKADEGDNADYQTVFAAREGAVAAPTAGLHFTPELLAALDEGGVRRVPVTLHVGAGTFLPVKVDEIADHKMHSEWGEISADTAAAVNETRKAGGRIVSVGTTALRILETAGRPDGTLIPFSGDTDIFITPGYRFRIVDLLWTNFHLPKSTLFMLVCAFAGYDRMRAAYQHAIDRNYRFFSYGDASLLHRTDPS

SEQ ID NO: 63643 - protein, 342 aa, Azospirillum palustre
  misc_feature (1)..(342): tr|A0A2B8B7U2|A0A2B8B7U2_9PROT S-adenosylmethionine:tRN A ribosyltransferase-isomerase OS=Azospirillum palustre OX=2044885 GN=queA PE=3 SV=1
MKTADFDFDLPPDRIAEHPVRPRDAARLLEVGSTLRDFIVRDLPTLVQPGDLMVVNDTRVIPARLDGRRGEVAVEITLHKRLGEREWATFSKPGKRLKPGDTIVIADDFSAEVIAKDGMEVRLRFSAGGAELMEALHRHGRMPLPPYIRRKADEGDNADYQTVFAAREGAVAAPTAGLHFTPELLAALDERGVRRAPVTLHVGAGTFLPVKVDDIADHKMHSEWGEISAETAAAVNETRKAGGRIVSVGTTALRILETAGRPDGTLVPFSGDTDIFITPGYRFRIVDLLWTNFHLPKSTLFMLVCAFAGYDRMRAAYRHAIDTDYRFFSYGDASLLHRTDPT

SEQ ID NO: 63644 - protein, 342 aa, Azospirillum sp.
  misc_feature (1)..(342): tr|A0A4P7Z615|A0A4P7Z615_9PROT S-adenosylmethionine:tRN A ribosyltransferase-isomerase OS=Azospirillum sp. TSA2 s OX=709810 GN=queA PE=3 SV=1
MKTADFDFDLPPDRIAEHPVRPRDAARLLEVGSTLRDFIVRDLPTLLQPGDLMVVNDTRVIPARLDGRRGEVAVEITLHKRLGEREWATFSKPGKRLKPGDTIVIAEDFSAEVIAKDGMEVRLRFSAGGAELMEALHRHGRMPLPPYIRRKADEGDNADYQTVFAAREGAVAAPTAGLHFTPELLAALDARGVRRVPVTLHVGAGTFLPVKVDDIADHKMHSEWGEISHETAAAVNETRKAGGRIVSVGTTALRILETAGREDGTLVPFSGDTDIFITPGYRFRIVDLLWTNFHLPKSTLFMLVCAFGGYDRMRAAYSHAIDTNYRFFSYGDASLLHRTDPS

SEQ ID NO: 63645 - protein, 342 aa, Azospirillum sp.
  misc_feature (1)..(342): tr|A0A2U1XAK4|A0A2U1XAK4_9PROT S-adenosylmethionine:tRN A ribosyltransferase-isomerase OS=Azospirillum sp. TSH2 0 OX=652754 GN=queA PE=3 SV=1
MKTADFDFDLPPDRIAEHPVRPRDAARLLEVGPTLRDLIVRDLPMLLQPGDLMVVNDTRVIPARLDGRRGEVAVEITLHKRLGEREWATFSKPGKRLKPGDTIVIAEDFSAEVIAKDGMEVRLRFSAGGAELMEALHRHGRMPLPPYIRRKADEGDNADYQTVFAAREGAVAAPTAGLHFTPELLAALDARGVRRVPVTLHVGAGTFLPVKVDDIADHKMHSEWGEISPETAAAVNETRKAGGRIVSVGTTALRILETAGQPDGTLVPFSGDTDIFITPGYRFRIVDLLWTNFHLPKSTLFMLVCAFAGYDRMRAAYSHAIDTNYRFFSYGDASLLHRTDPS

SEQ ID NO: 63646 - protein, 352 aa, Azospirillum thiophilum
  misc_feature (1)..(352): tr|A0A0F2KXH7|A0A0F2KXH7_9PROT S-adenosylmethionine:tRN A ribosyltransferase-isomerase OS=Azospirillum thiophil um OX=528244 GN=queA PE=3 SV=1
MKTADFDFDLPPDRIAEHPVRPRDAARLLEVGSTLRDLPLRDLPLRDLIVRDLPALLQPGDLMVVNDTRVIPARLDGRRGEVAVEITLHKRLGERDWATFSKPGKRLKPGDVIRIAEDFSAEVVAKDGMEVRLRFSAGGAELMEALHRHGRMPLPPYIRRKADKGDDADYQTVFAAREGAVAAPTAGLHFTADLLAALDARGVRRVPVTLHVGAGTFLPVKVDDIADHKMHSEWGEISPDTAAAVNETRAAGGRIVSVGTTALRILETAGRPDGTLVPFSGDTGIFITPGYRFRIVDLLWTNFHLPKSTLFMLVCAFAGYDRMRAAYAHAIDQNYRFFSYGDASLLHRTDPS

SEQ ID NO: 63647 - protein, 349 aa, Azotobacter beijerinckii
  misc_feature (1)..(349): tr|A0A1I4C3V8|A0A1I4C3V8_9GAMM S-adenosylmethionine:tRN A ribosyltransferase-isomerase OS=Azotobacter beijerinc kii OX=170623 GN=queA PE=3 SV=1
MRVADFHFELPESLIARHPLAERRASRLLVLDGASGGLEHRRFADLLDYLRAGDLMVFNDTRVIPARLFGQKASGGRLEILVERVLDDDRVLAHVRASKSPKPGSKILIEGGGEAQMLARHDALFELRFDQSVLPLLERVGHMPLPPYIDRPDEAADRERYQTVYADRAGAVAAPTAGLHFDEALLAAIREKGVDTAFVTLHVGAGTFQPVRVERIEDHHMHREWLEVGPDVVDAVAACRARGGRVIAVGTTSVRSLESAARDGVLKPFSGDTDIFIYPGRPFHVIDALVTNFHLPESTLLMLVSAFAGYPETMAAYAVAVEQGYRFFSYGDAMFITRNPAPRGPEETP

SEQ ID NO: 63648 - protein, 349 aa, Azotobacter beijerinckii
  misc_feature (1)..(349): tr|A0A1H6ZRN7|A0A1H6ZRN7_9GAMM S-adenosylmethionine:tRN A ribosyltransferase-isomerase OS=Azotobacter beijerinc kii OX=170623 GN=queA PE=3 SV=1
MRVADFHFELPESLIARHPLAERRASRLLVIDGTSGGLEHRRFADLLDYLRAGDLMVFNDTRVIPARLFGQKASGGRLEILVERVLDDDRVLAHVRASKSPKPGSKILIEGGGEALMLARHDALFELRFDQSVLPLLERVGHMPLPPYIDRPDEAADRERYQTVYADRAGAVAAPTAGLHFDEGLLAAIREKGVDIAFVTLHVGAGTFQPVRVERIEDHHMHREWLEVGPDVVDAVAACRARGGRVIAVGTTSVRSLESAARDGVLKPFSGDTDIFIYPGRPFHVVDALVTNFHLPESTLLMLVSAFAGYPETMAAYAAAVEQGYRFFSYGDAMFITRNPAPRGPEETP

SEQ ID NO: 63649 - protein, 349 aa, Azotobacter chroococcum
  misc_feature (1)..(349): tr|A0A0C4WMI8|A0A0C4WMI8_9GAMM S-adenosylmethionine:tRN A ribosyltransferase-isomerase OS=Azotobacter chroococc um NCIMB 8003 OX=1328314 GN=queA PE=3 SV=1
MRVADFHFDLPESLIARHPLAERRASRLLVLDGATGSLQHRRFADLLDYLRPGDLMVFNNTRVIPARLFGQKASGGKLEILVERVLDDDRVLAHVRASKSPKPGSKVLIEGGGEAQMLARHDALFELRFDQSVLPLLERVGHMPLPPYIDRPDEAADRERYQTVYADRAGAVAAPTAGLHFDEGLLAAIREKGVDTAFVTLHVGAGTFQPVRVERIEDHHMHREWLEVGQDVVDAVAACRARGGRVIAVGTTSVRSLESAARDGELKPFSGDTDIFIYPGRPFHVVDALVTNFHLPESTLLMLVSAFAGYPETMAAYAAAVEQGYRFFSYGDAMFITRNPAPRGPEETP

SEQ ID NO: 63650 - protein, 349 aa, Azotobacter chroococcum; identical to SEQ ID NO: 63649
  misc_feature (1)..(349): tr|A0A4U1KU18|A0A4U1KU18_9GAMM S-adenosylmethionine:tRN A ribosyltransferase-isomerase OS=Azotobacter chroococc um OX=353 GN=queA PE=3 SV=1

SEQ ID NO: 63651 - protein, 349 aa, Azotobacter vinelandii
  misc_feature (1)..(349): sp|C1DE77|QUEA_AZOVD S-adenosylmethionine:tRNA ribosylt ransferase-isomerase OS=Azotobacter vinelandii (strain DJ / ATCC BAA-1303) OX=322710 GN=queA PE=3 SV=1
MRVADFHFELPESLIARHPLAERRASRLLVLDGVTGDLQHRRFADLLDHLRPGDLMVFNNTRVIPARLFGWKASGGKLEILVERVLDDERVLAHVRASKSPKAGSRILIEGGGEAQMLARHDALFELRFDQRVLPLLERVGHMPLPPYIDRPDEAADRERYQTVYAARAGAVAAPTAGLHFDEALLAAIGEKDVATAFVTLHVGAGTFQPVRVERIEDHHMHREWLEVGQEVVDAVAACRARGGRVVAVGTTSVRSLESAARDGVLRPFSGDTDIFIYPGRPFHVVDALVTNFHLPESTLLMLVSAFAGYPETMAAYAAAVAQGYRFFSYGDAMFITRNPAPRAPEETP

SEQ ID NO: 63652 - protein, 349 aa, Azotobacter vinelandii; identical to SEQ ID NO: 63651
  misc_feature (1)..(349): tr|M9YDR3|M9YDR3_AZOVI S-adenosylmethionine:tRNA ribosy ltransferase-isomerase OS=Azotobacter vinelandii CA6 OX =1283331 GN=queA PE=3 SV=1

SEQ ID NO: 63653 - protein, 342 aa, Bacillaceae bacterium; identical to SEQ ID NO: 62916
  misc_feature (1)..(342): tr|A0A3E0JTS0|A0A3E0JTS0_9BACI S-adenosylmethionine:tRN A ribosyltransferase-isomerase OS=Bacillaceae bacterium OX=1889774 GN=queA PE=3 SV=1

SEQ ID NO: 63654 - protein, 342 aa, Bacillaceae bacterium
  misc_feature (1)..(342): tr|A0A271M7S7|A0A271M7S7_9BACI S-adenosylmethionine:tRN A ribosyltransferase-isomerase OS=Bacillaceae bacterium SAOS 7 OX=2015052 GN=queA PE=3 SV=1
MKVEDFDFYLPEELIAQTPLKERAESRLMVLNKETGDIQHQVFKQITDFLEPGDCLVLNDTRVLPARLYGVKAETGAKIEVLLLKQEEGDRWETLVKPAKRIKEGSVISFGDGRLTATCVAEKDHGGRILEFSYEGIFYEVLEELGEMPLPPYIKEQLDEQERYQTVFAKERGSAAAPTAGLHFTEELLDDIRAKGVYITFITLHVGLGTFRPVSVDAIEDHEMHSEFYQVSEETARLIEDAKAKGGRIISVGTTSTRTLETVARDHGGKIEAASGWTDIFIYPGFQFQAIDGMITNFHLPMSTLIMLVSALAGKEHVMKAYEEAVAKEYRFFSFGDAMLIK

SEQ ID NO: 63655 - protein, 343 aa, Bacilli bacterium
  misc_feature (1)..(343): tr|A0A0K0GEN6|A0A0K0GEN6_9FIRM S-adenosylmethionine:tRN A ribosyltransferase-isomerase OS=Bacilli bacterium VT- 13-104 OX=1637974 GN=queA PE=3 SV=1
MNIEDFDYHLPEELIAQTPLKDRTSSRLLVLDRQTKNVKHEHFSDIKKYLKPGDCLVLNNTKVLPARLYGIKEDTGAKIEVLLLHQKEEDTWEVLTKPAKKVKKGTVLVFGDGLLQATCVGFKEHGGRILEFSYDGIFYEVLDQLGEMPLPPYIKEQLPEEDKDRYQTVYAKEEGSAAAPTAGLHFTSELLNEIKEMGVTIAFITLHVGLGTFRPVSVDKIEEHEMHSEFYQMTKETADTLNKVKENGGRIISVGTTSTRTLETIRRDHDKFVETSGWTDIFIYPPYEFKAIDGLITNFHLPKSTLIMLVSALVDKDTILRAYNEAVEERYRFFSFGDAMLIL

SEQ ID NO: 63656 - protein, 342 aa, Bacillus aerius
  misc_feature (1)..(342): tr|A0A3A9DNN6|A0A3A9DNN6_9BACI S-adenosylmethionine:tRN A ribosyltransferase-isomerase OS=Bacillus aerius OX=29 3388 GN=queA PE=3 SV=1
MKVELFDFDLPERLIAQVPLKERDASRLMVLDKKTGEITHSTFKHVIDFLNAGDCIVLNDTRVLPARLYGVKEETGAKVEVLLLKQEEGDVWETLVKPAKRVKRGTVLSFGDGRLTAVCTEELEHGGRKIEFRYEGIFYEVLESLGEMPLPPYIKEQLDDRERYQTVYSKKQGSAAAPTAGLHFTEEILDALRKKGVHIAFITLHVGLGTFRPVSAENVEEHDMHAEFYEMSEETAALLNRVRQEGGKIISVGTTSTRTLETIASEHDGRFREARGWTSIFIYPGYTFRAIDGMITNFHLPKSSLIMLVSALAGREHVLSAYRTAVEHEYRFFSFGDAMLIK

SEQ ID NO: 63657 - protein, 342 aa, Bacillus aerophilus
  misc_feature (1)..(342): tr|A0A410KM97|A0A410KM97_9BACI S-adenosylmethionine:tRN A ribosyltransferase-isomerase OS=Bacillus aerophilus O X=293389 GN=queA PE=3 SV=1
MKLELFDFDLPERLIAQVPLEKRDASRLMVLNKQTGGITHDTFSQITDYFQKGDCLVLNNTRVLPARLFGTKEDTGAKVELLLLKQEEGDKWETLVKPAKRVKNGTVITFGDGRLKAVCTEELEHGGRKVEFQYTGIFYEVLESLGEMPLPPYIKEQLDDRERYQTVYSKEVGSAAAPTAGLHFTNELLDALKAKGVHIAFITLHVGLGTFRPVSAERIEEHEMHAEFYEMNEETAEELNRVRKEGGRIISVGTTSTRTLETIASAYDGEFKASSGWTSIFIYPGYTFKAIDGMITNFHLPKSSLIMLVSALAGREHVLKAYNEAVKEEYRFFSFGDAMLIQ

SEQ ID NO: 63658 - protein, 339 aa, Bacillus akibai
  misc_feature (1)..(339): tr|W4QRG7|W4QRG7_BACA3 S-adenosylmethionine:tRNA ribosy ltransferase-isomerase OS=Bacillus akibai (strain ATCC 43226 / DSM 21942 / JCM 9157 / 1139) OX=1236973 GN=JCM9 157_1289 PE=3 SV=1
MKPLTYSFQVPAHLHANTPAEYRSSKREAVKLFVLDRHSGSYHHDNFDHFSTYLNKGDVLILNNSRTLPAVLHTIDKIEIRLAKKRQDDTWEALIIGALPKNGKLIFPDNVNATMKKSDSKKPLVTLQFSVSGNSFYEFLYRHGSPIRYEYIHREWPIQAYQTVFSSVPGSIEMPSAGRALSWKMLAQLQKKGVKIVFVQLHTGLSYFENDQWPEPSNHSEAFSVSNEVVTLIKQAKTTGSKVIAVGTTVVRALESAVDAYGMLRPTTGETTLHIKADTMLNVVDGLLTGFHEPEASHLDMLSAFIETPYLLTAYHEAINQGYLWHEFGDINLILPLNK

SEQ ID NO: 63659 - protein, 341 aa, Bacillus akibai
  misc_feature (1)..(341): tr|W4QU18|W4QU18_BACA3 S-adenosylmethionine:tRNA ribosy ltransferase-isomerase OS=Bacillus akibai (strain ATCC 43226 / DSM 21942 / JCM 9157 / 1139) OX=1236973 GN=queA PE=3 SV=1
MNVEDFDFYLPEELIAQTPLPDRTASRLLVLDRETGETKDLEFVSIIDELKAGDCLVLNDTRVLPARLYGTKEETGASIEVLLIKQTEGNEWETLVKPAKRVKKGTIISFGDGKLIAECIGEADHGGRVLRMKYEGIFHEILDELGEMPLPPYIKETLPDQERYQTVFAKNRGSAAAPTAGLHFTTELLEKIKEKGVQIAFITLHVGIGTFRPVSVDNVEEHEMHAEFYQMNEETARLLQSVKENGGRVVAVGTTSARTLETIVSDHGSYKEASGWTSIFIYPGYEVKGFDALLTNFHLPKSTLVMLVSAVAGKEHVMNAYKHAVEQKYRFFSFGDAMLIR

SEQ ID NO: 63660 - protein, 350 aa, Bacillus albus
  misc_feature (1)..(350): tr|A0A1J9TWU6|A0A1J9TWU6_9BACI S-adenosylmethionine:tRN A ribosyltransferase-isomerase OS=Bacillus albus OX=202 6189 GN=queA PE=3 SV=1
MDINLFDFHLPEELIAQVPLEERETSRLMVLDRETGDIEHKHFTDILSYLHEGDCLVLNETKVMPARLHGVKEDTGAHIEVLLLKQEEGDKWETLVKPAKRVKEGTVISFGEGKLKATCTGTADQGGRQLEFSYDGIFYEILDELGEMPLPPYIKETLEDRDRYQTVYAKEVGSAAAPTAGLHFTEELLEKLKQKGVELAFITLHVGLGTFRPVSADTIEEHHMHAEYYHMSEETAALLNRVKENGGRIITVGTTSTRTLETIATDHDGKLCAASGWTDIFMYPGYEFKAIDGLITNFHLPKSTLIMLVSAFANRDNVLHAYNEAVKEKYRFFSFGDAMFVASHAKMGNK

SEQ ID NO: 63661 - protein, 350 aa, Bacillus albus
  misc_feature (1)..(350): tr|A0A4Q0X2Q0|A0A4Q0X2Q0_9BACI S-adenosylmethionine:tRN A ribosyltransferase-isomerase OS=Bacillus albus OX=202 6189 GN=queA PE=3 SV=1
MDINLFDFHLPEELIAQVPLEERETSRLMVLDRETGDIEHKHFTDILSYLHEGDCLVLNETKVMPARLHGVKEGTGAHIEVLLLKQEEGDKWETLVKPAKRVKEGTVISFGEGKLKATCTGTADQGGRQLEFSYDGIFYEILDELGEMPLPPYIKETLEDRDRYQTVYAKEVGSAAAPTAGLHFTEELLEKLKQKGVELAFITLHVGLGTFRPVSADTIEEHHMHAEYYHMSEETAALLNRVKENGGRIITVGTTSTRTLETIATDHDGKLCAASGWTDIFMYPGYEFKAIDGLITNFHLPKSTLIMLVSAFANRDNVLHAYNEAVKEKYRFFSFGDAMFVASHAKMGNK

SEQ ID NO: 63662 - protein, 344 aa, Bacillus alcalophilus
  misc_feature (1)..(344): tr|A0A094WKM6|A0A094WKM6_BACAO S-adenosylmethionine:tRN A ribosyltransferase-isomerase OS=Bacillus alcalophilus ATCC 27647 = CGMCC 1.3604 OX=1218173 GN=queA PE=3 SV=1
MEVEEFDFELPEQLIAQTPLKDRTASRLLALNKSTGEIKDEHFPDILNYLKEGDCLVLNDTRVLPARLYGMKADTGAKIEVLLLKQLDGDKWETLVKPAKRIKEGTEIIFGEGLLKAKCTKELEHGGREIELIYEGILHEVLDNLGEMPLPPYIKEQLDDKERYQTVFAKNRGSAAAPTAGLHFTEELLEKVREKGVHIAMVTLHVGLGTFRPVSVDKIEEHEMHAEFYQMSAETAQLLQKVKKNGSRIIAVGTTSARTLETIMKEHGQFCETSGWTSIFIYPGFEFKGLDALLTNFHLPKSTLVMLVSALAGKEHVMNAYRHAVNEQYRFFSFGDAMFISDWK

SEQ ID NO: 63663 - protein, 338 aa, Bacillus alcalophilus
  misc_feature (1)..(338): tr|A0A094WPS8|A0A094WPS8_BACAO S-adenosylmethionine:tRN A ribosyltransferase-isomerase OS=Bacillus alcalophilus ATCC 27647 = CGMCC 1.3604 OX=1218173 GN=AJ85_01655 PE= 3 SV=1
MNIVNNIHQSFQIPANLHANTPAEYRENSRSQVNMMVLNKQTGAVSDHHLANLPHLLSPGDLLVFNKSRTIPALLRSKDQKIEIRLARKITDLKWEALIFQNDERRDCILLEGGGQLDIVGTGSEAPLVVVEFRQISEPILSYLYKYGAPIRYEYIHKPWPMQDYQTIFASVPGSVEMPSAGRAFSWKLIQQLKKSGIQIAFLELHAGISYYGDNQWPNPKNHPEAYSIPVETIELIKKTKHHEGKIIAVGTTVVRALESFALENNPLNGETTTDLYINRQHPLQIVDGLMTGLHEPDTSHLDLLCAFTEEAYIIDAYRHALKQQYLWHEFGDLNLIF

SEQ ID NO: 63664 - protein, 342 aa, Bacillus altitudinis
  misc_feature (1)..(342): tr|A0A5D4PQG1|A0A5D4PQG1_9BACI S-adenosylmethionine:tRN A ribosyltransferase-isomerase OS=Bacillus altitudinis OX=293387 GN=queA PE=3 SV=1
MKLELFDFDLPERLIAQVPLEKRDASRLMVLHKQTGDITHDTFSQITDYVQKGDCLVLNNTRVLPARLFGTKEDTGAKVELLLLKQEEGDKWETLVKPAKRVKNGTVITFGDGRLKAVCTEELEHGGRKVEFQYTGIFYEVLESLGEMPLPPYIKEQLDDRERYQTVYSKEVGSAAAPTAGLHFTNELLDALKAKGVHIAFITLHVGLGTFRPVSAERIEEHEMHAEFYEMNEETAEELNRVRKEGGRIISVGTTSTRTLETIASAYNGEFKASSGWTSIFIYPGYTFKAIDGMITNFHLPKSSLIMLVSALAGREHVLKAYNEAVKEEYRFFSFGDAMLIL

SEQ ID NO: 63665 - protein, 342 aa, Bacillus altitudinis
  misc_feature (1)..(342): tr|A0A5C2CDH4|A0A5C2CDH4_9BACI tRNA preQ1(34) S-adenosy lmethionine ribosyltransferase-isomerase QueA OS=Bacill us altitudinis OX=293387 GN=queA PE=4 SV=1
MKLELFDFDLPERLIAQVPLEKRDASRLMVLHKQTGDITHDTFSQITDYFQKGDCLVLNNTRVLPARLFGTKEDTGAKVELLLLKQEEGDKWETLVKPAKRVKNGTVITFGDGRLKAVCTEELEHGGRKVEFQYTGIFYEVLESLGEMPLPPYIKEQLDDRERYQTVYSKEVGSAAAPTAGLHFTNELLDALKAKGVHIAFITLHVGLGTFRPVSAERIEEHEMHAEFYEMNEETAEELNRVRKEGGRIISVGTTSTRTLETIASAYDGEFKASSGWTSIFIYPGYTFKAIDGMITNFHLPKSSLIMLVSALAGREHVLKAYNEAVKEEYRFFSFGDAMLIQ

SEQ ID NO: 63666 - protein, 342 aa, Bacillus amyloliquefaciens
  misc_feature (1)..(342): tr|A0A5C8IP16|A0A5C8IP16_BACAM S-adenosylmethionine:tRN A ribosyltransferase-isomerase OS=Bacillus amyloliquefa ciens OX=1390 GN=queA PE=3 SV=1
MKVDLFDFELPERLIAQVPLKERDASRLMVLDKQTGGLTDSSFKEIVSFFKEGDCLVLNNTRVLPARLFGTKEDTGAKVELLLLKQEENDTWETLVKPAKRVRKGTILTFGDGRLTAVCTEELDHGGRKIKFRYDGIFYEVLESLGEMPLPPYIKEQLDDKERYQTVFSKEIGSAAAPTAGLHFTEEILDELKQKGVRIEFITLHVGLGTFRPVSADDVEEHNMHAEFYEMTEETAASLNEVRKAGGRIVSVGTTSTRTLETIAGEHDGVFTASSGWTSIFIYPGYEFKAIDGMITNFHLPKSSLIMLVSALAGREHVLSAYRHAVEEEYRFFSFGDAMLII

SEQ ID NO: 63667 - protein, 342 aa, Bacillus amyloliquefaciens
  misc_feature (1)..(342): tr|A0A0D7XVK5|A0A0D7XVK5_BACAM S-adenosylmethionine:tRN A ribosyltransferase-isomerase OS=Bacillus amyloliquefa ciens OX=1390 GN=queA PE=3 SV=1
MKVDLFDFELPERLIAQVPLKERDASRLMVLDKQTGGLTDSSFKEIVSFFNEGDCLVLNNTRVLPARLFGTKEDTGAKVELLLLKQEENDTWETLVKPAKRVKKGTVLTFGDGRLTAVCTEELDHGGRKIEFRYDGIFYEVLESLGEMPLPPYIKEQLDDKERYQTVFSKEIGSAAAPTAGLHFTEEILDELKQKGVRIEFITLHVGLGTFRPVSADDVEEHNMHAEFYEMTEETAASLNEVRKAGGRIVSVGTTSTRTLETIAGEHDGVFTASSGWTSIFIYPGYEFKAIDGMITNFHLPKSSLIMLVSALAGREHVLSAYRHAVEEEYRFFSFGDAMLII

SEQ ID NO: 63668 - protein, 350 aa, Bacillus anthracis
  misc_feature (1)..(350): sp|Q81LH1|QUEA_BACAN S-adenosylmethionine:tRNA ribosylt ransferase-isomerase OS=Bacillus anthracis OX=1392 GN=q ueA PE=3 SV=1
MDINLFDFHLPEELIAQVPLEERETSRLMVLDRETGDIEHKHFTDILSYLHEGDCLVLNETKVMPARLHGVKEDTGAHIEVLLLKQEEGDKWETLVKPAKRVKEGTVISFGEGKLKATCTGTADQGGRQLEFSYDGIFYEILDELGEMPLPPYIKETLEDRDRYQTVYAKEIGSAAAPTAGLHFTEELLEKLKQKGVELAFITLHVGLGTFRPVSADTIEEHHMHAEYYHMSEETAALLNRVKENGGRIITVGTTSTRTLETIATDHDGKLCAASGWTDIFMYPGYEFKAIDGLITNFHLPKSTLIMLVSAFANRDNVLHAYNEAVKEKYRFFSFGDAMFVASHAKMGNK

SEQ ID NO: 63669 - protein, 350 aa, Bacillus anthracis; identical to SEQ ID NO: 63668
  misc_feature (1)..(350): sp|C3L6U7|QUEA_BACAC S-adenosylmethionine:tRNA ribosylt ransferase-isomerase OS=Bacillus anthracis (strain CDC 684 / NRRL 3495) OX=568206 GN=queA PE=3 SV=1

SEQ ID NO: 63670 - protein, 338 aa, Bacillus aquimaris
  misc_feature (1)..(338): tr|A0A1J6VKD6|A0A1J6VKD6_9BACI S-adenosylmethionine:tRN A ribosyltransferase-isomerase OS=Bacillus aquimaris OX =189382 GN=BHE18_16180 PE=3 SV=1
MNEAVFDIPRQLNASAPVELSGKGRDEVKLMVLNRETGGVEHSYFNRLHTQLKRGDVLVVNNSRTIPASLRGTQGSREVEVRLSRKVSSREWDALILGPVNDARLPITFADGVKAFMSGNGSEKPLVRLTFSVEGAGFYDFLYKNGQPIRYEYIDAPWPLDYYQNVYGSVPGSVEMASAGRAFSWKLITKLRAEGIEVVCLQLHAGLSYYGDDRWPNPVNHPEEYHVSRETADSIRRAKREGNRVIAVGTTVVRALEAVAAGHGGDVAAASGVTNLYITKESPLRVVDGLITGLHEPEASHLDLLQAFVPRDYLMSAYRTAVAKGYLWHEFGDMNLIL

SEQ ID NO: 63671 - protein, 343 aa, Bacillus aquimaris
  misc_feature (1)..(343): tr|A0A5D4TWF2|A0A5D4TWF2_9BACI S-adenosylmethionine:tRN A ribosyltransferase-isomerase OS=Bacillus aquimaris OX =189382 GN=FZC80_11160 PE=3 SV=1
MGAISKAFEVPQSLNAKVPAEFRGRGRDDVRLMVMDGEGVYHDRFSSLPDFLKKGDLLIFNNSRTIPAVLKAKACNREVEIRLSRQLDGRTWEALIWGGLYSAGYELTLVNGVKAVITGNAADKPLITISFSIEGAELLDYIYRYGEPIRYEYIESDWPLEAYQTAYASVPGSVEMASAGRAFSWKMFDKLKEKGVETAFLTLHTGLSYYGKDRWPDPNKHPEAFHIPEETAELINSVREARGRVIAVGTTVVRALETAADDAGRLTATEGITNLYIKKDHQLKAVDGLVTGLHEPEATHLEMLSAFTSPHRLFAAYREALKKGYLWHEFGDVNLILSERAHS

SEQ ID NO: 63672 - protein, 342 aa, Bacillus aryabhattai
  misc_feature (1)..(342): tr|A0A1S2C1A3|A0A1S2C1A3_9BACI S-adenosylmethionine:tRN A ribosyltransferase-isomerase OS=Bacillus aryabhattai OX=412384 GN=queA PE=3 SV=1
MKVDLFDFHLPEELIAQTPLEQRDASRLMVLNKETGSVKHHMFHDLLDYVQEGDCLVLNDTRVLPARLFGTKEDTGANIEVLLLKQTQGDTWETLVKPAKRVKEGTVISFGDGRLTAVCKETSDQGGRLLEFNYEGIFYEVLEQLGEMPLPPYIKERLDDQERYQTVFAREQGSAAAPTAGLHFTEEMLEQLKTKGVHIAFLTLHVGLGTFRPVSVDDLEEHDMHSEFYQVSEGTAALLNSVREKGGRIISVGTTSTRTLETIATEHNGKFVASSGWTNIFIFPGYEFKAIDGMITNFHLPKSTLIMLVSALAGRENVISAYEQAVEEKYRFFSFGDAMLIL

SEQ ID NO: 63673 - protein, 342 aa, Bacillus aryabhattai
  misc_feature (1)..(342): tr|A0A1G6M4M9|A0A1G6M4M9_9BACI S-adenosylmethionine:tRN A ribosyltransferase-isomerase OS=Bacillus aryabhattai B8W22 OX=1358420 GN=queA PE=3 SV=1
MKVDLFDFHLPEELIAQTPLEQRDASRLMVLNKETGSVKHHMFHDLLDYVQEGDCLVLNDTRVLPARLFGTKEDTGANIEVLLLKQTQGDTWETLVKPAKRVKEGTVISFGDGRLTAVCKETSDQGGRLLEFNYEGIFYEVLEQLGEMPLPPYIKERLDDQERYQTVFAREQGSAAAPTAGLHFTEEMLEQLKEKGVHIAFLTLHVGLGTFRPVSVDDLEEHDMHSEFYQVSEGTAALLNSVREKGGRIISVGTTSTRTLETIATEHNGKFVASSGWTNIFIFPGYEFKAIDGMITNFHLPKSTLIMLVSALAGRENVISAYEQAVAEKYRFFSFGDAMLIL

SEQ ID NO: 63674 - protein, 342 aa, Bacillus asahii
  misc_feature (1)..(342): tr|A0A398B617|A0A398B617_9BACI S-adenosylmethionine:tRN A ribosyltransferase-isomerase OS=Bacillus asahii OX=22 8899 GN=queA PE=3 SV=1
MKLDLFDFHLPEELIAQVPLENREASRLMVLDKETGDIQHDVFKHITEYLQPGDCLVLNDTKVLPARLHGSKEDTGANIEVLLLKQQQDDEWETLVKPAKRIKEGSTIVFGDGKLKAVCTGVLEHGGRMLRFQYDGIFYEVLEELGEMPLPPYIKEQLDDQDRYQTVYARERGSAAAPTAGLHFTKELLAKVKEMGVHIAFITLHVGLGTFRPVNVEDIDDHDMHSEFYQMTADTAHLLNEVKANGGRIITVGTTSTRTLETIASRHNGVFKEESGWTSIFIYPGYEFKGIDAMITNFHLPKSTLIMLISALAGRENVLHAYNIAVEEKYRFFSFGDAMFIK

SEQ ID NO: 63675 - protein, 345 aa, Bacillus asahii
  misc_feature (1)..(345): tr|A0A3T0KW80|A0A3T0KW80_9BACI S-adenosylmethionine:tRN A ribosyltransferase-isomerase OS=Bacillus asahii OX=22 8899 GN=queA PE=3 SV=1
MEEVKLDLFDFHLPEELIAQVPLENREASRLMVLDKETGDIQHDVFKHITEYLQPGDCLVLNDTKVLPARLHGSKEDTGANIEVLLLKQQQDDEWETLVKPAKRIKEGSTIFFGDGKLKAVCTGVLEHGGRMLRFQYDGIFYEVLEELGEMPLPPYIKEQLDDQDRYQTVYARERGSAAAPTAGLHFTKELLAKVKEMGVHIAFITLHVGLGTFRPVNVEDIDDHDMHSEFYQMTADTAHLLNEVKANGGRIITVGTTSTRTLETIASRHNGVFKEESGWTSIFIYPGYEFKGIDAMITNFHLPKSTLIMLISALAGRENVLHAYNLAVEEKYRFFSFGDAMFIK

SEQ ID NO: 63676 - protein, 342 aa, Bacillus atrophaeus
  misc_feature (1)..(342): tr|A0A0H3E6A6|A0A0H3E6A6_BACA1 S-adenosylmethionine:tRN A ribosyltransferase-isomerase OS=Bacillus atrophaeus ( strain 1942) OX=720555 GN=queA PE=3 SV=1
MKVELFDFELPERLIAQVPLEQRDASRLMVLDKHTGGLSDSSFKEIVSFFKEGDCLVLNNTRVLPARLFGVKEDTGAKVELLLLKQETGDRWETLVKPAKRVKKGTVLTFGDGLLQAVCTEELEHGGRKVEFRYDGIFYEVLESLGEMPLPPYIKEQLDDRERYQTVFSKEIGSAAAPTAGLHFTEEILGELKEKGVRIEFITLHVGLGTFRPVSADEVEEHNMHAEFYEMSAETAAALNHVRETGGRIVSVGTTSTRTLETIAGENNGSFKASSGWTSIFIYPGYEFKAIDGMITNFHLPKSSLIMLVSALAGREHVLRAYNHAVEKEYRFFSFGDAMLII

SEQ ID NO: 63677 - protein, 342 aa, Bacillus atrophaeus; identical to SEQ ID NO: 63676
  misc_feature (1)..(342): tr|A0A080UN55|A0A080UN55_BACAT S-adenosylmethionine:tRN A ribosyltransferase-isomerase OS=Bacillus atrophaeus O X=1452 GN=queA PE=3 SV=1

SEQ ID NO: 63678 - protein, 342 aa, Bacillus australimaris
  misc_feature (1)..(342): tr|A0A0P7G5W5|A0A0P7G5W5_9BACI S-adenosylmethionine:tRN A ribosyltransferase-isomerase OS=Bacillus australimari s OX=1326968 GN=queA PE=3 SV=1
MKLELFDFDLPERLIAQVPLEKRDASRLMVLNKQTGAITHDTFSQITDYFQKGDCLVLNNTRVLPARLFGMKEDTGAKVELLLLKQEEGDHWETLVKPAKRVKKGTVITFGDGRLQAVCTEEMEHGGRKVEFQYTGIFYEVLESLGEMPLPPYIKEQLDDRERYQTVYSKEVGSAAAPTAGLHFTTELLDELKAKGVHIAFITLHVGLGTFRPVSAERIEEHEMHAEFYEMNEETAEELNRVRKEGGRIISVGTTSTRTLETIASAHDGEFKASSGWTSIFIYPGYTFKAIDGMITNFHLPKSSLIMLVSALAGREHVLKAYNEAVKEEYRFFSFGDAMLIQ

SEQ ID NO: 63679 - protein, 342 aa, Bacillus azotoformans
  misc_feature (1)..(342): tr|K6C1A4|K6C1A4_BACAZ S-adenosylmethionine:tRNA ribosy ltransferase-isomerase OS=Bacillus azotoformans LMG 958 1 OX=1131731 GN=queA PE=3 SV=1
MKVDLFNFNLPEELIAQTPLTERTASRLMVLDKQTGDFKHEQFRNIIDYLQADDCLILNDTRVLPARLFGVKEDTGAQIEVLLLKQVENDVWETLAKPAKRVKVGTIITFGDGRLKAKCISEGDHGGRHFEFSYDGIFYEVLDLLGEMPLPHYIKEQLDDKERYQTVFARERGSAAAPTAGLHFTKELLEEIKQKGVHVAFITLHVGLGTFRPVSAESVEDHDMHAEFYQMTQETADLLNRVKADGGRIISVGTTSTRTLETIASGHDGQFQETSGWTDIFIYPGYEFKAINGMLTNFHLPKSTLMMLISALAGREHVLKAYEEAVKERYRFFSFGDAMLII

SEQ ID NO: 63680 - protein, 342 aa, Bacillus azotoformans
  misc_feature (1)..(342): tr|A0A072NR74|A0A072NR74_BACAZ S-adenosylmethionine:tRN A ribosyltransferase-isomerase OS=Bacillus azotoformans MEV2011 OX=1348973 GN=queA PE=3 SV=1
MKVDLFDFNLPEELIAQTPLTERTASRLMVLDKQTGDFKHEQFRNIIDYLQAGDCLILNDTRVLPARLFGIKEDTGAKIEVLLLKQVENDIWETLVKPAKRVKVGTVITFGEGRLKAKCISEGDHGGRHFEFFYEGIFYEVLDLLGEMPLPHYIKEQLDDKERYQTVFARERGSAAAPTAGLHFTKELLEEIKQKGVHVAFITLHVGLGTFRPVSSETVEGHDMHAEFYQMTKETAELLNQVKADGGRIISVGTTSTRTLETIASGSDGQFQETSGWTDIFIYPGYEFKAINGMLTNFHLPKSTLMMLISALAGRDHVIKAYEEAVKERYRFFSFGDAMLII

SEQ ID NO: 63681 - protein, 342 aa, Bacillus bacterium
  misc_feature (1)..(342): tr|A0A3C2CQT6|A0A3C2CQT6_9BACI S-adenosylmethionine:tRN A ribosyltransferase-isomerase OS=Bacillus bacterium OX =2053512 GN=queA PE=3 SV=1
MKVDLFDFHLPEELIAQTPLEQRAESRLMVLNKKSGSIEHDIFKNIKNYLKPGDCLVLNDTRVLPARLFGTKEDTGAKIEVLLLKQLEGDEWETLIKPAKRVKEGTSIVFGDGLLTAVCTGEADHGGRKLTFTYDGIFYEVLEKLGEMPLPPYIKEQLEDKDRYQTVFARERGSAAAPTAGLHFTEALLAELEGSGIHIAFITLHVGLGTFRPVSVDSIDEHEMHSEFYQLTEGTAMLLNKVREQGGRIISVGTTSTRTLETIATANEGTFVSANGWTNIFIYPGYEFKAIDGMITNFHLPKSTLIMLVSALAGRENVIHAYNVAVEERYRFFSFGDAMLIF

SEQ ID NO: 63682 - protein, 342 aa, Bacillus bacterium
  misc_feature (1)..(342): tr|A0A3D0E221|A0A3D0E221_9BACI S-adenosylmethionine:tRN A ribosyltransferase-isomerase OS=Bacillus bacterium OX =2053512 GN=queA PE=3 SV=1
MKVDMFDFDLPEELIAQVPLKDRSSSRLMVLNKKTGAIKHERFSHLIDYLNPGDCLVLNDTKVLPARLFGIKSDTGAKVEVLLLKQVAGDCWETLVKPAKRVKVGTEITFGDGRLKAICTRTEEHGGRLFEFHYEGIFYEILDSLGKMPLPPYIKEQLEDQDRYQTVYARERGSAAAPTAGLHFTNEMLETIKEKGVYVTFITLHVGLGTFRPVSVDSIEDHDMHAEFYRMSEETSSLLNEVKNNGGRIISVGTTSTRTLETIAVENDGVFKAGSGWTDIFIFPGYKFRAIDGLITNFHLPMSTLIMLVSALAGRENILHAYETAVQEKYRFFSFGDAMLII

SEQ ID NO: 63683 - protein, 356 aa, Bacillus badius
  misc_feature (1)..(356): tr|A0A0C2Y7Q9|A0A0C2Y7Q9_BACBA S-adenosylmethionine:tRN A ribosyltransferase-isomerase OS=Bacillus badius OX=14 55 GN=queA PE=3 SV=1
MLLENGNKKIGMKKVKVEEFDFNLPEELIAQTPLAERTESRLMVLDKKTGAITHDVFKNITSFLQPGDCLVLNDTKVLPARLYGTKEDTGAKIEVLLLRQEEGDRWETLVKPAKRIKAGSQVTFGDGRLQAVCVEEKEHGGRVLEFSYEGIFYEVLDELGEMPLPPYIKEQLEEKDRYQTVFAKERGSAAAPTAGLHFTEELLEEIRGMGVHTAFLTLHVGLGTFRPVSVDTIEEHEMHAEFYHVSEGTARLIQQVKEAGGRIISVGTTSTRTLETVARDHDGRIEAASGWTDIFIYPGFPFQAIDGMITNFHLPKSTLIMLVSALAGKEHVMKAYHEAVDEKYRFFSFGDAMLIK

SEQ ID NO: 63684 - protein, 342 aa, Bacillus badius
  misc_feature (1)..(342): tr|A0A165ZW95|A0A165ZW95_BACBA S-adenosylmethionine:tRN A ribosyltransferase-isomerase OS=Bacillus badius OX=14 55 GN=queA PE=3 SV=1
MKVEEFDFNLPEELIAQTPLAERTESRLMVLDKKTGAITHDVFKNITSFLQPGDCLVLNDTKVLPARLYGTKEDTGAKIEVLLLRQEEGDRWETLVKPAKRIKAGSQVTFGDGRLQAVCVEEKEHGGRVLEFSYEGIFYEVLDELGEMPLPPYIKEQLEEKDRYQTVFAKERGSAAAPTAGLHFTEELLEEIRGMGVHTAFLTLHVGLGTFRPVSVDTIEEHEMHAEFYHVSEGTARLIQQVKEAGGRIISVGTTSTRTLETVARDHDGRIEAASGWTDIFIYPGFPFQAIDGMITNFHLPKSTLIMLVSALAGKEHVMKAYHEAVDEKYRFFSFGDAMLIK

SEQ ID NO: 63685 - protein, 343 aa, Bacillus bataviensis
  misc_feature (1)..(343): tr|K6D9D9|K6D9D9_9BACI S-adenosylmethionine:tRNA ribosy ltransferase-isomerase OS=Bacillus bataviensis LMG 2183 3 OX=1117379 GN=BABA_11176 PE=3 SV=1
MAATKALDFYLPDELNASHPPEKRGLRRDHVRMMVLDRSMGDVRHDCFFHLADYLESGDLVILNNSRTIPAVLYAEWYRNTVQLAPKVEIRLARRRGEDTWDALVVASPVMTGDSLHLSPELSATVLGEKENSPLKLIQFSKKGADLFNIIYALGEPVRYEYIEQPWDLDFYQTVFASHPGSVEMPSAGRAFSWELLFNLKRNDIQVDYIRLHTGLSYLLDDQWIQTPEENEEEYHISDGTMARIIETKAAGKRVIAVGTTVVRALETAAKNGALSGMTNLYINQHYPLKIADGIITGLHEPKASHLDMLSAFVSEHHLLKAYGQAIDTGYLWHEFGDMNLIL

SEQ ID NO: 63686 - protein, 342 aa, Bacillus bataviensis
  misc_feature (1)..(342): tr|A0A561DGM4|A0A561DGM4_9BACI S-adenosylmethionine:tRN A ribosyltransferase-isomerase OS=Bacillus bataviensis OX=220685 GN=queA PE=3 SV=1
MKVDLFDFHLPEELIAQVPLKTRTDSRLMVLNKQTGEIKHEVFKNITEYLREGDCLVLNDTKVLPARLFGVKNDTGAKIEVLLLKQLEGDQWETLVKPAKRVKVGTEIVFGDGVLTAVCIDESDHGGRVLEFKYTGIFYEVLDQLGEMPLPPYIKEQLDDRDRYQTVYAREPGSAAAPTAGLHFTESLLEEIKAKGVHIAFITLHVGLGTFRPVSVEDVLEHDMHAEFYMVTEGTAKLLNEVRQSGGRIVTVGTTSTRTLETIASANNGQFTAGSGWTSIFIYPGYEFKAIDGMITNFHLPKSTLIMLVSALAGRENILHAYNTAVAERYRFFSFGDAMFII

SEQ ID NO: 63687 - protein, 355 aa, Bacillus beveridgei
  misc_feature (1)..(355): tr|A0A1D7QU38|A0A1D7QU38_9BACI S-adenosylmethionine:tRN A ribosyltransferase-isomerase OS=Bacillus beveridgei O X=632773 GN=queA PE=3 SV=1
MDVSAFDYELPEKLIAQTPLSNRAESKLLAMDRSTGELVHQQFCNVLDFLEPGDALVLNDTKVLPARLYGIKKDTGAKIEVLLLNEEDNHVWEALVKPAKRLKTGTEVSFGDGILEAVCTEELPEGRRRLKFHFEGVFHERLDELGEMPLPPYIQEQLEEKERYQTVYAKNLGSAAAPTAGLHFTPELLEDVRRKGANVVFLTLHVGLGTFRPVSVDTIEAHKMHAEFYQLSKESADVLNQTRKNGGRVIAVGTTSARTLETIARDHGGEIKPASGWTDIFIYPGFTFQGIDGLLTNFHLPKSTLVMLVSAFSKREYILNAYQSAIEKQYRFFSFGDAMLIADGVGTITKGEDHT

SEQ ID NO: 63688 - protein, 350 aa, Bacillus bombysepticus
  misc_feature (1)..(350): tr|A0A023PBC4|A0A023PBC4_9BACI S-adenosylmethionine:tRN A ribosyltransferase-isomerase OS=Bacillus bombysepticu s str. Wang OX=1330043 GN=queA PE=3 SV=1
MDINLFDFHLPEELIAQVPLEERETSRLMVLDRETGDIEHKHFTDILSYLHEGDCLVLNETKVMPARLHGVKEDTGAHIEVLLLKQEEGDKWETLVKPAKRVKEGTVISFGEGKLKATCTGTADQGGRQLEFSYDGIFYEILDELGEMPLPPYIKETLEDRDRYQTVYAKEIGSAAAPTAGLHFTEELLEKLKQKGVQLAFITLHVGLGTFRPVSADTIEEHHMHAEYYHMSEETAALLNRVKENGGRIITVGTTSTRTLETIATDHEGKLCAASGWTDIFMYPGYEFKAIDGLITNFHLPKSTLIMLVSAFANRDNVLHAYNEAVKEKYRFFSFGDAMFVASHAKMRNK

SEQ ID NO: 63689 - protein, 112 aa, Bacillus boroniphilus
  misc_feature (1)..(112): tr|W4RI38|W4RI38_9BACI S-adenosylmethionine:tRNA ribosy ltransferase-isomerase OS=Bacillus boroniphilus JCM 217 38 OX=1294265 GN=JCM21738_593 PE=3 SV=1
MTEGTALLLNSVREQGGRIITVGTTSTRTLETIATANDGKFVAETGWTNIFIYPGYEFKAIDGMITNFHLPKSTLIMLVSALAGRDNVLNAYNNAVEERYRFFSFGDAMLIL

SEQ ID NO: 63690 - protein, 230 aa, Bacillus boroniphilus
  misc_feature (1)..(230): tr|W4RIH7|W4RIH7_9BACI S-adenosylmethionine:tRNA ribosy ltransferase-isomerase OS=Bacillus boroniphilus JCM 217 38 OX=1294265 GN=JCM21738_594 PE=3 SV=1
MKVDLFDFHLPEELIAQTPLEQRAESRLMILNKESGKIEHDVFKNIKNYLNPGDCLVLNDTKVLPARLFGMKEDTGAKIEVLLLKQLDGDEWETLIKPAKRVKEGTKIVFGDGLLTAECTGEAEHGGRNLKFSYDGIFYEVLEQLGEMPLPPYIKEQLEDKDRYQTVFARERGSAAAPTAGLHFTEELLEEIKEMGIHIALSLFTWVWEHSGLSVLIRSKSMTCIQSFTR

SEQ ID NO: 63691 - protein, 342 aa, Bacillus butanolivorans
  misc_feature (1)..(342): tr|A0A2A7W8J9|A0A2A7W8J9_9BACI S-adenosylmethionine:tRN A ribosyltransferase-isomerase OS=Bacillus butanolivora ns OX=421767 GN=queA PE=3 SV=1
MKLDMFDFHLPEELIAQVPLEDREASRLMVLDKVTGELKHDVFSHITEYIKPGDCLVLNDTKVLPARLYGSKEETGGKVEVLLLKQEHDDVWETLVKPAKRIKEGTTIIFGDGKLSAVCTGVLEHGGRILKFQYEGIFYEILEELGEMPLPPYIKEQLDDQDRYQTVYARERGSAAAPTAGLHFTEHLLEKLKGMGVHIAFITLHVGLGTFRPVSVDDIDSHEMHSEFYQMTEGTARLLNKVKEDGGKIITVGTTSTRTLETIASRNDGVFKEESGWTSIFIYPGYEFKGINAMITNFHLPKSTLIMLISALAGREHVLHAYETAVAEKYRFFSFGDAMLIK

SEQ ID NO: 63692 - protein, 342 aa, Bacillus butanolivorans
  misc_feature (1)..(342): tr|A0A0M0EYJ0|A0A0M0EYJ0_9BACI S-adenosylmethionine:tRN A ribosyltransferase-isomerase OS=Bacillus butanolivora ns OX=421767 GN=queA PE=3 SV=1
MKLDMFDFHLPEELIAQVPLEDREASRLMVLDKVTGELKHDVFSHITEYIKPGDCLVLNDTKVLPARLYGSKEETGGKVEVLLLKQEHDDVWETLVKPAKRIKEGTTIIFGDGKLSAVCTGVLEHGGRILKFQYEGIFYEILEELGEMPLPPYIKEQLDDQDRYQTVYARERGSAAAPTAGLHFTEHLLEKLKGMGVHIAFITLHVGLGTFRPVSVDDIDSHEMHSEFYQMTEGTARLLNKVKEDGGKIITVGTTSTRTLETIASRNDGVFKEESGWTSIFIYPGYEFKGINAMITNFHLPKSTLIMLISALAGREHVLHAYETAVEEKYRFFSFGDAMLIK

SEQ ID NO: 63693 - protein, 342 aa, Bacillus caldolyticus
  misc_feature (1)..(342): tr|A0A2H5KKR5|A0A2H5KKR5_BACCL S-adenosylmethionine:tRN A ribosyltransferase-isomerase OS=Bacillus caldolyticus OX=1394 GN=queA PE=3 SV=1
MKVDLFDFHLPEELIAQTPLPDRAASRLMVLDKRTGAIRHETFRNIISYLNPGDCLVLNDTRVMPARLYGEKEETGGTVEVLLLKQLDGDRWETLVKPGKRVKPGTKLTFGEGKLEAVCLDTLEHGGRVLEFSYDGLFYEVLAELGEMPLPPYIKEKLDDPERYQTVYAREIGSAAAPTAGLHFTEELLDAIREKGVHIVFITLHVGLGTFRPVQVDEVEKHDMHAEFYQMSEETAETLNRVREQGGRIIAVGTTSTRTLETIAGKHNGRFVAESGWTDIFIYPGYEFKGIDGLVTNFHLPKSTLIMLVSALAGRENILHAYQVAVKERYRFFSFGDAMLII

SEQ ID NO: 63694 - protein, 342 aa, Bacillus camelliae
  misc_feature (1)..(342): tr|A0A2N3LKY4|A0A2N3LKY4_9BACI S-adenosylmethionine:tRN A ribosyltransferase-isomerase OS=Bacillus camelliae OX =1707093 GN=queA PE=3 SV=1
MKVDIFDFHLPEELIAQTPLKNRSDSRLMVLNKENGEIEHTIFKNITSYLRKGDCLVLNDTKVLPARLFGVKEDTGAHIEVLLLKQLEENNWETLVKPAKRVKVGTKLIFGDGQLIAHCVKEEEHGGRVLKFEYEGIFYEVLEALGEMPLPPYIKEKLDDKDRYQTVYAKERGSAAAPTAGLHFTEELLEEIKNMGVHITFITLHVGLGTFRPVSVENVEKHDMHSEYYQVSKETADLINRVRKQGGRIISVGTTSTRTLETIASEHDGEIVAQNGWTDIFIYPGYQFKGIDGMITNFHLPKSTLIMLVSALAGREHILHAYETAVQEKYRFFSFGDAMLII

SEQ ID NO: 63695 - protein, 341 aa, Bacillus campisalis
  misc_feature (1)..(341): tr|A0A0M2SXM5|A0A0M2SXM5_9BACI S-adenosylmethionine:tRN A ribosyltransferase-isomerase OS=Bacillus campisalis O X=1408103 GN=WQ57_14245 PE=3 SV=1
MTTAQLDFELPPELNASMPPERRGIRRDQVRMMVLDRISGRRIHDSFFRLGNYLKPGDLIVLNSSRTVPALLKGTWKRGKALMDTDVEVRLARRKDDSTWEALVAAAGASVGDTLQFSPGLSGVITGEKASSPIKSILFSQAGTELYNIFYDIGEPITYEYIEKPWKLDYYQTVFASSPGSVEMPSAGRAFSWELLFQLQNMGVSIAFIQLHTGLSYLGEDFDFHPEEHEETYHVPGEVMQKISSTKAAGGRIIAAGTTVVRAIETVGEGGKLSGSTNLYVSRDTRLNITDGILTGFHEPKASHLDMLTAFVSEHHLLCAYQEAVKSRYLWHEFGDMNLIL

SEQ ID NO: 63696 - protein, 342 aa, Bacillus campisalis
  misc_feature (1)..(342): tr|A0A0M2SKH2|A0A0M2SKH2_9BACI S-adenosylmethionine:tRN A ribosyltransferase-isomerase OS=Bacillus campisalis O X=1408103 GN=queA PE=3 SV=1
MKVDLFDFHLPEELIAQVPLEQRSESRLMVLDKKTGGLQHDVFKHIKSHLRPGDCLVLNDTRVLPARLFGMKEDTGAKIEVLLLKQLEGDKWETLVKPAKRVKEGTTLVFGDGLLTAVCTGSSDHGGRVLEFSYDGIFYEVLEQLGEMPLPPYIKEQLDDQERYQTVFAKERGSAAAPTAGLHFTEELLEELKEAGVHITFITLHVGLGTFRPVSSDTIEEHEMHAEFYIMSEGSAKLLNEVREQGGRIITVGTTSTRTLETIASAHNGKFAAATGWTDIFIYPGFEFKGIDGMITNFHLPKSTLIMLVSALAGREHVLHAYNTAVQERYRFFSFGDAMLII

SEQ ID NO: 63697 - protein, 342 aa, Bacillus canaveralius
  misc_feature (1)..(342): tr|A0A3R9P9N0|A0A3R9P9N0_9BACI S-adenosylmethionine:tRN A ribosyltransferase-isomerase OS=Bacillus canaveralius OX=1403243 GN=queA PE=3 SV=1
MNVELFDFDLPAELIAQVPLKNRTDSRLMVLNKESGEIRHDTFKNIGDYFKKEDCLVLNDTRVLPARLYGAKQDTGAKIEVLLLKQQDGDRWETLVKPAKRVRKGTKIDFGDGLLSAVCVGEAEHGGRILEFSYEGIFYEVLEGLGEMPLPPYIKEQLDDRDRYQTVFARERGSAAAPTAGLHFTEALLEQLRVLGVHIAFITLHVGLGTFRPVNVENIHEHQMHAEFYQVSEGTARLLNDVRSKGGRIITVGTTSTRTLETIAAAHDGTFVAESGWTDIFIYPGYQFKAIDGMITNFHLPMSTLIMLVSALAGRENVLNAYQIAVKERYRFFSFGDAMLLL

SEQ ID NO: 63698 - protein, 342 aa, Bacillus canaveralius
  misc_feature (1)..(342): tr|A0A2N5GH72|A0A2N5GH72_9BACI S-adenosylmethionine:tRN A ribosyltransferase-isomerase OS=Bacillus canaveralius OX=1403243 GN=queA PE=3 SV=1
MNVELFDFDLPAELIAQVPLKNRTDSRLMVLNKESGEIRHDTFKNIGDYFKKGDCLVLNDTRVLPARLYGAKQDTGAKIEVLLLKQQDGDRWETLVKPAKRVRKGTKIDFGDGLLSAVCVGEAEHGGRILEFSYEGIFYEVLEGLGEMPLPPYIKEQLDDRDRYQTVFARERGSAAAPTAGLHFTEALLEQLRVLGVHIAFITLHVGLGTFRPVNVENIHEHQMHAEFYQVSEGTARLLNDVRSKGGRIITVGTTSTRTLETIAAAHDGTFVAESGWTDIFIYPGYHFKAIDGMITNFHLPMSTLIMLVSALAGRENVLNAYQIAVKERYRFFSFGDAMLLL

SEQ ID NO: 63699 - protein, 342 aa, Bacillus caseinilyticus
  misc_feature (1)..(342): tr|A0A1H3K6A5|A0A1H3K6A5_9BACI S-adenosylmethionine:tRN A ribosyltransferase-isomerase OS=Bacillus caseinilytic us OX=1503961 GN=queA PE=3 SV=1
MDISQFDFHLPEELIAQTPLKDRTASKLLVLHRKTGRKEHRHFRDLLDYLTPGDVIVLNDTKVLPARLFGVKEETGAKIEILLLKDEGEHTWEVLAKPAKRLKAGTQISFGDGKLVGTCVGEAPDGLRKIKFTFSGIFNEILDQLGQMPLPPYIQEQLEEQERYQTVYAKHSGSAAAPTAGLHFTKEFLENVKEKGINIVYVTLHVGLGTFRPVAVENIEKHEMHAEYYEMTERTAEVLNAAKEQGNNIVAVGTTSARTLETIATKHHGHFQASSGWTDIFIYPGYMFKGIDGLLTNFHLPKSTLVMLVSAFAGRENTLSAYSEAVDRKYRFFSFGDAMLLL

SEQ ID NO: 63700 - protein, 342 aa, Bacillus cavernae
  misc_feature (1)..(342): tr|A0A3S0VWR3|A0A3S0VWR3_9BACI S-adenosylmethionine:tRN A ribosyltransferase-isomerase OS=Bacillus cavernae OX= 1674310 GN=queA PE=3 SV=1
MKVELFDFHLPEELIAQVPLEHREQSRLMVLDKETGAIQHEIFKDITEYLQPGDCLVLNDTRVLPARLYGSKEDTGANVEVLLLKQEEGDAWETLVKPAKRIKEGTKIVFGDGKLTATCTDVLDHGGRVLAFAYEGIFYEVLEELGSMPLPPYIKEQLEDKERYQTVYAKERGSAAAPTAGLHFTEQLLEGIKEKGVHIAFITLHVGLGTFRPVSADDVDDHEMHAEFYQMTEGTARLLNEVKANGGRIITVGTTSTRTLETIASKHDGLFKEESGWTSIFIFPGYQFKGIDAMITNFHLPKSTLIMLISTLAGREHVLHAYETAVKEKYRFFSFGDAMLIK

SEQ ID NO: 63701 - protein, 342 aa, Bacillus cellulosilyticus
  misc_feature (1)..(342): tr|E6TV72|E6TV72_BACCJ S-adenosylmethionine:tRNA ribosy ltransferase-isomerase OS=Bacillus cellulosilyticus (st rain ATCC 21833 / DSM 2522 / FERM P-1141 / JCM 9156 / N -4) OX=649639 GN=queA PE=3 SV=1
MDVTQFDFHLPEELIAQTPLADRTASRLLVLNRENGSIEHRHFKDLLQYFSKGDVLVLNNTKVLPARLFGIKEDTGAKIELLLLREESDYTWEALVKPAKRVKIGTKIVIGEGKLIGKCVEELPEGIRKIQFEFDGIFNEILDELGEMPLPPYIQEQLDEKDRYQTVFAKHSGSAAAPTAGLHFTKELLQNIEQLGVHIVFITLHVGLGTFRPVAVENVKEHTMHEEYYDMTSEAASVLNEARSNGNKIIAVGTTSVRTLETIASKHDGAFTASSGWTNIFIYPGYQYKAIDGMITNFHLPKSTLVMLVSAFAGRGNILSAYNAAVEKKYRFFSFGDAMLII

SEQ ID NO: 63702 - protein, 350 aa, Bacillus cereus
  misc_feature (1)..(350): sp|C1ESW2|QUEA_BACC3 S-adenosylmethionine:tRNA ribosylt ransferase-isomerase OS=Bacillus cereus (strain 03BB102 ) OX=572264 GN=queA PE=3 SV=1
MDINLFDFHLPEELIAQVPLEERETSRLMVLDRETGDIEHKHFTDILSYLHEGDCLVLNETKVMPARLHGVKEDTGAHIEVLLLKQEEGDKWETLVKPAKRVKEGTVISFGEGKLKATCTGTADQGGRQLEFSYDGIFYEILDELGEMPLPPYIKETLEDRDRYQTVYAKEIGSAAAPTAGLHFTEELLEKLKQKGVELAFITLHVGLGTFRPVSADTIEEHHMHAEYYHMSEETAALLNRVKENGGRIITVGTTSTRTLETIATDHNGKLCAASGWTDIFMYPGYEFKAIDGLITNFHLPKSTLIMLVSAFANRDNVLHAYNEAVKEKYRFFSFGDAMFIASHAKMGNK

SEQ ID NO: 63703 - protein, 350 aa, Bacillus cereus
  misc_feature (1)..(350): tr|J8JPW3|J8JPW3_BACCE S-adenosylmethionine:tRNA ribosy ltransferase-isomerase OS=Bacillus cereus VD102 OX=1053 228 GN=queA PE=3 SV=1
MDINLFDFHLPEELIAQVPLEERETSRLMVLDRETGDIEHKHFTDILSYLHEGDCLVLNETKVMPARLHGVKEDTGAHIEVLLLKQEEGDKWETLVKPAKRVKEGTVISFGEGKLKATCTGTADQGGRQLEFSYDGIFYEILDELGEMPLPPYIKETLEDRDRYQTVYAKEIGSAAAPTAGLHFTEELLEKLKQKGVELAFITLHVGLGTFRPVSADTIEEHHMHAEYYYMSEETAALLNRVKENGGRIITVGTTSTRTLETIATDHDGKLCAASGWTDIFMYPGYEFKAIDGLITNFHLPKSTLIMLVSAFANRDNVLHAYNEAVKEKYRFFSFGDAMFVASHAKMGNK

SEQ ID NO: 63704 - protein, 342 aa, Bacillus circulans
  misc_feature (1)..(342): tr|A0A553SKD2|A0A553SKD2_BACCI S-adenosylmethionine:tRN A ribosyltransferase-isomerase OS=Bacillus circulans OX =1397 GN=queA PE=3 SV=1
MKVDLFDFHLPEELIAQVPLKDRTSSRLMVVDKETGSLEHRTFKDIIEYINPGDCLVLNDTRVLPARLHGEKEDTGAHIEVLLLKQQEGEQWETLVKPAKRVKKGTIISFGAGKLKAVCKEELEHGGRVLEFLYDGIFYEILDELGEMPLPPYIKETLDDQDRYQTVYAKERGSAAAPTAGLHFTEELLEELKAKGVHIAFITLHVGLGTFRPVNVDDIDKHEMHAEFYQLTAGTAKLLNKVREEGGRILSVGTTSTRTLETIASANDGKFVESNGWTSIFIYPGYEFKGIDGMITNFHLPKSTLIMLVSALSSRENILHAYETAVQERYRFFSFGDAMFIR

SEQ ID NO: 63705 - protein, 342 aa, Bacillus circulans
  misc_feature (1)..(342): tr|A0A0J1L000|A0A0J1L000_BACCI S-adenosylmethionine:tRN A ribosyltransferase-isomerase OS=Bacillus circulans OX =1397 GN=queA PE=3 SV=1
MKVDLFDFYLPEELIAQTPLEDRTSSRLMIVNKETGDLEHRKFKDIYEYINPGDCLVLNDTRVLPARLHGEKEDTGAHIEVLLLKQQKDDKWETLVKPAKRVKEGTIISFGDGTLKAVCVKELEHGGRILDFQYEGIFYEILDQLGEMPLPPYIKEKLDDQDRYQTVYAKERGSAAAPTAGLHFTTELLDALKKKGVHIAFITLHVGLGTFRPVNVEDVDKHEMHAEFYQLNKETAALLNSVRGQGGRIISVGTTSTRTLETIASANNGEFVESSGWTSIFIYPGYEFKGIDGMITNFHLPKSTLIMLVSALAGRENILHAYETAVKERYRFFSFGDAMFIQ

SEQ ID NO: 63706 - protein, 342 aa, Bacillus clausii
  misc_feature (1)..(342): sp|Q5WHR3|QUEA_BACSK S-adenosylmethionine:tRNA ribosylt ransferase-isomerase OS=Bacillus clausii (strain KSM-K1 6) OX=66692 GN=queA PE=3 SV=1
MDVNEFDFDLPEELIAQTPLKTRTNSRLLVVDKKTKAISDRMFPDLIEALSPGDCLVLNDTKVMPARLLGEKVETKAVIELLLLKQLEGDCWETLVKPAKRVKIGTEVSFGDGKLTAICTAVQPQGGRIFEFRYSGVFYELLEELGTMPLPPYIKERLEDADRYQTVYAKQIGSAAAPTAGLHFSEQLLLEIEAKGVKIVYITLHVGLGTFRPVSASSVEDHQMHAEYYQVTEEAAHTLASARENGGNIIAVGTTSARTLETIYSDHGAFVAASGWTSIFIYPGYKYQAIDGLLTNFHLPKSTLVMLVSALIGKEALMDAYAHAIKERYRFFSFGDAMFIRP

SEQ ID NO: 63707 - protein, 333 aa, Bacillus clausii
  misc_feature (1)..(333): tr|A0A268NTG8|A0A268NTG8_BACCS S-adenosylmethionine:tRN A ribosyltransferase-isomerase OS=Bacillus clausii OX=7 9880 GN=CHH72_21735 PE=3 SV=1
MMLIPTEKRLDADTPPEKRGQMRDGVRLLTYWSDSGRIVHGGFFQLAHQLEAGDVLVFNNSRTIPAELKTVDGIRVRLSREVEDGTWDGLILGESSKKLEFMHGLKALVTGPGTEPPLVRLVFSCSSSRLLRELYRQGDVIRYEHVARSWPLQDYQTVYASIPGSVEMPSAGRAFTWRMLAHLQKHGIRLAFVTLHAGLSYYGDDKWPNPALHPEAFSIEDEQAAIINDAKANGGRVIAVGTTVVRALETASDGNTIIPQAGVTSLYLSRTSKLTAVDGLLTGFHEQEASHIDLLQTFAGEEGVKAIYKEAVAKRYLWHEFGDMNLLMRQERS

SEQ ID NO: 63708 - protein, 342 aa, Bacillus coagulans
  misc_feature (1)..(342): tr|A0A133KWW5|A0A133KWW5_BACCO S-adenosylmethionine:tRN A ribosyltransferase-isomerase OS=Bacillus coagulans OX =1398 GN=queA PE=3 SV=1
MKLDLFDYELPEELIAQTPLKNRSDSRLMVLDKKTGEIEHSVFKNITQYLRPGDCLVLNNTKVLPARLFGIKDETGAKIEVLLLKQLEGDRWETLVKPAKRVKTGTVIRFGDGQLSAVCAEELDHGGRVMEFQYEGIFYEVLNELGKMPLPPYIKEQLEDQDRYQTVYAKEPGSAAAPTAGLHFTEALLKEIEAMGVKIVYITLHVGLGTFRPVNEENIENHDMHAEFYQVSEEAARTITEVKENGGRVVSVGTTSTRTLETVASAHDGKIVASSGWTDIFIYPGYQYKAIDALITNFHLPKSTLIMMVSALAGRENILHAYETAVKEKYRFFSFGDAMLIK

SEQ ID NO: 63709 - protein, 342 aa, Bacillus coagulans
  misc_feature (1)..(342): tr|A0A0C5C6H8|A0A0C5C6H8_BACCO S-adenosylmethionine:tRN A ribosyltransferase-isomerase OS=Bacillus coagulans OX =1398 GN=queA PE=3 SV=1
MKLDLFDYDLPEELIAQTPLKNRSDSRLMVLDKKTGEIEHSVFKNITQYLRPGDCLVLNNTKVLPARLIGIKDETGAKIEVLLLKQLEGDRWETLVKPAKRVKTGTVVRFGDGKLSAVCAEELDHGGRVMKFRYEGIFYEVLNELGKMPLPPYIKEQLEDQDRYQTVYAKEPGSAAAPTAGLHFTEALLKKIEAMGVKIVYITLHVGLGTFRPVNEENIENHDMHAEFYQVSEEAARTIMEVKENGGRVVSVGTTSTRTLETVASAHGGKIAASSGWTDIFIYPGYQYKAIDALITNFHLPKSTLIMMVSALAGRENILHAYETAVKEKYRFFSFGDAMLIK

SEQ ID NO: 63710 - protein, 342 aa, Bacillus coahuilensis
  misc_feature (1)..(342): tr|A0A147K719|A0A147K719_9BACI S-adenosylmethionine:tRN A ribosyltransferase-isomerase OS=Bacillus coahuilensis p1.1.43 OX=1150625 GN=queA PE=3 SV=1
MKVEDFDFYLPEELIAQTPLEERSKSRLMVIDKITGDIKHRVFEDILEDLHEGDCLVLNDTRVLPARLYGVKEETGAKVECLLLKQEEGDEWETLIKPAKRVKVGTVLTFGDGRLKAECVAEKDHGGRMMRFIYDGIFYEVLEELGEMPLPPYIRETLDDRDRYQTVFAKERGSAAAPTAGLHFTEDLLKKIGGKGVHIAFITLHVGLGTFRPVSVESIEEHDMHAEFYQMTEGTARLLNEVKERGGSIITVGTTSTRTLETIASKYDGQFREESGWTDIFIYPGYEFKGIDAMITNFHLPKSTLIMLVSALAGKEHVLHAYETAVKEKYRFFSFGDAMFIK

SEQ ID NO: 63711 - protein, 342 aa, Bacillus cohnii
  misc_feature (1)..(342): tr|A0A223KT89|A0A223KT89_9BACI S-adenosylmethionine:tRN A ribosyltransferase-isomerase OS=Bacillus cohnii OX=33 932 GN=queA PE=3 SV=1
MKVDLFDFHLPEELIAQIPLENREASRLMVLNKENGNVAHEPSFRSILQYVQAGDCLVLNDTRVLPARLFGMKEDTGAKVEVLLLKQEEGDVWETLVKPAKRVKKGTIITFGDGRLKAVCVEEKEHGGRMLEFQYEGIFYEVLEGLGEMPLPPYIKEQLDDQERYQTVFARERGSAAAPTAGLHFTEELLEEMRTKGVHIAFITLHVGLGTFRPVNVDNIEEHDMHAEFYQMTEETANELNTVRENGGRIITVGTTSTRTLETIVSEHGMFKEASGWTNIFIYPGYTFKAIDGMLTNFHLPKSTLIMLVSALAGRDNVIHAYEEAVKEKYRFFSFGDAMLIL

SEQ ID NO: 63712 - protein, 342 aa, Bacillus cucumis
  misc_feature (1)..(342): tr|A0A2N5H6X6|A0A2N5H6X6_9BACI S-adenosylmethionine:tRN A ribosyltransferase-isomerase OS=Bacillus cucumis OX=1 740721 GN=queA PE=3 SV=1
MKVDLFDFHLPEELIAQVPLKTRTDSRLMVLNKQTGEINHEVFKNITEYLREGDCLVLNDTKVLPARLFGVKSDTGAKIEVLLLKQQEGDQWETLVKPAKRVKIGTEIVFGDGLLTAVCIEESEHGGRVLEFKYTGIFYEVLDQLGEMPLPPYIKEQLEDRDRYQTVYAREPGSAAAPTAGLHFTESLLEEIKAKGVHIAFITLHVGLGTFRPVSVDDVLEHDMHAEFYTVTEGTAQLLNDVRQNGGRIITVGTTSTRTLETIASANNGVFTAGSGWTSIFIYPGYEFKAIDGMITNFHLPKSTLIMLVSALAGRENVLHAYNTAVAERYRFFSFGDAMFII

SEQ ID NO: 63713 - protein, 350 aa, Bacillus cytotoxicus
  misc_feature (1)..(350): sp|A7GTA0|QUEA_BACCN S-adenosylmethionine:tRNA ribosylt ransferase-isomerase OS=Bacillus cytotoxicus (strain DS M 22905 / CIP 110041 / 391-98 / NVH 391-98) OX=315749 G N=queA PE=3 SV=1
MDINLFDFHLPEELIAQTPLEKRETSRLMVLDRETGDIEHKHFSDILAYLHEGDCLVLNETKVMPARLHGVKEDTGAHIEVLLLKQEEGDTWETLVKPAKRVKEGTVISFGEGKLKATCVGTADQGGRQLEFSYDGIFYEILDELGEMPLPPYIKETLEDRDRYQTVYAKEIGSAAAPTAGLHFTEELLEKLQQKGVKLAFITLHVGLGTFRPVSTDKIEDHHMHAEYYHMSQETADLLNDVKVNGGRIITVGTTSTRTLETIATEHDGKLCGASGWTDIFMYPGYEFKAIDGLITNFHLPKSTLIMLVSAFAGRENVLHAYNEAVKEKYRFFSFGDAMFLASHAKERMK

SEQ ID NO: 63714 - protein, 350 aa, Bacillus cytotoxicus; identical to SEQ ID NO: 63713
  misc_feature (1)..(350): tr|A0A2S1AE43|A0A2S1AE43_9BACI S-adenosylmethionine:tRN A ribosyltransferase-isomerase OS=Bacillus cytotoxicus OX=580165 GN=queA PE=3 SV=1

SEQ ID NO: 63715 - protein, 342 aa, Bacillus daliensis
  misc_feature (1)..(342): tr|A0A1H0BLA3|A0A1H0BLA3_9BACI S-adenosylmethionine:tRN A ribosyltransferase-isomerase OS=Bacillus daliensis OX =745820 GN=queA PE=3 SV=1
MDVSQFDYELPEELIAQTPLRDREASRMLVLDKEKGSRMHEYFHQLTNYLEPGDTLVLNNTKVIPARLFGIKKDTGAKIEVLLLKEDIGHVWEALVKPAKRIKKGTVIEFGEGLLQAQCLEELPDGRRKLAFQFEGIFHEILDELGEMPLPPYIQQQLEEKDRYQTVFAKHRGSAAAPTAGLHFTETMIEKLKQNGIEIAYLTLHVGLGTFRPVSVEDVESHTMHAEFYNLPGSTADVLNETKNRGGRIIAVGTTSARTLETIARDQDGIFTGSTGWTDIFIYPGFEFRAIDGLLTNFHLPKSTLVMLVSALAGREAVLEAYKEAVAQKYRFFSFGDAMLII

SEQ ID NO: 63716 - protein, 342 aa, Bacillus deserti
  misc_feature (1)..(342): tr|A0A2N5M9H5|A0A2N5M9H5_9BACI S-adenosylmethionine:tRN A ribosyltransferase-isomerase OS=Bacillus deserti OX=6 73318 GN=queA PE=3 SV=1
MKVDLFDFHLPEELIAQTPLEQRAESRLMVLDKETGEINHEIFKNIKNYLTPGDVLVLNDTKVLPARLFGIKTDTGAKIEVLLLKQQEGNKWEALVKPAKRIKEGTEILFGDGQLRAVCEDVGEHGGRILNFHYEGIFYEVLEELGQMPLPPYIKEQLEDQDRYQTVYARERGSAAAPTAGLHFTEELLAEIQEMGVHIAFITLHVGLGTFRPVSVEDIDEHEMHSEYYIMTEGTARLLNQVKQEGNRIITVGTTSTRTLESIAAKNGGVFKEESGWTNIFIYPGYEFKAIDGMITNFHLPKSTLIMLVSALAGRDHILHAYNTAVEERYRFFSFGDAMFIR

SEQ ID NO: 63717 - protein, 343 aa, Bacillus deserti
  misc_feature (1)..(343): tr|A0A2N5M0U3|A0A2N5M0U3_9BACI S-adenosylmethionine:tRN A ribosyltransferase-isomerase OS=Bacillus deserti OX=6 73318 GN=CUU66_20895 PE=3 SV=1
MIPAKNRAFHLPPELNASVPPERRGINRDHVKMMVLDRKTGMYEHDHFYNIDRHLRPGDLIVLNNSRTIPAVLSASLKRSFITIVDKVEIRLARRKGEGVWDALIVSDKAKAGDILEFSDHLKAAILHIDKNKPLQTIKFSQTGGELFNSIYELGEPVRYEYIQTPWSLDYYQTVYATNPGSVEMPSAGRAFTWELLFKLQKKGIRIAFLQLHTGLSYLLDDKWIMNPAENSEEYDIPEATLQAIVQTKSEGGRVIAAGTTVVRALETAAAQVKRKGWTNLYIHSDFKLKAVDGIITGMHEPEASHLDMLSAFVKSEYLMRSYQDAISKEYLWHEFGDMNLII

SEQ ID NO: 63718 - protein, 341 aa, Bacillus enclensis
  misc_feature (1)..(341): tr|A0A0V8HMN6|A0A0V8HMN6_9BACI S-adenosylmethionine:tRN A ribosyltransferase-isomerase OS=Bacillus enclensis OX =1402860 GN=queA PE=3 SV=1
MNVEDFDFHLPEELIAQTPLEHRSESRLMVLDKENGSIEHYRFKNIVDFLEEGDCLVLNDTKVLPARLFGQKGDTGANIEVLLLKQEDGDQWETLVKPAKRVRVGTEIVFGDGKLKAVCVGLKDHGGRILEFHYEGIFYEVLDELGEMPLPPYIRERLDEQDRYQTVFARERGSAAAPTAGLHFTEELLEDLRAKGIHIAFITLHVGLGTFRPVSVDNIEEHDMHAEFYQVSEGTARLLNEVKERGGRIITVGTTSTRTLETIASKHGEFVEENGWTNIFIYPGYEFKGIDGLITNFHLPKSTLIMLVSALAGRENVLNAYETAVREKYRFFSFGDAMFIK

SEQ ID NO: 63719 - protein, 338 aa, Bacillus enclensis
  misc_feature (1)..(338): tr|A0A1C4D578|A0A1C4D578_9BACI S-adenosylmethionine:tRN A ribosyltransferase-isomerase OS=Bacillus enclensis OX =1402860 GN=GA0061094_3581 PE=3 SV=1
MNEAIFEIPRQLNASAPVELTGKSRDEVKLMVLNRKTGSVEHSRFTQLHTQLKRGDVLVVNNSRTIPASLRGTQGSREVEVRLSRKVGSREWDALILGPVYDARLPITFADGVKAFMSGNGSEKPLVRLTFSVEGAGFYDFLYKNGQPIRYEYIDAPWPLDYYQNVYGSVPGSVEMASAGRAFSWKLITKLRAEGIEVVCLQLHAGLSYYGDDRWPNPVHHPEEYHLPQETADSIRRAKREGNRVIAVGTTVVRALETVAAGHDGNVAAASGVTNLYITKESPLRVVDGLITGLHEPEASHLDLLQAFISRQHLMSAYRTAVAKGYLWHEFGDMNLIL

SEQ ID NO: 63720 - protein, 342 aa, Bacillus endophyticus
  misc_feature (1)..(342): tr|A0A329EQ92|A0A329EQ92_9BACI S-adenosylmethionine:tRN A ribosyltransferase-isomerase OS=Bacillus endophyticus OX=135735 GN=queA PE=3 SV=1
MKVDLFDFHLPEELIAQTPLKERDKSRLMVLDKKTGELAHDHFYNIGDYLQEGDCLVLNDTRVLPARLFGTKEETGANIEVLLLKQEEGDVWETLVKPAKRVRKGTVITFGDGRLKAICQEEMDQGGRMLEFHYEGIFYEVLESLGEMPLPPYIKERLEDRERYQTVYAREQGSAAAPTAGLHFTEDLIEQLKEKGVHIAFITLHVGLGTFRPVSAEDLEEHDMHAEFYQMTEGTAALLNNVKEQGGRIVSVGTTSTRTLETIASKHDGQFVASSGWTSIFIFPGYEFKAIDGMITNFHLPKSTLIMLISALAGRENVLHAYNKAVEEKYRFFSFGDAMFIR

SEQ ID NO: 63721 - protein, 342 aa, Bacillus endozanthoxylicus
  misc_feature (1)..(342): tr|A0A5J5HV50|A0A5J5HV50_9BACI tRNA preQ1(34) S-adenosy lmethionine ribosyltransferase-isomerase QueA OS=Bacill us endozanthoxylicus OX=2036016 GN=queA PE=4 SV=1
MKVDLFDFHLPEELIAQTPLLDRTSSRLMVLDKETGSITHDIFKHIRNYLKPGDCLVLNDTRVLPARLYGAKEDTGAKIEVLLLKQQENDQWETLVKPAKRIKKGAKIVFGNGLLTAVCIEELEHGGRILDFQYEGIFYEVLDQLGEMPLPPYIKEQLEDQDRYQTVYARERGSAAAPTAGLHFTEELLDEIRAAGIHIAFITLHVGLGTFRPVSVDDIDQHEMHSEFYQMTEGTAALLNEVRSSGGRIISVGTTSTRTLETIASEYNGRFEARSGWTDIFIYPGYEFKAIDGMITNFHLPKSTLIMLVSSLAGRKAVLNAYETAVQERYRFFSFGDAMLII

SEQ ID NO: 63722 - protein, 342 aa, Bacillus filamentosus
  misc_feature (1)..(342): tr|A0A3A5IYF7|A0A3A5IYF7_9BACI S-adenosylmethionine:tRN A ribosyltransferase-isomerase OS=Bacillus filamentosus OX=1402861 GN=queA PE=3 SV=1
MKVDLFDFHLPEELIAQTPLKERDKSRLMVLDKKTGELAHDHFYNIGDYLQEGDCLVLNDTRVLPARLFGTKAETGANIEVLLLKQEEGDVWETLVKPAKRVRKGTVITFGDGRLKAICQEEMDQGGRMLEFHYEGIFYEVLESLGEMPLPPYIKERLEDRERYQTVYAREQGSAAAPTAGLHFTEELIEQLKEKGVHIAFITLHVGLGTFRPVSAEDLEEHDMHAEFYQMTEGTAALLNNVKAQGGRIVSVGTTSTRTLETIASKHDGQFVASSGWTSIFIFPGYEFKAIDGMITNFHLPKSTLIMLISALAGRENVLHAYNKAVEEKYRFFSFGDAMFIR

SEQ ID NO: 63723 - protein, 342 aa, Bacillus filamentosus
  misc_feature (1)..(342): tr|A0A1X7CVA1|A0A1X7CVA1_9BACI S-adenosylmethionine:tRN A ribosyltransferase-isomerase OS=Bacillus filamentosus OX=1402861 GN=queA PE=3 SV=1
MKVDLFDFHLPEELIAQTPLKERDKSRLMVLDKKTGELAHDHFYNIGDYLQEGDCLVLNDTRVLPARLFGTKAETGANIEVLLLKQEEGDVWETLVKPAKRVRKGTVITFGDGRLKAICQEEMDQGGRMLEFHYEGIFYEVLESLGEMPLPPYIKERLEDRERYQTVYAREQGSAAAPTAGLHFTEELIEQLKEKGVHIAFITLHVGLGTFRPVSAEDLEEHDMHAEFYQMTEGTAALLNNVKEQGGRIVSVGTTSTRTLETIASKHDGQFVASSGWTSIFIFPGYEFKAIDGMITNFHLPKSTLIMLISALAGRENVLHAYNKAVEEKYRFFSFGDAMFIR

SEQ ID NO: 63724 - protein, 342 aa, Bacillus firmus
  misc_feature (1)..(342): tr|W7L410|W7L410_BACFI S-adenosylmethionine:tRNA ribosy ltransferase-isomerase OS=Bacillus firmus DS1 OX=130743 6 GN=queA PE=3 SV=1
MKVDWFDFHLPEELIAQTPLADRTSSRLMVLDKKTGDIQHSVFKDIKNYLKAGDCLVLNDTKVLPARLFGEKTGTGAKIEVLLLKQIEGDSWETLVKPAKRVKEGTEITFGDGKLTAVCTGTSDHGGRVLEFRYQGIFYEVLEQLGEMPLPPYIKEQLDDRDRYQTVFARERGSAAAPTAGLHFTEQLLEEIKKMGVHIAFITLHVGLGTFRPVSVDDINEHEMHAEFYQVTEGTARLLNDVREQGGRIISVGTTSTRTLETIASAHNGHFAEASGWTDIFIYPGYDFKAIDGMITNFHLPKSTLIMLVSALAGRENVLNAYNQAVEERYRFFSFGDAMLIL

SEQ ID NO: 63725 - protein, 342 aa, Bacillus firmus
  misc_feature (1)..(342): tr|A0A366JWW3|A0A366JWW3_BACFI S-adenosylmethionine:tRN A ribosyltransferase-isomerase OS=Bacillus firmus OX=13 99 GN=queA PE=3 SV=1
MKVDWFDFHLPEELIAQTPLADRTSSRLMILDKKTGNLQHSVFKDIKNYLKSGDCLVLNDTKVLPARLFGEKTGTGAKIEVLLLKQLEGDSWETLVKPAKRVKEGTEITFGNGNLTAVCTGTSDHGGRVLEFKYDGIFYEVLEQLGEMPLPPYIKEQLDDRDRYQTVFARERGSAAAPTAGLHFTEELLEEIKEMGVHIAFITLHVGLGTFRPVNVEDLNEHEMHSEFYQVTEGTARLLNEVREHGGRIISVGTTSTRTLETIASLHNGRFEESSGWTDIFIYPGYEFKAIDGMITNFHLPKSTLIMLVSALAGRENVLNAYNQAVEERYRFFSFGDAMLIL

SEQ ID NO: 63726 - protein, 342 aa, Bacillus flexus
  misc_feature (1)..(342): tr|A0A4P8X5C3|A0A4P8X5C3_9BACI S-adenosylmethionine:tRN A ribosyltransferase-isomerase OS=Bacillus flexus OX=86 664 GN=queA PE=3 SV=1
MKVDLFDFHLPEELIAQTPLEKRDASRLMVVNKETGEVRHHMFQDLLDYLQEGDCLVLNDTRVLPARLFGTKEDTGANIEVLLLKQTEGDMWETLVKPAKRVKEGTVISFGDGRLTAVCKGVSDQGGRLLEFKYDGIFYEVLEQLGEMPLPPYIKERLDDRERYQTVFAREQGSAAAPTAGLHFTEEMLEEIKVKGVHIAFLTLHVGLGTFRPVSVDDLEEHDMHAEYYQVSEETASLLNSVREQGGRIISVGTTSTRTLETIATEHDGVFKASSGWTSIFIFPGYEFKAIDGMITNFHLPKSTLIMLVSALAGREHIIGAYETAVKEKYRFFSFGDAMLIL

SEQ ID NO: 63727 - protein, 342 aa, Bacillus foraminis
  misc_feature (1)..(342): tr|A0A4R2BFE0|A0A4R2BFE0_9BACI S-adenosylmethionine:tRN A ribosyltransferase-isomerase OS=Bacillus foraminis OX =279826 GN=queA PE=3 SV=1
MKVDLFDFHLPEELIAQVPLMERAKSRLMVLDKQTGEVQHSTFKNIKEYLRPGDCLVLNDTRVLPARLFGMKEDTGAKIEVLLLKQLEGDRWETLVKPAKRVKEGTKLVFGDGLLSAVCTGTSDHGGRELEFSYKGIFYEVLEELGEMPLPPYIKEQLDDKERYQTVFAKERGSAAAPTAGLHFTEALLEELKEMGVLITFITLHVGLGTFRPVSAESVDEHEMHAEFYQVSEGTARLLNEVREKGGRIVTVGTTSTRTLETIASANDGKFIGASGWTDIFIFPGYEFKGIDGMITNFHLPKSTLIMLVSALAGRENVLHAYNLAVKDRYRFFSFGDAMLIL

SEQ ID NO: 63728 - protein, 342 aa, Bacillus fortis
  misc_feature (1)..(342): tr|A0A443J420|A0A443J420_9BACI S-adenosylmethionine:tRN A ribosyltransferase-isomerase OS=Bacillus fortis OX=25 4758 GN=queA PE=3 SV=1
MKVDMFDFDLPEELIAQTPLKNRSSSRLMVLNKLTGEIKHETFSKLIDYLNPGDCLVLNDTKVLPARLFGIKTDTGAKVEVLLLKQVHGDCWETLVKPAKRVKTGTVISFGDGQLKAVCTGTEEHGGRLFEFQYEGIFYEILDALGKMPLPPYIKEQLEDQDRYQTVYARERGSAAAPTAGLHFTNELLENIKEKGVHVTFITLHVGLGTFRPVSVDSVEDHDMHAEFYRMSEETADLLNKVKKDGGRIISVGTTSTRTLETIAGANDGLFIAGSGWTDIFIYPGYTFQAVDGLVTNFHLPMSTLIMLVSALAGREHILHAYETAVQEKYRFFSFGDAMLII

SEQ ID NO: 63729 - protein, 342 aa, Bacillus freudenreichii
  misc_feature (1)..(342): tr|A0A3S4TUA0|A0A3S4TUA0_9BACI S-adenosylmethionine:tRN A ribosyltransferase-isomerase OS=Bacillus freudenreich ii OX=1783501 GN=queA PE=3 SV=1
MKVEMFDFDLPEELIAQVPLEDRSSSRLMVLNKRTGALRHETFSHVIDYLNPGDCLVLNDTKVLPARLFGTKKDTGAKVEVLLLKQVNGDRWETLVKPAKRVKIGTEIIFGDGQLRAVCTGMEEHGGRLFEFQYDGIFYEILDALGKMPLPPYIKEQLEDQDRYQTVYARERGSAAAPTAGLHFTNNMIEKIKEKGVHVTFITLHVGLGTFRPVSAESVEDHDMHAEFYRMSEETASLLNDVKKSGGRIISVGTTSTRTLETIASANDGLFKPGSGWTDIFIFPGYKFQAIDGLITNFHLPMSTLIMLVSALAGREHVLHAYNTAVQEKYRFFSFGDAMLVL

SEQ ID NO: 63730 - protein, 350 aa, Bacillus gaemokensis
  misc_feature (1)..(350): tr|A0A073KIT6|A0A073KIT6_9BACI S-adenosylmethionine:tRN A ribosyltransferase-isomerase OS=Bacillus gaemokensis OX=574375 GN=queA PE=3 SV=1
MDINLFDFHLPEELIAQTPLEERETSRLMVLDRETGDIEHKHFTDILSYLHEGDCLVLNETKVMPARLHGVKEDTGAHIEVLLLKQEDGDKWETLVKPAKRVKEGTVISFGEGKLKATCIGTADQGGRQLEFSYDGIFYEILDELGEMPLPPYIKETLEDRDRYQTVYAKEIGSAAAPTAGLHFTEELLEKLKQKGVGLAFITLHVGLGTFRPVSADTIEEHHMHAEYYHMSEETAELLNRVKENGGRIITVGTTSTRTLETIATDHDGKLCAASGWTDIFMYPGYEFKAIDGLITNFHLPKSTLIMLVSAFSNRENVLHAYNEAVKEKYRFFSFGDAMFVASHLKTRNK

SEQ ID NO: 63731 - protein, 342 aa, Bacillus galactosidilyticus
  misc_feature (1)..(342): tr|A0A178A263|A0A178A263_9BACI S-adenosylmethionine:tRN A ribosyltransferase-isomerase OS=Bacillus galactosidil yticus OX=217031 GN=queA PE=3 SV=1
MKLEQFDFELPEELIAQVPLENRSSSRLMVLDKETGKISHETFHNLIAFLRKGDCLVLNDTKVLPARLFGLKVDTGAKVEVLLLKQLNGDQWETLVKPAKRLKKGMTLTFGDGQLKAVCLDELEHGGRILEFQYEGIFYEVLDQLGKMPLPPYIKTQLEDQDRYQTVYAKERGSAAAPTAGLHFTEDLLKQIQDQGIRVAYITLHVGLGTFRPVNVDEIEEHDMHSEFYRMSKETADLLNQTREEGGRIISVGTTSTRTLETIASSHQGHFVETNGWTDIFIYPGYEFKAIDGMITNFHLPKSTLIMLVSALAGREHVLYAYKEAVREKYRFFSFGDAMLLI

SEQ ID NO: 63732 - protein, 342 aa, Bacillus ginsengihumi
  misc_feature (1)..(342): tr|A0A0A6VH09|A0A0A6VH09_9BACI S-adenosylmethionine:tRN A ribosyltransferase-isomerase OS=Bacillus ginsengihumi OX=363870 GN=queA PE=3 SV=1
MKIDLFDFDLPESLIAQTPLKNRSDSRLMVLDKKTGEIEHTVFKNITEYLHPGDCLVLNDTKVLPARLFGVKEDTGANIEVLLLKQQENDQWETLVKPAKRVKAGTEIIFGEGKLKATCIEELDHGGRIMKFDYEGIFYEVLNELGEMPLPPYIKEQLDDQDRYQTVYAREVGSAAAPTAGLHFTESLLKEIEKMGVKIIFITLHVGLGTFRPVSVDEIENHDMHAEFYQVSEEAAKAIMDVKKNGGRVISVGTTSTRTLETIASEHDGNIVATSGWTDIFIYPGYEFKGIDAMITNFHLPKSTLIMLVSALAGREHVLHAYETAVKEQYRFFSFGDAMFIK

SEQ ID NO: 63733 - protein, 342 aa, Bacillus glycinifermentans
  misc_feature (1)..(342): tr|A0A1C3SHG5|A0A1C3SHG5_9BACI S-adenosylmethionine:tRN A ribosyltransferase-isomerase OS=Bacillus glyciniferme ntans OX=1664069 GN=queA PE=3 SV=1
MKVDLFDFDLPERLIAQVPLKERDASRLMVLDKKTGDITHSTFKHIIDFLNPGDLLVLNDTRVLPARLFGIKEETGAKVEVLLLKQEEGDVWETLVKPAKRVKKGTVLTFGDGRLTAVCKEELDHGGRKIEFRYEGIFYEVLDSLGEMPLPPYIKEQLDDKERYQTVYSKKQGSAAAPTAGLHFTEEILKALEEKGVQIAFITLHVGLGTFRPVSAENVEEHDMHAEFYEMTEETAAILNRVKEDGGRIISVGTTSTRTLETIASENDGRFKEARGWTSIFIYPGYTFKAIDGMITNFHLPKSSLIMLVSALAGREHILSAYRTAVEHEYRFFSFGDAMLIQ

SEQ ID NO: 63734 - protein, 342 aa, Bacillus glycinifermentans
  misc_feature (1)..(342): tr|A0A0J6ES92|A0A0J6ES92_9BACI S-adenosylmethionine:tRN A ribosyltransferase-isomerase OS=Bacillus glyciniferme ntans OX=1664069 GN=queA PE=3 SV=1
MKVDLFDFDLPERLIAQVPLKERDASRLMVLDKKTGDITHSSFKHIIDFLNPGDLLVLNDTRVLPARLFGIKEETGAKVEVLLLKQEEGDVWETLVKPAKRVKKGTVLTFGDGRLTAVCKEELDHGGRKIEFRYEGIFYEVLDSLGEMPLPPYIKEQLDDKERYQTVYSKKQGSAAAPTAGLHFTEEILKELEEKGVQIAFITLHVGLGTFRPVSADNVEEHDMHAEFYEMTEETAAILNRVKEDGGRIISVGTTSTRTLETIASENDGRFKEARGWTSIFIYPGYTFKAIDGMITNFHLPKSSLIMLVSALAGREHILSAYRTAVEHEYRFFSFGDAMLIQ

SEQ ID NO: 63735 - protein, 344 aa, Bacillus gobiensis
  misc_feature (1)..(344): tr|A0A0M3RAL4|A0A0M3RAL4_9BACI S-adenosylmethionine:tRN A ribosyltransferase-isomerase OS=Bacillus gobiensis OX =1441095 GN=AM592_18935 PE=3 SV=1
MNTSLMKFHIPEALHAADPPEKRLSARDQVKLLVLDRQTGKFKHDQFVHIRSYLEKGDLLIFNNSRTIPAVLRANHNGKSVEVRLSRRLSDSEWDVLLPESRLNIGENLKFSNGVSAIITGYGSVPPLVKIDFPARGTDLLHLFYETGDPIRYEYIHHPWPLEAYQTVFATAPGSVEMPSAGRAFSWKLIKDLKKEGIGIAFLSLHAGLSYYGNDKWPSPKKHPETYSVPKSTAEKINEAKRNGKRVIAVGTTVVRALETAAGANGLVEAEEGTTSLYVTKNYPLRAADGLITGFHEPEASHLDMLTSFVQEEFLLSAYQNAISKNYLWHEFGDMNIILPLKGK

SEQ ID NO: 63736 - protein, 342 aa, Bacillus gobiensis
  misc_feature (1)..(342): tr|A0A0M4FJU1|A0A0M4FJU1_9BACI S-adenosylmethionine:tRN A ribosyltransferase-isomerase OS=Bacillus gobiensis OX =1441095 GN=queA PE=3 SV=1
MKVNLFDFDLPEHLIAQVPLQERDASRLMVLDKKTGEITHSAFKEITSFFKPGDCLVLNNTRVLPARLHGHKPETGGNVEVLLLKQEENDTWETLAKPARRVKIGTKLSFGDGRLTAECIGEKDHGGRILRFSYQGIFYEVLESLGEMPLPPYIKEQLGDKERYQTVYSKEAGSAAAPTAGLHFTEEILTDLEEKGVYVAYITLHVGLGTFRPVNADDIEAHEMHAEFYEMNTETAELLNRVKKEGGRIVAVGTTSTRTMETIAQNYDGRFEASSGWTSIFIYPGYTFQAIDAMITNFHLPKSSLIMLVSALATRENILHAYEEAVRNEYRFFSFGDAMLIK

SEQ ID NO: 63737 - protein, 347 aa, Bacillus halodurans
  misc_feature (1)..(347): sp|Q9KDI6|QUEA_BACHD S-adenosylmethionine:tRNA ribosylt ransferase-isomerase OS=Bacillus halodurans (strain ATC C BAA-125 / DSM 18197 / FERM 7344 / JCM 9153 / C-125) O X=272558 GN=queA PE=3 SV=1
MNVRDFDFHLPEKLIAQTPLKDRTASRLLVLDKHTGAVEDKKFPDLLQFIEAGDCLVLNDTRVLPARLFGVKEETGAQVEVLLLKQMEGDRWETLVKPAKRLKVGTIIRFGNGELTATCVQELEHGGRVLEFSYEGIFHEVLDQLGEMPLPPYIKEQLDDKDRYQTVFAKNRGSAAAPTAGLHFTEELLDQLKQKGVHLAFITLHVGLGTFRPVSVEEIEEHEMHAEFYQMSAGTARLLNEVKRQGGRIIAVGTTSARTLETIRQEHDEFVETSGWTSIFIYPGYEFKGIDGLITNFHLPKSTLVMLVSALAGRENLLNAYAHAVKQSYRFFSFGDAMFIYDKKTNS

SEQ ID NO: 63738 - protein, 336 aa, Bacillus halodurans
  misc_feature (1)..(336): tr|Q9KAS6|Q9KAS6_BACHD S-adenosylmethionine:tRNA ribosy ltransferase-isomerase OS=Bacillus halodurans (strain A TCC BAA-125 / DSM 18197 / FERM 7344 / JCM 9153 / C-125) OX=272558 GN=BH2211 PE=3 SV=1
MNHAPTFSIPDHLNASEPIERQGKQRSDVRMLVLDRDSHRTFHEPFTAIANYLQQGDVLVLNRSRTIPSRLIGSLHGETIELRLSHERRDGLWDGLILSSSELHAGDRIFLSSSLSATLIEKDEHTPLWRVAFSKRGAQLLEYVYRYGEPIGYEYIKSSLSIQDYQTVYSSAPGSVEMCSAGRPFTWQLLARLKQKGVRIAFLELHTGLSYYENDVWPDPAHHPEHYHIPKETIEELKKGKRIIAVGTTVVRALETYAQTNRSQGTTTLSIDAGYELQLATGLLTGFHEPQASHLHMLAAFVQEQELFRVYEQAIRQGYQWHEFGDVNFILPLGDM

SEQ ID NO: 63739 - protein, 342 aa, Bacillus halotolerans
  misc_feature (1)..(342): tr|A0A3Q9RXM3|A0A3Q9RXM3_9BACI S-adenosylmethionine:tRN A ribosyltransferase-isomerase OS=Bacillus halotolerans OX=260554 GN=queA PE=3 SV=1
MKVDLFDFELPERLIAQVPLVQRDASRLMVLDKHTGELTDSSFKQIISFFKEGDCLVLNNTRVLPARLFGTKEDTGAKVELLLLKQEAGDRWETLVKPAKRVKKGTVVTFGDGRLKAVCTEELEHGGRKVEFQYDGIFYEVLESLGEMPLPPYIKEQLDDRERYQTVFSKEIGSAAAPTAGLHFTEDILQQLKDKGVQIEFITLHVGLGTFRPVSADEVEEHNMHAEFYQMSEETAAALNSVREKGGRIISVGTTSTRTLETIAGEHDGRFKASSGWTSIFIYPGYEFKAIDGMITNFHLPKSSLIMLVSALAGRENVLRAYNHAVEEEYRFFSFGDAMLII

SEQ ID NO: 63740 - protein, 342 aa, Bacillus halotolerans
  misc_feature (1)..(342): tr|A0A2S9WN15|A0A2S9WN15_9BACI S-adenosylmethionine:tRN A ribosyltransferase-isomerase OS=Bacillus halotolerans OX=260554 GN=queA PE=3 SV=1
MKVDLFDFELPERLIAQVPLEQRDASRLMVLDKHTGELTDSSFKQIISFFKEGDCLVLNNTRVLPARLFGTKEDTGAKVELLLLKQEAGDRWETLVKPAKRVKKGTVVTFGDGRLKAVCTEELEHGGRKVEFQYDGIFYEVLESLGEMPLPPYIKEQLDDRERYQTVFSKEIGSAAAPTAGLHFTEDILQQLKDKGVQIEFITLHVGLGTFRPVSADEVEEHNMHAEFYQMSEETAAALNSVREKGGRIISVGTTSTRTLETIAGEHDGRFKASSGWTSIFIYPGYEFKAIDGMITNFHLPKSSLIMLVSALAGRENVLRAYNHAVEEEYRFFSFGDAMLII

SEQ ID NO: 63741 - protein, 342 aa, Bacillus haynesii
  misc_feature (1)..(342): tr|W7RUU2|W7RUU2_9BACI S-adenosylmethionine:tRNA ribosy ltransferase-isomerase OS=Bacillus haynesii OX=1925021 GN=queA PE=3 SV=1
MKVELFDFDLPERLIAQVPLKERDASRLMVLDKKTGEITHSTFKHVIDFLNAGDCIVLNDTRVLPARLYGVKEETGAKVEVLLLKQEEGDVWETLVKPAKRVKRGTVLSFGDGRLTAVCTDELEHGGRKIEFRYEGIFYEVLESLGEMPLPPYIKEQLDDRERYQTVYSKKQGSAAAPTAGLHFTEEILDALRKKGVHIAFITLHVGLGTFRPVSADNVEEHDMHAEFYEMSEETAALLNRVKQDGGRIISVGTTSTRTLETIASEHDGRFLEARGWTSIFIYPGYTFRAIDGMITNFHLPKSSLIMLVSALAGREHVLSAYRTAVEQEYRFFSFGDAMLIK

SEQ ID NO: 63742 - protein, 342 aa, Bacillus haynesii
  misc_feature (1)..(342): tr|A0A1R1RH28|A0A1R1RH28_9BACI S-adenosylmethionine:tRN A ribosyltransferase-isomerase OS=Bacillus haynesii OX= 1925021 GN=queA PE=3 SV=1
MKVELFDFDLPERLIAQVPLKERDASRLMVLDKKTGEITHSTFKHVIDFLNAGDCIVLNDTRVLPARLYGVKEETGAKVEVLLLKQEEGDVWETLVKPAKRVKRGTVLSFGDGRLTAVCTDELEHGGRKIEFRYEGIFYEVLESLGEMPLPPYIKEQLDDRERYQTVYSKKQGSAAAPTAGLHFTEEILDALRKKGVHIAFITLHVGLGTFRPVSADNVEEHDMHAEFYEMSEETAALLNRVRQDGGRIISVGTTSTRTLETIASEHDGRFLEARGWTSIFIYPGYTFRAIDGMITNFHLPKSSLIMLVSALAGREHVLSAYRTAVEQEYRFFSFGDAMLIK

SEQ ID NO: 63743 - protein, 341 aa, Bacillus hemicellulosilyticus
  misc_feature (1)..(341): tr|W4QEC7|W4QEC7_9BACI S-adenosylmethionine:tRNA ribosy ltransferase-isomerase OS=Bacillus hemicellulosilyticus JCM 9152 OX=1236971 GN=queA PE=3 SV=1
MNVEEFDFDLPEELIAQTPLLDRTASRLLVLDRKQEDMKDRTFTNVLDELQAGDCLVLNDSRVLPARLYGTKHETGAHIEVLLLKQEEGHVWETLVKPAKRVKEGTVIVFGNGQLRAKCVGEAEHGGRMLEMKFEGIFHEVLEELGEMPLPPYIKEKLPDQERYQTVYSKHSGSAAAPTAGLHFTNELLEEVKAKGVHVAFITLHVGLGTFRPVSVDTIEEHKMHAEFYQMSEQTAQLLNSAREQGGRIIAVGTTSARTLETIMSEHRTFKECSGWTSIFIYPGYEFKGIDGLLTNFHLPKSTLMMLVSAFGGTDFMMGAYAHAIRERYRFFSFGDAMLIV

SEQ ID NO: 63744 - protein, 342 aa, Bacillus hisashii
  misc_feature (1)..(342): tr|A0A267TQ71|A0A267TQ71_9BACI S-adenosylmethionine:tRN A ribosyltransferase-isomerase OS=Bacillus hisashii OX= 996558 GN=queA PE=3 SV=1
MKLEDFDYYLPDELIAQTPLQDRAASRLMVLNKQTGEIEHKIFSDIIHYLNPGDCLVLNDTKVMPARLFGMKEDTNAHVEVLLLKQIEGDKWETLVKPAKRIKPGTVISFGGGKLHAKCIDTLEYGGRIFEFQYDGIFYEILDELGEMPLPPYIKKRLDDADRYQTVYAREIGSAAAPTAGLHFTEKLLADIKNKGVHIAFITLHVGLGTFRPVNVESIEEHEMHAEFYHMTEETANLLNEVKKNGRRIISVGTTSTRTLETIAARHNGSFVAESGWTDIFIYPGFQFKAIDCLITNFHLPKSTLIMLVSALAGREHILHAYETAVKERYRFFSFGDAMFIH

SEQ ID NO: 63745 - protein, 342 aa, Bacillus horikoshii
  misc_feature (1)..(342): tr|A0A1Y0CQD5|A0A1Y0CQD5_9BACI S-adenosylmethionine:tRN A ribosyltransferase-isomerase OS=Bacillus horikoshii O X=79883 GN=queA PE=3 SV=1
MKIDLFDFHLPEELIAQTPLEQREASRLMVLNKQTGNLTHEPTFRSILDYVKEGDCLVLNDTRVLPARLFGVKSETGAKIEVLLLKQLEGDTWETLIKPAKRVKEGTVVSFGDGRLTAICTGESEHGGRKLDFRYEGIFYEVLDSLGEMPLPPYIKEQLEDRDRYQTVFARETGSAAAPTAGLHFTEELLDALKDKGVHTAFITLHVGLGTFRPVSVDSVEEHDMHAEFYQMSEGTARLLNDVRSNGGRIITVGTTSTRTLETIARDHGEFKEASGWTNIFIYPGYKFAAIDGMITNFHLPKSTLIMLVSALAGRENVMHAYEEAVKERYRFFSFGDAMLIL

SEQ ID NO: 63746 - protein, 342 aa, Bacillus horikoshii
  misc_feature (1)..(342): tr|A0A5D4T7J3|A0A5D4T7J3_9BACI S-adenosylmethionine:tRN A ribosyltransferase-isomerase OS=Bacillus horikoshii O X=79883 GN=queA PE=3 SV=1
MKIDLFDFHLPEELIAQTPLEQREASRLMVLNKQTGNLTHEPTFRSILDYVKEGDCLVLNDTRVLPARLFGVKSETGAKIEVLLLKQLEGDTWETLIKPAKRVKEGTVVSFGDGRLTAICTGESEHGGRKLDFRYDGIFYEVLDSLGEMPLPPYIKEQLEDRDRYQTVFARETGSAAAPTAGLHFTEELLDALKDKGVHTAFITLHVGLGTFRPVSVISVEEHDMHAEFYQMSEGTARLLNDVRSNGGRIITVGTTSTRTLETIARDHGEFKEASGWTNIFIYPGYKFAAIDGMITNFHLPKSTLIMLVSALAGRENVMHAYEQAVKERYRFFSFGDAMLIL

SEQ ID NO: 63747 - protein, 342 aa, Bacillus horneckiae
  misc_feature (1)..(342): tr|A0A2N0ZAU5|A0A2N0ZAU5_9BACI S-adenosylmethionine:tRN A ribosyltransferase-isomerase OS=Bacillus horneckiae O X=549687 GN=queA PE=3 SV=1
MKVDLFDFHLPEELIAQTPLKERANSRLMVLNKETGELQHDTFKNIKDYLKQGDALVLNDTRVLPARLFGVKEDTGAKIEVLLLKQQAGDRWETLIKPAKRVKVGTTLIFRDGLLRAQCIEESDHGGRILDFQYDGIFYEVLDRLGEMPLPPYIKEQLEDRDRYQTVYARENGSAAAPTAGLHFTEALLQEIREMGVELLFITLHVGLGTFRPVSVDEVTEHDMHAEFYHMTAETADRLNEVRANGGKIISVGTTSTRTLETIATAHNGHFTEASGWTDIFIYPGYEFKAIDGMITNFHLPKSTLIMLISALAGREHVLHAYNRAVEERYRFFSFGDAMLIK

SEQ ID NO: 63748 - protein, 345 aa, Bacillus horneckiae
  misc_feature (1)..(345): tr|A0A2N0Z8C6|A0A2N0Z8C6_9BACI S-adenosylmethionine:tRN A ribosyltransferase-isomerase OS=Bacillus horneckiae O X=549687 GN=CWS20_27625 PE=3 SV=1
MKAAARSFLIPNYLNANTPAEYRGIQRDHVRLMTLDPVTGETFHNFFYQLNACLREGDLLVLNNSRTIPAVLKGKKQKQAIELHLSRKLSNHEWEGLIVGGVFTIGEKIDFPGDLTATITGLGNEAPLIILSFSKGGLDLYDAIYRYGEPLHYEYIETPWPLEMYQTVYASVPGSVEMPSAGRAFSWKLLNKLKQKGVKIAFVQLHAGLSYYGNDRWPNPSKHLEVFCVPKETAELVNKTKKNNGRVIAVGTTVVRALETAVNNAGNVEAQEGITRLYIQKGYPLKAVDGLLTGFHEPEASHLDLLTAFIEEDYLMKAYNEALTTGYLWHEFGDMNLILPMEEKL

SEQ ID NO: 63749 - protein, 348 aa, Bacillus hwajinpoensis
  misc_feature (1)..(348): tr|A0A4U1MIV3|A0A4U1MIV3_9BACI S-adenosylmethionine:tRN A ribosyltransferase-isomerase OS=Bacillus hwajinpoensi s OX=208199 GN=queA PE=3 SV=1
MKVNDFDFELPERLIAQVPLKERTKSRLMVLDPAEQKLEHREFSNLEDYIKPGDCLVLNDTRVMPARLYGTKEETGAKIEVLLLKQLENDSWETLVKPAKRVKPGTEISFGDGRLTAICIESLEHGGRVLEFKYDGVFYEVLDQLGEMPLPPYITETLDDQERYQTVFAKNRGSAAAPTAGLHFTEEMLERLENKGVHVAFITLHVGLGTFRPVSVDNILEHEMHGEFYQLTKGTAELLNRVKDEGGRIISVGTTSTRTLETVASSHEGRFEEASGWTDIFIYPGYTFKAIDGLITNFHLPQSTLIMLVSALAGREFIISAYRKAVEEEYRFFSFGDAMLILEGSTKE

SEQ ID NO: 63750 - protein, 342 aa, Bacillus indicus
  misc_feature (1)..(342): tr|A0A084GWX5|A0A084GWX5_BACID S-adenosylmethionine:tRN A ribosyltransferase-isomerase OS=Bacillus indicus OX=2 46786 GN=queA PE=3 SV=1
MKVDLFDFDLPEELIAQVPLLERDASRLMVLDKESGSVEHGKFKSIIDYFHEGDCLVLNNTRVLPARLIGEKKDTGAKIELLLLKQEQGDVWEVLAKPAKRVKVGTEIVFGDGILRAVCTGEADHGGRMLEFKYEGIFYEALDSLGKMPLPPYIKEQLDDQERYQTVFSREVGSAAAPTAGLHFTEEILEALKEKGVHLAFITLHVGLGTFRPVSADVVEEHEMHAEFYQMSAGTAQLLNQVREKGGRIISVGTTSTRTLETIASANNGTFKEDSGWTSIFIYPGYEFKAIDGMVTNFHLPKSSLIMLVSALATREHVMHAYETAVKEKYRFFSFGDAMLII

SEQ ID NO: 63751 - protein, 342 aa, Bacillus infantis
  misc_feature (1)..(342): tr|U5LGD1|U5LGD1_9BACI S-adenosylmethionine:tRNA ribosy ltransferase-isomerase OS=Bacillus infantis NRRL B-1491 1 OX=1367477 GN=queA PE=3 SV=1
MKVEMFDFHLPEELIAQTPLEDRTSSRLMVLDKEDGALQHETFKNLPEYLNPGDCLVLNDTRVLPARLFGAKEGTGAKIEVLLLKQQEGDVWETLIKPAKRVKEGTRIEFGDGLLSAVCTGTEEQGGRLLKFNYEGIFYEVLEQLGEMPLPPYIKEQLDDRERYQTVYAKERGSAAAPTAGLHFTEELLDEIREKGVHIAFITLHVGLGTFRPVSVEDIHEHSMHAEYYQVTEGTARLLNEVRENGGRIITVGTTSTRTLETIADANEGRLEAGSGWTSIFIYPGYEFKAIDGMITNFHLPKSTLIMLISALAGRENVLNAYNEAVKERYRFFSFGDAMLII

SEQ ID NO: 63752 - protein, 342 aa, Bacillus infantis
  misc_feature (1)..(342): tr|A0A5D4SS94|A0A5D4SS94_9BACI S-adenosylmethionine:tRN A ribosyltransferase-isomerase OS=Bacillus infantis OX= 324767 GN=queA PE=3 SV=1
MKVEMFDFHLPEELIAQTPLEDRTSSRLMVLDKEDGALQHETFKNLPEYLNPGDCLVLNDTRVLPARLFGAKEGTGAKIEVLLLKQQEGDVWETLIKPAKRVKEGTRIEFGDGLLSAVCTGTEEQGGRLLKFNYEGIFYEVLEQLGEMPLPPYIKEQLDDRERYQTVYAKERGSAAAPTAGLHFTEELLDEIREKGVHIAFITLHVGLGTFRPVSVEDIHEHSMHAEYYQVTEGTARLLNEVRENGGRIITVGTTSTRTLETIADANEGRFEAGSGWTSIFIYPGYEFKAIDGMITNFHLPKSTLIMLISALAGRENVLNAYNEAVKERYRFFSFGDAMLII

SEQ ID NO: 63753 - protein, 342 aa, Bacillus intestinalis
  misc_feature (1)..(342): tr|A0A136GCY7|A0A136GCY7_9BACI S-adenosylmethionine:tRN A ribosyltransferase-isomerase OS=Bacillus intestinalis OX=1963032 GN=queA PE=3 SV=1
MKVDLFDFELPERLIAQVPLEQRDASRLMVLDKHTGELTDSSFKHIISFFNEGDCLVLNNTRVLPARLFGTKEDTGAKVELLLLKQEAGDRWETLAKPAKRVKKGTVVTFGDGRLKAVCTEELEHGGRKMEFQYDGIFYEVLESLGEMPLPPYIKEQLDDRERYQTVYSKEIGSAAAPTAGLHFTEEILQQLKDKGVQIEFITLHVGLGTFRPVSADDVEEHNMHAEFYQMSEETAAALNKVREKGGRIISVGTTSTRTLETIAGEHDGQFKASSGWTSIFIYPGYEFKAIDGMITNFHLPKSSLIMLVSALAGRENVLRAYNHAVEEEYRFFSFGDAMLIL

SEQ ID NO: 63754 - protein, 342 aa, Bacillus koreensis
  misc_feature (1)..(342): tr|A0A0M0L7E6|A0A0M0L7E6_9BACI S-adenosylmethionine:tRN A ribosyltransferase-isomerase OS=Bacillus koreensis OX =284581 GN=queA PE=3 SV=1
MKIDLFDFNLPEELIAQTPLEKRDASRLMVVNKETGELHHEHFHNIIEHLNEGDCLVLNDTRVLPARLFGTKDETGANVEVLLLKQEEGNEWETLVKPARRIKVGTTITFGDGRLTAVCTREGNQGGRHLEFKYEGIFYEILEQLGEMPLPPYIKERLDDRERYQTVYAREEGSAAAPTAGLHFTEELLEKIKQKGVHVAFITLHVGLGTFRPVSADTIEDHDMHAEFYQMSEGTAALLNKVKEEGGRIVSVGTTSTRTLETIATAHDGKFVASSGWTSIFIFPGYEFKGISGMITNFHLPKSTLVMLVSALAGRENILHAYNTAVEERYRFFSFGDAMLII

SEQ ID NO: 63755 - protein, 341 aa, Bacillus krulwichiae
  misc_feature (1)..(341): tr|A0A1X9M710|A0A1X9M710_9BACI S-adenosylmethionine:tRN A ribosyltransferase-isomerase OS=Bacillus krulwichiae OX=199441 GN=queA PE=3 SV=1
MNVEDFSFDLPEELIAQTPLPDRTASRLLVLDKKTGETKDCQFVSIIDELNEGDCLVLNDTRVLPARLYGIKADTGANIEVLLLKQVEGDLWETLVKPAKRVKKGTKIQFGDGRLVAVCTGEADHGGRILRMEYSGIFHEVLDALGEMPLPPYIKETLPDQERYQTVFAKNRGSAAAPTAGLHFTNELLEKIKQKGVHIAFITLHVGLGTFRPVSVEKIEEHEMHSEFYQMSAGTAQLLQSVRENNKRVIAVGTTSARTLETIVSEHGDYKEASGWTSIFIYPGYDVKGFDGLLTNFHLPKSTLVMLVSAVAGREHILNAYRHAVKERYRFFSFGDAMFIR

SEQ ID NO: 63756 - protein, 342 aa, Bacillus kyonggiensis
  misc_feature (1)..(342): tr|A0A4U1DDJ3|A0A4U1DDJ3_9BACI S-adenosylmethionine:tRN A ribosyltransferase-isomerase OS=Bacillus kyonggiensis OX=1037680 GN=queA PE=3 SV=1
MKVDLFDFHLPEELIAQTPLQDRTSSRLMVLNKETGEIEHETFKNIKNYLRAGDCIVLNDTRVLPARLFGEKEDTGAKIEVLLLKQVEGDTWETLVKPAKRIKEGSVITFGNGLLSAICVGEKEHGGRLLKFSYEGIFYEVLEALGEMPLPPYIKEQLEDKDRYQTVYAKERGSAAAPTAGLHFTETLLEELKEMGVHIAFITLHVGLGTFRPVSVDDIDEHEMHAEFYQVSEETATLLNEVRQNGGRIVTVGTTSTRTLETIASAYDGKFVAASGWTSIFIYPGYEFKAIDGMITNFHLPKSTLIMLVSALAGREHVLNAYNTAVEEKYRFFSFGDAMLII

SEQ ID NO: 63757 - protein, 338 aa, Bacillus lehensis
  misc_feature (1)..(338): tr|A0A4Y7WFQ6|A0A4Y7WFQ6_9BACI S-adenosylmethionine:tRN A ribosyltransferase-isomerase OS=Bacillus lehensis OX= 300825 GN=E2L03_17200 PE=3 SV=1
MTNLVSLHEAFSLPAHLHAHTPAELRGNDRSDVKLLHTERKSGRIQDHTLTDLTELLQPNDLLLFNRSRTIPAQLVSETDNVTVRLARQLTETSWEALILGKDKTVVQLQDGVTLHVQGDGSEAPLKRVTFQGLQEPVLSFLHKYGEPIRYEYINTPWSLESYQTVFASVPGSIEMPSAGRAFSWKLIHQLKQNQIQVGFLTLHAGISYYEDNQWPDPLHHPEAYMIPAETITAIHEAKARGGRIIAVGTTVVRAVESYAKNKPSHQGAWTDTTNLFIQRETPLQLVDGLLSGLHEPHSSHLELLRAFLPDDALLSSYQHALQNNYLWHEFGDVHLML

SEQ ID NO: 63758 - protein, 338 aa, Bacillus lehensis
  misc_feature (1)..(338): tr|A0A060M6B9|A0A060M6B9_9BACI S-adenosylmethionine:tRN A ribosyltransferase-isomerase OS=Bacillus lehensis G1 OX=1246626 GN=BleG1_3536 PE=3 SV=1
MTNLVSFHEAFSLPAHLHAHTPAELRGNDRSDVKLLHTERKNGRIQDRTLIDLTELLQPNDLLLFNRSRTIPAQLVSETDNVTVRLARQLTETSWEALILGKDKTVVQLQDGVTLHVQGDGSEAPLKRVTFHGLQEPVLSFLHKYGEPIRYEYINTPWSLEAYQTVFASVPGSIEMPSAGRAFSWKLIHQLKQNHIQVGFLTLHAGISYYEDNQWPDPLHHPEAYMIPAETITAIHEAKARGGRIIAVGTTVVRAVESYAQKKPSHQGAWTDTTNLFIQRKTPLQLVDGLLSGLHEPHSSHLELLRAFLPDDALLSSYQHALQNNYLWHEFGDVHLML

SEQ ID NO: 63759 - protein, 342 aa, Bacillus lentus
  misc_feature (1)..(342): tr|A0A2X4WDY5|A0A2X4WDY5_BACLE S-adenosylmethionine:tRN A ribosyltransferase-isomerase OS=Bacillus lentus OX=14 67 GN=queA PE=3 SV=1
MKVNMFDFELPEELIAQVPLENRTESRLMVLDKQTGSIRHEIFKNIKNYLQKGDCLVLNDTKVLPARLLGAKVDTNAKIEVLLLKQLEGDKWETLVKPAKRVKIGTVISFGNGKLTATCVGVEKHGGRILEFRYGGIFYEVLEELGKMPLPPYIKEQLEDQARYQTVFAKERGSAAAPTAGLHFTKELLEELKENGVIITFITLHVGLGTFRPVSVGDINEHEMHSEFYRVSEETAELLNDVRRSGGRIITVGTTSTRTLETITAENNGEFKAGNGWTDIFIYPGYSFKAIDGMLTNFHLPMSTLIMLVSALAGRENVLQAYNEAVKERYRFFSFGDAMLIK

SEQ ID NO: 63760 - protein, 342 aa, Bacillus licheniformis
  misc_feature (1)..(342): sp|Q65GP8|QUEA_BACLD S-adenosylmethionine:tRNA ribosylt ransferase-isomerase OS=Bacillus licheniformis (strain ATCC 14580 / DSM 13 / JCM 2505 / NBRC 12200 / NCIMB 937 5 / NRRL NRS-1264 / Gibson 46) OX=279010 GN=queA
MKVELFDFDLPERLIAQVPLKERDASRLMVLDKKTGEITHSTFKHVIDFLNAGDCIVLNDTRVLPARLYGVKEETGAKVEVLLLKQEEGDVWETLVKPAKRVKRGTVLSFGDGRLTAVCTEELEHGGRKIEFRYEGIFYEVLESLGEMPLPPYIKEQLDDRERYQTVYSKKQGSAAAPTAGLHFTEEILDALREKGVHIAFITLHVGLGTFRPVSAENVEEHDMHAEFYEMSEETAALLNRVRQEGGRIISVGTTSTRTLETIASEHDGRFREASGWTSIFIYPGYTFRAIDGMITNFHLPKSSLIMLVSALAGREHVLSAYRTAVEHEYRFFSFGDAMLIK

SEQ ID NO: 63761 - protein, 342 aa, Bacillus licheniformis; identical to SEQ ID NO: 63760
  misc_feature (1)..(342): tr|A0A415JD36|A0A415JD36_BACLI S-adenosylmethionine:tRN A ribosyltransferase-isomerase OS=Bacillus licheniformi s OX=1402 GN=queA PE=3 SV=1

SEQ ID NO: 63762 - protein, 342 aa, Bacillus litoralis
  misc_feature (1)..(342): tr|A0A5C6W2M2|A0A5C6W2M2_9BACI S-adenosylmethionine:tRN A ribosyltransferase-isomerase OS=Bacillus litoralis OX =152268 GN=queA PE=3 SV=1
MKVELFDFHLPEELIAQVPLMERDASRLMVLKKETGEIKHESFKAIIDYFNEGDCLVLNNTRVMPARLFGVKEDTGASIEILLLKQQEDNVWETLVKPAKRVKEGTVVTFGSGVMKATCVGSSEHGGRLLKFDYEGIFYEVLETLGEMPLPPYIKEQLDDRERYQTVFSREIGSAAAPTAGLHFTEEILEQLKSKGVHIAFITLHVGLGTFRPVSADTVEEHEMHAEFYQVTEGTAALLNETRAKGGRIISVGTTSTRTLETIASKHNGQYVSENGWTNIFIYPGYEFKGIDGMITNFHLPKSSLIMLVSALASRENVMNAYETAVKEQYRFFSFGDAMLII

SEQ ID NO: 63763 - protein, 342 aa, Bacillus litoralis
  misc_feature (1)..(342): tr|A0A179SXE2|A0A179SXE2_9BACI S-adenosylmethionine:tRN A ribosyltransferase-isomerase OS=Bacillus litoralis OX =152268 GN=queA PE=3 SV=1
MKVELFDFHLPEELIAQVPLKERDASRLMVLHKETGELQHKSFKSVIDYFHSGDCLVLNNTRVMPARLFGMKEDTGASIEILLLKQQEADVWETLVKPAKRVKEGTVITFGSGILKATCVGTSEHGGRLLQFDYDGIFYEVLDSLGEMPLPPYIKEQLDDRERYQTVFSREIGSAAAPTAGLHFTEEILDQLKEKGVHIGFITLHVGLGTFRPVSAETVEEHDMHAEFYQVSEGTASLLNEVRSRGGRIISVGTTSTRTLETIASKNEGQYVAESGWTNIFIYPGYEFKGIDGMITNFHLPKSSLIMLVSALASREYVMNAYTAAVKEKYRFFSFGDAMLII

SEQ ID NO: 63764 - protein, 342 aa, Bacillus loiseleuriae
  misc_feature (1)..(342): tr|A0A0K9GXV7|A0A0K9GXV7_9BACI S-adenosylmethionine:tRN A ribosyltransferase-isomerase OS=Bacillus loiseleuriae OX=1679170 GN=queA PE=3 SV=1
MKVDLFDFHLPEELIAQVPLLDRESSRLMVLNKETGEIAHETFKQITNYLKPGDCLVLNDTKVLPARLFGNKDGTGAKIEVLLLKQQETDSWETLVKPAKRIKEGSVIVFGDGKLKAVCTGVLEHGGRILDFSYEGIFYEVLDELGTMPLPPYIKEQLDDQDRYQTVFARERGSAAAPTAGLHFTDQLLEKIKEMGVHIAFITLHVGLGTFRPVSVDDIDNHDMHSEFYQMTADTAQILNQVRSAGGRIITVGTTSTRTLETIATRHDGVFQEESGWTSIFIHPGYEFKGIDGMITNFHLPKSTLIMLVSALSNREHVLHAYETAVLEKYRFFSFGDAMLII

SEQ ID NO: 63765 - protein, 348 aa, Bacillus lonarensis
  misc_feature (1)..(348): tr|A0A1G6JQM6|A0A1G6JQM6_9BACI S-adenosylmethionine:tRN A ribosyltransferase-isomerase OS=Bacillus lonarensis O X=1464122 GN=queA PE=3 SV=1
MIKGDGMKVEAFDFELPEELIAQTPLPARADSRLLIIDKNTKALTDTTFTAIVDELMPGDCLVLNDTKVLPARLFGAKKDTGGAVEVLLLKQEAEDVWETLVKPAKRVKVGTVLTFGEGRLQATCTAVLAHGGRMFSFSYDGVFYEILDELGTMPLPPYIRERLDEADRYQTVYAKHRGSAAAPTAGLHFTETLLKQVAEKGVSIAYVTLHVGLGTFRPVSAETIEAHDMHAEYYEVSQETANVLKETHTNGGRIIAVGTTSARTLETVYRDHGGFVACAGWTDIFIYPGYTYQAIDGLLTNFHLPKSTLVMLVSALVGREALLSAYKHAIDERYRFFSFGDAMFIRP

SEQ ID NO: 63766 - protein, 331 aa, Bacillus lonarensis
  misc_feature (1)..(331): tr|A0A1G6GZS8|A0A1G6GZS8_9BACI S-adenosylmethionine:tRN A ribosyltransferase-isomerase OS=Bacillus lonarensis O X=1464122 GN=SAMN05421737_102187 PE=3 SV=1
MMATIIEATTPMERLGKTRDAVRMLVYGANTNNMWHDLFTSLPQFLRPDDVLVFNNSRTIPARLRLQGGGEVRLSRHVSEQVWDVLIMEDESAVVGKMLTFVGSLTATLLGEGSERPLKRLKFHASALEVVNYLYKYGEVIRYEYVKEPWPLADYQTVYGTMPGSVEMASAGRAFTWRLLASLRAHGVSFATITLHAGLSYYEDDRWPQPSLHPELFTVTKENAAIINKAKAAGGRIIAVGTTVVRTLETVAHRGRVCAGAGETTLHVQHPEQFTVIDGLLTGFHEREASHMQLLEAFIGDRGVRAVYDEAVAHNYHWHEFGDMNLLLKDR

SEQ ID NO: 63767 - protein, 342 aa, Bacillus luciferensis
  misc_feature (1)..(342): tr|A0A1E2VVX5|A0A1E2VVX5_9BACI S-adenosylmethionine:tRN A ribosyltransferase-isomerase OS=Bacillus luciferensis OX=178774 GN=queA PE=3 SV=1
MDVNLFDFDLPEELIAQTPLLDREASRLMVLHKESGNVEHKQFPDVLDYLQEGDCLVLNETKVMPARLFGVKEDTGAQIEVLLLQQEEQDVWETLVKPAKRVKEGTIILFGDGRLKAECVGSSDQGGRKLKFQYDGIFYEILDQLGEMPLPPYIKEKLEDKDRYQTVFAKEIGSAAAPTAGLHFTKELLAKVQEKGVKLAFITLHVGLGTFRPVSVESIEEHDMHSEYYYMSEETAELLNETKANGGKIITVGTTSTRTVETIATANNGKFEGASGWTSIFIFPGYKFMGIDGMITNFHLPKSTLIMLISALAGREPVLAAYKEAVEQKYRFFSFGDAMLIL

SEQ ID NO: 63768 - protein, 350 aa, Bacillus luti
  misc_feature (1)..(350): tr|A0A1J9ZXB2|A0A1J9ZXB2_9BACI S-adenosylmethionine:tRN A ribosyltransferase-isomerase OS=Bacillus luti OX=2026 191 GN=queA PE=3 SV=1
MDINLFDFHLPEELIAQVPLEERETSRLMVLDRETGDIEHKHFTDILSYLHEGDCLVLNETKVMPARLHGVKEDTGAHIEVLLLKQEEGDKWETLVKPAKRVKEGTVISFGEGKLKATCTGTADQGGRQLEFSYDGIFYEILDELGEMPLPPYIKETLEDRDRYQTVYAKEIGSAAAPTAGLHFTEELLEKLKQKGVELAFITLHVGLGTFRPVSADTIEEHHMHAEYYHMSEETAALLNRVKENGGRIITVGTTSTRTLETIATDHDGKLCAASGWTDIFMYPGYEFKAIDGLITNFHLPKSTLIMLVSAFANRDNVLHAYNEAVKEKYRFFSFGDAMFVASHDKIGNK

SEQ ID NO: 63769 - protein, 348 aa, Bacillus manliponensis
  misc_feature (1)..(348): tr|A0A073JYQ7|A0A073JYQ7_9BACI S-adenosylmethionine:tRN A ribosyltransferase-isomerase OS=Bacillus manliponensi s OX=574376 GN=queA PE=3 SV=1
MDINLFDFHLPEELIAQTPLEQRETSRLMVLDRKTGEMQHKRFTDILSYLHEGDCLVLNETKVMPARLHGVKEDTGAHIEVLLLKQEDGDTWETLVKPAKRVKEGTIISFGEGKLKATCVGTGEQGGRHLQFSYDGIFYEILDELGEMPLPPYIKETLDDRDRYQTVFAREIGSAAAPTAGLHFTEELLEELKRKGVRLAFITLHVGLGTFRPVSADTIEEHEMHAEYYHMSEETARTLHEVQELGGRIITVGTTSTRTLETIATNNNGKLVAASGWTDIFMYPGYEFKAVDGIITNFHLPKSTLIMLVSAFAGREHVLHAYNEAVKEKYRFFSFGDAMFIATHTEGK

SEQ ID NO: 63770 - protein, 341 aa, Bacillus marisflavi
  misc_feature (1)..(341): tr|A0A0J5TDT2|A0A0J5TDT2_9BACI S-adenosylmethionine:tRN A ribosyltransferase-isomerase OS=Bacillus marisflavi O X=189381 GN=queA PE=3 SV=1
MKVEDFDFHLPEELIAQTPLENRSESRLMVLDKEDGSIDHLQFKNIVDLLDEGDCLVLNDTRVLPARLFGQKEETGANIEVLLLKQEEGDQWETLVKPAKRVKVGTEIVFGDGKLKATCVGTKDHGGRIMEFAYDGIFYEVLEELGEMPLPPYIRERLEEQDRYQTVYAKERGSAAAPTAGLHFTEELLEELKAKGVHIAFITLHVGLGTFRPVSVDSIEDHDMHSEFYQISEGTARLLNDVRDKGGRIITVGTTSTRTLETIASKHDRFVEENGWTNIFIYPGYEFKGIDGLITNFHLPKSTLIMLVSAFAGQEHVLKAYETAVQEKYRFFSFGDAMFLK

SEQ ID NO: 63771 - protein, 341 aa, Bacillus marisflavi
  misc_feature (1)..(341): tr|A0A5D4S462|A0A5D4S462_9BACI S-adenosylmethionine:tRN A ribosyltransferase-isomerase OS=Bacillus marisflavi O X=189381 GN=queA PE=3 SV=1
MKVEDFDFHLPEELIAQTPLENRSESRLMVLDKEDGSIDHLRFKNIVDLLDEGDCLVLNDTRVLPARLFGQKEETGANIEVLLLKQEEGDQWETLVKPAKRVKVGTEVVFGDGKLKATCVGTKDHGGRIMEFAYDGIFYEVLEELGEMPLPPYIRERLEEQDRYQTVYAKERGSAAAPTAGLHFTEELLEELKQKGVHIAFITLHVGLGTFRPVSVDSIEDHDMHSEFYQISEGTARLLNDVRDKGGRIITVGTTSTRTLETIASKHDRFVEENGWTNIFIYPGYEFKGIDGLITNFHLPKSTLIMLVSAFAGQEHVLKAYETAVQEKYRFFSFGDAMFLK

SEQ ID NO: 63772 - protein, 343 aa, Bacillus marmarensis
  misc_feature (1)..(343): tr|U6SP51|U6SP51_9BACI S-adenosylmethionine:tRNA ribosy ltransferase-isomerase OS=Bacillus marmarensis DSM 2129 7 OX=1188261 GN=A33I_16660 PE=3 SV=1
MMINSTIHSFKLPPYLHATTPAEVTRNQRSDVRLLTLHGDSGAWDHHTFEDIIDLLQPNDLLILNTSRTIPSSLRTVDGGEIRLSRKIDEQVWEVLILEKRLNESTTLYFDDGISASIVGPGMAPELTLIEFSIGGEGLMHFFYNHGQPITYEYIDTPWQLSHYQTVYSHQPGSVEMNSAGRAFSHKMLKQLKDKGVQISYVCLHTGLSYYENNRWPDPLRHFEWFSVGADTVEHIYKTKKGGHRVVAVGTTVVRALESAHDPKAGLQPQEGLTNVYIDKDTTLKVVDGLITGFHEPEASHLDMLCAFVQEKKLIEAYQAAINEQYLWHEFGDLNLIWKQTYA

SEQ ID NO: 63773 - protein, 341 aa, Bacillus marmarensis
  misc_feature (1)..(341): tr|U6SUE7|U6SUE7_9BACI S-adenosylmethionine:tRNA ribosy ltransferase-isomerase OS=Bacillus marmarensis DSM 2129 7 OX=1188261 GN=queA PE=3 SV=1
MDVRDFDFYLPDELIAQTPLLDRTASRLLVLDKDNGAIKDDVFSSITNYLKSGDCLVLNDTRVLPARLYGVKKDTGAKIELLLLKQLEGDKWETLAKPAKRVKKGTTITFGEGLLTATCIEETDQGGRVVELAYEGILHEVLDQLGEMPLPPYIKEQLDDQERYQTVFAKNRGSAAAPTAGLHFTEDLLQTLQDKGVHLAFITLHVGLGTFRPVSVEDVESHEMHAEYYQMSEGTARLLNEVKENGGKVVAVGTTSARTLETIMNENGTYCEASGWTSIFIYPGYKFKGIDGLLTNFHLPKSTLVMLVSALAGREHILQAYNHAVKERYRFFSFGDAMFIR

SEQ ID NO: 63774 - protein, 342 aa, Bacillus megaterium; identical to SEQ ID NO: 63673
  misc_feature (1)..(342): tr|D5DT33|D5DT33_BACMQ S-adenosylmethionine:tRNA ribosy ltransferase-isomerase OS=Bacillus megaterium (strain A TCC 12872 / QMB1551) OX=545693 GN=queA PE=3 SV=1

SEQ ID NO: 63775 - protein, 342 aa, Bacillus megaterium
  misc_feature (1)..(342): tr|A0A0B6AWG2|A0A0B6AWG2_BACMB S-adenosylmethionine:tRN A ribosyltransferase-isomerase OS=Bacillus megaterium ( strain ATCC 14581 / DSM 32 / JCM 2506 / NBRC 15308 / NC IMB 9376 / NCTC 10342 / VKM B-512) OX=1348623 GN
MKVDLFDFHLPEELIAQTPLEQRDASRLMVLNKETGSVKHHMFHDLLDYVQEGDCLVLNDTRVLPARLFGTKEDTGANIEVLLLKQTQGDTWETLVKPAKRVKEGTVISFGDGRLTAVCKETSDQGGRLLEFNYEGIFYEVLEQLGEMPLPPYIKERLDDQERYQTVFAREQGSAAAPTAGLHFTEEMLEQLKEKGVHIAFLTLHVGLGTFRPVSVDDLEEHDMHSEFYQVSEGTAALLNSVREKGGRIISVGTTSTRTLETIATEHNGKFVASSGWTNIFIFPGYEFKAIDGMITNFHLPKSTLIMLVSALAGRENVISAYEQAVVEKYRFFSFGDAMLIL

SEQ ID NO: 63776 - protein, 343 aa, Bacillus mesonae
  misc_feature (1)..(343): tr|A0A3Q9QQP8|A0A3Q9QQP8_9BACI S-adenosylmethionine:tRN A ribosyltransferase-isomerase OS=Bacillus mesonae OX=1 193713 GN=CHR53_00910 PE=3 SV=1
MAAVKTLDFYLPDNLNASHPPEKRGIRRDHVRMMVLDRRSGAVSHDHFFHLNHYLEPGDLVILNNSRTIPAVFQAEWLRGPALIAPKIEVRLARRRHDETWEALIVAAPVKIKDRLTFSTGLSATVVSEKQNSPLRVIQFSKKGPDLFNSIYELGEPVRYEYIRHPWSLDYYQTVFASHPGSVEMPSAGRAFSWELLFKLKQQGIGVDFIQLHTGLSYLLDDQWHQKPEENVEEYHIPEQTMERILKTKAAGKKVIAVGTTVVRTLETAARNGILSGMTNLYVHRDFPLKIADGILTGFHEPRASHLDMLSSFITEPHLLHAYEQAIEAGYLWHEFGDMNLII

SEQ ID NO: 63777 - protein, 342 aa, Bacillus mesonae
  misc_feature (1)..(342): tr|A0A3Q9R0W3|A0A3Q9R0W3_9BACI S-adenosylmethionine:tRN A ribosyltransferase-isomerase OS=Bacillus mesonae OX=1 193713 GN=queA PE=3 SV=1
MKVDLFDFHLPEELIAQVPLKKRTDSRLMVLNKETGDIQHEVFKDITKYLREGDCLVLNDTKVLPARLFGVKTDTGAKIEVLLLKQLEGDEWETLVKPAKRVKEGTVVEFGDGLLTAVCTGESDHGGRTFEFKYEGIFYEILDQLGQMPLPPYIKEQLDDQDRYQTVYAKEPGSAAAPTAGLHFTEELLQEIAGMGVHIAFITLHVGLGTFRPVSADDVEGHDMHAEFYIMTDETATLLNKVRNSGGRIITVGTTSTRTLETIAHANNGQFIGCSGWTDIFIFPGYEFKGINGMITNFHLPKSTLIMLVSALAGREHILHAYNTAVEEKYRFFSFGDAMFIV

SEQ ID NO: 63778 - protein, 342 aa, Bacillus methanolicus
  misc_feature (1)..(342): tr|I3EAW5|I3EAW5_BACMM S-adenosylmethionine:tRNA ribosy ltransferase-isomerase OS=Bacillus methanolicus (strain MGA3 / ATCC 53907) OX=796606 GN=queA PE=3 SV=1
MKVELFDFNLPEELIAQTPLKNRTDSRLMVLDKETGDVKHDFFRNIKEYLKAGDCLVLNDTKVLPARLFGLKADTGAKVEVLLLKQQDGDRWETLVKPAKRVKEGTRIKFGDGVLSAVCVGTTEHGGRIFDFHYDGIFYEVLEKLGEMPLPPYIKEQLEDKDRYQTVYARERGSAAAPTAGLHFTEELLEELKEMGVHLAFITLHVGLGTFRPVSVEDVDKHEMHSEFYQMSEGTAALLNEVRKQGGRIITVGTTSTRTLETIAFAHNGQFVAESGWTNIFIYPGYDFKAIDGMITNFHLPKSTLIMLVSALAGRENVLRAYNIAVKEKYRFFSFGDAMLIL

SEQ ID NO: 63779 - protein, 342 aa, Bacillus methanolicus
  misc_feature (1)..(342): tr|I3DXN9|I3DXN9_BACMT S-adenosylmethionine:tRNA ribosy ltransferase-isomerase OS=Bacillus methanolicus PB1 OX= 997296 GN=queA PE=3 SV=1
MKVELFDFDLPEELIAQTPLKNRTDSRLMVLNKETGEVKHNFFKNIKEYLKAGDCLVLNDTRVLPARLFGVKTDTGAKVEVLLLKQLDGDRWETLVKPAKRVKDGTRIEFGNGVLSAVCVGMTEHGGRIFDFHYDGIFYEVLEKLGEMPLPPYIKEQLEDKDRYQTVYAREKGSAAAPTAGLHFTEKLLEELREMGVHIAFITLHVGLGTFRPVNVENVDEHEMHSEFYQMSEGTAALLNEVRKQGGRIITVGTTSTRTLETIASARNGKFAAESGWTNIFIYPGYEFKAIDGMITNFHLPKSTLIMLVSALAGRENVLRAYNLAVQARYRFFSFGDAMLIL

SEQ ID NO: 63780 - protein, 350 aa, Bacillus mobilis
  misc_feature (1)..(350): tr|A0A386V8C7|A0A386V8C7_9BACI S-adenosylmethionine:tRN A ribosyltransferase-isomerase OS=Bacillus mobilis OX=2 026190 GN=queA PE=3 SV=1
MDINLFDFHLPEELIAQVPLEDRETSRLMVLDRETGDIEHKHFTDILSYLHEGDCLVLNETKVMPARLHGVKEDTGAHIEVLLLKQEEGDTWETLVKPAKRVKEGTVISFGEGKLKATCTGTADQGGRQLEFSYDGIFYEILDELGEMPLPPYIKETLEDRDRYQTVYAKEIGSAAAPTAGLHFTEELLEKLKQKGVGLAFITLHVGLGTFRPVSADTIEEHHMHAEYYHMSEETAALLNRVKESGGRIITVGTTSTRTLETIATDHDGKLCAASGWTDIFMYPGYEFKAIDGLITNFHLPKSTLIMLVSAFANRDNVLHAYNEAVKEKYRFFSFGDAMFVASHAKMGNK

SEQ ID NO: 63781 - protein, 350 aa, Bacillus mobilis
  misc_feature (1)..(350): tr|A0A1K0A9E6|A0A1K0A9E6_9BACI S-adenosylmethionine:tRN A ribosyltransferase-isomerase OS=Bacillus mobilis OX=2 026190 GN=queA PE=3 SV=1
MDINLFDFHLPEELIAQVPLEDRETSRLMVLDRETGDIEHKHFSDILSYLHEGDCLVLNETKVMPARLHGVKEDTGAHIEVLLLKQEEGDTWETLVKPAKRVKEGTVISFGEGKLKATCTGTADQGGRQLEFSYDGIFYEILDELGEMPLPPYIKETLEDRDRYQTVYAKEIGSAAAPTAGLHFTEELLEKLKQKGVGLAFITLHVGLGTFRPVSADTIEEHHMHAEYYHMSEETAALLNRVKESGGRIITVGTTSTRTLETIATDHDGKLCAASGWTDIFMYPGYEFKAIDGLITNFHLPKSTLIMLVSAFANRDNVLHAYNEAVKEKYRFFSFGDAMFVASHAKMGNK

SEQ ID NO: 63782 - protein, 342 aa, Bacillus muralis
  misc_feature (1)..(342): tr|A0A1B3XRP7|A0A1B3XRP7_9BACI S-adenosylmethionine:tRN A ribosyltransferase-isomerase OS=Bacillus muralis OX=2 64697 GN=queA PE=3 SV=1
MKLDMFDFHLPEELIAQVPLEDREASRLMVLDKETGKIEHDVFSHITEYIKPGDCLVLNDTRVLPARLYGSKEGTGAKIEVLLLKQEHDDVWETLVKPAKRIKEGSTIFFGDGKLSAVCTGVLEHGGRILEFRYEGIFYEILDKLGEMPLPPYIKEQLDDQDRYQTVYARERGSAAAPTAGLHFTEHLLEKLKGMGVHIAFITLHVGLGTFRPVSVDDIDSHEMHSEFYQMTEGTARLLNEVKEKGGKIITVGTTSTRTLETIASGNAGVFKEASGWTSIFIYPGYEFKGIDAMITNFHLPKSTLIMLISALAGREHVLHAYETAVEEKYRFFSFGDAMLIK

SEQ ID NO: 63783 - protein, 350 aa, Bacillus mycoides
  misc_feature (1)..(350): tr|A0A1D3NH39|A0A1D3NH39_BACMY S-adenosylmethionine:tRN A ribosyltransferase-isomerase OS=Bacillus mycoides OX= 1405 GN=queA PE=3 SV=1
MDINLFDFHLPEELIAQVPLEERETSRLMVLDRETGDIEHKHFTDILSYLHEGDCLVLNETKVMPARLHGVKEDTGAHIEVLLLKQEDGDKWETLVKPAKRVKEGTVISFGEGKLKATCTGTADQGGRQLEFSYDGIFYEILDELGEMPLPPYIKETLEDRDRYQTVYAKEIGSAAAPTAGLHFTEELLEKLKQKGVGLAFITLHVGLGTFRPVSADTIEEHHMHAEYYHMSEETAALLNRVKENGGRIITVGTTSTRTLETIATDHSGKLCAASGWTDIFMYPGYEFKAIDGLITNFHLPKSTLIMLVSAFSNRDNVLHAYNEAVKEKYRFFSFGDAMFVASHAKTRNK

SEQ ID NO: 63784 - protein, 350 aa, Bacillus mycoides
  misc_feature (1)..(350): sp|A9VIP4|QUEA_BACMK S-adenosylmethionine:tRNA ribosylt ransferase-isomerase OS=Bacillus mycoides (strain KBAB4 ) OX=315730 GN=queA PE=3 SV=1
MDINLFDFHLPEELIAQIPLEERETSRLMVLDRETGDIEHKHFADILSYLQEGDCLVLNETKVMPARLHGVKEDTGAHIEVLLLKQEEGDKWETLIKPAKRVKEGTVISFGEGKLKATCIGTADQGGRQLEFSYDGIFYEILDELGEMPLPPYIKETLEDRDRYQTVYAKEIGSAAAPTAGLHFTEELLEKLKQKGVGLAFITLHVGLGTFRPVSADTIEEHHMHAEYYHMSEETAALLNRVKEDGGRIITVGTTSTRTLETIATDHSGKLCAASGWTDIFMYPGYEFKAIDGLITNFHLPKSTLIMLVSAFSNRDNVLHAYNEAVKEKYRFFSFGDAMFVASHAKMRNK

SEQ ID NO: 63785 - protein, 342 aa, Bacillus nakamurai
  misc_feature (1)..(342): tr|A0A150F3R8|A0A150F3R8_9BACI S-adenosylmethionine:tRN A ribosyltransferase-isomerase OS=Bacillus nakamurai OX =1793963 GN=queA PE=3 SV=1
MKVDLFDFELPDHLIAQVPLKQRDASRLMVLDKHTGGLTDSSFKEIVSFFKEGDCLVLNNTRVLPARLFGTKEDTGAKVELLLLKQEENDRWETLVKPAKRVKKGTVLTFGDGRLKAVCTEELDHGGRKVEFRYDGIFYEVLESLGEMPLPPYIKEQLDDKERYQTVFSKEIGSAAAPTAGLHFTEEILDELKQKGVRIEFITLHVGLGTFRPVSADEVEEHNMHAEFYEMTEETAASLNEVRKAGGRIVSVGTTSTRTLETIAGDNDGVFTASSGWTSIFIYPGYEFKAIDGMITNFHLPKSSLIMLVSALAGRDHVLHAYRHAVEEEYRFFSFGDAMLII

SEQ ID NO: 63786 - protein, 341 aa, Bacillus nanhaiisediminis
  misc_feature (1)..(341): tr|A0A562QHP7|A0A562QHP7_9BACI S-adenosylmethionine:tRN A ribosyltransferase-isomerase OS=Bacillus nanhaiisedim inis OX=688079 GN=queA PE=3 SV=1
MNVEEFDFQLPEELIAQTPLLDRTASRLLVLDRKTGQTTDRTFETIIDELQQGDCLVLNDTRVLPARLYGTKEETGAKVEVLLLKQLENDEWETLVKPAKRVKKGTVIQFGDGRLTAICTGEADHGGRVLKMSYKGIFHEVLDELGEMPLPPYIKETLPDQERYQTVYAKHRGSAAAPTAGLHFTNELLERIQEKGVHVTFITLHVGLGTFRPVSVDNVEDHEMHAEFYQMSESTAALLTQVRKQGGRIFAVGTTSARTLETIMKEYGEFRDCSGWTSIFIYPGYEVLGFDGLLTNFHLPKSTLVMLVSAFAGKEYVMNAYEHAVKERYRFFSFGDAMLIR

SEQ ID NO: 63787 - protein, 342 aa, Bacillus nealsonii
  misc_feature (1)..(342): tr|A0A2N0Z4J2|A0A2N0Z4J2_9BACI S-adenosylmethionine:tRN A ribosyltransferase-isomerase OS=Bacillus nealsonii OX =115979 GN=queA PE=3 SV=1
MKVELFDFHLPEELIAQTPLEDRTSSRLMVVNKKTGDLEHRSFKDIIEYINPGDCLVLNDTRVLPARLYGEKEDTGAHIEVLLLKQQDGDKWESLVKPAKRVKVGTVISFGDGHLKAVCVQELEHGGRVLDFQYDGIFYEILEELGEMPLPPYIKEKLDDQDRYQTVYAKERGSAAAPTAGLHFTEELLDSLEKKGVHIAFITLHVGLGTFRPVSVDDVDSHEMHAEFYQLTKGTADLLNKVKENGGRIISVGTTSTRTLETIAAAHDGVFKEQNGWTNIFIYPGYEFKGIDGMITNFHLPKSTLIMLVSALAGRDEILHAYKTAVEMRYRFFSFGDAMFIC

SEQ ID NO: 63788 - protein, 342 aa, Bacillus nealsonii
  misc_feature (1)..(342): tr|R9C8C8|R9C8C8_9BACI S-adenosylmethionine:tRNA ribosy ltransferase-isomerase OS=Bacillus nealsonii AAU1 OX=12 02533 GN=queA PE=3 SV=1
MKVDLFDFHLPEELIAQTPLEDRTSSRLMIVNKVTGELQHRKFKDIYEYINPGDCLVLNDTRVLPARLHGEKEDTGAHIEVLLLKQQENDKWETLVKPAKRVKEGTIITFGEGKLKAVCVKELEHGGRILDFQYEGIFYEILDQLGEMPLPPYIKEKLDDQDRYQTVYAKERGSAAAPTAGLHFTTELLDALKEKGVHILFITLHVGLGTFRPVNVEDVDKHEMHAEFYQLNQETAALLNKVRAQGGRILSVGTTSTRTLETIATANNGEFVESSGWTSIFIYPGYEFKGIDGMITNFHLPKSTLIMLVSALAGRENVLHAYETAVKERYRFFSFGDAMFIQ

SEQ ID NO: 63789 - protein, 342 aa, Bacillus notoginsengisoli
  misc_feature (1)..(342): tr|A0A417YTU1|A0A417YTU1_9BACI S-adenosylmethionine:tRN A ribosyltransferase-isomerase OS=Bacillus notoginsengi soli OX=1578198 GN=queA PE=3 SV=1
MKVDLFDFHLPEELIAQTPLENRTDSRLMVLNKETGEINHAIFKNIKQYLRKGDCLVLNDTRVLPARLYGAKKDTGAKIEVLLLKQIDGDQWETLIKPAKRIRVGMEIEFGEGLLTAVCTEEAEHGGRVLEFKYNGIFYEILDALGEMPLPPYIKEQLDDKDRYQTVFAKERGSAAAPTAGLHFTEELLEEIREMGVSTAFITLHVGLGTFRPVSVENVLEHDMHAEFYIVSEGTARLLNETRETGGRIITVGTTSTRTLETVASSNGGQFRADSGWTSIFIYPGYEFQAVDGMITNFHLPKSTLIMLVSALAGRENVLHAYETAVRERYRFFSFGDAMLII

SEQ ID NO: 63790 - protein, 339 aa, Bacillus notoginsengisoli
  misc_feature (1)..(339): tr|A0A417YX08|A0A417YX08_9BACI S-adenosylmethionine:tRN A ribosyltransferase-isomerase OS=Bacillus notoginsengi soli OX=1578198 GN=D1B31_05300 PE=3 SV=1
MIAGSIAFHLPLSLNASAPPERRGVRRDHVRMMVLSKETGHACHDQFYHLDRYLASGDVLVLNNSRTIPAILKGRAASTSLELEIRLARKIDDRRWHALLVSTEGVKEGETIVFSAQLQGVVEKTTPDSPLSMIRFSKSGTSLFNEIYSIGEPVRYEYIEDPWDLDYYQTVFASHPGSVEMPSAGRAFTWEMLFKLRKKGVKITFIQLHTGLSYFLNDRWDHHPSKNTEQYIVPTESWNEIISAKLSGKRVIAAGTTVVRALETAIETNELSGWTNLYIHPGYQLKVADGILTGLHEPEASHLAMLSAFISQEKLCQAYQEAVEEKYLWHEFGDMNLIL

SEQ ID NO: 63791 - protein, 342 aa, Bacillus obstructivus
  misc_feature (1)..(342): tr|A0A1L8ZIE4|A0A1L8ZIE4_9BACI S-adenosylmethionine:tRN A ribosyltransferase-isomerase OS=Bacillus obstructivus OX=1914540 GN=queA PE=3 SV=1
MKIDLFDFNLPESLIAQTPLKNRSDSRLMVLNKQTGEIEHQVFKNITKYLKPGDCLVLNDTKVLPARLFGIKEDTGAKIEVLLLKQMENDRWETLVKPAKRIKVGSEIVFGDGKLKARCIAEKDHGGRIIEFHYEGIFYEVLNELGEMPLPPYIKEQLEDRDRYQTVYAKETGSAAAPTAGLHFTEELLTEIKNMGVHITFLTLHVGLGTFRPVSVEDIHEHEMHAEFYQVSEETADLINRVKQQGGRIISVGTTSTRTLETIASANNGKIIATSGWTDIFIYPGYEFKGIDGMITNFHLPKSTLIMLVSALAGRQNVLHAYEEAVNEKYRFFSFGDAMLII

SEQ ID NO: 63792 - protein, 342 aa, Bacillus obstructivus
  misc_feature (1)..(342): tr|A0A1L8ZRR8|A0A1L8ZRR8_9BACI S-adenosylmethionine:tRN A ribosyltransferase-isomerase OS=Bacillus obstructivus OX=1914540 GN=BLX88_02645 PE=3 SV=1
MVTNVLNFHLPDELNAIAPPERRGVRRDHVKMMVLNKKNGKIDHSLFFRLDQYLNKDDLIILNSSRTVPADLQGICERTQKQVGIRLAHQKNPSLWEALIIGDHLKKGEKVKFNSKLEATVTHSDPNQPFSILQFNMCCSDLYNQIYQIGEPVRYEYTKEAWSLDYYQTVFATTPGSVEMPSAGRAFSWELLFRLQKKGVKIAYLQLHTGLSYLLDDRWHLGPLDNFEKYVINEATVEAIKKTKKNNGRVIAVGTTVVRALESAVDKYGKITEKDGWTNLYIAADTKLQVADGLITGFHEPEASHLDLLTAFVNPKHLYHAYQEALSHKYLWHEFGDMNLII

SEQ ID NO: 63793 - protein, 342 aa, Bacillus oceanisediminis
  misc_feature (1)..(342): tr|A0A1S1YK49|A0A1S1YK49_9BACI S-adenosylmethionine:tRN A ribosyltransferase-isomerase OS=Bacillus oceanisedimi nis OX=665099 GN=queA PE=3 SV=1
MKVDWFDFHLPEELIAQTPLADRTSSRLMVLDKITGDLQHSVFKNIKHYLKAGDCLVLNDTKVLPARLFGEKTGTGAKIEVLLLKQLEGDSWETLVKPAKRVKEGTEITFGNGNLTAVCTGTSDHGGRVLEFKYDGIFYEVLEELGEMPLPPYIKEQLDDRDRYQTVFARERGSAAAPTAGLHFTEQLLEEIKEMGVHIAFITLHVGLGTFRPVSVDDLNEHEMHAEFYQVTEGTARLLNEVREQGGRIISVGTTSTRTLETIASMHNGRFEEASGWTDIFIYPGYEFKAIDGMITNFHLPKSTLIMLVSALAGRENVLNAYNQAVEEHYRFFSFGDAMLII

SEQ ID NO: 63794 - protein, 342 aa, Bacillus oceanisediminis
  misc_feature (1)..(342): tr|A0A160MER3|A0A160MER3_9BACI S-adenosylmethionine:tRN A ribosyltransferase-isomerase OS=Bacillus oceanisedimi nis 2691 OX=1196031 GN=queA PE=3 SV=1
MKVDWFDFHLPEELIAQTPLADRTGSRLMVLDKITGDLQHSVFKNIKHYLKAGDCLVLNDTKVLPARLFGEKTGTGAKIEVLLLKQLEGDSWETLVKPAKRVKEGTEITFGNGNLTAVCTGTSDHGGRVLEFKYDGIFYEVLEELGEMPLPPYIKEQLDDRDRYQTVFARERGSAAAPTAGLHFTEQLLEEIKEMGVHIAFITLHVGLGTFRPVSVDDLNEHEMHAEFYQVTEGTARLLNEVREQGGRIISVGTTSTRTLETIASMHNGRFEEASGWTDIFIYPGYEFKAIDGMITNFHLPKSTLIMLVSALAGRENVLNAYNQAVEEHYRFFSFGDAMLII

SEQ ID NO: 63795 - protein, 341 aa, Bacillus okhensis
  misc_feature (1)..(341): tr|A0A0B0IPL7|A0A0B0IPL7_9BACI S-adenosylmethionine:tRN A ribosyltransferase-isomerase OS=Bacillus okhensis OX= 333138 GN=queA PE=3 SV=1
MNVEEFDFELPDELIAQTPLPDRTASRLLVLDRKTGETKDGHFLSIIDELNEGDCLVLNDTRVLPARLYGSKKDTGASIEILLLKQLEDDQWETLVKPAKRVKKGTEVVFGDGQLTAICTGEAEHGGRIMKMSYIGIFHEVLDELGEMPLPPYIKETLPDQERYQTVFAKNRGSAAAPTAGLHFTKELLTSIEKKGVHIAYITLHVGLGTFRPVSVENIEEHEMHAEFYQMSAGTARLLQSVRGNGGRIIAVGTTSARTLETIIKDHGQFLEASGWTSIFIYPGYEVRGFDGLLTNFHLPKSTLVMLVSAFSTKEYVLNAYRHAVNERYRFFSFGDAMLIR

SEQ ID NO: 63796 - protein, 339 aa, Bacillus okhensis
  misc_feature (1)..(339): tr|A0A0B0IJ78|A0A0B0IJ78_9BACI S-adenosylmethionine:tRN A ribosyltransferase-isomerase OS=Bacillus okhensis OX= 333138 GN=LQ50_13945 PE=3 SV=1
MTLASYPFVIPQHLHASLPAEVRSHQREAVRLLVQNRQTGHVTHDTFAHLSNYLKKGDVLILNKSRTIPAVLYTTDHIEVRLARKCSTDIWEVLSSDQSEIGDTLHFTNNVRATVIDKSKKTPLISIRFSIKGDEFYNFLYINGTPIHYEYLQDHWPLQAFQTVYSSVPGSIEMPSAGRALTWRMLAALQNKGIKIGFVSLHSGLSYFEDDRWPDPIFQPEPFSVPVETVKLIQTAKNERSNVIAVGTTVVRALESAVDTNHNLQATAGETTLHIKSNSALQVVDGLLTGFHEPEASHLDMLSAFIDKNHLLAAYEEAIRQEYLWHEFGDVNLLLPMEN

SEQ ID NO: 63797 - protein, 336 aa, Bacillus okuhidensis
  misc_feature (1)..(336): tr|A0A0M0KKQ1|A0A0M0KKQ1_9BACI S-adenosylmethionine:tRN A ribosyltransferase-isomerase OS=Bacillus okuhidensis OX=136160 GN=AMD02_08820 PE=3 SV=1
MNHAPTFSIPDHLNASEPIERQGKQRSDVRMLVLDRDSHRTFHEPFTAIANYLQQGDVLVLNRSRTIPSRLIGSLHGETIELRLSHERRDGLWDGLILSSSELHAGDRIFLSSSLSATLIEKDEHTPLWRVAFSKRGAQLLEYVYRYGEPIGYEYIKSPLSIQDYQTVYSSAPGSVEMCSAGRPFTWQLLARLKQKGVRIAFLELHTGLSYYENDVWPDPAHHPEHYHIPKETIEALKKGKRIIAVGTTVVRALETYAQTNRSQGTTTLSIDAGYELQLATGLLTGFHEPQASHLHMLAAFVQEQELFRVYEQAIRQGYQWHEFGDVNFILPLGDM

SEQ ID NO: 63798 - protein, 347 aa, Bacillus okuhidensis
  misc_feature (1)..(347): tr|A0A0M0KMT7|A0A0M0KMT7_9BACI S-adenosylmethionine:tRN A ribosyltransferase-isomerase OS=Bacillus okuhidensis OX=136160 GN=queA PE=3 SV=1
MNVRDFDFHLPEKLIAQTPLKDRTASRLLVLDKHTGAVEDKKFPDLLQFIEAGDCLVLNDTRVLPARLFGVKEETGAQVEVLLLKQMEGDRWETLVKPAKRLKVGTIIRFGNGELTATCVQELEHGGRVLEFSYEGIFHEVLDQLGEMPLPPYIKEQLDDKDRYQTVFAKNCGSAAAPTAGLHFTEELLDQLKQKGVHLAFITLHVGLGTFRPVSVEEIEEHEMHAEFYQMSAGTARLLNEVKRQGGRIIAVGTTSARTLETIRQEHDEFVETSGWTSIFIYPGYEFKGIDGLITNFHLPKSTLVMLVSALAGRENLLNAYAHAVKQSYRFFSFGDAMFIYDKKTNS

SEQ ID NO: 63799 - protein, 352 aa, Bacillus oleivorans
  misc_feature (1)..(352): tr|A0A285CVN7|A0A285CVN7_9BACI S-adenosylmethionine:tRN A ribosyltransferase-isomerase OS=Bacillus oleivorans O X=1448271 GN=queA PE=3 SV=1
MKVDEFDFNLPPELIAQTPLEHREESRLMVLNKRTGAIEHRIFRDIINYLNPGDCLVLNDTRVLPARLYGVKEDTGAKVEVLLLKEVGSNQWETLVKPGKKVKPGTTLSFGNGLLRAECIGTTEFGGRIFKFLYEGIFYEILDQLGEMPLPPYITEQLEDKDRYQTVYAKHEGSAAAPTAGLHFTELLLDEIQKKGVHIAFITLHVGLGTFRPVQVEDINKHQMHSEFYQMTEETAQLLNRVKQAGGRIISVGTTSTRTLETIAQKNNGHFEADSGWTDIFIYPGFVFKGIDGMITNFHLPKSTLIMLVSALASRDFIMKAYEEAVKERYRFFSFGDAMLIHEGSTGIDTTN

SEQ ID NO: 63800 - protein, 345 aa, Bacillus oleivorans
  misc_feature (1)..(345): tr|A0A285CIM7|A0A285CIM7_9BACI S-adenosylmethionine:tRN A ribosyltransferase-isomerase OS=Bacillus oleivorans O X=1448271 GN=SAMN05877753_101168 PE=3 SV=1
MLMTIHGSFQIPAHLHAIAPAEFRGLRRDQVRMMVLDRITGQFEHASFKEIGRYLASGDLLVFNNSRTIPAKLKGTQQQGTEFEIRLSRQISDTAWEGLIVGDYDRNRPIKLSEELFAEVIGNGGAEPLVRLSFSKKGLALLNDFYRIGEPIRYEYIHEPWALDVYQTVYAAVPGSVEMPSAGRAFTWQLLQALKASGIRVAFLQLHAGLSYYGNDKWPDPNQHPEVFHIPSSTAKLVTETKESGGRVIAVGTTVVRALETAAVEGKVTGTKGVTKLYVDRGYLLKVVDGLLTGFHEPEASHLDMLTAFIDEEQLKAAYQAAIEEGYLWHEFGDVNLILSKEASL

SEQ ID NO: 63801 - protein, 350 aa, Bacillus pacificus; identical to SEQ ID NO: 63668
  misc_feature (1)..(350): tr|A0A1J9YQ95|A0A1J9YQ95_9BACI S-adenosylmethionine:tRN A ribosyltransferase-isomerase OS=Bacillus pacificus OX =2026187 GN=queA PE=3 SV=1

SEQ ID NO: 63802 - protein, 342 aa, Bacillus paralicheniformis; identical to SEQ ID NO: 63656
  misc_feature (1)..(342): tr|A0A1Q8GQJ5|A0A1Q8GQJ5_9BACI S-adenosylmethionine:tRN A ribosyltransferase-isomerase OS=Bacillus paralichenif ormis OX=1648923 GN=queA PE=3 SV=1

SEQ ID NO: 63803 - protein, 350 aa, Bacillus paramycoides
  misc_feature (1)..(350): tr|A0A1J9VYP4|A0A1J9VYP4_9BACI S-adenosylmethionine:tRN A ribosyltransferase-isomerase OS=Bacillus paramycoides OX=2026194 GN=queA PE=3 SV=1
MDINLFDFHLPEELIAQIPLEERETSRLMVLDRETGDIEHKHFTDILSYLHEGDCLVLNETKVMPARLHGVKEDTGAHIEVLLLKQEEGDKWETLVKPAKRVKEGTVISFGEGKLKATCTGTADQGGRQLEFSYDGIFYEILDELGEMPLPPYIKETLEDRDRYQTVYAKEIGSAAAPTAGLHFTEELLEKLKQKGVQLAFITLHVGLGTFRPVSADTIEEHHMHAEYYHMSEETAALLNRVKENGGRIITVGTTSTRTLETIATDHDGKLCAASGWTDIFMYPGYEFKAIDGLITNFHLPKSTLIMLVSAFANRDNVLHAYNEAVKEKYRFFSFGDAMFVASHAKMRNK

SEQ ID NO: 63804 - protein, 350 aa, Bacillus paranthracis; identical to SEQ ID NO: 63668
  misc_feature (1)..(350): tr|A0A4U1DRF2|A0A4U1DRF2_9BACI S-adenosylmethionine:tRN A ribosyltransferase-isomerase OS=Bacillus paranthracis OX=2026186 GN=queA PE=3 SV=1

SEQ ID NO: 63805 - protein, 350 aa, Bacillus paranthracis
  misc_feature (1)..(350): tr|A0A4V1GX89|A0A4V1GX89_9BACI S-adenosylmethionine:tRN A ribosyltransferase-isomerase OS=Bacillus paranthracis OX=2026186 GN=queA PE=3 SV=1
MDINLFDFHLPEELIAQVPLEERETSRLMVLDRETGDIEHKHFTDILSYLHEGDCLVLNETKVMPARLHGVKEDTGAHIEVLLLKQEEGDKWETLVKPAKRVKEGTVISFGEGKLKATCTGTADQGGRQLEFSYDGIFYEILDELGEMPLPPYIKETLEDRDRYQTVYAKEIGSAAAPTAGLHFTEELLEKLKQKGVELAFITLHVGLGTFRPVSADTIEEHHMHAEYYHMSEETAALLNRVRENGGRIITVGTTSTRTLETIATDHDGKLCAASGWTDIFMYPGYEFKAIDGLITNFHLPKSTLIMLVSAFANRDNVLHAYNEAVKEKYRFFSFGDAMFVASHAKMGNK

SEQ ID NO: 63806 - protein, 342 aa, Bacillus persicus
  misc_feature (1)..(342): tr|A0A1H7XEP7|A0A1H7XEP7_9BACI S-adenosylmethionine:tRN A ribosyltransferase-isomerase OS=Bacillus persicus OX= 930146 GN=queA PE=3 SV=1
MKVDLFDFHLPEELIAQVPLIERAESRLMVLDKQTGELQHTIFKNIKEYLQPGDCLVLNDTRVLPARLFGVKEDTGAKIEVLLLKQVEGDKWETLVKPAKRVKEGTKIVFGDGALTAVCTGESDHGGRILEFLYEGIFYEVLEGLGEMPLPPYIKEQLDDQERYQTVYAKERGSAAAPTAGLHFTESLLEEIKAMGVHITFITLHVGLGTFRPVSAETIEDHEMHAEFYIMSEGTARLLNEVREQGGRIISVGTTSTRTLETIASENNGEFKAATGWTDIFIFPGYEFKGINGMITNFHLPKSTLIMLVSTLAGRENVLNAYNTAVKEKYRFFSFGDAMLII

SEQ ID NO: 63807 - protein, 343 aa, Bacillus persicus
  misc_feature (1)..(343): tr|A0A1H7WBU3|A0A1H7WBU3_9BACI S-adenosylmethionine:tRN A ribosyltransferase-isomerase OS=Bacillus persicus OX= 930146 GN=SAMN05192533_101336 PE=3 SV=1
MTVASAFEFELPQELNATHPPERRGVRRDHVRMMTLNKETGNVKHKRFNELPDCLLPGDLVILNNSRTLPAILRASLKRNEMILSAMIEVRLARRIDDARWEALIVAGSSKLGDILEFSPELNAVVTNENSDTPLKTILFSQKGFELLNIIYSLGEPVRYEYIDEPWDLDYYQTVFASQPGSVKMPSAGRAFSWELLFKLQQKGIQLDYIQLHTGLSYLLDDKYVHSPEDNYEEYSVSAMTMDRIQQTKATGGRVIAVGTTVVRALESAAKTGVLSGWTNLYIHREFSLKLVDGIITGFHEPKASHLDMLTAFVKEDTLFSAYHQALEQKYFWHEFGDMNLIL

SEQ ID NO: 63808 - protein, 342 aa, Bacillus praedii
  misc_feature (1)..(342): tr|A0A4R1AYM4|A0A4R1AYM4_9BACI S-adenosylmethionine:tRN A ribosyltransferase-isomerase OS=Bacillus praedii OX=1 742358 GN=queA PE=3 SV=1
MKVDLFDFHLPEELIAQTPLIERTSSRLMVLDKEKGATQHTVFKHIKEHLKAGDCLVLNDTRVLPARLFGEKEGTGAKIEVLLLKQLEGDSWETLIKPAKRVKEGTRIVFGNGKLSAVCTQTSEHGGRVLEFQYDGIFYEVLEQLGEMPLPPYIKEQLDDQERYQTVFARERGSAAAPTAGLHFTEQLLEEIKELGVHIAFITLHVGLGTFRPVNVEDLNEHEMHSEFYQMTEGTARLLNEVREEGGRIISVGTTSTRTLETIASANNGRFEEASGWTDIFIYPGYEFKAIDGMITNFHLPKSTLIMLVSALSGRENVLNAYREAVEEKYRFFSFGDAMLII

SEQ ID NO: 63809 - protein, 345 aa, Bacillus praedii
  misc_feature (1)..(345): tr|A0A4V2NU67|A0A4V2NU67_9BACI S-adenosylmethionine:tRN A ribosyltransferase-isomerase OS=Bacillus praedii OX=1 742358 GN=E0Y62_15910 PE=3 SV=1
MMSTARSFQVPEYLNARTPAEYRGISRDHVRLMTLDTVTGDCSHNYFNMLDSYLAEGDLLVLNNSRTIPAVLKGKRGRQAVEIRLSRKLSDREWEALIVGEVITVGEKIDLPGGLTATIAGLGAETPLIVLSFSKSGLNLIENFYQYGEPLHYEYIETPWPIEMYQTVYASVPGSVEMPSAGRAFTWRLLNKLKEKGVNIAYLQLHAGLSYYGNDRWPHPNKHLEEFCVPLNTAEMINKTREKNGRVIAVGTTVVRALETAVNIAGYVVPQKGITSLYIQKGYPLKAVDGLITGFHEPEASHLDLLSAFIDKDLLMKAYKKALANGYLWHEFGDMNLILPMDERK

SEQ ID NO: 63810 - protein, 341 aa, Bacillus pseudofirmus
  misc_feature (1)..(341): tr|A0A1Q9PQF3|A0A1Q9PQF3_BACPF S-adenosylmethionine:tRN A ribosyltransferase-isomerase OS=Bacillus pseudofirmus OX=79885 GN=queA PE=3 SV=1
MDVRDFDFYLPDELIAQTPLLDRTASRLLVLDKDNGAIKDDVFSSITDYLKPGDCLVLNDTRVLPARLYGVKEDTGAKIELLLLKQLEGDKWETLAKPAKRVKKGTTITFGDGLLTATCIEETDQGGRVVELAYEGILHEVLDQLGEMPLPPYIKEQLDDQERYQTVFAKNRGSAAAPTAGLHFTEDLLQTLQDRGVHLAFITLHVGLGTFRPVSVEDVESHEMHAEYYQMSEGTARLLNEVKENGGKVVAVGTTSARTLETIMNENGTYCEASGWTSIFIYPGYKFKGIDGLLTNFHLPKSTLVMLVSALAGREHILQAYNHAVKERYRFFSFGDAMFIR

SEQ ID NO: 63811 - protein, 341 aa, Bacillus pseudofirmus
  misc_feature (1)..(341): tr|D3FVV6|D3FVV6_BACPE S-adenosylmethionine:tRNA ribosy ltransferase-isomerase OS=Bacillus pseudofirmus (strain OF4) OX=398511 GN=queA PE=3 SV=1
MDVRDFDFYLPDELIAQTPLLDRTASRLLVLDKDNGAIKDDVFSSITDYLKSGDCLVLNDTRVLPARLYGVKEDTGAKIELLLLKQLEGDKWETLAKPAKRVKKGTTITFGEGLLTATCIEETDQGGRVVELAYEGILHEVLDQLGEMPLPPYIKEQLDDQERYQTVFAKNRGSAAAPTAGLHFTEDLLQTLQDKGVHLAFITLHVGLGTFRPVSVEDVESHEMHAEYYQMSEGTARLLNEVKENGGKVVAVGTTSARTLETIMNENGTYCEASGWTSIFIYPGYKFKGIDGLLTNFHLPKSTLVMLVSALAGREHILQAYNHAVKERYRFFSFGDAMFIR

SEQ ID NO: 63812 - protein, 350 aa, Bacillus pseudomycoides
  misc_feature (1)..(350): tr|C3BQF0|C3BQF0_9BACI S-adenosylmethionine:tRNA ribosy ltransferase-isomerase OS=Bacillus pseudomycoides DSM 1 2442 OX=527000 GN=queA PE=3 SV=1
MDINLFDFHLPEELIAQTPLEQRETSRLMVLDRETGDIEHKHFTDILSYLHEGDCLVLNETKVMPARLHGVKEDTGAHIEVLLLKQEDGDKWETLVKPAKRVKEGTIISFGEGKLKATCIGTADQGGRQLEFSYDGIFYEILDELGEMPLPPYIKETLEDRDRYQTVYAKEIGSAAAPTAGLHFTEELLEKLKKKGVHLAFITLHVGLGTFRPVSADTIEEHHMHAEYYHMSEETADLLNRVKENGGRIITVGTTSTRTLETIATDHDGKLCATSGWTDIFMYPGYEFKAIDGLITNFHLPKSTLIMLVSAFASRENVLHAYNEAVKEKYRFFSFGDAMFVASHAKERSK

SEQ ID NO: 63813 - protein, 350 aa, Bacillus pseudomycoides
  misc_feature (1)..(350): tr|A0A2C5F4Z1|A0A2C5F4Z1_9BACI S-adenosylmethionine:tRN A ribosyltransferase-isomerase OS=Bacillus pseudomycoid es OX=64104 GN=queA PE=3 SV=1
MDINLFDFHLPEELIAQTPLEQRETSRLMVLDRETGDIEHKHFTDILSYLHEGDCLVLNETKVMPARLHGVKEDTGAHIEVLLLKQEDGDKWETLVKPAKRVKEGTIISFGEGKLKATCIGTADQGGRQLEFSYDGIFYEILDELGEMPLPPYIKETLEDRDRYQTVYAKEIGSAAAPTAGLHFTEELLEKLKKKGVHLAFITLHVGLGTFRPVSADTIEEHHMHAEYYHMSEETADLLNRVKENGGRIITVGTTSTRTLETIATDHDGKLCSASGWTDIFMYPGYEFKAIDGLITNFHLPKSTLIMLVSAFASRENVLHAYNEAVKEKYRFFSFGDAMFVASHAKERSK

SEQ ID NO: 63814 - protein, 342 aa, Bacillus pumilus
  misc_feature (1)..(342): sp|A8FFR0|QUEA_BACP2 S-adenosylmethionine:tRNA ribosylt ransferase-isomerase OS=Bacillus pumilus (strain SAFR-0 32) OX=315750 GN=queA PE=3 SV=1
MKLELFDFDLPERLIAQVPLEKRDASRLMVLNKQTGEVTHDTFSQITDYFQTGDCLVLNNTRVLPARLFGMKEDTGAKVELLLLKQEEGDKWETLVKPAKRVKKGTVITFGDGRLQAVCTEELEHGGRKVEFQYTGIFYEVLESLGEMPLPPYIKEQLDDRERYQTVYSKEVGSAAAPTAGLHFTNELLDALKEKGVHIAFITLHVGLGTFRPVSADRIEEHEMHAEFYEMNEETAAELNRVRKEGGRIISVGTTSTRTLETIASAHDGEFKASSGWTSIFIYPGYTFKAIDGMITNFHLPKSSLIMLVSALAGREHVLKAYNEAVKEEYRFFSFGDAMLIQ

SEQ ID NO: 63815 - protein, 342 aa, Bacillus pumilus
  misc_feature (1)..(342): tr|A0A5D4QC42|A0A5D4QC42_BACPU S-adenosylmethionine:tRN A ribosyltransferase-isomerase OS=Bacillus pumilus OX=1 408 GN=queA PE=3 SV=1
MKLELFDFDLPERLIAQVPLEKRDASRLMVLNKQTGAITHDTFSQITDYFQTGDCLVLNNTRVLPARLFGMKEDTGAKVELLLLKQEEGDQWETLVKPAKRVKKGTVITFGDGRLQAVCTEEMEHGGRKVEFQYTGIFYEVLESLGEMPLPPYIKEQLDDRERYQTVYSKEVGSAAAPTAGLHFTNELLDALKAKGVHIAFITLHVGLGTFRPVSADRIEEHEMHAEFYEMNEETAEELNRVRKEGGRIISVGTTSTRTLETIASAHDGEFKASSGWTSIFIYPGYTFKAIDGMITNFHLPKSSLIMLVSALAGREHVLKAYNEAVKEEYRFFSFGDAMLIQ

SEQ ID NO: 63816 - protein, 342 aa, Bacillus safensis
  misc_feature (1)..(342): tr|A0A561S7Z1|A0A561S7Z1_9BACI S-adenosylmethionine:tRN A ribosyltransferase-isomerase OS=Bacillus safensis OX= 561879 GN=queA PE=3 SV=1
MKLELFDFDLPERLIAQVPLEQRDASRLMVLNKQTGAITHDTFSQIIDYFQKGDCLVLNNTRVLPARLFGMKEDTGAKVELLLLKQEEGDNWETLVKPAKRVKKGTVITFGDGRLKAVCTEEMEHGGRKVEFQYTGIFYEVLESLGEMPLPPYIKEQLDDRERYQTVYSKEVGSAAAPTAGLHFTTELLDALKAKGVHIAFITLHVGLGTFRPVSAERIEEHEMHAEFYEMNEETADELNRVRKEGGRIISVGTTSTRTLETIASAHDGEFKASSGWTSIFIYPGYTFKAIDGMITNFHLPKSSLIMLVSALAGREHVLKAYNEAVKEEYRFFSFGDAMLIQ

SEQ ID NO: 63817 - protein, 342 aa, Bacillus safensis
  misc_feature (1)..(342): tr|A0A0M2EHV8|A0A0M2EHV8_9BACI S-adenosylmethionine:tRN A ribosyltransferase-isomerase OS=Bacillus safensis OX= 561879 GN=queA PE=3 SV=1
MKLELFDFDLPERLIAQVPLEKRDASRLMVLNKQTGAITHDTFSQIIDYFQKGDCLVLNNTRVLPARLFGMKEDTGAKVELLLLKQEEGDNWETLVKPAKRVKKGTVITFGDGRLQAVCTEEMEHGGRKVEFQYTGIFYEVLESLGEMPLPPYIKEQLDDRERYQTVYSKEVGSAAAPTAGLHFTTELLDALKAKGVHIAFITLHVGLGTFRPVSAERIEEHEMHAEFYEMNEETADELNRVRKEGGRIISVGTTSTRTLETIASAHDGEFKASSGWTSIFIYPGYTFKAIDGMITNFHLPKSSLIMLVSALAGREHVLKAYNEAVKEEYRFFSFGDAMLIQ

SEQ ID NO: 63818 - protein, 343 aa, Bacillus salacetis
  misc_feature (1)..(343): tr|A0A3A1QPS3|A0A3A1QPS3_9BACI S-adenosylmethionine:tRN A ribosyltransferase-isomerase OS=Bacillus salacetis OX =2315464 GN=D3H55_19750 PE=3 SV=1
MAAIGNAFKIPQSLNAKVPAERRGSGRDDVRLMVMEGEDVHHERFSSLPDFLNERDLLVFNNSRTIPAVLKAAAGNREVEVRLSRQLDDHRWEALIWGGLFSAGDELMLNEGVSAVVTGTGKEKPLIILAFSISGVELMDYIYRLGEPVRYEYIDSAWTLDAYQTAYASVPGSVEMASAGRAFSWNLLGKLKEKGVKTAFLTLHTGLSYYGHDRWPNPEKHPESYHIPKETVDLIRSVKKAHGRVIAVGTTVVRALETAADENGDLTEAEGITSLYIRKEYRLKTVDGLITGLHEPEATHLEMLTAFTPEHQLFEAYRQALKRGYLWHEFGDMNLILRKNVLQ

SEQ ID NO: 63819 - protein, 342 aa, Bacillus salacetis
  misc_feature (1)..(342): tr|A0A3A1R504|A0A3A1R504_9BACI S-adenosylmethionine:tRN A ribosyltransferase-isomerase OS=Bacillus salacetis OX =2315464 GN=queA PE=3 SV=1
MKVEDFDFHLPEELIAQTPLEKRSESRLMAIDRKTGSLQHKQFKDITGFLQEGDCLVLNDTRVLPARLFGIKEDTGAKIEVLLLKQEEGDKWETLVKPAKRVKAGTKISFGEGKLTAVCTGEKEQGGRILEFQYEGIFYEVLDELGEMPLPPYISEKLEDQDRYQTVFARERGSAAAPTAGLHFTEELLDEIRSKGIHVAFITLHVGLGTFRPVSVDSIEEHDMHSEFYQITEGTARLLNGVKESGGRIITVGTTSTRTLETIASKHDGRFAEESGWTDIFIYPGYEFKAIDGLVTNFHLPKSTLIMLVSAFTSREIILNAYNTAVEEKYRFFSFGDSMLIL

SEQ ID NO: 63820 - protein, 349 aa, Bacillus salarius
  misc_feature (1)..(349): tr|A0A3R9RFN7|A0A3R9RFN7_9BACI S-adenosylmethionine:tRN A ribosyltransferase-isomerase OS=Bacillus salarius OX= 284579 GN=queA PE=3 SV=1
MNVNDFDFTLPEELIAQTPLKKRDASRLMVLDPEEDNIHHDSFQSILDYLDEGDCLVLNDTRVLPARLFGEKETGGQVEVLLLKQEDTDEWETLVKPAKRVKSGTILSFGEGKLKAECTDILEHGGRMLRFSYEGVFLEILEELGEMPLPPYIKEKLSDQERYQTVYAKQDGSAAAPTAGLHFTESLLQQAKEKGIQVTTITLHVGLGTFRPVSADNVEDHHMHEEFYQISEGTAMLLNETKAKGNKIVAVGTTSARTLETAAQNKERFYKESGWTDIFIYPGYRFQGIDAMLTNFHLPKSTLVMLVSAMAGRQFLLSAYEEAIREKYRFFSFGDAMLIMKGSRHKWQQ

SEQ ID NO: 63821 - protein, 349 aa, Bacillus salarius
  misc_feature (1)..(349): tr|A0A428MSW1|A0A428MSW1_9BACI S-adenosylmethionine:tRN A ribosyltransferase-isomerase OS=Bacillus salarius OX= 284579 GN=queA PE=3 SV=1
MNVEDFDFSLPEELIAQTPLEKRDASRLMVLDPEENALHHGAFHSILDYLDEGDCLVLNDTRVLPARLFGEKETGGQVEVLLLKQENTDEWETLVKPAKRVKPGTVLYFGENKLKAECTDVLEHGGRMLRFSYEGVFLEILEELGEMPLPPYIKEKLQDQERYQTVYAKQDGSAAAPTAGLHFTESLLHKAKEKGVHVTTITLHVGLGTFRPVSADKVEDHHMHAEFYQISEGTAMLLNETKTNGNKIVAVGTTSVRTLETAAQNKDGFQKESGWTDIFIYPGYVFQGIDAMLTNFHLPKSTLVMLVSAMAGRNFLLSAYEEAIRERYRFFSFGDAMLIMKGSRHKWQQ

SEQ ID NO: 63822 - protein, 343 aa, Bacillus salsus
  misc_feature (1)..(343): tr|A0A1H0V5H2|A0A1H0V5H2_9BACI S-adenosylmethionine:tRN A ribosyltransferase-isomerase OS=Bacillus salsus OX=93 0152 GN=queA PE=3 SV=1
MMKVELFDFDLPEELIAQTPLEDREASRLMVLDKNSGQIRHSHFRSVLDYLQEGDCLVLNDTRVLPARLFGTKDDTGAKVEVLLLKQTEGDNWETLVKPAKRIKVGSVISFGDGLLKAVCTAESEHGGRYLTFQYDGIFYEVLEQLGEMPLPPYIKEQLDDRERYQTVFAKERGSAAAPTAGLHFTEQLLQDIRDKGVHVAFITLHVGLGTFRPMSVENIDEHEMHAEFYQMTEGTARLLNKVKQDGGKIISVGTTSTRTLETIARDNEGQFVESSGWTDIFIFPGYTYKAIDGLITNFHLPKSTLIMLVSALAGRENVLQAYEEAVKERYRFFSFGDAMLII

SEQ ID NO: 63823 - protein, 342 aa, Bacillus selenatarsenatis
  misc_feature (1)..(342): tr|A0A0A8X8B0|A0A0A8X8B0_9BACI S-adenosylmethionine:tRN A ribosyltransferase-isomerase OS=Bacillus selenatarsen atis SF-1 OX=1321606 GN=queA PE=3 SV=1
MKVDLFDFHLPEELIAQTPLEQRAESKLMVLNKESGKIEHDVFKNIKNHLKPGDCLVLNDTKVLPARLFGMKEDTGAKIEVLLLKQLEGDEWETLIKPAKRVKEGTKIVFGDGLLTAECTVEAEHGGRSLRFSYDGIFYEVLEQLGEMPLPPYIKEQLEDKDRYQTVFARERGSAAAPTAGLHFTEELLEEIKEMGIHIAFITLHVGLGTFRPVSVDSIEEHDMHSEFYQVTEGTALLLNSVREQGGRIITVGTTSTRTLETIAAANDGKFVAENGWTNIFIYPGYKFKAINGMITNFHLPKSTLIMLVSALAGRENVLNAYNKAVEERYRFFSFGDAMLIL

SEQ ID NO: 63824 - protein, 346 aa, Bacillus selenatarsenatis
  misc_feature (1)..(346): tr|A0A0A8X2Q4|A0A0A8X2Q4_9BACI S-adenosylmethionine:tRN A ribosyltransferase-isomerase OS=Bacillus selenatarsen atis SF-1 OX=1321606 GN=SAMD00020551_1684 PE=3 SV=1
MQLETKIHPHGFSLPPSLNASHPPERRGLRRDQVKMMVLDRVTGNVVHEQFNQIEKYLNSGDILVLNNSRTIPAILKGTLHRNGKVIGTNVEMRLARKKNDSEWEVLIVATNVKSGDCFKFSEILEANVIGKVFKSPLKMIQFNLQGKDLYNEIYSTGEPIRYEYIHHAWNLDYYQTVFASQPGSVEMPSAGRAFSWELLLKLQLKGVKLAFLQLHTGLSYFLDDEFVHSPEEHFEEYSIRQEDMEAILKAKDSGAKVIAAGTTVVRALETAASNSTIQGWTNLYITSDYELQLVDGIITGFHEPKASHLDMLAAFVDEIKLLEAYNLAIEQKYLWHEFGDINLII

SEQ ID NO: 63825 - protein, 351 aa, Bacillus selenitireducens
  misc_feature (1)..(351): tr|D6XWZ3|D6XWZ3_BACIE S-adenosylmethionine:tRNA ribosy ltransferase-isomerase OS=Bacillus selenitireducens (st rain ATCC 700615 / DSM 15326 / MLS10) OX=439292 GN=queA PE=3 SV=1
MDVSAFDYELPEELIAQTPLKNREESRLLVMERTTGDLSHQTFSSVIDHLNPGDALVLNDTKVIPARLFGIKKETGAKIEVLLLKEQDDHVWEALVKPAKRLKKGTVISFGEGVLQAECTGELPEGRRLLRFSFDGVFHERLDDLGEMPLPPYIQEQLDEKDRYQTVYAANRGSAAAPTAGLHFTPDLLEKIRAKGIRTVFLTLHVGLGTFRPVSVDTVEDHTMHAEFYQFSEASARALRETRARGGRIIAVGTTSARTLETIVRDHDDFAAASGWTDIFIYPGYRFQGIDGLLTNFHLPKSTLVMLVSAFSKREFVLDAYREAVRERYRFFSFGDAMLIANQSGDSRKGE

SEQ ID NO: 63826 - protein, 344 aa, Bacillus shackletonii
  misc_feature (1)..(344): tr|A0A0Q3TJ38|A0A0Q3TJ38_9BACI S-adenosylmethionine:tRN A ribosyltransferase-isomerase OS=Bacillus shackletonii OX=157838 GN=AN964_10965 PE=3 SV=1
MMTKATTFDFYLPSELNASHPPERRGIRRDHVKMMVLDRITGNIRHDQFFQLSNYLKQGDLVVLNNSRTIPAILQAKLLRETKLIEENVEIRLARSRDEEVWDVLIVANEIKRGDILQFSSDLSAIVIEYTDSSPLRTIQFSKKGTELFNRIYALGEPIRYEYIHQPWALDYYQTVFASVPGSVEMPSAGRAFSWELLFNLQRNGIQLEFIQLHTGLSYLLDDELETSPTDNYEKYHLSETTVEKIDKTKASGGRVIAVGTTVVRALESAAMTGVLSGVTNLYINQSFPLKFVDGIITGFHEPKASHLDMLTAFLPQELLWNAYDEAIKNRYQWHEFGDMNLII

SEQ ID NO: 63827 - protein, 342 aa, Bacillus shackletonii
  misc_feature (1)..(342): tr|A0A0Q3THD8|A0A0Q3THD8_9BACI S-adenosylmethionine:tRN A ribosyltransferase-isomerase OS=Bacillus shackletonii OX=157838 GN=queA PE=3 SV=1
MKVDIFDFHLPEELIAQTPLKNRSDSRLMVLNKENGEIEHTVFKNITKYLRKGDCLVLNNTKVLPARLFGVKEDTGAHIEVLLLKQLEEDNWETLVKPAKRVKVGTKLTFGDGQLVAHCVKEEEHGGRVLKFEYNGIFYEVLEALGEMPLPPYIKEKLDDRDRYQTVYAKEEGSAAAPTAGLHFTHELLEEIKNMGVHITFLTLHVGLGTFRPVSVENIEKHDMHSEYYQVSKETADLINNVKKQGGRVIAVGTTSTRTLETIASEHNGEIVAQNGWTDIFIYPGYEFKGIDGMITNFHLPKSTLIMLVSALAGREHILHAYETAVQEKYRFFSFGDAMLII

SEQ ID NO: 63828 - protein, 342 aa, Bacillus siamensis
  misc_feature (1)..(342): tr|A0A268DS02|A0A268DS02_9BACI S-adenosylmethionine:tRN A ribosyltransferase-isomerase OS=Bacillus siamensis OX =659243 GN=queA PE=3 SV=1
MKVDLFDFELPERLIAQVPLKERDASRLMVLDKQTGGLTDSSFKEIVSFFKEGDCLVLNNTRVLPARLFGTKEDTGAKVELLLLKQEENDTWETLVKPAKRVKKGTVLTFGDGRLTAVCTEELDHGGRKIEFRYDGIFYEVLESLGEMPLPPYIKEQLDDKERYQTVFSKEIGSAAAPTAGLHFTEEILDELKQKGVRIEFITLHVGLGTFRPVSADDVEEHNMHAEFYEMTEETAASLNEVRKSGGRIVSVGTTSTRTLETIAGEHDGVFTASSGWTSIFIYPGYEFKAIDGMITNFHLPKSSLIMLVSALAGREHVLSAYRHAVEEEYRFFSFGDAMLII

SEQ ID NO: 63829 - protein, 342 aa, Bacillus siamensis
  misc_feature (1)..(342): tr|A0A2K9K921|A0A2K9K921_9BACI S-adenosylmethionine:tRN A ribosyltransferase-isomerase OS=Bacillus siamensis OX =659243 GN=queA PE=3 SV=1
MKVDLFDFELPERLIAQVPLKERDASRLMVLDKQTGGLTDSSFKEIVSFFKEGDCLVLNNTRVLPARLFGTKEDTGAKVELLLLKQEENDTWETLVKPAKRVKKGTVLTFGDGRLTAVCTEELDHGGRKIEFRYDGIFYEVLESLGEMPLPPYIKEQLDDKERYQTVFSKEIGSAAAPTAGLHFTEEILDELKQKGVRIEFITLHVGLGTFRPVSADDVEEHNMHAEFYEMTEETAASLNEIRKSGGRIVSVGTTSTRTLETIAGEHDGVFTASSGWTSIFIYPGYEFKAIDGMITNFHLPKSSLIMLVSALAGREHVLSAYRHAVEEEYRFFSFGDAMLII

SEQ ID NO: 63830 - protein, 342 aa, Bacillus simplex
  misc_feature (1)..(342): tr|A0A127DAI9|A0A127DAI9_9BACI S-adenosylmethionine:tRN A ribosyltransferase-isomerase OS=Bacillus simplex OX=1 478 GN=queA PE=3 SV=1
MKLEMFDFHLPEELIAQVPLEDREASRLMVLDKETGKLQHDVFSHITEYIKPGDCLVLNDTKVLPARLYGSKEETGAKVEVLLLKQEHDDVWETLVKPAKRIKVGSTIIFGDGKLSAVCTGVLEHGGRILEFKYEGIFYEILEKLGEMPLPPYIKEQLDDQDRYQTVYARERGSAAAPTAGLHFTEDLLEKLKGMGVHIAFITLHVGLGTFRPVSVDDIDSHEMHSEFYQMTEGTARLLNDVKEKGGKIITVGTTSTRTLETIASRNDGVFKEENGWTSIFIYPGYEFKGIDAMITNFHLPKSTLIMLISALAGREHILHAYETAVKEKYRFFSFGDAMLIK

SEQ ID NO: 63831 - protein, 342 aa, Bacillus simplex
  misc_feature (1)..(342): tr|A0A2A4BN83|A0A2A4BN83_9BACI S-adenosylmethionine:tRN A ribosyltransferase-isomerase OS=Bacillus simplex OX=1 478 GN=queA PE=3 SV=1
MKLDMFDFHLPEELIAQVPLEDREASRLMVLDKETGKLQHDVFSHITEYIKPGDCLVLNDTKVLPARLYGSKEGTGAKIEVLLLKQEHDDVWETLVKPAKRIKEGSTIVFGDGKLSAVCTGVLEHGGRILEFKYDGIFYEILEKLGEMPLPPYIKEQLDDQDRYQTVYARERGSAAAPTAGLHFTEDLLEKLKGMGVHIAFITLHVGLGTFRPVSVDDIDSHEMHSEFYQMTEGTARLLNDVKEKGGKIITVGTTSTRTLETIASRNDGVFKEENGWTSIFIYPGYEFKGIDAMITNFHLPKSTLIMLISALAGREHVLHAYETAVEEKYRFFSFGDAMLIK

SEQ ID NO: 63832 - protein, 342 aa, Bacillus smithii
  misc_feature (1)..(342): tr|G9QQ32|G9QQ32_9BACI S-adenosylmethionine:tRNA ribosy ltransferase-isomerase OS=Bacillus smithii 7_3_47FAA OX =665952 GN=queA PE=3 SV=1
MNVEDFDFELPEELIAQTPLKNRSESRLMVLDKETGEIKHDIFKNLLHHLNPGDCLVLNDSKVLPARLYGVKKDTGAHIEILLLKQLEGDRWETLAKPAKRLKEGSQIIFGDGQLTAECVGELDHGGRVIEFHYDGIFYEILDQLGEMPLPPYIKEKLEDQDRYQTVYAKERGSAAAPTAGLHFTEELLKKIESAGVHLAFLTLHVGLGTFRPVSVDRVEDHDMHAEFYQVSKETADLIEKVRREGGKIYSVGTTSTRTLETIARDHDGKIVPASGWTDIFIYPGFQFRAIDGLITNFHLPKSTLIMLVSALAGRENILNAYETAVREKYRFFSFGDAMFIK

SEQ ID NO: 63833 - protein, 342 aa, Bacillus smithii
  misc_feature (1)..(342): tr|A0A0H4P1G0|A0A0H4P1G0_9BACI S-adenosylmethionine:tRN A ribosyltransferase-isomerase OS=Bacillus smithii OX=1 479 GN=queA PE=3 SV=1
MNVEDFDFELPEELIAQTPLKNRSESRLMVLDKETGEIKHDIFKNLLHHLNPGDCLVLNDSKVLPARLYGVKKDTGAHIEILLLKQLEGDRWETLAKPAKRLKEGSQIIFGDGQLTAECVGKLDHGGRVIEFHYDGIFYEILDQLGEMPLPPYIKEKLEDQDRYQTVYAKERGSAAAPTAGLHFTEELLKEIESAGVHLAFLTLHVGLGTFRPVSVDRVEDHDMHAEFYQVSKETADLIEKVRREGGKIYSVGTTSTRTLETIARDHDGKIVPASGWTDIFIYPGFQFRAIDGLITNFHLPKSTLIMLVSALAGRENILNAYETAVREKYRFFSFGDAMFIK

SEQ ID NO: 63834 - protein, 345 aa, Bacillus solani
  misc_feature (1)..(345): tr|A0A0Q3VFD2|A0A0Q3VFD2_9BACI S-adenosylmethionine:tRN A ribosyltransferase-isomerase OS=Bacillus solani OX=16 37975 GN=AN957_01830 PE=3 SV=1
MMSTARSFQVPEYLNARMPAEYRGIQRDHVRLMTLDTVTGDCSHNFFNKLDSYLVEGDLLVLNNSRTIPAVLKGKRGKQTIEIRLSRKLSDREWEALIVGGVITVGEKIDLPGGLTATITGLGTEAPLIVLSFSKSGLDLLEIFYQYGEPLHYEYIETPWPIEMYQTVYASVPGSVEMPSAGRAFTWRLLNMLKGKGVNIAYIQLHAGLSYYGNDRWPNPNKHLEEFCVPVKTAELINKTRKNNGRVIAVGTTVVRALETAVNTDGNVEPQEGITSLYIQKGYPLKAVDGLITGFHEPEASHLDLLSAFIDKGLLMKAYKKALADGYLWHEFGDMNLILPMDERK

SEQ ID NO: 63835 - protein, 342 aa, Bacillus solani
  misc_feature (1)..(342): tr|A0A0Q3QSI2|A0A0Q3QSI2_9BACI S-adenosylmethionine:tRN A ribosyltransferase-isomerase OS=Bacillus solani OX=16 37975 GN=queA PE=3 SV=1
MKVDLFDFHLPEELIAQTPLIERTSSRLMVLDKEKGTTRHTVFKQIKEHLKAGDCLVLNDTRVLPARLFGEKEGTGAKIEVLLLKQLEGDSWETLIKPAKRVKEGTRIVFGDGKLSAVCTQTSEHGGRVLEFQYDGIFYEVLEQLGEMPLPPYIKEQLDDQERYQTVFARERGSAAAPTAGLHFTEQLLEEIKELGVHIAFITLHVGLGTFRPVNVEDLNEHEMHSEFYQMTEGTARLLNEVREDGGRIISVGTTSTRTLETIASANNGRFEEASGWTDIFIYPGYEFKAIDGMITNFHLPKSTLIMLVSALAGRENVLNAYREAVEEKYRFFSFGDAMLII

SEQ ID NO: 63836 - protein, 347 aa, Bacillus solimangrovi
  misc_feature (1)..(347): tr|A0A1E5LBM3|A0A1E5LBM3_9BACI S-adenosylmethionine:tRN A ribosyltransferase-isomerase OS=Bacillus solimangrovi OX=1305675 GN=queA PE=3 SV=1
MDVNLFDFNLPEELIAQTPLEERTASKLMVLDKETGKIKHETFKNILDYLYPGDCLVLNDTKVLPARLYGMKEETGAKVEVLLLKQLEGDTWETLVKPAKRVKVGTIVSFGDGRLKAKCISENEHGGRNFEFMYEGIFYEVLDSLGEMPLPPYIKEQLDDRSRYQTVFARERGSAAAPTAGLHFTEELLEAIRAKGVYITFITLHVGLGTFRPVSVDSIEEHEMHGEFYQMSHETAEQLNQVRKEGGRIISVGTTSTRTLETIASSYNGEFKESSGWTSIFIYPGYAFKGIDGMITNFHLPKSTLIMLISALAGRENVLHAYEEAVNRRYRFFSFGDAMFITNKLSE

SEQ ID NO: 63837 - protein, 342 aa, Bacillus sonorensis
  misc_feature (1)..(342): tr|M5P6T2|M5P6T2_9BACI S-adenosylmethionine:tRNA ribosy ltransferase-isomerase OS=Bacillus sonorensis L12 OX=12 74524 GN=queA PE=3 SV=1
MKVELFDFDLPERLIAQVPLKERDASRLMVLNKQTGDITHSTFKHIIDFMQAGDCLVLNDTRVLPARLFGIKEETGAKVEVLLLKQEEGDIWETLVKPAKRVKRGTVLTFGDGRLTAVCTEELDHGGRKIEFRYEGIFYEVLESLGEMPLPPYIKEQLDDKERYQTVYSKKQGSAAAPTAGLHFTEEILEALKQKGVEIAFITLHVGLGTFRPVSAEHVEEHDMHAEFYEMTEETAAILNRVKDSGGRIISVGTTSTRTLETIASENDGRFREARGWTSIFIYPGYTFKAIDGMVTNFHLPKSSLIMLVSALAGREHILSAYRTAVEHEYRFFSFGDAMLIQ

SEQ ID NO: 63838 - protein, 342 aa, Bacillus sp.; identical to SEQ ID NO: 63673
  misc_feature (1)..(342): tr|A0A0Q9GWY4|A0A0Q9GWY4_9BACI S-adenosylmethionine:tRN A ribosyltransferase-isomerase OS=Bacillus sp. Root239 OX=1736499 GN=queA PE=3 SV=1

SEQ ID NO: 63839 - protein, 350 aa, Bacillus sp.
  misc_feature (1)..(350): tr|A0A2B4NUD0|A0A2B4NUD0_9BACI S-adenosylmethionine:tRN A ribosyltransferase-isomerase OS=Bacillus sp. AFS07596 0 OX=2034282 GN=queA PE=3 SV=1
MDINLFDFHLPEELIAQVPLEDRETSRLMVLDRETGDIEHKHFTDILSYLHEGDCLVLNETKVMPARLHGVKEDTGAHIEVLLLKQEEGDKWETLVKPAKRVKEGTVISFGEGKLKATCTGTADQGGRQLEFSYDGIFYEILDELGEMPLPPYIKETLEDRDRYQTVYAKEIGSAAAPTAGLHFTEELLEKLKQKGVELAFITLHVGLGTFRPVSADTIEEHHMHAEYYHMSEETAALLNRVKESGGRIITVGTTSTRTLETIATDHDGKLCAASGWTDIFMYPGYEFKAIDGLITNFHLPKSTLIMLVSAFANRDNVLHAYNEAVKEKYRFFSFGDAMFVASHAKMGNK

SEQ ID NO: 63840 - protein, 342 aa, Bacillus sporothermodurans
  misc_feature (1)..(342): tr|A0A2T6ELY9|A0A2T6ELY9_9BACI S-adenosylmethionine:tRN A ribosyltransferase-isomerase OS=Bacillus sporothermod urans OX=46224 GN=queA PE=3 SV=1
MKVDLFDFNLPESLIAQTPLKNRSDSRLMVLNKETGDLKHTVFKNITEYLQPGDCLVLNDTKVLPARLFGIKEDTGAKIEVLLLKQTEDDRWETLVKPAKRIKIGSEIIFGDGKLKATCIEEKEHGGRILEFQYEGIFYEVLDALGEMPLPPYIKEQLDDRDRYQTVYAKESGSAAAPTAGLHFTEELLEEIKNMGVHIAFITLHVGLGTFRPVSVEDVDKHSMHAEFYQVNEETAELINNVKKQGGRIISVGTTSTRTLETIASANNGQIVSTSGWTDIFIFPGYEFKGIDGMITNFHLPKSTLIMLVSALAGREHVLHAYEEAVNQKYRFFSFGDAMLII

SEQ ID NO: 63841 - protein, 342 aa, Bacillus sporothermodurans
  misc_feature (1)..(342): tr|A0A150LEY6|A0A150LEY6_9BACI S-adenosylmethionine:tRN A ribosyltransferase-isomerase OS=Bacillus sporothermod urans OX=46224 GN=queA PE=3 SV=1
MKVDLFDFNLPESLIAQTPLKNRSDSRLMVLNKETGDIKHTVFKNITEYLQPGDCLVLNDTKVLPARLFGIKEDTGAKIEVLLLKQTEDDRWETLVKPAKRIKIGSEIIFGDGKLKATCIEEKEHGGRILEFQYEGIFYEVLDALGEMPLPPYIKEQLDDRDRYQTVYAKESGSAAAPTAGLHFTEELLEEIKNMGVHIAFITLHVGLGTFRPVSVEDVDKHSMHAEFYQVNEETAELINNVKKQGGRIISVGTTSTRTLETIASANNGQIVSTSGWTDIFIFPGYEFKGIDGMITNFHLPKSTLIMLVSALAGREHVLHAYEEAVNQKYRFFSFGDAMLII

SEQ ID NO: 63842 - protein, 342 aa, Bacillus stratosphericus
  misc_feature (1)..(342): tr|A0A4Y9JU92|A0A4Y9JU92_9BACI S-adenosylmethionine:tRN A ribosyltransferase-isomerase OS=Bacillus stratospheri cus OX=293386 GN=queA PE=3 SV=1
MKLELFDFDLPERLIAQVPLEKRDASRLMVLNKQTGAITHDTFSQIIDYFQKGDCLVLNNTRVLPARLFGMKEDTGAKVELLLLKQEEGDNWETLVKPAKRVKKGTVITFGDGRLQAVCTEEMEHGGRKVEFQYTGIFYEVLESLGEMPLPPYIKEQLDDRERYQTVYSKEVGSAAAPTAGLHFTTELLDALKAKGVHIAFITLHVGLGTFRPVSAERIEEHEMHAEFYEMNEETADALNRVRNEGGRIISVGTTSTRTLETIASAHDGAFKASSGWTSIFIYPGYTFKAIDGMITNFHLPKSSLIMLVSALAGREHVLKAYNEAVKEEYRFFSFGDAMLIQ

SEQ ID NO: 63843 - protein, 342 aa, Bacillus stratosphericus
  misc_feature (1)..(342): tr|M5RER6|M5RER6_9BACI S-adenosylmethionine:tRNA ribosy ltransferase-isomerase OS=Bacillus stratosphericus LAMA 585 OX=1236481 GN=queA PE=3 SV=1
MKLELFDFDLPERLIAQVPLEKRDASRLMVLNKQTGDITHDTFSQITDYFQKGDCLVLNNTRVLPARLFGTKEDTGAKVELLLLKQEEGDKWETLVKPAKRVKNGTVITFGDGRLKAVCTEELEHGGRKVEFQYTGIFYEVLESLGEMPLPPYIKEQLDDRERYQTVYSKEVGSAAAPTAGLHFTNELLDALKAKGVHIAFITLHVGLGTFRPVSAERIEEHEMHAEFYEMNEETAEELNRVRKEGGRIISVGTTSTRTLETIASAYDGEFKASSGWTSIFIYPGYTFKAIDGMITNFHLPKSSLIMLVSALAGREHVLKAYNEAVKEEYRFFSFGDAMLIQ

SEQ ID NO: 63844 - protein, 340 aa, Bacillus subterraneus
  misc_feature (1)..(340): tr|A0A0D6Z7K9|A0A0D6Z7K9_9BACI S-adenosylmethionine:tRN A ribosyltransferase-isomerase OS=Bacillus subterraneus OX=285983 GN=UB32_12240 PE=3 SV=1
MKAGVMDFYLPENLNANLPPEKRGLKRDQVRLMTLSRKTGEIQHDRFDHLPYFLQPGDLIILNNSRTIPASLQGDCIREGVQILPRVEIRLARRIFDDTWDALIIANSVRMGDVLHFSEKLTATVIAEIDTSPLKTIKFNKGGSELLNLIYVLGAPIRYEYIEQPWDLNYYQNVFATHPGSVEMPSAGRAFSWELLFDLKKKGIQVDFIQLHTGLSYLLEDHVDPKENPEEYHIRQHTMEQILKAHSSGKKVIAVGTTVVRALESAARNEELSGATNLYIDQESSLKIVDGIITGFHEPRASHLDMLTAFLPKHHLFHAYQQAIHEGYLWHEFGDMNLII

SEQ ID NO: 63845 - protein, 342 aa, Bacillus subterraneus
  misc_feature (1)..(342): tr|A0A3R9FC23|A0A3R9FC23_9BACI S-adenosylmethionine:tRN A ribosyltransferase-isomerase OS=Bacillus subterraneus OX=285983 GN=queA PE=3 SV=1
MKVDLFDFHLPEELIAQTPLEQRAESRLMVLDKETGNIDHDVFKNIKKYLKPGDCLVLNDTKVLPARLFGMKEDTGAKIEVLLLKQLEGDEWETLIKPAKRVKEGTKIVFGDGLLTAECTGEAEHGGRNLKFSYDGIFYEVLEQLGEMPLPPYIKEQLEDKDRYQTVFARERGSAAAPTAGLHFTEELLEEIKGLGIHIAFITLHVGLGTFRPVSVDSIEEHDMHSEFYQVTEGTALLLNSVREQGGRIITVGTTSTRTLETIATANDGKFVAENGWTNIFIYPGYEFKAIDGMITNFHLPKSTLIMLVSALAGRENVLNAYNKAVEERYRFFSFGDAMLIL

SEQ ID NO: 63846 - protein, 342 aa, Bacillus subtilis
  misc_feature (1)..(342): sp|O32054|QUEA_BACSU S-adenosylmethionine:tRNA ribosylt ransferase-isomerase OS=Bacillus subtilis (strain 168) OX=224308 GN=queA PE=1 SV=1
MKVDLFDFELPERLIAQVPLEQRDASRLMVLDKHTGELTDSSFKHIISFFNEGDCLVLNNTRVLPARLFGTKEDTGAKVELLLLKQETGDKWETLAKPAKRVKKGTVVTFGDGRLKAICTEELEHGGRKMEFQYDGIFYEVLESLGEMPLPPYIKEQLDDKERYQTVYSKEIGSAAAPTAGLHFTEEILQQLKDKGVQIEFITLHVGLGTFRPVSADEVEEHNMHAEFYQMSEETAAALNKVRENGGRIISVGTTSTRTLETIAGEHDGQFKASSGWTSIFIYPGYEFKAIDGMITNFHLPKSSLIMLVSALAGRENILRAYNHAVEEEYRFFSFGDAMLII

SEQ ID NO: 63847 - protein, 342 aa, Bacillus subtilis; identical to SEQ ID NO: 63846
  misc_feature (1)..(342): tr|A0A063XI68|A0A063XI68_BACIU S-adenosylmethionine:tRN A ribosyltransferase-isomerase OS=Bacillus subtilis OX= 1423 GN=queA PE=3 SV=1

SEQ ID NO: 63848 - protein, 342 aa, Bacillus swezeyi
  misc_feature (1)..(342): tr|A0A5D4QAG4|A0A5D4QAG4_9BACI S-adenosylmethionine:tRN A ribosyltransferase-isomerase OS=Bacillus swezeyi OX=1 925020 GN=queA PE=3 SV=1
MKVDLFDFELPERLIAQVPLKERDASRLMVLDKETGGITHSTFKHIIDFLEAGDCIVLNDTRVLPARLFGVKEETGAKVEVLLLKQEEGDGWETLVKPAKRVKRGTVLTFGDGRLTAVCTEELDHGGRKIEFRYEGIFYEVLESLGEMPLPPYIKEQLDDKERYQTVYSKKQGSAAAPTAGLHFTEEILDALKEKGVHIAFITLHVGLGTFRPVSAETVEEHDMHAEFYEMTAETAAALNQVKQKGGRIISVGTTSTRTLETIASEHDGRFQEARGWTSIFIYPGYAFRAIDGMITNFHLPKSSLIMLVSALAGREHVLSAYRTAVEHEYRFFSFGDAMLIK

SEQ ID NO: 63849 - protein, 342 aa, Bacillus swezeyi
  misc_feature (1)..(342): tr|A0A1R1Q8S9|A0A1R1Q8S9_9BACI S-adenosylmethionine:tRN A ribosyltransferase-isomerase OS=Bacillus swezeyi OX=1 925020 GN=queA PE=3 SV=1
MKVDLFDFELPERLIAQVPLQERDASRLMVLDKETGDITHSTFKHIIDFLEAGDCIVLNDTRVLPARLFGVKEETGAKVEVLLLKQEEGDEWETLVKPAKRVKRGTVLTFGDGRLTAVCTEELDHGGRKIEFRYEGIFYEVLESLGEMPLPPYIKEQLDDKERYQTVYSKKQGSAAAPTAGLHFTDEILDALKEKGVHIAFITLHVGLGTFRPVSAETVEEHDMHAEFYEMTAETAAALNQVKQDGGRIISVGTTSTRTLETIASEHDGRFQEARGWTSIFIYPGYAFRAIDGMITNFHLPKSSLIMLVSALAGREHVLSAYRTAVEHEYRFFSFGDAMLIK

SEQ ID NO: 63850 - protein, 353 aa, Bacillus taeanensis
  misc_feature (1)..(353): tr|A0A366Y2I4|A0A366Y2I4_9BACI S-adenosylmethionine:tRN A ribosyltransferase-isomerase OS=Bacillus taeanensis O X=273032 GN=queA PE=3 SV=1
MDVNLFDFNLPESLIAQTPLKDRTSSRLMVVDPQSNQIRHHQFKNILQFLNAGDCLVLNDTRVLPARLYGIKEETGAKVEVLLLKQEKDDQWETLVKPAKRVKNGTVLSFGDGRLTATCIKELEHGGRILEFHYEGIFYEVLDSLGEMPLPPYIKETLDEKERYQTVYAKHRGSAAAPTAGLHFTEKLLTEIEEMGVHIVYLTLHVGLGTFRPVSADKVEEHEMHAEFYQLSKGSAEKLNAVKDAGGRIIAVGTTSTRTLETIASDNDGVFKEASGWTSIFIYPGYAFKAINGMITNFHLPKSSLVMLVSALAGREFILSAYEEAVREQYRFFSFGDAMLILEGSLEHDSSEI

SEQ ID NO: 63851 - protein, 342 aa, Bacillus tequilensis
  misc_feature (1)..(342): tr|A0A2X0XV33|A0A2X0XV33_9BACI S-adenosylmethionine:tRN A ribosyltransferase-isomerase OS=Bacillus tequilensis OX=227866 GN=queA PE=3 SV=1
MKVDLFDFELPERLIAQVPLEQRDASRLMVLDKHTGELTDSSFKHIISFFKEGDCLVLNNTRVLPARLFGTKEDTGAKVELLLLKQETGDNWETLAKPAKRVKKGTVVTFGDGRLKAICTEELEHGGRKMEFQYDGIFYEVLESLGEMPLPPYIKEQLDDRERYQTVYSKEIGSAAAPTAGLHFTEEILQQLKDKGVQIEFITLHVGLGTFRPVSADDVEEHNMHAEFYQMSEETAAALNKIRENGGRIISVGTTSTRTLETIAGEHDGQFKASSGWTSIFIYPGYEFKAIDGMITNFHLPKSSLIMLVSALAGRENVLRAYHHAVEEEYRFFSFGDAMLIL

SEQ ID NO: 63852 - protein, 342 aa, Bacillus terrae
  misc_feature (1)..(342): tr|A0A429X1G8|A0A429X1G8_9BACI S-adenosylmethionine:tRN A ribosyltransferase-isomerase OS=Bacillus terrae OX=19 14933 GN=queA PE=3 SV=1
MKVDMFDFNLPEELIAQTPLENRSSSRLMVLNKQTGEVKHETFRKLIDYLNPGDCLVLNDTKVLPARLFGIKTDTGAKVEVLLLKQTNEDRWETLVKPAKRVKKGTEISFGDGRLKAVCTGTEDHGGRLFEFQYEGIFYEILDSLGKMPLPPYIKEQLEDQGRYQTVYARERGSAAAPTAGLHFTNEILESLKEKGVHVAFVTLHVGLGTFRPVSVDSVEDHDMHAEFYRMSKETAALLNQVKKDGGRIISVGTTSTRTLETIARENGGLFKAGNGWTDIFIYPGYEFRAIDGLVTNFHLPMSTLIMLVSALAGREYILYAYETAVQEKYRFFSFGDAMLII

SEQ ID NO: 63853 - protein, 342 aa, Bacillus thermoamylovorans
  misc_feature (1)..(342): tr|A0A2U8EDU9|A0A2U8EDU9_9BACI S-adenosylmethionine:tRN A ribosyltransferase-isomerase OS=Bacillus thermoamylov orans OX=35841 GN=queA PE=3 SV=1
MKLEDFDYYLPDELIAQTPLQDRAASRLMVLNKQTGEIEHKIFSDIIHYLNPGDCLVLNDTKVMPARLFGMKEDTNAHVEVLLLKQIEGDKWETLVKPAKRIKPGTVISFGGGKLHAKCIDTLEYGGRIFEFQYDGIFYEILDELGEMPLPPYIKKRLDDADRYQTVYAREIGSAAAPTAGLHFTEKLLADIKNKGVHIAFITLHVGLGTFRPVNVESIEEHEMHAEFYHMTEETANLLNEVKKNGGRIISVGTTSTRTLETIAARHNGSFVAESGWTDIFIYPGFQFKAIDCLITNFHLPKSTLIMLVSALAGREHILHAYETAVKERYRFFSFGDAMFIH

SEQ ID NO: 63854 - protein, 342 aa, Bacillus thermoamylovorans; identical to SEQ ID NO: 63744
  misc_feature (1)..(342): tr|A0A090IWR4|A0A090IWR4_9BACI S-adenosylmethionine:tRN A ribosyltransferase-isomerase OS=Bacillus thermoamylov orans OX=35841 GN=queA PE=3 SV=1

SEQ ID NO: 63855 - protein, 343 aa, Bacillus thermocopriae
  misc_feature (1)..(343): tr|A0A410XKZ6|A0A410XKZ6_9BACI S-adenosylmethionine:tRN A ribosyltransferase-isomerase OS=Bacillus thermocopria e OX=1215031 GN=queA PE=3 SV=1
MKIDLFDFYLPEELIAQTPLPNREASRLMVLDKKTGEVTHEPTFRSILSYLKEGDCLVLNDTRVLPARLYGEKEETGAHIEVLLLKQLDGDQWETLVKPAKRVKVGTIISFGDGRLRAECVAELEHGGRILSFSYDGIFLEVLESLGEMPLPPYIKAQLHDRERYQTVYAREAGSAAAPTAGLHFTEQLLEDVRKKGVHLAFITLHVGLGTFRPVNVENIEEHDMHAEFYQMSEQTAQLLNDVKAQGGRIIAVGTTSTRTLETIASRHDGTFVAESGWTDIFIYPGYTFRAIDGMITNFHLPKSTLIMLVSALAGREHVLRAYEEAVKERYRFFSFGDAMLII

SEQ ID NO: 63856 - protein, 343 aa, Bacillus thermozeamaize
  misc_feature (1)..(343): tr|A0A1Y3PIL9|A0A1Y3PIL9_9BACI S-adenosylmethionine:tRN A ribosyltransferase-isomerase OS=Bacillus thermozeamai ze OX=230954 GN=queA PE=3 SV=1
MDVSQFDFDVPEDLIAQSPLPQREQSRLLVLRRRSGKIEHRRFREIVEYLSPGDCLVLNHSKVIPARLHGVKESTGARVEVLLLHRLDGERWETLVRPGKKVREEDWLSFGDGQLRGLVERRTEVGGRVIRFFYEGLFEEVLDRLGEMPLPPYIRAGLPDRGRYQTVYAKEPGSAAAPTAGLHFTEQLLQELKERGVEQAFLTLHVGLGTFRPVTVERVEEHRMHAEYYELGEEAAALIRRTKQRGGRVVAVGTTSCRTLEWIARKFQGEIRADRGWTDLFIYPGYAFRAIDGLITNFHLPRSTLVMLVSAFAGMEQTRRAYEEAIRERYRFYSFGDAMLIID

SEQ ID NO: 63857 - protein, 350 aa, Bacillus thuringiensis; identical to SEQ ID NO: 63668
  misc_feature (1)..(350): tr|C3G8M5|C3G8M5_BACTU S-adenosylmethionine:tRNA ribosy ltransferase-isomerase OS=Bacillus thuringiensis serova r andalousiensis BGSC 4AW1 OX=527032 GN=queA PE=3 SV=1

SEQ ID NO: 63858 - protein, 350 aa, Bacillus thuringiensis; identical to SEQ ID NO: 63688
  misc_feature (1)..(350): tr|W8YHM0|W8YHM0_BACTU S-adenosylmethionine:tRNA ribosy ltransferase-isomerase OS=Bacillus thuringiensis DB27 O X=1431339 GN=queA PE=3 SV=1

SEQ ID NO: 63859 - protein, 342 aa, Bacillus timonensis
  misc_feature (1)..(342): tr|A0A4S3PS44|A0A4S3PS44_9BACI S-adenosylmethionine:tRN A ribosyltransferase-isomerase OS=Bacillus timonensis O X=1033734 GN=E1I69_12135 PE=3 SV=1
MVAKALDFYLPSQLNASHPPEKRGIRRDHVRMMVLNRSSGNIEHDQFFHLPHYLEPGDLVILNNSRTIPAVLHAKWYRNKVQLTTKTEIRLARRREDDIWETLIVESRVKIGDQFIFSPELTATVIGVKKNSPLKLLKFTKKGSDLLNIIYALGEPVRYEYIDHPWSLDYYQTVFASQPGSVEMPSAGRAFSWELLFTLMRKGIQVDFIQLHTGLSYLLDDQWHQSPEENEEEYHISEKTMQRTLETKAAGKKVIAVGTTVVRALESAEKLGHLSGVTNLYIHREFPMKIADGIITGFHEPQASHLDMLSAFIAEHHLLRAYDQAIDAKYLWHEFGDMNLII

SEQ ID NO: 63860 - protein, 341 aa, Bacillus timonensis
  misc_feature (1)..(341): tr|A0A4S3PZE7|A0A4S3PZE7_9BACI S-adenosylmethionine:tRN A ribosyltransferase-isomerase OS=Bacillus timonensis O X=1033734 GN=queA PE=3 SV=1
MKVDLFDFDLPEELIAQTPLENREASRLMVVDKETGEITHTHFRSILSYLNKGDCLVLNDTRVLPARLYGVKEDTGAKVEVLLLKQKDGDTWETLVKPAKRVKEGTVLTFGDGRLKATCTDIGDHGGRMLEFHYEGIFYEVLDALGEMPLPPYIHEQLDDKERYQTVYAKHRGSAAAPTAGLHFTEELLQEIRDKGVHTAFITLHVGLGTFRPVSSDTIEDHDMHSEFYQMTDETAKLLNDVKKSGGKIISVGTTSTRTLETIVKKHGKFVESSGWTSIFIYPGYQYEAINGLITNFHLPKSTLIMLVSALAGRENILHAYNEAVKERYRFFSFGDAMLIK

SEQ ID NO: 63861 - protein, 350 aa, Bacillus toyonensis
  misc_feature (1)..(350): tr|A0A2C4F3E8|A0A2C4F3E8_9BACI S-adenosylmethionine:tRN A ribosyltransferase-isomerase OS=Bacillus toyonensis O X=155322 GN=queA PE=3 SV=1
MDINLFDFHLPEELIAQVPLEDRETSRLMVLDRETGDIEHKHFTDILSYLHEGDCLVLNETKVMPARLHGEKEDTGAHIEVLLLKQEEGDKWETLVKPAKRVKEGTVISFGEGKLKATCTGTADQGGRQLEFSYDGIFYEILDELGEMPLPPYIKETLEDRDRYQTVYAKEIGSAAAPTAGLHFTEELLEKLKKKGVQLAFITLHVGLGTFRPVSADTIEEHHMHAEYYHMSEETAALLNRVKENGGRIITVGTTSTRTLETIATDHSGKLCAASGWTDIFMYPGYEFKAIDGLITNFHLPKSTLIMLVSAFSNRDNVLHAYNEAVKEKYRFFSFGDAMFVASHAKMRNK

SEQ ID NO: 63862 - protein, 350 aa, Bacillus toyonensis
  misc_feature (1)..(350): tr|A0A2C5KGI6|A0A2C5KGI6_9BACI S-adenosylmethionine:tRN A ribosyltransferase-isomerase OS=Bacillus toyonensis O X=155322 GN=queA PE=3 SV=1
MDINLFDFHLPEELIAQVPLEDRETSRLMVLDRETGDIEHKHFTDILSYLHEGDCLVLNETKVMPARLHGVKEDTGAHIEVLLLKQEEGDKWETLVKPAKRVKEGTVISFGEGKLKATCTGTADQGGRQLEFSYDGIFYEILDELGEMPLPPYIKETLEDRDRYQTVYAKEIGSAAAPTAGLHFTEELLEKLKKKGVQLAFITLHVGLGTFRPVSADTIEEHHMHAEYYYMSEETAALLNRVKENGGRIITVGTTSTRTLETIATDHSGKLCAASGWTDIFMYPGYKFKAIDGLITNFHLPKSTLIMLVSAFSNRDNVLHAYNEAVKEKYRFFSFGDAMFVASHAKMRNK

SEQ ID NO: 63863 - protein, 350 aa, Bacillus tropicus; identical to SEQ ID NO: 63668
  misc_feature (1)..(350): tr|A0A4Y6F0S9|A0A4Y6F0S9_9BACI S-adenosylmethionine:tRN A ribosyltransferase-isomerase OS=Bacillus tropicus OX= 2026188 GN=queA PE=3 SV=1

SEQ ID NO: 63864 - protein, 346 aa, Bacillus trypoxylicola
  misc_feature (1)..(346): tr|A0A162E6D7|A0A162E6D7_9BACI S-adenosylmethionine:tRN A ribosyltransferase-isomerase OS=Bacillus trypoxylicol a OX=519424 GN=queA PE=3 SV=1
MNVEQFDFPLPDELIAQTPLYDRTASRLLALDKVSGEIKDGTFSDIIEYVQSGDCLVLNDTKVLPARLFGIKADTGAKVEVLLLKQMEEDQWETLVKPAKRVKKGTEITFGDGLLKAMCLEELEHGGRVFRLEYEGIFHEVLDQLGEMPLPPYIKEQLEDKERYQTVYAKNRGSAAAPTAGLHFTEELLHEIKGKGVNVVMVTLHVGLGTFRPVSVDKIEDHEMHAEFYQMNDEAATTLNEAKKSGNRIIAVGTTSARTLETIMEKHGTFCETSGWTSIFIYPGFQFKGLDALITNFHLPKSTLMMLVSALAGREHIMNAYYHAVEKKYRFFSFGDAMYIGNEVKK

SEQ ID NO: 63865 - protein, 335 aa, Bacillus trypoxylicola
  misc_feature (1)..(335): tr|A0A161PWW6|A0A161PWW6_9BACI S-adenosylmethionine:tRN A ribosyltransferase-isomerase OS=Bacillus trypoxylicol a OX=519424 GN=AZF04_12450 PE=3 SV=1
MDMFKIPPHLNATVPAEYRLTHRSQVSLMLLNKETGQLSDHLLTELPQLLSKNDLLIFNSSRTIPASILSVDQNVEIRLARKIDERKWEAILLDSEERVLSVERLDLPEDVNIAVVGSGSEFPLVTIEFQNIHEPLLSYLYRFGEPIRYEYIDQKWPLDAYQTIFASSPGSIEMPSAGRAFSWKLMHSLQKAKIKMGFLELHTGISYYGNHIWPNPINHPEAYYIPHKTIQLMNQLKANNGRLIAVGTTVVRAIESFALQKTSFMSECRDTHLYIHSGTTLQMADAIITGLHEPEASHLDMLKAFTKSEYLNKSYDHALKKGYLWHEFGDIQLIL

SEQ ID NO: 63866 - protein, 342 aa, Bacillus urumqiensis
  misc_feature (1)..(342): tr|A0A2P6MFE1|A0A2P6MFE1_9BACI S-adenosylmethionine:tRN A ribosyltransferase-isomerase OS=Bacillus urumqiensis OX=1548213 GN=queA PE=3 SV=1
MNVTDFDYDLPEELIAQTPLKDRAASRMLVLSKETGEIDHSRFTHFLDHVEPGDTLVLNNTKVIPARLFGVKEETGAKIEVLLLSEGENYTWETLVKPAKRIKPGTVVSFGDGMLRAECMEELPEGRRTFRFSFEGIFHEVLDQLGEMPLPPYIQEQLEEKDRYQTVFAKNRGSAAAPTAGLHFTPEMLQKIEEKGADVVYLTLHVGLGTFRPVSADTVEDHTMHAEFYELPRETADTLNETKKRGGRVIAVGTTSCRTLETIARDTDGAFREARGWTDIFIFPGFTFRAVDALLTNFHLPKSTLVMLVSALAGREQILGAYEDAVRERYRFFSFGDAMLIK

SEQ ID NO: 63867 - protein, 342 aa, Bacillus vallismortis; identical to SEQ ID NO: 63667
  misc_feature (1)..(342): tr|A0A1W6HKJ8|A0A1W6HKJ8_BACVA S-adenosylmethionine:tRN A ribosyltransferase-isomerase OS=Bacillus vallismortis OX=72361 GN=queA PE=3 SV=1

SEQ ID NO: 63868 - protein, 342 aa, Bacillus vallismortis
  misc_feature (1)..(342): tr|A0A410WEB9|A0A410WEB9_BACVA S-adenosylmethionine:tRN A ribosyltransferase-isomerase OS=Bacillus vallismortis OX=72361 GN=queA PE=3 SV=1
MKVDLFDFELPERLIAQVPLEQRDASRLMVLDKHTGELTDSSFKHIISFFKEGDCLVLNNTRVLPARLFGTKEDTGAKVELLLLKQEAGDKWETLVKPAKRVKKGTVVTFGDGRLKAVCTDELEHGGRKVEFQYEGIFYEVLESLGEMPLPPYIKEQLDDRERYQTVFSKEIGSAAAPTAGLHFTEEILQQLKDKGVQIEFITLHVGLGTFRPVSADDVEEHNMHAEFYQMSEETAAALNKVREKGGRIISVGTTSTRTLETIAGEHDGQFKASSGWTSIFIYPGYEFKAIDGMITNFHLPKSSLIMLVSALAGRENVLRAYNHAVEEEYRFFSFGDAMLIL

SEQ ID NO: 63869 - protein, 342 aa, Bacillus velezensis
  misc_feature (1)..(342): tr|A0A410L580|A0A410L580_9BACI S-adenosylmethionine:tRN A ribosyltransferase-isomerase OS=Bacillus velezensis O X=492670 GN=queA PE=3 SV=1
MKVDLFDFELPERLIAQVPLRERDASRLMVLNKQTGGLTDSSFKEIVSFFNEGDCLVLNNTRVLPARLFGTKEDTGAKVELLLLKQEENDTWETLVKPAKRVKKGTVLTFGDGRLTAVCTEELDHGGRKIKFRYDGIFYEVLESLGEMPLPPYIKEQLDDKERYQTVFSKEIGSAAAPTAGLHFTEEILDELKQKGVRIEFITLHVGLGTFRPVSADDVEEHNMHAEFYEMTEETAASLNEVRKAGGRIVSVGTTSTRTLETIAGEHDGVFTASSGWTSIFIYPGYEFKAIDGMITNFHLPKSSLIMLVSALAGREHVLSAYRHAVEEEYRFFSFGDAMLII

SEQ ID NO: 63870 - protein, 342 aa, Bacillus velezensis
  misc_feature (1)..(342): sp|A7Z767|QUEA_BACVZ S-adenosylmethionine:tRNA ribosylt ransferase-isomerase OS=Bacillus velezensis (strain DSM 23117 / BGSC 10A6 / FZB42) OX=326423 GN=queA PE=3 SV=1
MKVDLFDFELPERLIAQVPLKERDASRLMVLDKQTGGLTDSSFKEIVSFFNEGDCLVLNNTRVLPARLFGTKEDTGAKVELLLLKQEENDTWETLVKPAKRVKKGTVLTFGDGRLTAVCTEELDHGGRKIEFRYDGIFYEVLESLGEMPLPPYIKEQLDDKERYQTVFSKEIGSAAAPTAGLHFTEEILDELKQKGVRIEFITLHVGLGTFRPVSADDVEEHNMHAEFYEMTEETAASLNEVRKAGGRIVSVGTTSTRTLETIAGEHDGEFTASSGWTSIFIYPGYEFKAIDGMITNFHLPKSSLIMLVSALAGREHVLSAYRHAVEEEYRFFSFGDAMLII

SEQ ID NO: 63871 - protein, 341 aa, Bacillus vietnamensis
  misc_feature (1)..(341): tr|A0A0P6WWG3|A0A0P6WWG3_9BACI S-adenosylmethionine:tRN A ribosyltransferase-isomerase OS=Bacillus vietnamensis OX=218284 GN=queA PE=3 SV=1
MKVEDFDFHLPEELIAQTPLENRSESRLMVLDKEDGSMDHIRFKQITEHLQEGDCLVLNDTRVLPARLYGQKEDTGANIEVLLLKQEDGDKWETLVKPAKRIRVGTEIVFGDGKLRATCVDLKDHGGRILEFQYEGIFYEVLDELGEMPLPPYIRERLDEQDRYQTVFARERGSAAAPTAGLHFTEELLDELKEKGVHIAFITLHVGLGTFRPVSVETIEDHDMHAEFYQVSEGTARLLNEVRANGGKIITVGTTSTRTLETIASKHGTFVEENGWTNIFIYPGYEFKGIDGLITNFHLPKSTLIMLVSAFAGQDNVMHAYETAVKEKYRFFSFGDAMLIK

SEQ ID NO: 63872 - protein, 343 aa, Bacillus vietnamensis
  misc_feature (1)..(343): tr|A0A5D4MBJ5|A0A5D4MBJ5_9BACI S-adenosylmethionine:tRN A ribosyltransferase-isomerase OS=Bacillus vietnamensis OX=218284 GN=FZC84_13260 PE=3 SV=1
MGAISNAFEVPQSLNAKVPAELRGKGRDDVRLMVMDGEGVYHDRFSSLPDFLEKGDLLIFNNSRTIPAVLKAKACKHEVEIRLSRQLDGQTWEALIWGGLFSAGYELELEKGVKAVITGNAAEKPLVTISFSVKGAELMDYIYSYGEPIRYEYIDSDWPLDAYQTAYASVPGSVEMASAGRAFSWKMLRNLKGKGIKTAFLTLHTGLSYYGKDRWPDPNKHPEAFHIPEETAELINSVREAGGRVIAVGTTVVRALETAADESGRLHTATGITNLYIKKEYKLKAVDGLVTGLHEPEATHLEMLSAFASPHRLFTAYREALKKGYLWHEFGDINLILSERAHS

SEQ ID NO: 63873 - protein, 343 aa, Bacillus vireti
  misc_feature (1)..(343): tr|W1SPY0|W1SPY0_9BACI S-adenosylmethionine:tRNA ribosy ltransferase-isomerase OS=Bacillus vireti LMG 21834 OX= 1131730 GN=BAVI_08291 PE=3 SV=1
MTAIKALDFYLPDELNASHPPEKRGLRRDHVRMMVLDRTTGEIKHDHFFHLADYLKPGDLVILNNSRTIPAVLQAKWLRNTVPIAPKVEIRLARRRGEDMWEALIVANPVKTGDILQFSPELSAMVIGEKENSPLKQIRFTKKGTDLYNIIYALGEPVRYEYIEQPWELDYYQTVFASHPGSVEMPSAGRAFSWELLFKLKRKGIQLEFIQLHTGLSYLLDDSLVQTPEDNDEEYQISERTMEKIIQTKASGKKVIAVGTTVVRALETAARNEVLSGITNLYINQHYPLKITDGIITGLHEPKASHLDMLSAFISERHLLKAYDEAIEAGYLWHEFGDMNLII

SEQ ID NO: 63874 - protein, 342 aa, Bacillus vireti
  misc_feature (1)..(342): tr|W1SG27|W1SG27_9BACI S-adenosylmethionine:tRNA ribosy ltransferase-isomerase OS=Bacillus vireti LMG 21834 OX= 1131730 GN=queA PE=3 SV=1
MKVDLFDFHLPEELIAQVPLKNRTDSRLMVLNKETGEINHEVFKDITQYLREGDCLVLNDTKVLPARLFGVKQDTGAKIEVLLLKQLEGDQWETLVKPAKRVKEGTEIDFGDGLLTAVCTGTSDHGGRVMEFKYEGIFYEVLDQLGEMPLPPYIKEQLEDRDRYQTVFAREPGSAAAPTAGLHFTEELLTEIKEKGVHVAFITLHVGLGTFRPVSVEDVLEHDMHSEFYIVTEGTARLLNEVRQNGGRIITVGTTSTRTLETIASANEGQFVDGSGWTNIFIYPGYKFKAIDGMITNFHLPKSTLIMLVSALAGRENILHAYTTAVEERYRFFSFGDAMFII

SEQ ID NO: 63875 - protein, 341 aa, Bacillus wakoensis
  misc_feature (1)..(341): tr|W4Q1U2|W4Q1U2_9BACI S-adenosylmethionine:tRNA ribosy ltransferase-isomerase OS=Bacillus wakoensis JCM 9140 O X=1236970 GN=queA PE=3 SV=1
MNVEEFDFDLPEELIAQTPLPDRTASRLLVLDRKTGETKDRNFLSIIDELHEGDCLVLNDTRVLPARLYGLKKETGASIEVLLLKQLENDQWETLVKPAKRIKEGSVIEFGDGRLTATCIGEEEHGGRILQMSYKGIFHEILDELGEMPLPPYIKETLPDQERYQTVFAKNRGSAAAPTAGLHFTKDLLQAIEEKGVHVVYITLHVGLGTFRPVNVENIEEHEMHAEFYQMSEETAEILRTARKKGGKIVAVGTTSARTLETIVKEHGTFQEASGWTSIFIYPGYEVRGFDGLLTNFHLPKSTLVMLVSAFATKDYILHAYRHAVEEKYRFFSFGDAMFIR

SEQ ID NO: 63876 - protein, 342 aa, Bacillus weihaiensis
  misc_feature (1)..(342): tr|A0A1L3MPT7|A0A1L3MPT7_9BACI S-adenosylmethionine:tRN A ribosyltransferase-isomerase OS=Bacillus weihaiensis OX=1547283 GN=queA PE=3 SV=1
MKVELFDFHLPEELIAQVPLKERDASRLMVLHKETGDIEHQSFKNILDYFQKGDCLVLNNTRVMPARLFGVKEDTGASIEVLLLKQQEDDVWETLIKPAKRVKEGTIVTFGGGKLRATCVGSSDHGGRLMKFDYEGIFYEVLDSLGEMPLPPYIKEQLDDRERYQTVFSREIGSAAAPTAGLHFTEEILDQLKQKGVHIAFITLHVGLGTFRPVSADTVEEHEMHAEFYQVTDGTAALLNEVRAQGGRIISVGTTSTRTLETIATKHDGKFAAENGWTNIFIYPGYEFKGIDGMITNFHLPKSSLIMLVSALASRDHVLHAYETAVNEKYRFFSFGDAMLII

SEQ ID NO: 63877 - protein, 350 aa, Bacillus wiedmannii
  misc_feature (1)..(350): tr|A0A2A7X5G5|A0A2A7X5G5_9BACI S-adenosylmethionine:tRN A ribosyltransferase-isomerase OS=Bacillus wiedmannii O X=1890302 GN=queA PE=3 SV=1
MDINLFDFHLPEELIAQIPLEDRETSRLMVLDRETGDIEHKHFTDILSYLHEGDCLVLNETKVMPARLHGVKEDTGARIEVLLLKQEEGDKWETLVKPAKRVKEGTVISFGEGKLKATCIGTADQGGRHLEFSYDGIFYEILDELGEMPLPPYIKETLEDRDRYQTVYAKEIGSAAAPTAGLHFTEELLEKLKQKGVGLAFITLHVGLGTFRPVSADTIEEHHMHAEYYHMSEETAALLNRVKENGGRIITVGTTSTRTLETIATDHDGKLCAASGWTDIFMYPGYEFKAIDGLITNFHLPKSTLIMLVSAFANRDNVLHAYNEAVKEKYRFFSFGDAMFVASHAKMGNK

SEQ ID NO: 63878 - protein, 350 aa, Bacillus wiedmannii
  misc_feature (1)..(350): tr|A0A2B6PHH3|A0A2B6PHH3_9BACI S-adenosylmethionine:tRN A ribosyltransferase-isomerase OS=Bacillus wiedmannii O X=1890302 GN=queA PE=3 SV=1
MDINLFDFHLPEELIAQIPLEDRETSRLMVLDRETGDIEHKHFTDILSYLHEGDCLVLNETKVMPARLHGVKEDTGAHIEVLLLKQEEGDKWETLVKPAKRVKEGTVISFGEGKLKATCIGTADQGGRHLEFSYDGIFYEILDELGEMPLPPYIKETLEDRDRYQTVYAKEIGSAAAPTAGLHFTEELLEKLKQKGVGLAFITLHVGLGTFRPVSADTIEEHHMHAEYYHMSEETAALLNRVKENGGRIITVGTTSTRTLETIATDHNGKLCAASGWTDIFMYPGYEFKAIDGLITNFHLPKSTLIMLVSAFANRDNVLHAYNEAVKEKYRFFSFGDAMFVASHAKMGNK

SEQ ID NO: 63879 - protein, 345 aa, Bacillus wudalianchiensis
  misc_feature (1)..(345): tr|A0A1B9B8N0|A0A1B9B8N0_9BACI S-adenosylmethionine:tRN A ribosyltransferase-isomerase OS=Bacillus wudalianchie nsis OX=1743143 GN=queA PE=3 SV=1
MKKVKVEEFDFNLPEELIAQTPLAERTESRLMVLDKETGAIQHEVFKNITSFLKPGDCLVLNDTKVMPARLYGVKPDTGAKIEVLLLKQEDGDRWETLVKPAKRIKEGSQILFGDGQLTAVCVGEKEHGGRILEFSYEGIFYEVLDELGEMPLPPYIKEQLEERDRYQTVFAKERGSAAAPTAGLHFTEELLEEIRAMGVHTAFLTLHVGLGTFRPVSVDKIEEHEMHAEFYHVSEGTARLIEQVKAEGGRIISVGTTSTRTLETVARDHDGHIQATSGWTDIFIYPGFEFKAIDGMITNFHLPKSTLIMLVSALAGKEHVLNAYKEAVAEKYRFFSFGDAMLIK

SEQ ID NO: 63880 - protein, 342 aa, Bacillus xiamenensis
  misc_feature (1)..(342): tr|K2N402|K2N402_9BACI S-adenosylmethionine:tRNA ribosy ltransferase-isomerase OS=Bacillus xiamenensis OX=11785 37 GN=queA PE=3 SV=1
MKLELFDFDLPERLIAQVPLEKRDASRLMVLNKQTGAITHDTFSQITDYFQKGDCLVLNNTRVLPARLFGTKEDTGAKVELLLLKQEEGDKWETLVKPAKRVKKGTVVTFGDGRLKAVCTEELEHGGRKVEFQYTGIFYEVLESLGEMPLPPYIKEQLDDRERYQTVYSKEVGSAAAPTAGLHFTTELLDALKAKGVHIAFITLHVGLGTFRPVSTERIEEHEMHAEFYEMNEETAEELNRVRKEGGRIISVGTTSTRTLETIASAYDGEFKASSGWTSIFIYPGYTFKAIDGMITNFHLPKSSLIMLVSALAGREHVLKAYNEAVKEEYRFFSFGDAMLIQ

SEQ ID NO: 63881 - protein, 342 aa, Bacillus zeae
  misc_feature (1)..(342): tr|A0A398B7N3|A0A398B7N3_9BACI S-adenosylmethionine:tRN A ribosyltransferase-isomerase OS=Bacillus zeae OX=1917 180 GN=queA PE=3 SV=1
MKVELFDFHLPEELIAQTPLEERTNSRLMVLDKKTGEVKHEIFKDITNYLQPGDCLVLNDTRVLPARLYGVKEETGAKIEVLLLKQKEGDRWETLVKPAKRVKAGTVIAFGDGLLTAVCTEESDHGGRVLDFKYEGIFYEVLEDLGEMPLPPYIKEQLDDRERYQTVFAKERGSAAAPTAGLHFTESLLEEIRAKGVHIAFITLHVGLGTFRPVSVDSIDEHEMHAEFYQVTEGTARLLNEVKEQGGRIISVGTTSTRTLETIARDHGGRFEEASGWTDIFIFPGFEFRAIDGMVTNFHLPKSTLVMLVSALAGRENVLKAYEAAVEERYRFFSFGDAMLII

SEQ ID NO: 63882 - protein, 341 aa, Bacillus zeae
  misc_feature (1)..(341): tr|A0A398B7S4|A0A398B7S4_9BACI S-adenosylmethionine:tRN A ribosyltransferase-isomerase OS=Bacillus zeae OX=1917 180 GN=D1970_10055 PE=3 SV=1
MTHAFNFHLPSSLNATQPPERRGVRRDHVRMMVLDKSSGHINHDRFINLEKHLQPGDLLVLNNSRTLPAVLTATRKRHNERTPTRIEIRLARRISENTWDVLPVGEEVRNEDILEFLPELSAKVITEVSGSPIKTICFTKKGADLLERIYSIGEPIRYEYIYQDWPLEYYQTVFASKPGSVEMPSAGRAFSWEVLFKLQKKGVRLAFIQLHTGLSYLLDDKWNTSPEENNEEFAIESTVMKNIYETKVSGGRVIAVGTTVVRALETAAKTGDLSGWTNLYIHNKYPLKIADGILTGFHEPKASHLDMLEAFVPRPLLFSAYEKAIKHGYLWHEFGDMNLIL

SEQ ID NO: 63883 - protein, 342 aa, Bacillus zhangzhouensis
  misc_feature (1)..(342): tr|A0A081LBA9|A0A081LBA9_9BACI S-adenosylmethionine:tRN A ribosyltransferase-isomerase OS=Bacillus zhangzhouens is OX=1178540 GN=queA PE=3 SV=1
MKLELFDFDLPERLIAQVPLEKRDASRLMVLNKQTGAITHDTFSQITDYFQKGDCLVLNNTRVLPARLFGMKEDTGAKVELLLLKQEEGDNWETLVKPAKRVKKGMVITFGDGRLQAVCTEELEHGGRKVEFQYTGIFYEVLESLGEMPLPPYIKEQLDDRERYQTVYSKEVGSAAAPTAGLHFTTELLDALKAKGVHIAFITLHVGLGTFRPVSAERIEEHEMHAEFYEMNEETAAELNRVRQEGGRIISVGTTSTRTLETIASAHDGKFQASSGWTSIFIYPGYTFKAIDGMITNFHLPKSSLIMLVSALAGREHVLKAYNEAVKEEYRFFSFGDAMLIQ

SEQ ID NO: 63884 - protein, 356 aa, Unknown
  misc_feature (1)..(356): tr|A0A0J8YVJ8|A0A0J8YVJ8_9GAMM S-adenosylmethionine:tRN A ribosyltransferase-isomerase OS=bacteria symbiont BFo 2 of Frankliniella occidentalis OX=1628856 GN=queA PE=3 SV=1
MRVADFNFALPESLIAHYPQPERSACRLLSLDGPSGELQHGVFTDVLDKLQPGDLLVFNNTRVIPARVYGQKASGGKLEMLVERMLDDKRVLAHVRASKAPKPGAELLLGDDLAVRATMVARHDTLFEIEFHDSREVLDILNHIGHMPLPPYIDRPDEEADRELYQTVYSAKPGAVAAPTAGLHFDQPLLDALRQKGVETAFVTLHVGAGTFQPVRVESIEDHIMHAEYAEVPQEVVDAVLACKARGNKVVAVGTTSVRSLESAAKAAENALIAPFFDDTQIFIYPGYQYQVIDALITNFHLPESTLIMLVSAFAGYKNTMNAYQQAVEQQYRFFSYGDAMFITQNPQAVNEVMDG

SEQ ID NO: 63885 - protein, 356 aa, Unknown
  misc_feature (1)..(356): tr|A0A0J8YHI3|A0A0J8YHI3_9GAMM S-adenosylmethionine:tRN A ribosyltransferase-isomerase OS=bacteria symbiont BFo 1 of Frankliniella occidentalis OX=1628855 GN=queA PE=3 SV=1
MRVADFTFELPESLIAHYPQAQRSGCRLLSLNGPDGALSHGVFTDLLHKLNPGDLLVFNNTRVIPARIFGRKASGGKIEVLIERMLDDTRVLAHVRSSKAPKPGTALLLGDDESVQATMVARHDALFEIEFNDARPVLDILNAIGHMPLPPYIDRPDEDADRELYQTVYSQKPGAVAAPTAGLHFDEPLLEALREKGIETAFVTLHVGAGTFQPVRVDSIEDHIMHAEYAEVPQEVVDAVLACKARGNQVIAVGTTSVRSLESAAQAAENALIAPFFGDTKIFIYPGYHYQVIDALVTNFHLPESTLIMLVSAFAGYRHTMHAYQQAVAEQYRFFSYGDAMFITRNPEAYAEIPGQ

SEQ ID NO: 63886 - protein, 350 aa, Bacteriodetes bacterium
  misc_feature (1)..(350): tr|A0A522EVZ3|A0A522EVZ3_9BACT S-adenosylmethionine:tRN A ribosyltransferase-isomerase OS=Bacteriodetes bacteri um OX=2507565 GN=queA PE=3 SV=1
MKLSQFKFNLPKDLLAEYPSKHRDDARLMVIHRKTKKIEHKHFRDIINYFEPGDAMVVNNTQVFPARMYGNKEKTGARIEVFLLRELNRESRLWDVLVDPARKIRIGNKLYFGDNENSLVAEVIDNTTSRGRTLRFLFDGPYEEFKTLLTNLGQTPLPKYIKRKPEPLDVDRYQTVFAKHEGAVAAPTAGLHFSRELVRKLQIRGINFAELTLHVGLGTFRPIEVEDLTKHKMDSEEMEIPQSAVEVVNEAKNKGKKICVVGTTAMRAVETSVSTTQRLKPFKGWTNKFIFPPFNFNIADSMITNFHTPESSLLIMVCAFGGYDLIMKAYREAIKDKYKFFSYGDAMLIL

SEQ ID NO: 63887 - protein, 174 aa, Bacteriodetes bacterium
  misc_feature (1)..(174): tr|A0A521W7R7|A0A521W7R7_9BACT S-adenosylmethionine:tRN A ribosyltransferase-isomerase (Fragment) OS=Bacteriode tes bacterium OX=2507565 GN=EPO24_15250 PE=3 SV=1
FAKYIGSVAAPTASLHFSTRLLKQLEEKGVSISFLLLHLGLGSFRPVEVEDLSKHRMDSEFFEVPQSAVDAVNKSIDNKGNVFVCGTSTTRAIESAVTTTGHLKIARGWTDKFIFPPYDFKIVDKMITNFHLPESTMLMLVCAFAGRDLVMKAYKKAIKEKWRFYSYGDAMLII

SEQ ID NO: 63888 - protein, 351 aa, Bacterioplanes sanyensis
  misc_feature (1)..(351): tr|A0A222FL77|A0A222FL77_9GAMM S-adenosylmethionine:tRN A ribosyltransferase-isomerase OS=Bacterioplanes sanyen sis OX=1249553 GN=queA PE=3 SV=1
MKTSDFSFELPNELIASEPMSERSASRLLCLDGRDGQLQHRQFTDIEQLLEPGDLLVFNNTRVIPARLFGEKDSGGKLEALIERILPEQEVLAHVRSSRSPKAGQIITLGGERAEVLGREGSLFRLRFMMQRPVLELLDEVGHIPLPHYMEREDNQLDRERYQTVYAEKPGAVAAPTAGLHFDEPLLARLRERGVRFAYVTLHVGAGTFQPVKVENIADHQMHAEYIEVSDEVVAAVQATRAAGHRVVAVGTTSIRSLESASQSGDIAPFYGDSDIFIYPGYQFRSVDAVITNFHLPESTLIMLVSAFSGQENTLNAYRQAVQQRYRFFSYGDAMFLSHPHTPSQGADHDA

SEQ ID NO: 63889 - protein, 351 aa, Bacteriovorax sp.
  misc_feature (1)..(351): tr|T0C4X6|T0C4X6_9PROT S-adenosylmethionine:tRNA ribosy ltransferase-isomerase OS=Bacteriovorax sp. BAL6_X OX=1 201290 GN=queA PE=3 SV=1
MNQLNNVDLQLSSYDYDLPKEQIAERPIQGRHHSRLLVYNCETDTISHHKFNELINFLPCETTLVLNQSKVFPCRLKGHKESGGNAEVFFLTVEPNEMGQYRALVKARGKKKAGDKYIFANDLSISIVDNIEGEFLIAPSIVGNDLIDYLNANAFVPIPPYIRGGESDDQDKKDYQTVFANELGSVAAPTAGLHFSDELLEQIKGQGHDIAKVTLHVGLGTFAPVKVDNLEDHKMHSENYFVDQVNFEKIKNAKKRVAVGTTSLRTLETIWQNGVNDYTPGEMKDTSIFLHPGVDVKSIDGLVTNFHLPKSTLLMLVSALIGREKTLEIYNIAVKEGYRFFSYGDAMLILR

SEQ ID NO: 63890 - protein, 349 aa, Bacteriovorax sp.
  misc_feature (1)..(349): tr|T0RDZ6|T0RDZ6_9PROT S-adenosylmethionine:tRNA ribosy ltransferase-isomerase OS=Bacteriovorax sp. BSW11_IV OX =1353529 GN=queA PE=3 SV=1
MMQNVNPEDLHLSNYDFDLPKNLIADRPVVGRHHSKLLIYNAKTNEIIHTNFLEIDKYLPSDSLLVANQSKVFPCRLLGQKTSGGKAEIFILSVVSSNNSYKALIKCRGKKNVGDQFILPHDVKATITSVQDGVFWLSFSVVDFTGYLEQVGKIPIPPYIRSGESDEKDKSDYQTVFAKNVGSVAAPTAGLHFTDEVFANLAKKNIERAFVTLHVGLGTFAPVKTDNLSDHVMHTEEYFIDAANLDKLNSKKKIIAVGTTSLRVLESSFHEGRFDVEAEKRYHTNIFLHPGKTVHSIDALITNFHLPKSTLLMLVSSLIGREKTLELYKEAITREYRFFSYGDAMLILR

SEQ ID NO: 63891 - protein, 345 aa, Bacteriovorax stolpii
  misc_feature (1)..(345): tr|A0A2K9NXH7|A0A2K9NXH7_9PROT S-adenosylmethionine:tRN A ribosyltransferase-isomerase OS=Bacteriovorax stolpii OX=960 GN=queA PE=3 SV=1
MLLSSYHYDLPPELIAQRPVDGVNRHQSRLMVYNQKTDTVTHDYFYNLPKYLPADSLIVFNQSKVFPSRLLGNKKSGGKAELFFLSHETNQNGSYPALIKTRSKKNIGDEYTFAAEMKVEVSEIFSDGTFGVKVSLPAGFKNLLDYLETHALIPIPPYIRKGESDEEDKKNYQTVYSKHTGSVAAPTAGLHFTNDLLEKLKESNVERAFVTLHVGLGTFKPVTVAHLKDHVMHSEEYFVDEENLSKIRNAKNVFAVGTTSLRVLESSYGKDISPNEHYKTQIFLHPGVDVKSVSGLITNFHLPESTLLMLVSALIGRTKTLELYELAVKEKYRFFSYGDAMLILR

SEQ ID NO: 63892 - protein, 102 aa, Unknown
  misc_feature (1)..(102): tr|A0A496UTA4|A0A496UTA4_9BACT S-adenosylmethionine:tRN A ribosyltransferase-isomerase (Fragment) OS=bacterium OX=1869227 GN=DRQ50_06495 PE=3 SV=1
MTNNPYEFDLPAALIAQEPVARRGDSRLLLAEPGHGPVGERVFDELGEVLAAGDLLVLNESTVLPARLATRRVDTGGRVEILLIAPRGDDGAWSAMARPARR

SEQ ID NO: 63893 - protein, 232 aa, Unknown
  misc_feature (1)..(232): tr|A0A522WFP7|A0A522WFP7_9BACT S-adenosylmethionine:tRN A ribosyltransferase-isomerase (Fragment) OS=bacterium OX=1869227 GN=EPN16_03165 PE=3 SV=1
MNLSEFDYYLPKELIAQGPLGRRDSSRLMVVDRKRGSVSHKSFSGLAGYLQEDDVIALNDTKVIPARIIGHKKDTLGKVDALLCDRLSGRTFRALIKPNLRIGQEVIFGHGSVKAKLTKEKILEFNKELTLELMERIGVMPLPPYIKRIPSKADEERYQTVYAKSPGAIASPTAGLHFTKKLLQEIKDRSANIASVTLHVGIGTFKPVKCPDVRQHIMEKEAFSVPAQTVSA

SEQ ID NO: 63894 - protein, 343 aa, Unknown
  misc_feature (1)..(343): tr|A0A532UHT9|A0A532UHT9_9BACT S-adenosylmethionine:tRN A ribosyltransferase-isomerase OS=bacterium (candidate division B38) B3_B38 OX=2012999 GN=queA PE=3 SV=1
MKVSEFDFHLPPELIAQYPSPRRGDSRLMVVDRQSGKVTHAHFSLFPQLLHAGDLLVLNNTMVFPARLLGHKEGKNGKVEVLLAKRLTQNCWEALVRPGRKLRPVDRVIFGDGELQATIKERGERGKRLLQFHYRGDFFQLLEKLANPPLPPYIKRAASAEDRLRYQTIFAEERGAIAAPTAGLHFTPETLSSLKNQGVEQVAITLHIGVGTFQPIEAKEVEEHKMEEEYYRITPQAATKLNGALEEGRRIIAVGTTTTRALESASSATKRIPSGEGWTNLFIYPGYQFELVKALLTNFHLPRSSPLMLVCAFAGRDLIMEAYQQAIVAGYHYYSYGDCMLIL

SEQ ID NO: 63895 - protein, 355 aa, Unknown
  misc_feature (1)..(355): tr|A0A2M7V0Y1|A0A2M7V0Y1_9BACT S-adenosylmethionine:tRN A ribosyltransferase-isomerase OS=bacterium (Candidatus Moisslbacteria) CG_4_10_14_0_2_um_filter_36_61 OX=2014 283 GN=queA PE=3 SV=1
MTDLSLFDYELKPELIAQEPKEPRDHSRLLILNRNGEIIHKKFYQILNFLDSGDVLVFNNTEVVNSRLFGKKFETSGKVEIFLLRPSNKAVFDETSWPAKWIIISRPKLKKSLKIKFSHSLSGEIEKENLIVFNKQGETLKKEISKLGQVPLPPYIKHPTSLSFKNYQTVYAKNKGSVAAPTAGFHFTEKLLDKIREKGTETEFLTLHVGLGTFEPIRVKEIEKHQMQPEYFSLSKETAFRLNEAKIKKKRIIAVGTTVTRALEHCVDKNGFLKPKKGWNSLFIYPGFKFKFVDSLITNFHLPQSTLLLLVSAFVESATADKRVFTGRELILKAYQEAIKEKYRFYSFGDAMFII

SEQ ID NO: 63896 - protein, 98 aa, Unknown
  misc_feature (1)..(98): tr|A0A2G9YCB1|A0A2G9YCB1_9BACT S-adenosylmethionine:tRN A ribosyltransferase-isomerase (Fragment) OS=bacterium (Candidatus Ratteibacteria) CG23_combo_of_CG06-09_8_20_ 14_all_48_7 OX=2014292 GN=COX46_02740 PE=3 SV=1
RKEGKKIVAVGTTTVRTLEGNYLQGCLFSGTGSVNIFIYPGYPFQMVDKLITNFHLSRTTTLLLTAAFAGKELLLKAYDYALKEGFRFGSYGDAMLIL

SEQ ID NO: 63897 - protein, 350 aa, Unknown
  misc_feature (1)..(350): tr|A0A3A9A5T4|A0A3A9A5T4_9BACT S-adenosylmethionine:tRN A ribosyltransferase-isomerase OS=bacterium 0.1xD8-71 O X=2320099 GN=queA PE=3 SV=1
MTELKKSDFYFELPEELIAQDPLEDRSSSRLLVLDKVTGKTKHHVFKEILEYLRPGDCLVLNNTKVLPARLYGVKEDTGAAIEVLLLKRKENDVWETLVKPGKKARPGTRLLFGDGCLRAEVLEVVEEGNRLIRFSYEGIFEEILDRLGEMPLPPYITHKLQDKNRYQTVYAKYEGSAAAPTAGLHFTDQLLSQIADKGVETAYVTLHVGLGTFRPVKVDNLLEHHMHSEYYEVTQEAADKINRVKVAGGRIICVGTTSCRTVESAADEKGMVQAGCGNTEIFIYPGYQFKVLDCLITNFHLPESTLVMLVSALAGRENVLAAYQEAIRERYRFFSFGDAMFITDNCFIS

SEQ ID NO: 63898 - protein, 341 aa, Unknown
  misc_feature (1)..(341): tr|A0A3A9AU61|A0A3A9AU61_9BACT S-adenosylmethionine:tRN A ribosyltransferase-isomerase OS=bacterium 0.1xD8-82 O X=2320100 GN=queA PE=3 SV=1
MKTSDFYFDLPGELIAQDPLEERTSSRLLILDKKTGDIKHQAFRNIIDYLNPGDCLVLNNTKVLPARLLGVKKDTGAGIEILLLRRREGNIWETLVKPGKKARPGTQLIFGDGLLQAEVLDVAAEGNRLVRFSYEGIFEEVLDSLGEMPLPPYITHKLKDKNRYQTVYAKYDGSAAAPTAGLHFTRELLEQIEAKGVKLAYVTLHVGLGTFRPVKAEHILEHHMHSEYYQVTAEAAQTINETKKSGKRVICVGTTSCRTVESAADEKGMLKECCGDTDIFIYPGYRFKVLDCLITNFHLPESTLLMLVSALAGRENVLKAYDRAVEERYRFFSFGDAMLVI

SEQ ID NO: 63899 - protein, 347 aa, Unknown
  misc_feature (1)..(347): tr|A0A3A8U207|A0A3A8U207_9BACT S-adenosylmethionine:tRN A ribosyltransferase-isomerase OS=bacterium 1XD21-70 OX =2320103 GN=queA PE=3 SV=1
MNVKDFSFDLPQELIAQDPLEDRSASRLLVMDKHTGEIRHRIFRDITEYLKPGDCLVVNNTKVIPARLFGVKEDTGAKIEVLLLKRQEGDVWETLVKPGRKCRPGTKLVFGDGLLKGTVIEVAEEGNRLIRFLYDGIFEEVLDRLGQMPLPPYITHELKDKNRYQTVYAKHDGSAAAPTAGLHFTEGLLKKIQDKGVGIAHVTLHVGLGTFRPVKVENVLDHHMHSEFYVVEEGQAEKINRAKAAGGRVICVGTTSCRTLESAAAPDGTVKAGSGWTDIFIYPGYSFKAMDCLITNFHLPESTLVMLVSALAGREHVLHAYEEAVREKYRFFSFGDACFFTDLGSGQ

SEQ ID NO: 63900 - protein, 343 aa, Unknown
  misc_feature (1)..(343): tr|A0A3A9G5P9|A0A3A9G5P9_9BACT S-adenosylmethionine:tRN A ribosyltransferase-isomerase OS=bacterium 1XD42-44 OX =2320106 GN=queA PE=3 SV=1
MNIEEFDFDLPEELIAQTPLKERTASRLLVLNKQTKEIAHRHFPDIKEYLQPGDCLVLNNTRVLPARLHGVKEETGASIEVLLLHQVEGDSWEILAKPAKKVKLGSVIRFGDGLLTATCTEIKEHGGRVVQFAYEGIFYEVLDQLGEMPLPPYIKEQLSEKERYQTVYAKEEGSAAAPTAGLHFTTELLNELKQMGVNIAFITLHVGLGTFRPVSAETVEDHKMHAEFYHMDQHTADTLNHVKQSAGRIISVGTTSTRTLETIARDNNGEFREASGWTDIFIYPPYQFQAIDGLITNFHLPKSTLIMLISAFAGKDIVMETYGKAVQERYRFFSFGDAMFIYA

SEQ ID NO: 63901 - protein, 342 aa, Unknown
  misc_feature (1)..(342): tr|A0A3A9FP11|A0A3A9FP11_9BACT S-adenosylmethionine:tRN A ribosyltransferase-isomerase OS=bacterium 1XD42-54 OX =2320110 GN=queA PE=3 SV=1
MKTSDFYFNLPQELIAQDPLEDRSASRLLVLGKESGSITHRHFTDILDYLRPGDCLVLNNTKVIPARLYGVREGTGAVIEILLLKRREHDIWETLVKPGKKAKPGTKLIFGDGILQGEVLDIVEEGNRLIQFSYEGIFEEILDKLGQMPLPPYITHELKDKNRYQTVYAKHEGSAAAPTAGLHFTPKLLEQVRDQGIQIAEVTLHVGLGTFRPVKVEDVTQHHMHSEFYEVTEEAASLIRQTKASGGRVICVGTTSCRTIESVATRFDGNIRACSGWTEIFIYPGYQFQLMDGLITNFHLPESTLLMLVSALAGKEHILHAYEAAVKEEYRFFSFGDAMFIV

SEQ ID NO: 63902 - protein, 340 aa, Unknown
  misc_feature (1)..(340): tr|A0A3A8YV80|A0A3A8YV80_9BACT S-adenosylmethionine:tRN A ribosyltransferase-isomerase OS=bacterium 1xD42-67 OX =2320107 GN=queA PE=3 SV=1
MKTSDFDFQLPEELIAQTPLERRDTSRLLTLDKHSGAVGHHYFYDLPAFLRPGDCLVLNDSRVLPARLIGRRPTGGTCEVLLLIDRGGDLWECLVRPGRKLRTGAQIIFGDGQLTASVEAELDDGKRAVRFHYQGIFLEILEQLGKMPLPPYIKAELQDQERYQTVYSRVVGSAAAPTAGLHFTPELLAQIQGMGIKVCYVTLHVGLGTFRPVKAEDIQDHEMHSEFCMIPQETADTINETKQSRGRVICVGTTSCRTVESFAAEDGTMSECSGWTNIFIYPGYRFKVLDALITNFHLPQSTLIMLVSALAGREHVLDAYETAVRERYRFFSFGDAMMIS

SEQ ID NO: 63903 - protein, 341 aa, Unknown
  misc_feature (1)..(341): tr|A0A3A9G1B8|A0A3A9G1B8_9BACT S-adenosylmethionine:tRN A ribosyltransferase-isomerase OS=bacterium 1XD42-8 OX= 2320102 GN=queA PE=3 SV=1
MKTSDFDFQLPQELIAQTPIEPRDHSRLLVLERATGEIAHRTFYDVIDYLNPGDTLVVNTSRVIPARLFGAKEHTGGSMQFLLLEQKERDIWEIMVRPGKKAKPGARFVFGNGSLVGEIIKVLEDGNRLVHFEYTGDFYTILENIGKMPLPPYITKELENGERYQTIYSHQLGSAAAPTAGLHFTEELMQKLREKGIRIAEVVLHVGVGTFKPVKAEDINQHHMHSEHYFLSAQTAEIINQTKAEGKRVIAVGTTSCRTLESVAAKLGHIAEDEGDTDIFIYPGYSFRVLDGLITNFHLPKSTLIMLVSAFAGYENIMHAYETAVQEKYRFFSFGDAMFIL

SEQ ID NO: 63904 - protein, 344 aa, Unknown
  misc_feature (1)..(344): tr|A0A3A9FFW2|A0A3A9FFW2_9BACT S-adenosylmethionine:tRN A ribosyltransferase-isomerase OS=bacterium 1XD42-8 OX= 2320102 GN=queA PE=3 SV=1
MESLKKGDFYFYLPEEQIAQDPLENRSDSRLLCLEKETGEIHHHFFYEIGKFLKKGDCLVLNDTKVLPARIMGVKEKTGTVIEVLLLKRKEKAVWETLVKPGKKAKPGTFLSFGDGILKGEVMEIIEGGNRLIRFDYEGIFEEKLEQLGEMPLPPYITHKLKDKNRYQTVYAKHSGSAAAPTAGLHFTKALLSQIKEKGVDIVSVTLHVGLGTFRPVKEENIRDHHMHEESYMILEEAAKTINKAKAEGRRIIAVGTTTCRTLEAASDEKGFVHPGQGETSIFIYPGYEFRVIDGLITNFHLPESTLLMLTSALAGREHVLEAYREAVLKKYRFFSFGDAMLIK

SEQ ID NO: 63905 - protein, 344 aa, Unknown
  misc_feature (1)..(344): tr|A0A3A9ACX0|A0A3A9ACX0_9BACT S-adenosylmethionine:tRN A ribosyltransferase-isomerase OS=bacterium 1xD42-87 OX =2320113 GN=queA PE=3 SV=1
MTELKKSDFYFDLPQELIAQDPLEDRSASRLLVLDRKTGAVEHHTFREITNYVRSGDCLVLNNTKVIPARLMGVKEDTGAAIEVLLLKRRDNDVWETLVKPGKKARPGAKIVFGDGCLRAEVLDVVEEGNRLLRFDYEGIFEEVLDRLGEMPLPPYITHKLQDKNRYQTVYAKYEGSAAAPTAGLHFTEELLAQIEEMGVNIAYVTLHVGLGTFRPVKADNLSEHHMHSEHYEVTPETAELINRTKESGGRVICVGTTSCRTVESAADESGRVQPGCGDTEIFIYPGYRFKVLDCLITNFHLPESTLVMLVSALAGRENVLAAYREAVEERYRFFSFGDAMLVI

SEQ ID NO: 63906 - protein, 341 aa, Unknown
  misc_feature (1)..(341): tr|A0A3A8YHL8|A0A3A8YHL8_9BACT S-adenosylmethionine:tRN A ribosyltransferase-isomerase OS=bacterium 1xD8-6 OX=2 320116 GN=queA PE=3 SV=1
MKTSDFAYDLPEELIAQDPLADRASSRLLVLDKKTGERAHKNFHEIVHYLRRGDCLVINDTKVIPARLIGQKEGTGGKVEVLLLKRRENNIWETLVKPGKKARPGAEIVFGGGLLRAEVLEVVEEGNRLVKFSYEGIFEEILDQLGQMPLPPYITHELEDRNRYQTVYAAYEGSAAAPTAGLHFTKELLAEIEDMGVSIARVTLHVGLGTFRPVKVEDVAKHHMHTEYYRVTEEAANIINGTKKRGGRVICVGTTSCRTIESAAAADGTVVPGEGDTDIFIYPGYRFKVLDCLITNFHLPESTLLMLVSALAGREQVMAAYQEAVAERYRFFSFGDAMFIY

SEQ ID NO: 63907 - protein, 344 aa, Unknown
  misc_feature (1)..(344): tr|A0A3A9F1V5|A0A3A9F1V5_9BACT S-adenosylmethionine:tRN A ribosyltransferase-isomerase OS=bacterium 1XD8-76 OX= 2320115 GN=queA PE=3 SV=1
MQELKKSDFYFELPQELIAQDPLKDRASSRLLVLDKETGEIEHHVFRDILRCLVPGDCLVLNNTKVIPARLLGVKEETGAAVEVLLLKRKEKDIWETLVRPGKKMRPGAKLSFGGGLLGAEVLEVVEEGNRLIRFTYEGIFEEVLDRLGEMPLPPYITHKLQDKNRYQTVYAKYEGSAAAPTAGLHFTTELLQEIERMGVQIAYVTLHVGLGTFRPVKEENVLEHHMHSEYYEVSAEVAEKINRTKAEGKRVICVGTTSARTIESAADENGHLAACSGNTEIFIYPGYRFRVLDCLLTNFHLPESTLIMLVSALAGREKVLSAYEEAVREKYRFFSFGDAMFIY

SEQ ID NO: 63908 - protein, 341 aa, Unknown
  misc_feature (1)..(341): tr|A0A4Q2BSX2|A0A4Q2BSX2_9BACT S-adenosylmethionine:tRN A ribosyltransferase-isomerase OS=bacterium 1XD8-92 OX= 2320884 GN=queA PE=3 SV=1
MKTSDFYFELPQELIAQDPLEERSASRMLILDKNTGATRHENFKNIINYLKPGDCLVLNNTKVLPARLLGVKEDTGAAVEVLLLRRRSGDVWETLVKPGKKLRPGAKVSFGDGLLRAEILEIEAEGNRLVRFFYNGIFEEVLDRLGEMPLPPYITHKLQDKNRYQTVYARYDGSAAAPTAGLHFTEELLHEIEEKGVKLAYVTLHVGLGTFRPVKVENILEHHMHSEYYQITAEAAETINEAKRSGCRVICVGTTSCRTVESAADENGLLQACSGNTEIFIYPGYRFKVLDCLITNFHLPESTLVMLVSALAGREHVLEAYREAVEERYRFFSFGDVMLVK

SEQ ID NO: 63909 - protein, 344 aa, Unknown
  misc_feature (1)..(344): tr|A0A4Q2BNM7|A0A4Q2BNM7_9BACT S-adenosylmethionine:tRN A ribosyltransferase-isomerase OS=bacterium 1XD8-92 OX= 2320884 GN=queA PE=3 SV=1
MKEWKKSDFYFDLPEALIAQDPLEDRSASRLLVLNKRTGEREHHFFYEITDYLEPGDCLVLNNTKVIPARLTGIRETTGAAVELLLLKRREKDVWETLVKPGKKARPGTVICFGDGLLKGEILEVVEEGNRLVRFTYQGIFEEVLDRLGEMPLPPYITHKLEDKNRYQTVYAKYEGSAAAPTAGLHFTGELLKKIEEKGVSIAYVTLHVGLGTFRPVKAENILEHHMHSESYHVPEEAAEKINRAKCEGKRVICVGTTSCRTVESAVDENGMLRESSGDTDIFIYPGYHFKVMDALITNFHLPESTLVMLVAALAGRENVLDAYKEAVEEKYRFFSFGDVMLIQ

SEQ ID NO: 63910 - protein, 340 aa, Unknown
  misc_feature (1)..(340): tr|A0A0S4M2K9|A0A0S4M2K9_9BACT S-adenosylmethionine:tRN A ribosyltransferase-isomerase OS=bacterium 2013Arg42i OX=1561003 GN=queA PE=3 SV=1
MDLTTSDFDFEMDHSYIAQHPEENREFAKLMNVSDGERIRHQFIYDLEEIITDEYIIVRNNTKVVCARLRCTKATGGKIEVFLERLVDNNTAIVQIRSHKKVKLPLSVFINTDNKITIRERFDDSFFIAESSNIMELFNQYGEVPIPHYLRRDPSNRDKHDYQTVFASIPGAVAAPTAGLHFSENLIEKLINKGVEFYDITLHVGAGTFNPIRTDNIMEHEMHEEYYRVPNETREAIESGKRNGKKTLAIGTTVVRALESFFIQEQKDDQWKPTRLFITPGFKFNAVDMLLTNFHLPKSSLIILVSSFAGKDLIKKCYLDAMKNNYRFFSYGDAMLLKRE

SEQ ID NO: 63911 - protein, 399 aa, Unknown
  misc_feature (1)..(399): tr|A0A0M9DRM7|A0A0M9DRM7_9BACT S-adenosylmethionine:tRN A ribosyltransferase-isomerase OS=bacterium 336/3 OX=16 64068 GN=queA PE=3 SV=1
MESFNLQDYIYDLPTHKIAQQPLAKRDDAKLLVYQHETIKDYTFHQIPDLLPADSFLFFNNTKVIPARLFFTKPTGATIEIFLLEAKEPSNIVAITMEAKKRCVWNCMIGNRKRFKEALHQELTIENQTLHLQVNLLEENEVEFVWDNDAISFAEILHYLGKLPLPPYIKREAQKSDEERYQTVFAEKEGAVAAPTASLHFTEEVLEKLQQKGILYDFLTLHVGAGTFQPVKETDDFRNHTMHAEQIVVSKKNIENILQNLDKTIVAVGTTGMRTLESIYWFGAKIIDQNITDTTIWVEKLLPYSIQSPASPKEALEAILDLMQKNNLEELRGQTEIFIFPSYRFKICKGLITNFHMPETTLILLVASFMGQNWRKVYEHALNNEYRFLSYGDSSLLLI

SEQ ID NO: 63912 - protein, 350 aa, Unknown
  misc_feature (1)..(350): tr|A0A0N0CZ99|A0A0N0CZ99_9BACT S-adenosylmethionine:tRN A ribosyltransferase-isomerase OS=bacterium 336/3 OX=16 64068 GN=queA PE=3 SV=1
MKLSDYAFDLPTNLIALYPNPNRDEAKLMVINRATQTIEHKLFKDVLDYFDDGDVMAVNDTKVFPARLYGNKEKTGADIEVFLLRELNKPAHLWDVLVDPARKIRVGNKLYFGDGELVAEVIDNTTNRGRTIRFLWDGEEEEFYKTVYGLGETPLPKIITKRRKTEKEDEDRFQSIFAKETGAVAAPMACLHFTKQLVKRLAIKGVDIQPLTLHVSLGTFKSVDVEDLTKHKTDSEQFKIPEATAERINQALDSKKRVCAVGSSVIRSLESSVSANGRVKPVDAWTDKFIFTPYEFKIANSYITNFHIPESTLLMAACAFGGYDLIMKAYEIAIQEEYRFHTYGDAMLII

SEQ ID NO: 63913 - protein, 312 aa, Unknown
  misc_feature (1)..(312): tr|A0A101EE90|A0A101EE90_9BACT S-adenosylmethionine:tRN A ribosyltransferase-isomerase OS=bacterium 42_11 OX=16 35281 GN=queA PE=3 SV=1
MVLNREKGTIEHAMFYMLPQFLKEGDLLVFNKSKVIKARLVGTKRNGGARVELLLIRRLDDTLWEVIARPAKRLKLGTEVVFADGLSCVVEEVLDEGFRIVRFSVGGERFLSILESIGEVPTPPYIKRKIKDPSLYQTIYAEVPGSVAAPTAGFHFTDRVLEELRKKGIKMTFLILHVGAATFLPVRGDIRKHKVPPEYYEVPEECALEVNSALREGRRVIAVGTTTTRVLESVCDDNGVISPKKGWTDLFILPGFKFRVLKGLITNFHLPRTTLLALVSAFAGEEFLKRAYEIAVKERYRLYSFGDAMLIL

SEQ ID NO: 63914 - protein, 349 aa, Unknown
  misc_feature (1)..(349): tr|A0A1H8G6M9|A0A1H8G6M9_9BACT S-adenosylmethionine:tRN A ribosyltransferase-isomerase OS=bacterium A37T11 OX=1 855384 GN=queA PE=3 SV=1
MKLSQFKFNLPESLIASEPTENRDESRLMVLHRKTGEIEHKIFKDMLGYFDDKDVMILNNTKVFPARLYGNKEKTGATIEVFLLRELNKELRLWDVLVDPARKIRVGNKLYFGENDLLVAEVVDNTTSRGRTIRFLFDGTDEEFRRNIEILGETPLPKYIKRRPTPEDKFRYQTIFAKHEGAVAAPTAGLHFSRELMKRLELKGIEFAEVTLHIGLGTFRQVEVEDLTKHKMDSEQFIIEQKDADLVNKALDEKRRVCAVGTTSMRSIESAVSANRRLKAANEWTSKFIFPPYDFSIANSMITNFHTPESTLLMMVSAFGGYEQVMHAYEVAVKEKYRFYSYGDAMLII

SEQ ID NO: 63915 - protein, 353 aa, Unknown
  misc_feature (1)..(353): tr|A0A1H9QI07|A0A1H9QI07_9BACT S-adenosylmethionine:tRN A ribosyltransferase-isomerase OS=bacterium A52C2 OX=18 55383 GN=queA PE=3 SV=1
MRVDDFDFELPEECIALRPAEPRDAAKLLVVRPEARLEDRIARDLPDLLSPGDILVFNNTRVISGQLSGTRERDGNVVAVSATLIERIDSRSWWSFAKPGRRLAPGDRIRFGEGERLSATVGEKLDDGRIRLDFDLSGPALDIAIAETGAPPLPPYIASKRAADERDRSDYQTVYAEKDGAVAAPTAGLHFTDDLLRRLEKAGIGHAFVTLHVGAGTFLPVKVDDTADHHMHTEIGTLDQATADRLNAARAAGHRVVAVGTTSMRLLESAAGEDDVIRPFSGGTDIFITPGYRFRAVDAMVTNFHLPRSTLFMLVSAFAGLETMKAAYGHAIASGYRFYSYGDGSLLFPDRKT

SEQ ID NO: 63916 - protein, 340 aa, Unknown
  misc_feature (1)..(340): tr|A0A1V6C5P4|A0A1V6C5P4_9BACT S-adenosylmethionine:tRN A ribosyltransferase-isomerase OS=bacterium ADurb.Bin13 2 OX=1866923 GN=queA PE=3 SV=1
MLFSIMELKDFIYELPKELIAQKPSDVRDMSRLLVLDRSIGSLKEGIFRDVLSYFKKGDVLVLNDTKVIPARIFGKKPTGGNVEVFLLKWESPSTWKCLVKPGSRLKEGAEVIIDGHRAVIMERTSDGGRIVKFDMEDERILELGKIPFPPYVHNEKIDPGRYQTVYAKVPGAVAAPTAGLHFTEQLLQELSLNGVSIVKVTLHVGIGTFRPVKTNNIDEHKMEFEWYSVSEEAASTINSAKKTGGSIFACGTTVVRTLESSSGKDGLVVAGSGETNLFIKPGYSFKVVDHLITNFHLPGSTLLLLVSALASREKIFEAYEYAIEKRFRFYSFGDAMLIL

SEQ ID NO: 63917 - protein, 341 aa, Unknown
  misc_feature (1)..(341): tr|A0A1V6ADL2|A0A1V6ADL2_9BACT S-adenosylmethionine:tRN A ribosyltransferase-isomerase OS=bacterium ADurb.Bin15 7 OX=1866935 GN=queA PE=3 SV=1
MKTELFDYFLPPELIAQVPADKRSESRLLVYERDKKKISHRQFSNIVDYFEPGDLLIVNSSKVIPARLYTKDKIEGSKECEVFFIKLLQDGRFEAMVKPGKKFKVGRKHTLPGNTVIEVEEILDSGLRIMKTTDGKDPVEVFRKYGEMPLPPYITSRESEPERYQTVYSKLEGSVAAPTAGLHFDENVFKALKDKGVKVAEVILHVGLGTFKPVEADDLDDHQMHEEVFFVPDETAKLFKETKERNNKVWACGTTSVRTLESAIRDDKTLKTGWQATTCFIKPGYKFLAIDHFITNFHLPKSTLIVLVSAFAGREEILNLYAEAIKEKYRFYSFGDSMVMI

SEQ ID NO: 63918 - protein, 370 aa, Unknown
  misc_feature (1)..(370): tr|A0A1V5WR59|A0A1V5WR59_9BACT S-adenosylmethionine:tRN A ribosyltransferase-isomerase OS=bacterium ADurb.Bin21 2 OX=1866924 GN=queA PE=3 SV=1
MSSNLKDYNYALPEGLIATEPLVCRDQSKLMVLKRSSGQIENKKFSDILEYFHEGDLLVLNDTKVFPARLIGYNQNGAAVEILLCKPVADGIWQALGKNLKERDLVKFDSSKLQAEIVSKSGREILVRFNTVQNLLWDEIEKIGQMPLPPYISKKNTRHDSFHRERYQTVFAQKIGSVAAPTAGLHFTLEIIEKLQKKGVIVEHLTLHVGLGTFLPVESSDVSQHKMHSEYYHVSKELIDKIIHTKSAGGRVISVGTTVCRAIETVFSEPAIAELLLKNTRLIASNALQSSMESKLEEVSDIFGETDIFIYPPYKFKCVDGLITNFHLPKSTLLMLVSAMAGREYILEAYQHAVKNGYRFYSYGDAMYIE

SEQ ID NO: 63919 - protein, 373 aa, Unknown
  misc_feature (1)..(373): tr|A0A1V5UQX9|A0A1V5UQX9_9BACT S-adenosylmethionine:tRN A ribosyltransferase-isomerase OS=bacterium ADurb.Bin24 3 OX=1866936 GN=queA PE=3 SV=1
MTNENTNHKFDITSYDFALDDSKIAVRPYLKRDEARLLVFDRSSGEMASKKFGDIVDYFNNGDMLILNETRVFKARLYGTKHESGARIELLLLRRSGDNVFSALVKPSRRIKPGVRVHIDGGLLDAVAIGRGETDGAWLFEFEKKEFAHLDLFDIVDMCGHVPLPPYIIKNKPAPVEEGGVFKDDQIDCEGYQTVYARESGSVAAPTAGFHFTPDLLSRLCEKGVAIEKITLHVGLGTFKLVEKNDIRDHVMHKELIKIEKDSYSRITGFIKNKNGKKLFCCGTTSVRTIESIDRVVYDPAANSYCAETDLFIYDGYKFKNADAMITNFHLPKSTLLMMVSAFMGNDKMKSAYDFAINNDFMFYSYGDAMLVI

SEQ ID NO: 63920 - protein, 346 aa, Unknown
  misc_feature (1)..(346): tr|A0A1V5T3U3|A0A1V5T3U3_9BACT S-adenosylmethionine:tRN A ribosyltransferase-isomerase OS=bacterium ADurb.Bin27 0 OX=1866926 GN=queA PE=3 SV=1
MNLSDFDYEYPKELIAQHPLAARDESRMMVVHRSDSSFSHSGIKEIASFIEPGDIVVINETKVAPARIFGKRGNGEETEILLIEQTKTPNLWKALLKRAKKIRPGEKFFFGMQATATARGRDGIYLMLEFKGNSLKLAMEKHGVPPLPPYIERRGFEAYSQEDRERYQTVYARHTGSAAAPTAGLHLTPQIVRSIEDRKASVEKIVLHVGIDTFAPVRAEKLDDHKMHGERVIIQRETSKKIFDAKKLGRRIVAVGTTTTRALESAALRSETGEIAHDQWTTDLFIKPGFEFKVVDAMLTNFHQPKSTLLVMISAFAGREFILSCYEEAIKERYRLFSFGDCMLIL

SEQ ID NO: 63921 - protein, 338 aa, Unknown
  misc_feature (1)..(338): tr|A0A1V5PPA3|A0A1V5PPA3_9BACT S-adenosylmethionine:tRN A ribosyltransferase-isomerase OS=bacterium ADurb.Bin36 3 OX=1866927 GN=queA PE=3 SV=1
MKLSDFDYYLPRKLIAQTPASKRENSRLLIFKEDKIYHQTFNKCINYINEGDVLVINDTRVFPARLYGEKIPTGGKVELLLVEEINKGFWKCLAKPSRRLKPGNNIIFSNCLKARVTGRENNGTRIISFTDPSYKEKIFEIGEIPLPPYIKTPLKEKERYQTIYSKEIGSIAAPTAGLHFTETLLENLQKKGVIIAKITLHVGLGTFRPVKTDEIELHKMEKEYMEITEETIEKINNARTRGGKIIAVGTTSVRTLETSSDERGILRAGNQKTNLFIYPGYKFKLVNGIITNFHLPKSTLFMLVCAFIGIERVQALYQEAIRLKYRFYSFGDACLFFK

SEQ ID NO: 63922 - protein, 352 aa, Unknown
  misc_feature (1)..(352): tr|A0A1V5NG99|A0A1V5NG99_9BACT S-adenosylmethionine:tRN A ribosyltransferase-isomerase OS=bacterium ADurb.Bin40 0 OX=1866928 GN=queA PE=3 SV=1
MQLSDIDYHLPPELIADRAIEPRDQARLLVLDRQTGQIMHRRFSDIAEHLTPGDVLVMNNSKVIPARLIGRKEMTGGQVELLLEYEVEPGLWRVIGKKITQANRIIFDDSPLEAAVEDKRAGHYLVRFNMIGAHFMKEIDRIGQVPLPPYIVRKRRESATGLVQPSEHDKDNYQTVYASTPGSVAAPTAGLHFTERLLLDLKQKNIETVFLTLHVGYGTFAPIKDSIDQHVMHSEFYHVDASSLNTILRAKEAGRRIIAVGTTTTRVLEHLFAEMDKNPHAFALQGWTNIFITPGYNFKCIDGLITNFHLPKSTLLLLVSALAGHSNIMRAYKEAISKQYRFYSYGDAMLII

SEQ ID NO: 63923 - protein, 141 aa, Unknown
  misc_feature (1)..(141): tr|A0A1V5LRB5|A0A1V5LRB5_9BACT S-adenosylmethionine:tRN A ribosyltransferase-isomerase OS=bacterium ADurb.Bin42 5 OX=1866929 GN=queA PE=3 SV=1
MRLTLHVGAGTFKPIEESVEDHTIEEELYTICEETAAAVNKAKEEGRRVIAVGTTSLRALESAVVNGKLQARENASTSLYVKPGYEFAVIDGMITNFHLSKSSLLVLVAALTGRDLIMKAYQEAIKERYRFYSYGDAMLIL

SEQ ID NO: 63924 - protein, 342 aa, Unknown
  misc_feature (1)..(342): tr|A0A1V5LMI7|A0A1V5LMI7_9BACT S-adenosylmethionine:tRN A ribosyltransferase-isomerase OS=bacterium ADurb.Bin43 1 OX=1866931 GN=queA PE=3 SV=1
MKLSDFKYNLPDKLIAQYPSDERDQCRLMILNRESGTMEEGIFADVIDYMEKGDSLVINQTKVFPARLEGSKDKTDARVEVFLLRELEQGLWEVLVKPARKVRVGNRLTIGNELACDVIDNTVSGGRVVRFNYSGDFYEIVDRIGKSPLPPYIRREPEPSDKLRYQTVYARERGAVAAPTAGLHFTEPLLKKIKAKGIKIVPLTLHLGLGSFRAVVVEDLSRHKMDSEFFEISEEAAEAINETMRSKHKVVAVGTSVVRALEANVTSEGWAKAGHGWTDKFIYPPYEFRIVDRMITNFHLPQSTLLMLVSAFAGRDLVFKAYRKAIRDKFMFFSYGDSMLIL

SEQ ID NO: 63925 - protein, 154 aa, Unknown
  misc_feature (1)..(154): tr|A0A1V5KLV8|A0A1V5KLV8_9BACT S-adenosylmethionine:tRN A ribosyltransferase-isomerase OS=bacterium ADurb.Bin47 8 OX=1866932 GN=queA PE=3 SV=1
MIDRIEKKGVTVVRIVLHLGLGSFRPVVVEDLSRHKMDSEFFDISDQAANQINAAKRNKKKVIAVGTSVVRALETSVTSEGWAKSGRGWTDKFIYPPYDFKIVDHMITNFHLPCSTLLMLVSAFASRDLILKAYRKAIRDKYMFYSYGDAMMIL

SEQ ID NO: 63926 - protein, 344 aa, Unknown
  misc_feature (1)..(344): tr|A0A4Z0J956|A0A4Z0J956_9BACT S-adenosylmethionine:tRN A ribosyltransferase-isomerase OS=bacterium BCRC 81129 OX=2487722 GN=queA PE=3 SV=1
MGYTLDDFDYDLPHELIAQTPIKQRDTSRLLVLDHTAGTLADKHFYDILDELHAGDALVMNNSRVMPARLYGTKPDTGGHVEVLLLHNVAGDVWETLMKPAKRLRVGQQVVFGDGQLTATVTEERDDGIRLIEFHYDGIFMEILERLGETPLPPYIKEKLDDPDRYQTVYAKENGSAAAPTAGLHWTADLLAKVAAKGVKLVYVTLHVGLGTFRPVEEANIEDHTMHSEFYRLDADAAATLNEVRANGGRIIATGTTSIRTLETIGTKFNGQIRADSGWTDIFIKPGYHWQVVDAFITNFHLPKSTLVMLVAAFTGRDQILHAYHHAIEEKYRFFSFGDAMFIK

SEQ ID NO: 63927 - protein, 344 aa, Unknown
  misc_feature (1)..(344): tr|A0A4Z0JNQ3|A0A4Z0JNQ3_9BACT S-adenosylmethionine:tRN A ribosyltransferase-isomerase OS=bacterium BCRC 81127 OX=2487723 GN=queA PE=3 SV=1
MTLTTEDFDYDLPEELIAQTPIKNRDQSRLLVLDHETGEYSDKHFYDILDYLNPGDALVMNNSRVLPARLYGTKEDTDGHEEVLLLNNIEGDKWEVLMKPARRAKVGTKVQFGDGQLEAEVLEDLEHGGKIIEFHYQGIFMEILEQLGEMPLPPYIKEKLDDPDRYQTVYAKENGSAAAPTAGLHWTKDLLKKVEDKGVKLVYVTLHVGLGTFRPVTESDISKHVMHSEFYRLDEESAKTLNDVKKNGGKIVATGTTSIRTLETIGTKFNGEIKADSGWTDIFIKPGYQWKVVDEFITNFHLPKSTLVMLVAAFTGRENILNAYQHAVEEKYRFFSFGDAMFIK

SEQ ID NO: 63928 - protein, 342 aa, Unknown
  misc_feature (1)..(342): tr|A0A2N5ZDT6|A0A2N5ZDT6_9BACT S-adenosylmethionine:tRN A ribosyltransferase-isomerase OS=bacterium BM706 OX=20 53465 GN=queA PE=3 SV=1
MKKELLLESYKYELPEELIAQEPLKDRSDSRMLVLEKETGEFYEKKFSQLPDLIDDKYLIVRNNTRVRKARLFGKKDTGAKVEIFLLDRKDENTWETLARPGRRLKPGAKMIFPEDLKATILKDLGEGKKLIRFETSLSEEYIEKYGETPLPPYIKKKVDNPERYQTVYSKKINSSAAPTAGLHFNDKVIKRLTEKGIGIVDVNLGVGLGTFRPLNNENIKENQLHKEYYYIGEDTAKKYNEHREKGGKILAIGTTSVRTLETNIKKYSIIKSDEGWTNIFIYPGYKFEAVDALLTNFHLPGSSLLVMISAFAGYENVIKAYEYAVKERFRFFSFGDCMLII

SEQ ID NO: 63929 - protein, 344 aa, Unknown
  misc_feature (1)..(344): tr|A0A2H6K3U7|A0A2H6K3U7_9BACT S-adenosylmethionine:tRN A ribosyltransferase-isomerase OS=bacterium BMS3Abin01 OX=2005709 GN=queA PE=3 SV=1
MLTAQLDYELPPGLIAQHPVVPRDRSRLLIYDRHRDVVEHGGFPDLLARLRPADILVYNDSRVIRARVFAVKPTGGRVELLFLRRHRGEVWEALARPSARLRPEMLLRLEKGEAAGSARNVFQLMENLGGGRWLVKNLSGTSTEALLERVGEMPLPPYIHEELKEPEKYQTVYARAPGSAAAPTAGLHFTPELIGRIRGAGVALAPLTLDIGLDTFRPVEEDELELHRIHRERYRLLPESYQAIREARDRGGRVIAVGTTTVRVLETVFGEPRGPLEGETGLFITPGHEFRAVDVLLTNFHLPRSTLLALVMAFAGVPETRRLYQEAIRREYRFYSFGDAMMLL

SEQ ID NO: 63930 - protein, 344 aa, Unknown
  misc_feature (1)..(344): tr|A0A2H6EE90|A0A2H6EE90_9BACT S-adenosylmethionine:tRN A ribosyltransferase-isomerase OS=bacterium BMS3Abin03 OX=2005711 GN=queA PE=3 SV=1
MKLSDFKYNLPKTVIAKYPISPRDKAKLMVVNRETQEIETKKFSDVSNYMSKGDVMVVNETRVFQARLFGKKEKTNAKIEVFLLRELNAEECIWDVIVDPARKVRIGNKIYFKDNLWCEVIDNTTSRGRTVRFNQPGNVFKAIEKIGQTPLPPYIKRDPEPSDRENYQTVYAKVDGAVAAPTAGLHFTNRLLTKIKNRGVTIVPVILHIGLGTFRPVEVEDLTKHRMDSEYFEISERSADRINKALDSKKNVFVVGTSSCRALETSTTAEGMVKANSGWTDKFIYPPYEFKITTKLITNFHAPESTLLMLVSAFAGADLITKAYKKALKEKYRFLSYGDAMLII

SEQ ID NO: 63931 - protein, 345 aa, Unknown
  misc_feature (1)..(345): tr|A0A2H6EPK4|A0A2H6EPK4_9BACT S-adenosylmethionine:tRN A ribosyltransferase-isomerase OS=bacterium BMS3Abin04 OX=2005712 GN=queA PE=3 SV=1
MKLSDFKYNLPKNYIAKYPVHPRDKAKLMVLDRNTGEVEHKKFTDIVDYVSRGDILVVNETKVMQARLFGHKERTNAKIEVFVLRELNRDENIWDVIVDPARKVRIGNRIYFNDKLWCEVIDNTTSRGRTVRFNYDGTDIYKAIEEMGHTPLPPYITRDTVPEDREDYQTVFAKRDGSVAAPTAGLHFTKDLLKKIKKKGVKVESVLLHIGLGTFRPVEVEDLTKHRMDSEFFEISDKTAKNINDAKKAKKNIIVVGTSAVRALESSVTSEGFVKPNYGWTDKFIFPPYEFQIATKLITNFHQPESTLLMLASAFGGYDNVKKAYRKAMKEKYKFLSYGDAMLIK

SEQ ID NO: 63932 - protein, 342 aa, Unknown
  misc_feature (1)..(342): tr|A0A2H6EZ82|A0A2H6EZ82_9BACT S-adenosylmethionine:tRN A ribosyltransferase-isomerase OS=bacterium BMS3Abin05 OX=2005713 GN=queA PE=3 SV=1
MKLSDFKYSVPEHLVAQYPPEERDRARMMVLHRNAQKIEQKMFYDVVDYLQEGDCLVVNETKVFPARLIAKKDKTDASVEVFLLRELENNLWEVLVKPARKVRVGNRLSVTDDLFCDVIDNTVSGGRVVRFNLNGNFYNIIEDIGKTPLPPYITRDPEPSDKKNYQTVYARVRGAVAAPTAGLHFTSKILDKIKAKGVKVVPIVLHVGLGSFRPVQVEDLSRHKMDSEYFEIYEETANTINETRDNNGRIIAVGTSTVRVLESSVTSDYYVKPLSGWTDKFIYPPYEFKVIDGLVTNFHLPGSTLIMLVSALAGKDFVFKAYRKAIKEKYNFYSYGDAMLIV

SEQ ID NO: 63933 - protein, 346 aa, Unknown
  misc_feature (1)..(346): tr|A0A2H6F641|A0A2H6F641_9BACT S-adenosylmethionine:tRN A ribosyltransferase-isomerase OS=bacterium BMS3Abin06 OX=2005714 GN=queA PE=3 SV=1
MKLSAFDYHIPEDQIALHPLKERDSSKLFVLDRKSNKFEHRVFKDIIDYLAPGDLLVLNDTKVVPVRLCGVKPSGGKAEITLLKELDINTWDALVKGVHEGKIILTHGITADVSRLNGTVARVKFDLNSGLPDTERADIKFFLNEIGVMPLPVYIKRGALKSDSEQYQTVYAKKEGAVAAPTAGLHFTDSLLNSIKGKGIEIKAITLHVGHGTFKPLTVTDIRDHQMDEESYEIPEATAAAINSAGAEGRRVIAVGTTVTRALEASAGDGTETRIKPGAGKASIFIYPGFRFKIVDAIITNFHLPGSTPMMLASAFSGLGLLKKAYAEALKKEYRLFSYGDAMLIK

SEQ ID NO: 63934 - protein, 335 aa, Unknown
  misc_feature (1)..(335): tr|A0A2H6FF87|A0A2H6FF87_9BACT S-adenosylmethionine:tRN A ribosyltransferase-isomerase OS=bacterium BMS3Abin07 OX=2005715 GN=queA PE=3 SV=1
MKTSSFDFDLPEELIAQIPYAERDKCRLMVLHGNGAIEHRNFPDIINYLSRGDLLILNDTRVLPARLTGYKHSGYILEILLVREIETNKWEILSKGSYTGRLKISGQISAYIYNGKTAVFTCDGNIKNKLWKYGEMPIPPYIKRKATASDRDWYQTVFAKKEGSIAAPTAGLHFSRQLIREINDIGVKIRYITLHIGTGTFLPIKTDEVEQHRMHSEYFEISSSLLNEIEENIGSGKRVLAVGTTATRAIEGFLSDKERYNKGNGGFSGYTDVFIYPGYDFKAVNALLTNFHLPNSTPILLSSAMAGRENLLKGYEEAVRMKYRFFSYGDAMLIL

SEQ ID NO: 63935 - protein, 343 aa, Unknown
  misc_feature (1)..(343): tr|A0A2H6FTW8|A0A2H6FTW8_9BACT S-adenosylmethionine:tRN A ribosyltransferase-isomerase OS=bacterium BMS3Abin10 OX=2005718 GN=queA PE=3 SV=1
MKLSEFDYHLPKDLIAQYPADERDTSRLMVISRKTGDIQHKQFRNIIDYLKPGDVLVLNDAKVIPARLYGAKQSGGKVEILLLKELETNLWEALVKGLNTGTVKLSHGITASVSRSNGTARVKLEKDGRGSGGHDIKRSLHEIGVMPLPPYIKRPSGPSDPERYQTVYAKNEGAVAAPTAGLHFTGGLLKSIRDKAIEICMITLHVGYGTFRPVEAKNIEEHKMYEETYEIPAITAGAVNRARAEGRRVIAVGTTVTRALEASISDGTGSRIEDGTGSASIFIYPGYKFNAIDALITNFHLPGSTPLMLTSAFSGPELLLKAYQGAIQKAYRFYSYGDSMLII

SEQ ID NO: 63936 - protein, 346 aa, Unknown
  misc_feature (1)..(346): tr|A0A2H6G0P5|A0A2H6G0P5_9BACT S-adenosylmethionine:tRN A ribosyltransferase-isomerase OS=bacterium BMS3Abin11 OX=2005719 GN=queA PE=3 SV=1
MQKSDFSFNLPEELIAQIPLPVRSASRLLVCHRNSLATEDRQFNEIASFLMAGDLLVFNNTRVIPARLYGKKDTGGRVEILLERILDESRFTAIMRCSKVPQVGQKILIADGLTVCYEGRKSDFFLFSYEEGGLQQLFAEHGRMPLPPYIQRDADAQDEERYQTIFAQKPGAVAAPTASLHFDEAILRSLQQKGINTAEITLHVGAGTFQPVRADDLNRHVMHAETFDLSVETVEKILQTKAAGGRVFAAGTTSLRALEAASEEGELKPMSGDTRLFITPGYHFKVVDGLITNFHLSESTLLMLVSAFTGVEEIQHIYRHAINERYRFFSYGDAMIILPEDNKREI

SEQ ID NO: 63937 - protein, 333 aa, Unknown
  misc_feature (1)..(333): tr|A0A2H6H480|A0A2H6H480_9BACT S-adenosylmethionine:tRN A ribosyltransferase-isomerase OS=bacterium BMS3Bbin01 OX=2005724 GN=queA PE=3 SV=1
MRTSEFDYALPRGSIAQRPFAPRDAARLLDVRDLTDRSFRDLPALLMSGDLVVVNNTRVRAARLHGRKEETGGAVEALILTRLDDGRWEALVRPARRLHAGTRLRFGELRGRILEDPVRGKALLELEGDDVEALIAAHGEVPFPPYITAGPSDPEDYQTVFADKVGSAAAPTAGLHFSAPVLAELADRGVDVATVDLQVGLDTFRPIDAEYVEHHEMHTERFSIPVETAAAVSEARSRGGRVVAIGTTVVRALEAASVGNGVRSGEDSTDLFIRPGYDFTVVDALVTNFHIPRSSLIVLVAAFLGNRWRSVYARALERGYRFLSFGDAMYAER

SEQ ID NO: 63938 - protein, 338 aa, Unknown
  misc_feature (1)..(338): tr|A0A2H6HG73|A0A2H6HG73_9BACT S-adenosylmethionine:tRN A ribosyltransferase-isomerase OS=bacterium BMS3Bbin02 OX=2005725 GN=queA PE=3 SV=1
MQASEFSYHLPEASIAQSAIEPRDAARLLVASTLSSHRFSDLPQLLREGDLLVVNRTRVRAARLHAVRHGTGGTVEVLLTKRVDETRWEALLRPARRMRAGVVLQADGVRIELLSHPVNGVASVGLTAGGDIEQAISVAGEIPLPPYFRGQLDDDERYQTIFAETTGSAAAPTSALHFTPQLVSELSQGGIRIVAVDLDIGLDTFRPMADGEVTGHVIHREEYAVPAETAAAIDAARANRDRIVAVGTTVVRTLETAVAPDATMRAGAGESDLFIVPGFKPRIVDAMITNFHAPQTTLIVMIAALLGDRWRTVYDRALAEDYRFLSFGDAMFIDEFAR

SEQ ID NO: 63939 - protein, 349 aa, Unknown
  misc_feature (1)..(349): tr|A0A2H6HU69|A0A2H6HU69_9BACT S-adenosylmethionine:tRN A ribosyltransferase-isomerase OS=bacterium BMS3Bbin04 OX=2005727 GN=queA PE=3 SV=1
MDRRSDYLYHLPEELIAQQAIEPRDASRLLVLDRSAVKLQHSHFSQLPRYLNPGDTLVFNNTRVIPARLHGHRESGGQVELLLLEETADLTWDCLARPAKKIKSDTRIHFNGDMDAVVLEEGEAGRRTVRFEAANQAETTVEMFWDWLAKFGSVPLPPYIHREPITADEERYQTIYAKHDGSVAAPTAGLHFTPQLLQTLQDKGIQAAYVTLHVGIGTFRPVEVDNLADHKMDEERYFLNEETATILNRTRNNGGRIIAVGTTSVRTLESTIDQDGRFSAKSGRTDLFIRPPYKYKGVDALVTNFHLPGSTLMMLVSALADRESILSAYQQAVAEKYRFFSYGDAMLIL

SEQ ID NO: 63940 - protein, 222 aa, Unknown
  misc_feature (1)..(222): tr|A0A2H6IDI7|A0A2H6IDI7_9BACT S-adenosylmethionine:tRN A ribosyltransferase-isomerase OS=bacterium BMS3Bbin07 OX=2005730 GN=queA PE=3 SV=1
MPLPPYIKRKPDKRDRSWYQTVYAAKEGSIAAPTAGLHFTEKLLKELGSMGVIIKKLTLHVGIGTFMPVKNPHIGNHRMEPEEFEVEPGLIDLIKKRRKAGGRIFAVGTTTTRTIESLMNGHYKDCRLKNAKPGPESGSGQALTGTGVQGSEKIRGTTDLFIYPGHRFRGVDCLITNFHLPKSTPLMLASAFADREKILTAYRKAIASGYRFFSYGDAMLIL

SEQ ID NO: 63941 - protein, 359 aa, Unknown
  misc_feature (1)..(359): tr|A0A2H6IRR6|A0A2H6IRR6_9BACT S-adenosylmethionine:tRN A ribosyltransferase-isomerase OS=bacterium BMS3Bbin09 OX=2005732 GN=queA PE=3 SV=1
MKLSDFDYPLSTDLIAQHPLQERDSSRLLVLHRKTGDIEHRFFKDIVDYLNPGDLLILNNTRVIPSRLSGTKPSGGKAEITLLKELDKNTWEGLVKGVNEGTVIIKGRPACRQTGIRANVTRLERSLAKVVFEFANKPAGRQAQSRGPEPDIRDRLREIGEMPLPVYIKRESAATDKEAYQTVYAKEEGAVAAPTAGLHFTNTLLNALREKGVRIETVTLHVGYGTFKPVVIEEIEDHKMDEEYYEIPEATASAVNSARSDGRRVIAVGTTVTRTLESSAIAGGSDKVTAGKGKASIFIYPGYEFRIINTLITNFHLPKSTPMMLVSAFSGINLLKTTYCEAKKTGYRFFSYGDAMLMI

SEQ ID NO: 63942 - protein, 362 aa, Unknown
  misc_feature (1)..(362): tr|A0A2H6IZK8|A0A2H6IZK8_9BACT S-adenosylmethionine:tRN A ribosyltransferase-isomerase OS=bacterium BMS3Bbin10 OX=2005733 GN=queA PE=3 SV=1
MRVDDFDFELPGERIALRPARPRDIARLLCVDPDAGEPFQDRAICDLPEILEPGDALVFNDTRVLAARLEGLRHRGAARAKVSLTLLKPLDSSKWTALARPAKRLRAGDRIEFGSRENVCLLGCLWGCIEGRGEDGEVTIAFDFHGAALDEAIAALGQMPLPPYIASRRPADAHDRDDYQTVYAREMGAVAAPTAGLHFTDELFTRLERRGIARHFVTLHVGAGTFLPVKADDTCDHVMHSEWGEVTRETADELNEVRRAGGRVIAVGSTALRLLESASDERGKIGAFRGETDIFITPGVRIRAVDAMLTNFHLPRSTLFMLVAAFSGLDVMQRAYAHAIGRGYRFYSYGDACLLTPAGRKE

SEQ ID NO: 63943 - protein, 346 aa, Unknown
  misc_feature (1)..(346): tr|A0A2H6JAL0|A0A2H6JAL0_9BACT S-adenosylmethionine:tRN A ribosyltransferase-isomerase OS=bacterium BMS3Bbin12 OX=2005735 GN=queA PE=3 SV=1
MFRRDFEYRLPPDLIAQRPPDRRGDARLLCVDGAGGPPRDGTFRELPDLLRAGDLLVFNDTRVIPARLHARKPSGGRVELLVERILGTDRARARLRASKAPAPGTALTLEDGTRVVVGAREGDAYPLRFEGTRPASELLEAIGHVPLPPYIRRPDTGADRERYQTVYARNPGAIAAPTAGLHFDVTLLERLRDRGVDSAFVTLHVGAGTFQPVRVERVEEHRMHAERVEVGAGVCERVCAARARGGRVVAVGTTVVRGLEAAARAGSLAPFDGETDLFILPGFPFRVVDAVITNFHLPASTLLMLVCAFAGYRPVMDAYRHAVRERYRFYSYGDAMFVTRAPQAAA

SEQ ID NO: 63944 - protein, 379 aa, Unknown
  misc_feature (1)..(379): tr|A0A2H6JPV6|A0A2H6JPV6_9BACT S-adenosylmethionine:tRN A ribosyltransferase-isomerase OS=bacterium BMS3Bbin14 OX=2005737 GN=queA PE=3 SV=1
MNDNLHAATTKQSMPNSFDLAAYDYDLPPENIAQHPAARRDQSRLAVLDCENETITHKRFADITDYLRPGDLLVVNDTRVFPARLPGRKATGGKAEVLLLHYPAPTQPDPGSAGWQSAAVLALIKSSKRPKPGSSIFFGEDLRATVQELFDGGKAGIILHFLAPEGKTLADLLDRYGRIPLPPYIRRPRGDTAEDARRYQTKYAVQTGSVAAPTAGLHFSAALLEDIRHRGINIAAVTLHVGYGTFAPVRTEDIREHRIHEEYIEVPAETAQMINQAKKSGHRIWAVGTTTVRTLEFAAAESGQVRAWRGLCGLYIYPGFQFRVVDNLITNFHLPRSSLLFLVSALAGRERIMHCYQEAIDHSYRFFSYGDAMALITRP

SEQ ID NO: 63945 - protein, 345 aa, Unknown
  misc_feature (1)..(345): tr|A0A101VZ76|A0A101VZ76_9BACT S-adenosylmethionine:tRN A ribosyltransferase-isomerase OS=bacterium BRH_c32 OX= 1734400 GN=queA PE=3 SV=1
MKLSDFKYNLPKTSIPKFPVEPRDSAKLLVLDKKTGEIEHKLFSDIADYMDKGDVIAVNQTKVMQARLYGKKERTNAKIEVFVLRELNKEEKIWDVIVDPARKVRIGNRIYFNDNLWCEVIDNTTSRGRTVRFNEDAGDIFKAIEKIGLTPLPPYIKRDAVPEDRDSYQTIFAEIDGSVAAPTAGLHFTPSLVKKITKKGIKIVPVILHIGLGTFRPVEVEDLTKHRMDSEYFEIPDETAKVINKALEDKKKVFVVGTSSTRALESSVTAEGFVKSNYGWTDKFIFPPYDFKIARRLITNFHAPESTLMMLAAAFGGYENLMKAYKKALKEGYRFLSYGDAMLIK

SEQ ID NO: 63946 - protein, 341 aa, Unknown
  misc_feature (1)..(341): tr|A0A3A9C9E4|A0A3A9C9E4_9BACT S-adenosylmethionine:tRN A ribosyltransferase-isomerase OS=bacterium C-53 OX=232 0109 GN=queA PE=3 SV=1
MKKSDFYFDLPERLIAQDPLEDRSSSRLLVLDKKSGAMQHHTFKEIVHYLRQGDCLVLNDTKVIPARLLGEREDTKAAVELLLLKRREADTWETLVRPGKKCRPGAEISFGGGLLKAEILDIVEEGNRLVKFRYDGIFEEVLDRLGEMPLPPYITHKLTDRNRYQTVYAKHEGSAAAPTAGLHFTHELLEQIRGMGVKIVYVTLHVGLGTFRPVKEDDILKHHMHSEYYTVSEETADTVNAVKKAGGRVVCVGTTSCRTVESASDENGVLRAGSGNTEIFIYPGYRFRVLDALITNFHLPESTLIMLVSALAGREHVLSAYEEAVREEYRFFSFGDAMFIC

SEQ ID NO: 63947 - protein, 353 aa, Unknown
  misc_feature (1)..(353): tr|A0A2M7US68|A0A2M7US68_9BACT S-adenosylmethionine:tRN A ribosyltransferase-isomerase OS=bacterium CG_4_10_14_ 0_2_um_filter_48_144 OX=1975563 GN=queA PE=3 SV=1
MKVSLFKYHLPKNRIAQTPASPRDHARLFVLDKKAGRCAHKHIYDLPNLLRSGDILVLNNSKVIPARLYARKVLEVGGGGRVELFLLKHAGGRIWHVLLKGQNLRPQTRLTLLPTKTIFCTILRREQDGATLVEFSDSRAAVHAFYAAHGETPLPPYIKASGKSARVKSHYQTIFAKTSGSVAAPTAGLHFTKNLLRAIATKGVQIEYVTLHVGLGTFEPIRTAYIEDHAMHAEYAEIDRETLKRLLRAKTERRRMVAVGTTSARILEGLVAPYLSTPYPKKDKISAELTTYIYPPYAFKMVDALLTNFHLPQSSLLVLVAAFTGRSAILRAYQKAIRAGYRFYSFGDAMFIH

SEQ ID NO: 63948 - protein, 404 aa, Unknown
  misc_feature (1)..(404): tr|A0A2M7YUY5|A0A2M7YUY5_9BACT S-adenosylmethionine:tRN A ribosyltransferase-isomerase OS=bacterium CG_4_9_14_3 _um_filter_65_15 OX=1975567 GN=queA PE=3 SV=1
MNSVPEDTRAADFLFDLPPELIAQSPSAQRSQSRLLAVGPDGSVRDEHPFSALPDLLQRGDLVVLNDSRVLPARLETRRPDTGGRVEILLIEPGSGPNRWLAMARPARRLRTGVVLEILGAPDAEAGLEPTGDFLTVVENHGTGEVTVEGSVDPAVLASRRGVMPLPPYIRRDYGSAADRERMRRDRTRYQTVFATAGFDDGASVAAPTAGLHFDAAVLESLAAHGVAVERLRLHVGPGTFRPPDENQIRSRRLHAERFFLSADLWRKLADTRAAGGRIIAVGTTSLRVLETVARLDLERNDAAQREFPNTGDPVFSGSAWRRGEGWEVAGTTRLFLMPPEKVAAVDGLLTNFHLPGSSLLMLLAAFLQPGDWRPIYREAVTRRLGFYSYGDCMLSLKRERKGP

SEQ ID NO: 63949 - protein, 374 aa, Unknown
  misc_feature (1)..(374): tr|A0A1J4S827|A0A1J4S827_9BACT S-adenosylmethionine:tRN A ribosyltransferase-isomerase OS=bacterium CG1_02_42_9 OX=1805399 GN=queA PE=3 SV=1
MQTKLFDYHLAKEYIAQKPIFPRDRSRLMVLDRKNKTITHSHFYDLPQFLKPTDVLVFNQTKVIPARLLGSKENGAKLEVLLLHQVDNVTWEALTKPGLKENQQGFFDNHLTGMILKVLPTGNRLIKFNQKGKSFKETLKQIGLMPTPPYIKERLKNPAWYQTVYAKIEGSVAAPTAGFHFTKKLIEKLDKLSIQKEFITLHIGLDTFRPIRTDRLEDHAIHSEWGEVDKKTADKLNEYKKEGRRIIAVGTTVVRTLESATSVILRTRRIPASPAGGGGDVRIPLECAYSYGITRYSRGNKTIKPFSGNTRLFIYPPYKFQFVDGVITNFHLPKSTLLALVSAFAGRKFVLEVYEEAKRKGYRFFSFGDGMLIM

SEQ ID NO: 63950 - protein, 340 aa, Unknown
  misc_feature (1)..(340): tr|A0A1J5CUH9|A0A1J5CUH9_9BACT S-adenosylmethionine:tRN A ribosyltransferase-isomerase OS=bacterium CG2_30_54_1 0 OX=1805403 GN=queA PE=3 SV=1
MKTSVFDYDLPEELIAQVPSPTRSESRLLVLDRSNGSVSHRGFSDLTDLIPAGDLLVVNRSKVVPARLFTIPEKGRSAFEIFFIEDLGMGRFKAMVRPGKKFRPGDVRNLPGGIIAKVIETCEDGLRVMQIDGCNDILSIFRKFGEMPLPPYITSRESPPERYQTVFAREEGSVAAPTAGLHFDEALLNQLKEKGVIVREVVLHVGLGTFKPIETDEIEDHKMHAERFTIEKNLAESFAKVRTHGGKIWACGTTAVRSLESGIDGDGNLITGWRETRCFLKPGHVFRAVDRLVTNFHLPRSTLLVLVAAFAGLSRVLAAYREAVARRYRFFSFGDAMLIL

SEQ ID NO: 63951 - protein, 365 aa, Unknown
  misc_feature (1)..(365): tr|A0A3A9AYE1|A0A3A9AYE1_9BACT S-adenosylmethionine:tRN A ribosyltransferase-isomerase OS=bacterium D16-34 OX=2 320120 GN=queA PE=3 SV=1
MKTDDFDYDLPPELIAQTPAEIRDACNLLVMDRNTGDVEDRIFSDIIDYLRPGDLLVANETRVLPARLLGTKRNTGGAAEVFLLRETGGPEPRTNKLAYWEVLVRPGKRLKPGTGAVVDFTNKQGDVVLSAEIIDWAHNAQKGERVAKLTTDLPSLDEALHAVGHTPLPPYIRNYAGDEELYQTVYSKRESSAAAPTAGLHFTPELIERLQEKGVGWKTVELEVGLDTFRIVDEDDPTQHAIHTEYYTVSQETIDAINETHARNGRVIAVGTTSVRSLESAWDPAANNGKGALIPRDREATSLYILPGYEFKTVDALITNFHVPRSTLMMLVSAFSSREHIMAAYKHAIDKRYRLLSFGDAMFIH

SEQ ID NO: 63952 - protein, 344 aa, Unknown
  misc_feature (1)..(344): tr|A0A3A9D0C4|A0A3A9D0C4_9BACT S-adenosylmethionine:tRN A ribosyltransferase-isomerase OS=bacterium D16-50 OX=2 320112 GN=queA PE=3 SV=1
MTTLKKKDFYFDLPKELIAQDPLEDRASSRLLVLDKDTGAVSHHVFREVADYLRPGDCLVLNDTKVIPARLLGQREGTGAHVEVLLLKRLESDVWEALVRPGKKCRPGTGLTFGDGLLKAQVLETGEEGSRLIRFFYEGIFEEVLDRLGEMPLPPYITHKLEDKNRYQTVYAKYEGSAAAPTAGLHFTQELLEQIREKGVEIVSVTLHVGLGTFRPVKEENVLDHHMHSEHYQVSLEAAEKINRAREAGGRIICVGTTSCRTLESAADEEGKVRPGSGDTDIFIYPGYRFKVLDALITNFHLPESTLVMLVSALAGREQVLEAYEEAVRERYRFFSFGDAMIVV

SEQ ID NO: 63953 - protein, 359 aa, Unknown
  misc_feature (1)..(359): tr|A0A3A9BPP6|A0A3A9BPP6_9BACT S-adenosylmethionine:tRN A ribosyltransferase-isomerase OS=bacterium D16-54 OX=2 320104 GN=queA PE=3 SV=1
MNVKDFYFDLPQELIAQDPLEDRSASRLLVMDKNTGEIWHRVFRDITEYLHPGDCLVINDTKVIPARLMGVKEDTGAKIEVLLLIRKDKDIWETLVKPGRKCRPGTILSFGEGLLKGTVLDVMEEGNRLIRFEYEGIFEEVLDRLGQMPLPPYITHELKDKNRYQTVYAKHDGSAAAPTAGLHFTENLLKQIQGIGVEIAHVTLHVGLGTFRPVKVENVLEHHMHSEFYVVEESEAEKINRAKAAGGRIVCVGTTSCRTLESAAGEDGILKAGSGWTDIFIYPGYRFKILDCLITNFHLPESTLVMLVSALAGRDHVLHAYEEAIREKYRFFSFGDVCFFADLENEDTERENHGICPSE

SEQ ID NO: 63954 - protein, 345 aa, Unknown
  misc_feature (1)..(345): tr|A0A3A8WMJ6|A0A3A8WMJ6_9BACT S-adenosylmethionine:tRN A ribosyltransferase-isomerase OS=bacterium D16-59 OX=2 320098 GN=queA PE=3 SV=1
MKTSDFYYELPEELIAQDPLNDRASSRLLVLGKATGKREHTDFYHIIDYLRKGDCLVLNDTKVIPARLIGLKEDTGGKVELLLLKRKGNNIWETLVKPGKKARPGAKIVFGDGLLTAEVLEIAEEGNRLVQFSYEGIFEEILEQLGQMPLPPYITHELKDKGRYQTVYAKYEGSAAAPTAGLHFTEGLLQEIEKKGIEIARVTLHVGLGTFRPVKAEDVADHHMHTEYYRVGQEAADKINSAKAKGNRVICVGTTSCRTIESAAVNGVVQAGEGETDIFIYPGYQFRVLDCLITNFHLPESTLLMLVSALAGKENVMEAYKEAVAMKYRFFSFGDAMFITDSLMQ

SEQ ID NO: 63955 - protein, 490 aa, Unknown
  misc_feature (1)..(490): tr|A0A3A9AJV8|A0A3A9AJV8_9BACT S-adenosylmethionine:tRN A ribosyltransferase-isomerase (Fragment) OS=bacterium D16-63 OX=2320119 GN=queA PE=3 SV=1
AAEGEARRARCRACYRLRFAESARYAAAHGFDALGTTLSVSPYQYADVIAEELTRACAEAGVACLFEDYSPAYDEATRRSRDLGMYRQNYCGCRFSAAEAAAEREQRKAERKAAKRREQQARNDALMTADFDYDLPEELIAQEPAPIRDQCRLLTLNRSTGAMGDIVFRDILELLRPGDLLVANETRVMPARLLGAKRGTGGAAEVFLLREAGPRGQRTNQRAWWEVLVRPGKRLKPGSGAMVDFAGADGAVALSAAIVDWAPNAQKGERIAELTTTLPSLDEALHAVGNTPLPPYIKGYAGDAELYQTVYSRRESSAAAPTAGLHFTPELIGACKAKGVGWATVELEVGLDTFRVVDEEDPRRHAMHTERYTVPQATVDAIERCKAAGGRVIAVGTTSVRSLESAWDPTARSGEGALTARDRDATSLFLFPGSEFHVVDALITNFHVPRSTLMMLVSALAGRDRIMAAYRHAVKRRYRFLSFGDAMFIY

SEQ ID NO: 63956 - protein, 395 aa, Unknown
  misc_feature (1)..(395): tr|A0A2G6FZ32|A0A2G6FZ32_9BACT S-adenosylmethionine:tRN A ribosyltransferase-isomerase OS=bacterium DOLZORAL124 _64_63 OX=2044883 GN=queA PE=3 SV=1
MSADPRWHFPLPEELIAQDPPEERGDSRLLLVEPGGAVAGERVFRELPGILRPGDLLVLNDSRVLPARLRAIRRDTGGQVELLLVRPTGERTWLAMARPARRLREGIVLRLGQDSLTVVGKRPDGQVLVQGEKNPADLALAAGEMPLPPYIRRAAAEAEDPERLRRDKVRYQTVFNRPDPSGAGSVAAPTAGLHFSAAILAALEARGVGLARVQLHVGPGTFQPPTPQQIAGGRLHPEFFRYDAACAAAIARTRRLGGRVLAVGTTSLRVLETVARLDLPADGPDGPDGPDTVTFAPDATDDDPFFTGWARRRDGHWSVEGMTRLFIQPPDRVTAVDGLLTNFHLPGSSLLMLVAALAGEETWRAAYTFAVDAGLRFYSYGDCMLILPGLAGNQG

SEQ ID NO: 63957 - protein, 362 aa, Unknown
  misc_feature (1)..(362): tr|A0A202DIU9|A0A202DIU9_9BACT S-adenosylmethionine:tRN A ribosyltransferase-isomerase OS=bacterium E08(2017) O X=1932693 GN=queA PE=3 SV=1
MKTSEYDYDLPEELIAQEPPEKRGTSRMMVVDRSSGAIEHRLISDIPEYLRQDDVLVVNNTKVINARVFGTRQDTGGRVELLLVEEVTPPISNFEFQVSTWDCFLKASNRPPVGAVFELGEGRLIARVKEVLGQRIVVEFESGQPLLDLLEEVGVPPVPPYIRRDYGPRTTDHGADKRVALDHERYQTVYAKHAGSVAAPTAGLHFTEELLGELAAMGVCQAEVTLNVGPGTFKPVEVDTVEEHAMEAEWSRVSQEAADSVNKAKEGFGRVVAVGSTSVRTLESACQGGKVVAGEKRTSLFIYPPYEFQVVDMFLTNFHLPKSSLIMMVSAFAGKDLTFKAYEEAVREGYRFYSYGDAMLIV

SEQ ID NO: 63958 - protein, 346 aa, Escarpia laminata
  misc_feature (1)..(346): tr|A0A497TD75|A0A497TD75_9BACT S-adenosylmethionine:tRN A ribosyltransferase-isomerase OS=bacterium endosymbion t of Escarpia laminata OX=1221601 GN=queA PE=3 SV=1
MKLSDFSYDLPPELIAQFPEKERRGSRLLTLDGASGELNDQHFTDLPQLLRKGDLLVFNDTRVMQARLHGFKQSGGKVELLIERVLTPGRALAHVRASKSPKAGSRLYLGERKRAVEVVGRQESLFEIDLQEGDFFQLMEEQGHMPLPPYIDRSDDSSDRERYQTVYARRPGAVAAPTAGLHFDLEMLDELKERGVKSAQVTLHVGAGTFQPVRVDNLDEHIMHSEYVEVDESVCQKVRETRANGGRVVAVGTTSVRSLEAASASGEIVPFSGDTRLFIRPGYHFRSVDGMLTNFHLPESTLLMLVSAFSGYDHVMAAYRHAVSRRYRFFSYGDAMFLTPSLMQQA

SEQ ID NO: 63959 - protein, 346 aa, Escarpia laminata
  misc_feature (1)..(346): tr|A0A497UBH6|A0A497UBH6_9BACT S-adenosylmethionine:tRN A ribosyltransferase-isomerase OS=bacterium endosymbion t of Escarpia laminata OX=1221601 GN=queA PE=3 SV=1
MKLSDFSYDLPPELIAQFPEKERRGSRLLTLDGASGELNDQHFTDLPQLLRKGDLLVFNDTRVMQARLHGFKQSGGKVELLIERVLAPGRALAHVRASKSPKTGSHLYLGERKREVEVVGRQESLFEIDLQEGDFFQLMEEQGHMPLPPYIDRLDESSDRERYQTVYARRPGAVAAPTAGLHFDLEMLDELGERGVKSAQVTLHVGAGTFQPVRVDNLDEHIMHSEYVEVDESVCQKVRETRANGGRVVAVGTTSVRSLEAASASGEIAPFSGDTRLFIRPGYHFRSVDGMLTNFHLPESTLLMLVSAFSGYDHVMAAYRHAVSRRYRFFSYGDAMFLTPSLMQQA

SEQ ID NO: 63960 - protein, 358 aa, Unknown
  misc_feature (1)..(358): tr|A0A132HYZ6|A0A132HYZ6_9BACT S-adenosylmethionine:tRN A ribosyltransferase-isomerase OS=bacterium F083 OX=176 8114 GN=F083_671 PE=3 SV=1
MKLSYFNFNLPKDLIADRPVNAEYEKLLDQKRDESRLMVLHRDDGKVEHRLFKDMIDYIDTDDVVVVNNTKVFPARLDGEKEKTGAHITVFLLRELNPEMRLWDVVVEPARKIRIGNKLYFGENESLLAEVIDNTTSRGRTVRFLYDGSHEEFISLIRSMGKTPIPDYILKNRDLEKFDENRYQTLYAKVEGSVAAPIAGLHFSPQLLKRLEIKEVKWAELTLHIGLGSSIEVEDLSKHRMSAEEMHLDDANCDLVNNARNDGHKICCVGATTLRALETAVTTPGKICPFDGWTNKFIFPPYNFTIADMAITSLHFPCSPQFIMMSAFAGPELMRDAYQTAIREKYRFGAYGDAMLII

SEQ ID NO: 63961 - protein, 404 aa, Unknown
  misc_feature (1)..(404): tr|A0A132HU98|A0A132HU98_9BACT S-adenosylmethionine:tRN A ribosyltransferase-isomerase OS=bacterium F083 OX=176 8114 GN=F083_1605 PE=3 SV=1
MLSDLQAIEIADYDYPLPDGRIAKFPLAQRDASKLLVYRQGEITESRFGRLAGHLPDDTLLVCNNTRVIHARLLFRKSTGTTIEIFCLEPYNMPVATAFEQRGTGSWVCLVGHNKRWKTDTLTRELTLDGRLITLSASRREKAGNGWIVDFCWDSDDTFASVIECAGLIPLPPYLHRDASDEDNRRYQTVYASEKGSVAAPTAGLHFTDAVFDSLRQAHIGCEFITLHVGAGTFKPVDSATIGGHEMHTEQVEIGRANIEHILQHFGKPIVAVGTTSVRTLESLYWFGLQLEHDASLERMCVEQWEPYVDETPAITPQQAYTNVLLWMQRRHIERLEGSTRLMIAPGYRYHIVDGLITNFHQPRSTLLLLVSALIGNEWRRCYRYALDRDFRFLSYGDSCLFLP

SEQ ID NO: 63962 - protein, 341 aa, Unknown
  misc_feature (1)..(341): tr|A0A202DNF5|A0A202DNF5_9BACT S-adenosylmethionine:tRN A ribosyltransferase-isomerase OS=bacterium F11 OX=1932 698 GN=queA PE=3 SV=1
MDPDTLDFELPENLIAQEPLPKRDHARLMVLDRVSGSLQHKKFFDLKNYLKKDDVVVINKARVNRAKFIGKKLTGGHVEIVLIAPEGDPLTWRSLVRPMLKPGTVFKLTNGVGVRLIGRNKEGENILVFDGGNPRDLMASMGAMPLPPYIKRKSDDPRRKKDFDDYQTVYGEVDGSLAAPTAGLHFTPELLADIKSMGVTIVEVILHVGWGTFRPIRESVENHHMLPEQYEISTENIGCLMESKKRNRRIISVGTTSTRVLESLEQFRPEGPIKGETNLFIKPGFSYKWITGLITNFHVPRSTPIALTAAFSGLSHLEKAYEEAIGQQYRFFSYGDAMLII

SEQ ID NO: 63963 - protein, 347 aa, Unknown
  misc_feature (1)..(347): tr|A0A2H5VKK2|A0A2H5VKK2_9BACT S-adenosylmethionine:tRN A ribosyltransferase-isomerase OS=bacterium HR08 OX=203 5403 GN=queA PE=3 SV=1
MRVSDFDYHLPEELIAQEPLPERDHSRLLVLDRRTGAYWDRYFYEFPEEVAPGSVLVLNNTRVFPARLFGRRKGFTGRVEVLLLRRRQGTRWEALVKPGRIARPGTELVFDEGRLEARILAAEAEGKHLIEFLCPEEDLDAHIDRIGVAPLPPYIKRSDPASFARDALRYQTIYAKHRGSVAAPTAGFHFTERIFAALRERGVHIVELTLHVGYGTFKPVRTEEVEKHRMDGEEFIIPPETAAAINDARRNGRPVIAVGTTTVRALESAADAEGFVRAGTGWTELFIYPGYRFKAIDGLVTNFHLPRSTLLMLVCAFAGRENVLRAYEHAVARRYRFYSYGDAMFIR

SEQ ID NO: 63964 - protein, 312 aa, Unknown
  misc_feature (1)..(312): tr|A0A2H5VTE5|A0A2H5VTE5_9BACT S-adenosylmethionine:tRN A ribosyltransferase-isomerase OS=bacterium HR09 OX=203 5404 GN=queA PE=3 SV=1
MLPRQGSPWEANIRDIPALLTPGDVLLLNDVRVIPARLFGRRPGGGVCELLLLRPAGEGVWEAMGRPAARLREGTVVSFPWGRGVIQGRQGEGKLLVAFEPPLDASALEALGEVPLPPYIEKKRKAQPEDRRRYQTVFARRGLAVAAPTAGLHLTAELLAACEARGVEVVSLTLHVGPGTFKPVKSEDPRQHRLDPELYEISRETAGALNRALASGRRIVAVGTTSVRALEDALKRGGGRVLPGVAHADTYILPGFVFRGTGALLTNFHLPRSTLLMLVAALAGRERVLAAYEMAKARKFGFYSYGDAMLIL

SEQ ID NO: 63965 - protein, 347 aa, Unknown
  misc_feature (1)..(347): tr|A0A2H5VXX5|A0A2H5VXX5_9BACT S-adenosylmethionine:tRN A ribosyltransferase-isomerase OS=bacterium HR10 OX=203 5405 GN=queA PE=3 SV=1
MRASDFDYDLPEELIAQEPLPERDHSRLLVLDRRTGTYWDRYFYEFPHEVTPGSVLVLNNTRVFPARLFGRRKGFTGHVEVLLLRRREGTRWEALIKPGRVARPGTELVFDEGRLEARILAAEAEGKRLIEFLCPEEDLDARIDRIGVAPLPPYIKRPDPASFARDVLRYQTIYAKHRGSVAAPTAGFHFTERVFAALRERGVHIVELTLHVGYGTFKPVRTEEVEKHRMDGEEFVIPSETAAAINDARRSGRPVIAVGTTTVRALESAADAEGFVRAGTGWTELFIYPGYRFKVIDGLVTNFHLPRSTLLMLVCAFAGRENVLRAYAHAVAQRYRFYSYGDAMFIR

SEQ ID NO: 63966 - protein, 356 aa, Unknown
  misc_feature (1)..(356): tr|A0A2H5W4Z2|A0A2H5W4Z2_9BACT S-adenosylmethionine:tRN A ribosyltransferase-isomerase OS=bacterium HR11 OX=203 5406 GN=queA PE=3 SV=1
MESCFSLSAYDYELPRELIAQTPVEPRDQARMMVLWLRQRRWEHRRFFELPAFLQEGDVVVVNNSRVIPARLYGRLARGDRERPVEVLLVRSLSSEAAAPERWHALLRPSRRIRPGDVLRFPADVRATVVERTPEGDWVLAFESPRPLQTMLDDIGWMPVPPYIVRRDPSLAERDRRWYQTVYAKVQGSIAAPTAGLHFTPRVIQALQEKGVVWCEVTLHVGPGTFRPVRTPDVRHHRMDPEWYEIPPDVWAAIETARRRGRRVLVVGTTTTRALESAARHDPPCLSGWADVFIYPGYEFRVVRDLLTNFHLPRSTLLMLVCALGGRDFILAAYREAVRERYRFYSYGDCMLLLDA

SEQ ID NO: 63967 - protein, 334 aa, Unknown
  misc_feature (1)..(334): tr|A0A2H5WH27|A0A2H5WH27_9BACT S-adenosylmethionine:tRN A ribosyltransferase-isomerase OS=bacterium HR13 OX=203 5408 GN=queA PE=3 SV=1
MRLEDFDFELPPELIAKYPLKERHMARLMVLNRKERSIKHDIFWNLPLYLEGGDLLVFNDTKVIPARLYGEKPTGGKVEVLLTDHVKDNLWYALVGGKNIKEGLSVQIAQDFRVKLLKHISEGKFLVELIAQDPIKALYTYGHIPIPPYLEREEEHIDRVYYQTVFAQKEGSVAAPTASLHFSEELLKRLDEYGIRKAFITLHVSYGTFKPIKVSDIKVHKVDKEYAEVPEETVELIKKVKQEGKRVVAVGTTVVRALETKPFSPFSGKTDLYIYPGYTFKVVDAMITNFHLPRSSLLLLVSAFADREFILSAYQIAIKERYRFYSYGDGMLIL

SEQ ID NO: 63968 - protein, 92 aa, Unknown
  misc_feature (1)..(92): tr|A0A2H5WPY6|A0A2H5WPY6_9BACT S-adenosylmethionine:tRN A ribosyltransferase-isomerase OS=bacterium HR14 OX=203 5409 GN=queA PE=3 SV=1
MAVGTTSVRTLESAAVGKRRVQAQTAETKLYITPGYEFKVVEGLITNFHLPRTTMLVLVSAFAGREKVLHAYREAVRLRYRFLSFGDAMLIL

SEQ ID NO: 63969 - protein, 334 aa, Unknown
  misc_feature (1)..(334): tr|A0A2H5WY70|A0A2H5WY70_9BACT S-adenosylmethionine:tRN A ribosyltransferase-isomerase OS=bacterium HR15 OX=203 5410 GN=queA PE=3 SV=1
MEASLFDYELPEELIAQEPVEPRDASRLLVVHRDTGQLEHRHFYDLPDYLRAGDTLVLNDTRVSARRLFGRKPTGGQVELLLLRPVGDGRWQALVRPGRRLPEGSLILLDEAHTAQIEARLEGGVRLVRFIPPDDSWLQQMGQVPLPPYIHRALTDPERYQTVFAREPGSAAAPTAGLHFTPALLEKLKAQGVQIVRVTLHVSLDTFRPLQSEQVEEHKMHGEWFTVSPEAAEAINRATGRIVAVGTTCVRTLESAAVSQRRVQPITGETRLYITPGYEFQVVDALITNFHAPRTTVLVLVCAFAGRELILRAYQEAIRLRYRFLSFGDAMLIL

SEQ ID NO: 63970 - protein, 344 aa, Unknown
  misc_feature (1)..(344): tr|A0A2H5X0I8|A0A2H5X0I8_9BACT S-adenosylmethionine:tRN A ribosyltransferase-isomerase OS=bacterium HR16 OX=203 5411 GN=queA PE=3 SV=1
MVEQTIEEAVRLLEEYRYDLPEERIAQQPVEPRDSSRLLVLRRDTGEREHRLFRDIVEYLRPGDTLVLNNTRVSARRLRGFKSTGAQVEALLLREVQPGVWEALVRPGRRLLVGSQVILEGHLKAEVIACLPQGMRLLRFEEPQSVHHQPLGEIPLPPYIRRKLENEERYQTVYAAVNGSAAAPTAGLHFTPELLQRIREMGVRIVTITLHVGIATFRHPEPEQLVQRRLHPEWYTISEQAAEAINSTPGRIVAVGTTCVRALESAAVDERRVEARHGSTDLFILPGFRFRVVEALVTNFHLPASTPLLLTCAFAGKEKVFEAYREALAMGYRFLSFGDAMLIL

SEQ ID NO: 63971 - protein, 347 aa, Unknown
  misc_feature (1)..(347): tr|A0A2H5XCR5|A0A2H5XCR5_9BACT S-adenosylmethionine:tRN A ribosyltransferase-isomerase OS=bacterium HR17 OX=203 5412 GN=queA PE=3 SV=1
MRLEELDYELPPELIAQEPIEPRDHARLMVLNRHTGAIAHRRFYELGDYLQPGDVLVINDTKVIRARLRGKRADTGGQVEVLLLRPDDHDDYVWRVLIKPGRRARTRGQFVFGCAPLQVTASVEERLPDGSFAVRFDRPRGELLQALDTIGEVPLPPYIKTPLTDDRPYQTVYAREPGSVAAPTAGLHFTERLLAELQARGVQIARITLHVGWSTFKPVTSEIVEQHDIGEEFYRVPPEAAEIINAAWQRGNKVVAVGTTATRTLETVAVDFHRVVPGEGWTSLFITVGHPFKAVDALVTNFHLPRSSNLLLVAAFCGGMALVRKAYEEAVRERYRFYSFGDAMLIL

SEQ ID NO: 63972 - protein, 348 aa, Unknown
  misc_feature (1)..(348): tr|A0A2H5XMI0|A0A2H5XMI0_9BACT S-adenosylmethionine:tRN A ribosyltransferase-isomerase OS=bacterium HR18 OX=203 5413 GN=queA PE=3 SV=1
MRLSDLHYDYPKNLIAKYPAEPRDSARLMVLDRKTQTIEHRIFRDIVDYFNEGDVLIVNDTKVFPARLFGYKEKTGARIEVFLLRELNSEGRLWDVLVDPARKIRVGNKIYFEGDLVAEVVDNTTSRGRTIRFLFDGSNEDLYRKIEEIGHTPLPPYIKREDEPEDRERYQTIFARHKGSVAAPTAGLHFTPELVESLRRKGVDIVPITLHVGLGTFRPVEVEDLTKHRMDSEYYVISEEAAERINRALLSPHHTVTAVGTTVVRAIESSISATGTLKAGSGWTDKFIYPPYDFKITERLITNFHMPRSTLLALVVAFAGYEFVMNAYRVAVQEKYRLFSFGDAMMIL

SEQ ID NO: 63973 - protein, 352 aa, Unknown
  misc_feature (1)..(352): tr|A0A2H5XXK8|A0A2H5XXK8_9BACT S-adenosylmethionine:tRN A ribosyltransferase-isomerase OS=bacterium HR20 OX=203 5415 GN=queA_1 PE=3 SV=1
MAPAPVKLSDLKVSVPVALVAQHPLPKRENARLLVVDRSSGDLRDEKFKNLPKYFQKGDVLVLNDTKAFPSHLIGTKEKGDTRIDVYLIRELQREERLWDIVVEPARKVRIGNRVYFDGGRVYCEIIENTTTRGRIARFSYEGDMTPLINRIGQMALPPYITREHTDEDRERFQTVFANPSKRFAIAPPTAGLHFTKEMLKAIAKQGVHIVYVTLHIGQCVLEPIELEDVSKYRMYSEYFDVGREVAETINKALKSQRNVYVVGSSTLRALESSVLTTNMLKPNRGWTDKYIFPPYDFKFKFRLLTNFHPPNSASLVLAGAVAGPELLVHSYRHAVKESYRFYAYGDAMLII

SEQ ID NO: 63974 - protein, 171 aa, Unknown
  misc_feature (1)..(171): tr|A0A2H5XYB9|A0A2H5XYB9_9BACT S-adenosylmethionine:tRN A ribosyltransferase-isomerase OS=bacterium HR20 OX=203 5415 GN=queA_2 PE=3 SV=1
MHAERILVERSTIARLRELVAERNRFCICVGTTSVRTVESLYWFGARLVVDPSVPPQHLTQEEPYLPKLLERTIPAEHALDALLDWLDRSGVSTLEASTQLYILPGYRYRIVDGMITNFHQPQSTLLLLVAAFIGPWWQIIYHEALSNNYRFLSYGDASLLIAPRTTAASR

SEQ ID NO: 63975 - protein, 415 aa, Unknown
  misc_feature (1)..(415): tr|A0A2H5Y0F7|A0A2H5Y0F7_9BACT S-adenosylmethionine:tRN A ribosyltransferase-isomerase OS=bacterium HR21 OX=203 5416 GN=queA_2 PE=3 SV=1
MEVLPPVRLEDFDYELPPERIAQHPLPERDRCRLLVADHRRRQLAHHIFAELPQLVPAPSLLVRNITRVVHARLFLRKPTGGLVELLLLAPTSGSADAAFGATPPVEWECLLRGRRLRPGTVLSVEADGLRLHAVLHEVSHGIARLRFEWDPPDMTLAELLEHLGHVPLPPYVRRSDQPADRQHYQTVYARIPGSVAAPTAGLHFTERLLRELEHAGIGFADVCLHIGLDTFKPVRAADARFHRMHSEALMVPRETLEILLHFLRSPERRWLVAIGTTSVRTLESLYWHGVRLLRREPSVWDSPHLQVGQWDAYRLQTTALPPAAEALEAIGEWLGHHRLGRIEGTTELMILPGYQYQLCDALITNFHQPRSTLLLLIAALIGDFWREVYAEALAQGYRFLSYGDASLLISERAR

SEQ ID NO: 63976 - protein, 360 aa, Unknown
  misc_feature (1)..(360): tr|A0A2H5Y062|A0A2H5Y062_9BACT S-adenosylmethionine:tRN A ribosyltransferase-isomerase OS=bacterium HR21 OX=203 5416 GN=queA_1 PE=3 SV=1
MCSELYCGEMLLRTKLSSFRYTYPKQAIAKFPADPRDSSRLLVVHRTSGELEHRTFRDIVDYFHRGDCLVVNDTWVYPALLIGKKERTHAPIEVILARELSREGNLWEVLVEPARKVRIGNKIYFDNNRFYAEIIDNTTSRGRIVRFSYSGDLYKVAERLGNMVLPPYMQRQPEEGDKEWYQTVFANPEKIGSLAPPTAGLHFTGELLEQLRQKGVHIVSITLHIGLGAFETIEVEDLSKHTMTSEYFEVSPQAADLINRALRNRKRVCAVGCSVVRALESSALTTGVVKPSRGWTDRFIYPPYEFRIVQSMITNFHPPNSPSLLVGAALAGPELITKVYRTAVKEGYRLFAYGDAMLIL

SEQ ID NO: 63977 - protein, 358 aa, Unknown
  misc_feature (1)..(358): tr|A0A2H5Y620|A0A2H5Y620_9BACT S-adenosylmethionine:tRN A ribosyltransferase-isomerase OS=bacterium HR22 OX=203 5417 GN=queA PE=3 SV=1
MEPKDLLSLEAYDYELPPDRIAQSPAEPRDAARLMVVHRATGRIEHRIFREIIDYLHPGDLLVFNDTRVIPARLFAVKPTGGRVELLLVRRVDPERWWTMVRGRHIRPGTRLQLLSGGQPVDLYAEVEAEGEGPLRLLRFSIPPEGWLERVGVIPLPPYIRRPLHDPERYQTVYARVPGSVAAPTAGLHFTPELLARLREHGVRFAFVTLHISLDTFRPIKASDVREHKLHREWCSLSADTAALINRTRLEGGRIIAVGTTVVRVLETAARYGLGCSPEAVCPWQVVGPFEGETDLFIYPGFEFRVVDALITNFHLPRSTLLLVVAAFMGYERMREAYQVAIAEGYRFYSFGDAMLIL

SEQ ID NO: 63978 - protein, 72 aa, Unknown
  misc_feature (1)..(72): tr|A0A2H5YEX8|A0A2H5YEX8_9BACT S-adenosylmethionine:tRN A ribosyltransferase-isomerase OS=bacterium HR23 OX=203 5418 GN=queA PE=3 SV=1
MRPASGWADLYILPGYPFKVVDALITNFHLPRTTLLMLVCAFAGKDLILRAYQEAIQHGYRFYSFGDAMFIR

SEQ ID NO: 63979 - protein, 350 aa, Unknown
  misc_feature (1)..(350): tr|A0A2H5YSA7|A0A2H5YSA7_9BACT S-adenosylmethionine:tRN A ribosyltransferase-isomerase OS=bacterium HR26 OX=203 5421 GN=queA PE=3 SV=1
MTMGEPIRLSDYDYELPPELIAQQPIEPRDAARLLVLDRRTGRIEHRIFREIGDYLQPGDLLVVNDSRVLPARLFGRRGTGGQVELLLLQARGDGNWEALARPARRLRPGEVLTILPRESGLAEPAPATILERLEEGRVLVQLPAQVLDALDRYGHVPLPPYIRQALRDPERYQTVYARELGSVAAPTAGLHFTPELLERLQRSGVGLARVTLHVGLGTFKPVQVEDARQHRMHAEWYHVPAETLSAIRSTREQGRRVVAVGTTSARSLESISDRLGEQGDLTGWTDLFIVPGHHWRVVDALITNFHLPRSTLLLLVCSFAGRELIFRAYREAVERGYRFYSFGDATLIL

SEQ ID NO: 63980 - protein, 359 aa, Unknown
  misc_feature (1)..(359): tr|A0A2H5Z8A2|A0A2H5Z8A2_9BACT S-adenosylmethionine:tRN A ribosyltransferase-isomerase OS=bacterium HR28 OX=203 5423 GN=queA PE=3 SV=1
METSLSPMPEEISLSLHEFDYELPEELIAQEPIEPRDAARLMVLRRATRTIEHRIFRELPSLLDPGDLLVVNDSRVLPARLFGQRRTGGKVEILLVQPLEGTTLWLALGRPARKLRPGETILVLPHEESFAPQPLRILERRARGQVVVELSPAIAEHLELFGHVPLPPYIRAPLRDPERYQTVYATHPGSVAAPTAGLHFTERLLTELRQRGITIAPLTLHVGIGTFKPIEVEDVRQHKMHAEWYRVPAETVALIQEARRAGRRIVAVGTTAARTLESIADSLDQGAVSELTGWTDLYIYPGYRWRVVNALITNFHLPRSTLILLVASFAGREFILEAYREAVRQRYRFYSFGDAMLIL

SEQ ID NO: 63981 - protein, 344 aa, Unknown
  misc_feature (1)..(344): tr|A0A2H5ZD03|A0A2H5ZD03_9BACT S-adenosylmethionine:tRN A ribosyltransferase-isomerase OS=bacterium HR29 OX=203 5424 GN=queA PE=3 SV=1
MCNEPLRTSDFDYQLPPDRIAQEPAEPRDSARLMVLRRGERRIEHRIFRDLPELLSPGDLLVMNDTRVMAARLFGVREDTGGRVELLLVRPAGPRRWVVLMRPLRSARPGRRFRFEARGGPLGATVVERLPDEAVLEFDREVDPSAEGQVPLPPYIRRFRGDPERYQTVYAREARSAAAPTAGLHFTPELLERVRAAGIETAFVTLDVGPGTFRPVTSEDPRQHRLDVERVTVPASTAEAIARTKARGGRVVAVGTTVVRTLEHVALDCGEVKPYEGWTGLLILPGHRFRTIDALITNFHLPRSSLLMLVAAFAGREFVLEAYRIAVAEGYRFYSFGDAMLILP

SEQ ID NO: 63982 - protein, 363 aa, Unknown
  misc_feature (1)..(363): tr|A0A2H5ZL99|A0A2H5ZL99_9BACT S-adenosylmethionine:tRN A ribosyltransferase-isomerase OS=bacterium HR30 OX=203 5425 GN=queA PE=3 SV=1
MEVRTKSGEQADSALRRSDYEFFLPPELIAQEPVDQRDRARLMVLDRRTRTVTHAHVADLPKFLAAGDLLVVNDTRVIPARVTTTTAGGGRVELLFIRPLPTPSNTAPMWVCMGKPARHFRPGRRILLPGDVGVQVIDRQAPGRYIVQWHGSLDVFTYLERHGQAPLPPYIRRPHGPSPRDRERYQTIFARVPGSIAAPTAGLHFTPALLEALQQAGVAIASVTLHVGPGTFQPVRVEDVRLHRMEPEWCQIPPETAAAIRAAKSRGKRVIAVGTTTTRALESSAAADGQTVMPGARWADQFILPGYRFRVIDALVTNFHLPGSTLLLLVAALVGRTWLLECYAEAVRRRYRFYSYGDAMLIL

SEQ ID NO: 63983 - protein, 357 aa, Unknown
  misc_feature (1)..(357): tr|A0A2H6A0P2|A0A2H6A0P2_9BACT S-adenosylmethionine:tRN A ribosyltransferase-isomerase OS=bacterium HR33 OX=203 5428 GN=queA PE=3 SV=1
MGESDRRYPVSAFDYPLPEDLIAQHPLPDRSASRLLVLHKSDGRIEHRSFRDFPSLIEPGDVVVVNASRVIPARLKGTRENGREAEILLVHPEPDGSWLAMVHPGGKLKPGRKVRFGRDAVAEVVEVLGGGMRRIKFCGAIDVRALMERYGSVPLPPYIRRPPEEADRERYQTIFARVEGSVAAPTAGLHFTPETVSAIEDRGGKIVEIVLHIGPGTFKPVEVDDPSRHVMHAEWYEIPEAAAEEINRAKIEGSRIWAIGTTAVRTLETAAVEDNPAVGDRRAAGVRSGSGWTDLFIYPPYEFKVVDALLTNFHLPRSTLLMLVAAFGGYERTMAAYREAVALRYRMYSYGDAMAIL

SEQ ID NO: 63984 - protein, 353 aa, Unknown
  misc_feature (1)..(353): tr|A0A2H6A955|A0A2H6A955_9BACT S-adenosylmethionine:tRN A ribosyltransferase-isomerase OS=bacterium HR35 OX=203 5430 GN=queA PE=3 SV=1
MVYDFSLYDYNLPEELIAKEPAKPRDFSRLFIYSVKEDKILFDKFFNLDKYLSKDCFLVFNNTKVLPSRIEMIKETGGKIKILFLINEIIYSRINKIRGIVDRKLEVGQKVYFPEKKKFLIAISQEKNIFTFEINFDFQEFLKLLNTYGEAPLPPYLKKTPLTKQEAKKKYQTIFAKKEGSVAAPTASFHFTQRVLNKLKKKKIKHFFVTLHVGLGTFSPVTEKNIKKKKLHQEYWEINEDVYQQILKLKKNKKLIAVGTTTTRLLETIARKKLKFKNKKAIGTTELFIFPPFEFKLVDGLITNFHLPKSSLMMLVEAFLQFKNSKRHLKELYEIAIKNKFRFYSFGDAMLII

SEQ ID NO: 63985 - protein, 358 aa, Unknown
  misc_feature (1)..(358): tr|A0A2H6ADQ6|A0A2H6ADQ6_9BACT S-adenosylmethionine:tRN A ribosyltransferase-isomerase OS=bacterium HR36 OX=203 5431 GN=queA PE=3 SV=1
MPETTSASLPLEWFDYDLPRELIAQEPLPERDEARLFVLYRQTGTWEHRHVYDLPELLCPGDLLVLNNTKVIPARLYGVRERTGGRWEGLFLRRLPSGQWELLAQTRGKPQLGELFIIEPNDAATKNGPLTLVLEGRTEEGHWLCRPQPEAPPEQLLSLYGHVPLPPYIRQGRDCPEDRERYQTIYAERPGSVAAPTAGLHFTPRLFTRLAERGIDTVFVTLHVGVGTFQPITVPDAARHQMHAEWCEISQETAQRIVQCRALGGRVVAVGTTTVRTLETVAQNGSIRAWCGQTNLYIRPPFAFRAVDILMTNFHLPRSSLLVLVSAFAGLDLIQRAYQEAVRQRYRFYSYGDAMLII

SEQ ID NO: 63986 - protein, 350 aa, Unknown
  misc_feature (1)..(350): tr|A0A2H6APV8|A0A2H6APV8_9BACT S-adenosylmethionine:tRN A ribosyltransferase-isomerase OS=bacterium HR37 OX=203 5432 GN=queA PE=3 SV=1
MSLKLSPDVGKIVFMKTSDFDYHLPPDLIALYPLSKREECRLMVVDRKTGTIEHRRFFELPYILKAGDLLVLNNTRVIPARLTGRVVSSNRRCEVLLTERISSCLWKGLMKKPKNGMLIEFEGGLKGRVFKDGREEWVFEFSEDVDDYLERFGKMPLPPYIQRDPEEDDKLFYQTVYASKKGSVAAPTAGLHFSEALMEEIKKRGVEIRFVTLHVGIGSFKPVKVESVEGHKMHPEYREITEDVAFSVNRAKSEGRRVIAVGTTVVRALESAVCEDGSIKPISGYTDLFIYPGFNFRVVDALITNFHLPRSTLLMLVAAFSGRELIMRAYEEAKKERYRFLSYGDAMLIL

SEQ ID NO: 63987 - protein, 352 aa, Unknown
  misc_feature (1)..(352): tr|A0A2H6B259|A0A2H6B259_9BACT S-adenosylmethionine:tRN A ribosyltransferase-isomerase OS=bacterium HR40 OX=203 5435 GN=queA PE=3 SV=1
MRLELFDYELPTERIAQHPVEPRDLARLLVVRHDRFEDRRVLDLPWHLAAGDLLVVNDTRVLPARFYARRGDGRLELTLTTAVDERRWRALAKGARRLRPGDLIELAPGFSATVEGRDREGEVVLAFDREGTALLEAIRQHGAMPVPPYIRRREPLARDRVDYQTLFARREGAIAAPTAGLHFTERLLRALEERGVRLATITLHVGLGTFKPVRTADLEAHDMHAEWFEVPATTAAAIAETRRQGGAVVAVGTTVVRTLESVAREDGTVVPGSGETALYILPGFRFRVVDRLLTNFHLPKSTLFAMVCAFAGFRRVHAAYRHAIAQGYRFFSYGDACLLDRQDGSDQPPEEA

SEQ ID NO: 63988 - protein, 349 aa, Unknown
  misc_feature (1)..(349): tr|A0A3L8A051|A0A3L8A051_9BACT S-adenosylmethionine:tRN A ribosyltransferase-isomerase OS=bacterium J10(2018) O X=2320122 GN=queA PE=3 SV=1
MKLSQFKFKLPEDLIASHPCEVRDEARMMVIHRDTGEIEHLRFKDIINFFGDGDVFVFNDTKVFPALLYGNKEKTGARIEVFLLRELNEENKLWDVLVEPARKIRIGNKLYFGDDESMVAEVIDNTTSRGRTLRFLYDGSHEEFKDALYKLGQTPLPPYIKRAPEPEDAERYQCIFASNEGAVVAPSAGLHFSRELMKRLEIKGVEAGFLTVHSGLGNYREIDVEDLTKHRMDSEEMEVTPQLVDLVNNAKDNGKQVCAIGTSVLRGIESAVSMGGHMKTFTGWTNKFIFPPYDFTVASAMVSGFHMPYSTMLMMVAAFGGYDLVMHAYEEAVKEKYRFGAYGDAMLIL

SEQ ID NO: 63989 - protein, 405 aa, Unknown
  misc_feature (1)..(405): tr|A0A3L7ZYQ3|A0A3L7ZYQ3_9BACT S-adenosylmethionine:tRN A ribosyltransferase-isomerase OS=bacterium J10(2018) O X=2320122 GN=queA PE=3 SV=1
MNSTPQSIKIQDFDYPLPDERIAKHPLARRDNCKLLVRRPDGTLDTRIFTELPSLLAADSMLVYNNTRVINARLRFRKSDAGAIIEIFCLEPVEPADYAVSFASTSCCSWLCFVGNSKRWKEGDLSLPLHIDGKELTLKASRTGREGNASIIRFSWDDPSVTFARIIESAGEIPIPPYLNRNTEDTDSTDYQTVYSHIDGSVAAPTAGLHFTPEVLAEIDRHGIERRELTLHVGAGTFQPVKTDTIGDHGMHSEFIAVSRSLISELSETSRSVIAVGTTSVRTLESLYHIGCLIGQRKWDGEVPQWYPYSDEHPRLSAKDALANIDRYLAENGTDTLIASTRIIIAPGYEFKIVDGIITNFHQPRSTLLLLVSAFVDGDWRAVYDYALDGDYRFLSYGDASLLLH

SEQ ID NO: 63990 - protein, 362 aa, Unknown
  misc_feature (1)..(362): tr|A0A4S1I6X6|A0A4S1I6X6_9BACT S-adenosylmethionine:tRN A ribosyltransferase-isomerase OS=bacterium M00.F.Ca.ET .141.01.1.1 OX=2563898 GN=queA PE=3 SV=1
MRVDLFDFDLPEERIALRPAEPRDSAKMLVVKPGKGLEDRTVGNLPSLLRAGDVLVFNDTRVIPAQLKGIRRRGEAAAQVEATLHMRMAPDRWLAFMRPGKRIAAGDRIHFGHDGNSCFLGQLDATVIQKGEGGEALLGFDLSGPFLDEALHAVGHIPLPPYIASKRDDDERDRADYQTIYAREEGAVAAPTAGLHFTPELFAALDAKGIERRFVTLHVGAGTFLPVKADDTVDHKMHAEIGSVGEATANALNAAKVRGGRIIAVGTTSLRLLESAAREDGTVAPWSGPTDIFITPGYRFRTADMLMTNFHLPRSTLFMLVSAFSGLDTMRAAYAHAIANRYRFYSYGDASLLYRAEMSDGR

SEQ ID NO: 63991 - protein, 355 aa, Unknown
  misc_feature (1)..(355): tr|A0A4S1HYW3|A0A4S1HYW3_9BACT S-adenosylmethionine:tRN A ribosyltransferase-isomerase OS=bacterium M00.F.Ca.ET .141.01.1.1 OX=2563898 GN=queA PE=3 SV=1
MRAIVDLLPPTALKKSDFHYDLPAELIAQAPLAERSASRLLLVPPAPAAFTDLQVRDLPSLLQPGDLLVFNDTRVIPARLFGQKASGGRVEILIERLLGGQQARAQVGASKSPKAGSRIALDAGGEAEVLGRDGEFYVLQFHVPESLEQWLLHAGRLPLPPYIQREPGVDDRERYQTVFAREVGAVAAPTAGLHFDEPLLAALKDKGVEFGHVTLHVGAGTFQPVRADDLKDHVMHREWLNVGAELVQQVRRTRAAGGRVIGVGTTVVRALESAMRDGELLPFAGETQIFITPGYRIRSVDAMVTNFHLPESTLLMMISAFAGKERVFEAYRHAIEQRYRFFSYGDAMLLFPQAG

SEQ ID NO: 63992 - protein, 362 aa, Unknown
  misc_feature (1)..(362): tr|A0A4S1B2T9|A0A4S1B2T9_9BACT S-adenosylmethionine:tRN A ribosyltransferase-isomerase OS=bacterium M00.F.Ca.ET .146.01.1.1 OX=2563899 GN=queA PE=3 SV=1
MRVDLFDFDLPEERIALRPAEPRDSARLLVVKPGEMLQDRIVSELPSMLREGDVLVFNDTKVIPAQLKGMRKRGDAVAQVEATLHMRVAPDRWQAFMRPGKRVAAGDRIHFGHDQNSCFLGQLDARVLEKGEAGEALLGFDLSGPFLDEALHAVGHIPLPPYIASKRDDDERDRTDYQTIYAREEGAVAAPTAGLHFTPALFAALDAKGIERRFVTLHVGAGTFLPVKADDTADHKMHAETGSVSPETAAALNAAKARGGRIICVGTTSLRLLESAARDDGRIEPWSGPTDIFITPGYRFRTADMLMTNFHLPRSTLFMLVSAFSGLETMRSAYAHAIESRYRFYSYGDASLLYRAETCDGR

SEQ ID NO: 63993 - protein, 362 aa, Unknown
  misc_feature (1)..(362): tr|A0A4S1BJZ4|A0A4S1BJZ4_9BACT S-adenosylmethionine:tRN A ribosyltransferase-isomerase OS=bacterium M00.F.Ca.ET .152.01.1.1 OX=2563900 GN=queA PE=3 SV=1
MRVDLFDFDLPEERIALRPAEPRDSARMLVVKSGEELEDQIVRDLPSLLRAGDVLVFNDTRVIPAQLKGIRRRGEAQAQVEATLHMRVAPDRWLAFMRPGKRIAAGDRIHFGHDGNSCFLGQLDATVITKGEGGEALLGFDLSGPFLDEALHAVGHIPLPPYIASKRDDDERDRADYQTIYAREEGAVAAPTAGLHFTPDLFAALDARGVERHFVTLHVGAGTFLPVKADDTADHKMHAEIGSVSRETADALNAARARGGRIIAVGTTSLRLLESAAREDGTVPAWSGPTDIFITPGYRFRTADMLMTNFHLPRSTLFMLVSAFSGLDTMRAAYAHAIANRYRFYSYGDASLLYRAEISDGR

SEQ ID NO: 63994 - protein, 98 aa, Unknown
  misc_feature (1)..(98): tr|A0A4S0XH49|A0A4S0XH49_9BACT S-adenosylmethionine:tRN A ribosyltransferase-isomerase (Fragment) OS=bacterium M00.F.Ca.ET.155.01.1.1 OX=2563901 GN=EN798_34400 PE=3 S V=1
DTADHKMHAETGSVSPETAAALNAAKARGGRIICVGTTSLRLLESAARDDGRIEPWSGPTDIFITPGYRFRTADMLMTNFHLPRSTLFMLVSAFSGLE

SEQ ID NO: 63995 - protein, 352 aa, Unknown
  misc_feature (1)..(352): tr|A0A4S0YCY7|A0A4S0YCY7_9BACT S-adenosylmethionine:tRN A ribosyltransferase-isomerase OS=bacterium M00.F.Ca.ET .155.01.1.1 OX=2563901 GN=queA PE=3 SV=1
MLTLSDFDFDLPPELIAQVALPERSASRLLEVDNAPDADRAARLTDRRFSELPECINAGDLLVFNDTKVLKARFLGQKASGGKIEVLVERLVGERTALAQIRASKSPQPGTTIRLADAFDVTVGERVEPFYTLHFPADCLTLIEQYGRLPLPPYIEHDPDSTDETRYQTVYAQNPGAVAAPTAGLHFDDALFERLDARGVQRATLTLHVGAGTFQPVRVENLAEHKMHSEWYHLPQSLADKIAATRARGNRVIAVGTTSMRALEAAARDAEAAGRPLAAASTETDIFITPGYRFRVVDRLVTNFHLPKSTLLMLVSAFAGVETIRAAYRHAIEQRYRFFSYGDAMLLTRRDG

SEQ ID NO: 63996 - protein, 362 aa, Unknown
  misc_feature (1)..(362): tr|A0A4S0ZPQ7|A0A4S0ZPQ7_9BACT S-adenosylmethionine:tRN A ribosyltransferase-isomerase OS=bacterium M00.F.Ca.ET .156.01.1.1 OX=2563902 GN=queA PE=3 SV=1
MRVDLFDFDLPEERIALRPAEPRDSAKMLVVEPGKGLEDRTVGDLPSLLRAGDVLVFNDTKVIPAQLKGIRRRGEAAAQVEATLHMRMAPDRWLAFMRPGKRIAAGDRIHFGHDGNSCFLGQLDATVIEKGEGGEALLGFDLSGPFLDEALHAVGHIPLPPYIASKRDDDERDHADYQTIYAREEGAVAAPTAGLHFTPELFAALDAKGIERRFVTLHVGAGTFLPVKADDTADHKMHAEIGSVSEATASALNAAKARGGRIIAVGTTSLRLLESAARDDGTVAPWSGPTDIFITPGYRFRTADMLMTNFHLPRSTLFMLVSAFSGLDTMRAAYAHAIANRYRFYSYGDASLLYRAEMSDGR

SEQ ID NO: 63997 - protein, 362 aa, Unknown; identical to SEQ ID NO: 63992
  misc_feature (1)..(362): tr|A0A4S0ZI74|A0A4S0ZI74_9BACT S-adenosylmethionine:tRN A ribosyltransferase-isomerase OS=bacterium M00.F.Ca.ET .156.01.1.1 OX=2563902 GN=queA PE=3 SV=1

SEQ ID NO: 63998 - protein, 362 aa, Unknown
  misc_feature (1)..(362): tr|A0A4S0X3L7|A0A4S0X3L7_9BACT S-adenosylmethionine:tRN A ribosyltransferase-isomerase OS=bacterium M00.F.Ca.ET .157.01.1.1 OX=2563903 GN=queA PE=3 SV=1
MRVDLFDFDLPEERIALRPAEPRDSARLLVVKPGEMLQDRIVSELPSMLREGDVLVFNDTKVIPAQLKGMRKRGDAVAQVEATLHMRVAPDRWQAFMRPGKRVAAGDRIHFGHDQNSCFLGQLDATVLEKGEAGEALLGFDLSGPFLDEALHAVGHIPLPPYIASKRDDDERDRTDYQTIYAREEGAVAAPTAGLHFTPALFAALDAKGIERRFVTLHVGAGTFLPVKADDTADHKMHAETGSVSSETAAALNAAKARGGRIICVGTTSLRLLESAARDDGRIEPWSGPTDIFITPGYRFRTADMLMTNFHLPRSTLFMLVSAFSGLETMRSAYAHAIESLYRYYSYGDASLLYRAETSDGR

SEQ ID NO: 63999 - protein, 362 aa, Unknown; identical to SEQ ID NO: 63998
  misc_feature (1)..(362): tr|A0A4S0W9Z1|A0A4S0W9Z1_9BACT S-adenosylmethionine:tRN A ribosyltransferase-isomerase OS=bacterium M00.F.Ca.ET .159.01.1.1 OX=2563904 GN=queA PE=3 SV=1

SEQ ID NO: 64000 - protein, 362 aa, Unknown; identical to SEQ ID NO: 63993
  misc_feature (1)..(362): tr|A0A4V3S8J7|A0A4V3S8J7_9BACT S-adenosylmethionine:tRN A ribosyltransferase-isomerase OS=bacterium M00.F.Ca.ET .162.01.1.1 OX=2563905 GN=queA PE=3 SV=1

SEQ ID NO: 64001 - protein, 362 aa, Unknown; identical to SEQ ID NO: 63992
  misc_feature (1)..(362): tr|A0A4S0YND5|A0A4S0YND5_9BACT S-adenosylmethionine:tRN A ribosyltransferase-isomerase OS=bacterium M00.F.Ca.ET .163.01.1.1 OX=2563906 GN=queA PE=3 SV=1

SEQ ID NO: 64002 - protein, 355 aa, Unknown; identical to SEQ ID NO: 63991
  misc_feature (1)..(355): tr|A0A4S0Z2V9|A0A4S0Z2V9_9BACT S-adenosylmethionine:tRN A ribosyltransferase-isomerase OS=bacterium M00.F.Ca.ET .163.01.1.1 OX=2563906 GN=queA PE=3 SV=1

SEQ ID NO: 64003 - protein, 360 aa, Unknown
  misc_feature (1)..(360): tr|A0A4S1HA84|A0A4S1HA84_9BACT S-adenosylmethionine:tRN A ribosyltransferase-isomerase OS=bacterium M00.F.Ca.ET .168.01.1.1 OX=2563907 GN=queA PE=3 SV=1
MRVDLFDFDLPEENIALRPANPRDSARLLVVDPNENRMEDHRVFDLPSFLRAGDALVFNDTRVIPAQLEGVRLREGAPETAVSATLHMRADQSRWKAFARPGKRIKQGDRIRFGYERDNACGLAHLEATVEQKDEEGEITLLFDVSGPVLDEAIASVGHIPLPPYIAAKRPEDAQDQTDYQTIYAREKGAVAAPTAGLHFTPELFAALDKAGIERHFVTLHVGAGTFLPVKADDTDDHKMHFEIGHVSQETADRLNAVKARGGRIVCVGTTSLRLIESAAAEDGTIHPWSDATGIFITPGYRFRAVDMLMTNFHLPKSTLFMLVSAFCGLETMRDAYKHAIETGYRFYSYGDSSLLFRKN

SEQ ID NO: 64004 - protein, 362 aa, Unknown
  misc_feature (1)..(362): tr|A0A4S0QXG5|A0A4S0QXG5_9BACT S-adenosylmethionine:tRN A ribosyltransferase-isomerase OS=bacterium M00.F.Ca.ET .177.01.1.1 OX=2563908 GN=queA PE=3 SV=1
MRVDLFDFDLPEERIALRPAEPRDSARMLVVRPGDGLEDRNVRDLPSLLKDGDVLVFNDTKVIPAQLKGIRRRGEAMAQVEATLHMRVAPDRWQAFMRPGKRIAAGDRIHFGHDQNSCFLGQLDATVIEKGEAGEVLLGFDLSGPFLDEAMHAVGHIPLPPYIASKRDDDERDRSDYQTIYAREEGAVAAPTAGLHFTPELFAALDAKGIERRFVTLHVGAGTFLPVKADDTADHKMHAETGSVSAETAQALNAARERGARIVAVGTTSLRLLESAAREDGRIEPWSGPTDIFITPGYRFRTADMLMTNFHLPRSTLFMLVSAFSGLETMRSAYAHATDNSYRFYSYGDASLLFRAETSDGR

SEQ ID NO: 64005 - protein, 392 aa, Unknown
  misc_feature (1)..(392): tr|A0A4S0Q2T6|A0A4S0Q2T6_9BACT S-adenosylmethionine:tRN A ribosyltransferase-isomerase OS=bacterium M00.F.Ca.ET .177.01.1.1 OX=2563908 GN=EN820_53060 PE=3 SV=1
MIAADRRVRRAARLLVVEANGAMCDLPRAGLATLFNPGDLIVANDAATLPASLHGTHVPSGEAIEIRLAGWLSLPDPTRFVALAFGAGDHRTRTEDRLPPPPLSTGDRLRLGPLEAVVARLLDHPRLLELRFSGNRAAVIAGLAQHGRPIQYAHVPEPLALWDVWTKIAAGPVAFEAPSAGFALDWLTLQAWRRRDVGFATLTHAAGVSSTGDPALDSRLPFDESYRIPERTATQVARAKLRGSRIIVIGTSVVRALEAAANPDGSVRAGNGIATGRIVRGTRLRVVDAILTGVHQPGESHFELLRAFADDALLAKASVAFAACRYHTHEFGDSMLLNRQPLLPSSEQVRAEVLETKALLEACYDVGRIGGISDARRARKSEQCCSGPRVGI

SEQ ID NO: 64006 - protein, 360 aa, Unknown; identical to SEQ ID NO: 64003
  misc_feature (1)..(360): tr|A0A4S0MZJ6|A0A4S0MZJ6_9BACT S-adenosylmethionine:tRN A ribosyltransferase-isomerase OS=bacterium M00.F.Ca.ET .179.01.1.1 OX=2563909 GN=queA PE=3 SV=1

SEQ ID NO: 64007 - protein, 341 aa, Unknown
  misc_feature (1)..(341): tr|A0A4S0M161|A0A4S0M161_9BACT S-adenosylmethionine:tRN A ribosyltransferase-isomerase OS=bacterium M00.F.Ca.ET .180.01.1.1 OX=2563910 GN=queA PE=3 SV=1
MDIEAFDYHLPESLIAQTPLKNRDESRLLVLGRKTGNIEHKHFKNVIDYIESGDTLVLNDTRVMPARLFGLKEETGAKVEMLMLTQLEDNDWEVLLKPAKRIKVGDKLSFGEGKIVAECLETLDQGGRIMRLNYEGILQERLDELGEMPLPPYIKERLDDPDRYQTVYAKASGSAAAPTAGLHFTDELLEQLKAKGVNIAFITLHVGLGTFRPVSVENIDDHEMHSEYYQMNQETADLLNATKANGHRIFSVGTTSTRTLETIMQTHNNFVAESGWTDIFIYPGFDFKAIDGLITNFHLPKSTLVMLVSAFSSRDYILNAYQQAVKLEYRFFSFGDAMLIF

SEQ ID NO: 64008 - protein, 352 aa, Unknown; identical to SEQ ID NO: 63995
  misc_feature (1)..(352): tr|A0A4S0IWI8|A0A4S0IWI8_9BACT S-adenosylmethionine:tRN A ribosyltransferase-isomerase OS=bacterium M00.F.Ca.ET .191.01.1.1 OX=2563911 GN=queA PE=3 SV=1

SEQ ID NO: 64009 - protein, 360 aa, Unknown; identical to SEQ ID NO: 64003
  misc_feature (1)..(360): tr|A0A4S0GZF8|A0A4S0GZF8_9BACT S-adenosylmethionine:tRN A ribosyltransferase-isomerase OS=bacterium M00.F.Ca.ET .194.01.1.1 OX=2563912 GN=queA PE=3 SV=1

SEQ ID NO: 64010 - protein, 91 aa, Unknown
  misc_feature (1)..(91): tr|A0A4S0FZV0|A0A4S0FZV0_9BACT S-adenosylmethionine:tRN A ribosyltransferase-isomerase (Fragment) OS=bacterium M00.F.Ca.ET.194.01.1.1 OX=2563912 GN=EN837_28700 PE=3 S V=1
MRVDLFDFDLPEERIALRPAEPRDSAKMLVVEPGKGLEDRTVGDLPSLLRAGDVLVFNDTKVIPAQLKGIRRRGEAMAQVEATLHMRVAPD

SEQ ID NO: 64011 - protein, 355 aa, Unknown; identical to SEQ ID NO: 63991
  misc_feature (1)..(355): tr|A0A4S0FC12|A0A4S0FC12_9BACT S-adenosylmethionine:tRN A ribosyltransferase-isomerase OS=bacterium M00.F.Ca.ET .199.01.1.1 OX=2563913 GN=queA PE=3 SV=1

SEQ ID NO: 64012 - protein, 362 aa, Unknown; identical to SEQ ID NO: 63996
  misc_feature (1)..(362): tr|A0A4S0EFI6|A0A4S0EFI6_9BACT S-adenosylmethionine:tRN A ribosyltransferase-isomerase OS=bacterium M00.F.Ca.ET .199.01.1.1 OX=2563913 GN=queA PE=3 SV=1

SEQ ID NO: 64013 - protein, 362 aa, Unknown; identical to SEQ ID NO: 63993
  misc_feature (1)..(362): tr|A0A4R9ZK35|A0A4R9ZK35_9BACT S-adenosylmethionine:tRN A ribosyltransferase-isomerase OS=bacterium M00.F.Ca.ET .205.01.1.1 OX=2563914 GN=queA PE=3 SV=1

SEQ ID NO: 64014 - protein, 362 aa, Unknown; identical to SEQ ID NO: 63992
  misc_feature (1)..(362): tr|A0A4R9UEL8|A0A4R9UEL8_9BACT S-adenosylmethionine:tRN A ribosyltransferase-isomerase OS=bacterium M00.F.Ca.ET .221.01.1.1 OX=2563915 GN=queA PE=3 SV=1

SEQ ID NO: 64015 - protein, 362 aa, Unknown; identical to SEQ ID NO: 63992
  misc_feature (1)..(362): tr|A0A4R9V2K4|A0A4R9V2K4_9BACT S-adenosylmethionine:tRN A ribosyltransferase-isomerase OS=bacterium M00.F.Ca.ET .222.01.1.1 OX=2563916 GN=queA PE=3 SV=1

SEQ ID NO: 64016 - protein, 362 aa, Unknown; identical to SEQ ID NO: 63992
  misc_feature (1)..(362): tr|A0A4R9TPS2|A0A4R9TPS2_9BACT S-adenosylmethionine:tRN A ribosyltransferase-isomerase OS=bacterium M00.F.Ca.ET .227.01.1.1 OX=2563917 GN=queA PE=3 SV=1

SEQ ID NO: 64017 - protein, 352 aa, Unknown; identical to SEQ ID NO: 63995
  misc_feature (1)..(352): tr|A0A4R9RC51|A0A4R9RC51_9BACT S-adenosylmethionine:tRN A ribosyltransferase-isomerase OS=bacterium M00.F.Ca.ET .228.01.1.1 OX=2563918 GN=queA PE=3 SV=1

SEQ ID NO: 64018 - protein, 341 aa, Unknown; identical to SEQ ID NO: 64007
  misc_feature (1)..(341): tr|A0A4R9SKS5|A0A4R9SKS5_9BACT S-adenosylmethionine:tRN A ribosyltransferase-isomerase OS=bacterium M00.F.Ca.ET .229.01.1.1 OX=2563919 GN=queA PE=3 SV=1

SEQ ID NO: 64019 - protein, 362 aa, Unknown
  misc_feature (1)..(362): tr|A0A4R9S1V5|A0A4R9S1V5_9BACT S-adenosylmethionine:tRN A ribosyltransferase-isomerase OS=bacterium M00.F.Ca.ET .230.01.1.1 OX=2563920 GN=queA PE=3 SV=1
MRVDLFDFDLPEERIALRPAEPRDSARLLVVKPGEMLQDRIVSELPSMLREGDVLVFNDTKVIPAQLKGMRKRGDAVAQVEATLHMRVAPDRWQAFMRPGKRVAAGDRIHFGHDQNSCFLGQLDATVLEKGEAGEALLGFDLSGPFLDEALHAVGHIPLPPYIASKRDDDERDRTDYQTIYAREEGAVAAPTAGLHFTPALFAALDAKGIERHFVTLHVGAGTFLPVKADDTADHKMHAETGSVSPETAAALNAAKARGGRIICVGTTSLRLLESAARDDGRIEPWSGPTDIFITPGYRFRTADMLMTNFHLPRSTLFMLVSAFSGLETMRSAYAHAIESLYRYYSYGDASLLYRAETSDGR

SEQ ID NO: 64020 - protein, 357 aa, Unknown
  misc_feature (1)..(357): tr|A0A4R9RUE5|A0A4R9RUE5_9BACT S-adenosylmethionine:tRN A ribosyltransferase-isomerase OS=bacterium M00.F.Ca.ET .230.01.1.1 OX=2563920 GN=queA PE=3 SV=1
MPLTLDDFDYQLPDELIARYPLAVRSASRLLYLPAHGQPKDQQFVDLPELLNSGDLVVFNDTKVMKARLFGQKASGGAVEVLVERILPDDATSSQKHTALCHVRASRSPKEGQTLSLADGNIHATVMGREENLFLLAFDQPILPVLEHYGELPIPPYFERHADDNDETRYQTVFHDPAKLASVAAPTASLHFDDNVLAALKSKGINTAFVTLHVGAGTFAPVKTEDILRHKMHSEYAELPQATADLINQTKARGGQVIAVGTTVTRVLETAFQKTANFENPMLSAWSGDTDIFIYPSFRFGVIDKLITNFHLPKSTLLMLVSAFAGSEPIKQAYQHAIEQRYRFFSYGDAMLLEKMV

SEQ ID NO: 64021 - protein, 362 aa, Unknown
  misc_feature (1)..(362): tr|A0A5J4E2G5|A0A5J4E2G5_9BACT S-adenosylmethionine:tRN A ribosyltransferase-isomerase OS=bacterium MnTg02 OX=2 080452 GN=queA PE=4 SV=1
MRADEFDYELPPERIALRPCRPRDAARLLCVEPERNPPFTDRVVSELADVLSPGDALVINDTRVIRAALTGVRVRQGVEARIAVTLLKPLDANRWQALARPAKRLKSGDRIDFGADGRVCLQGTLSATVEERRGEGEVILAFDFHGAVLEDAIGTVGEMPLPPYIASRRPADERDDKDYQTVFAARDGAVAAPTAGLHFTQPLFDVLSARGISHHFVTLHVGAGTFLPMKAADTQDHKMHAEWGEVHADVADALNGVRAQGGRLVAIGTTALRLLESAADESGSIHPFAGETSLFITPGYRFRAVDRLFTNFHLPRSTLFMLVSAFSGLDVMKRAYAHAIEQNYRFYSYGDACLLSPKAETL

SEQ ID NO: 64022 - protein, 60 aa, Unknown
  misc_feature (1)..(60): tr|A0A5J4EC97|A0A5J4EC97_9BACT S-adenosylmethionine:tRN A ribosyltransferase-isomerase OS=bacterium MnTg04 OX=2 080454 GN=queA PE=4 SV=1
MLTNFHLPRSSLLMLVSAFAGRAAVLAAYRHAVDNRYRFFSYGDAMFLTPEPTTGHNHEI

SEQ ID NO: 64023 - protein, 349 aa, Unknown
  misc_feature (1)..(349): tr|A0A132H0W3|A0A132H0W3_9BACT S-adenosylmethionine:tRN A ribosyltransferase-isomerase OS=bacterium P201 OX=176 8112 GN=queA PE=3 SV=1
MKLSQFKFNLPSELIALQPTQNRDEARLMVVDRRTGKIEHRIFKDLVDYVKDGDVFVINNTKVFPAKLYGEKEKTGAKIEVLLLRELDHESRLWDVLVDPARKIRIGNKLYFGDGDELVAEVIDNTTSRGRTLRFLYDGTYDEFKKTLSSLGHTPIPKELNREERPEDAEDFQTIYAKVEGAVSAPTAGMHFSKILMKRLEIVGASFAELTLHPGMGNFRDIEVEDLTKHKPDSEEMYIDEECCTLVNEANARHNNVFAVGTTSLKALETAMTIGGKIKPYKGWTNKFIFPPYTFSVANCMITNFHLPKSPMMMEVAAFAGYDVLMKAYKEAIAQKYRFFTYGDAMLII

SEQ ID NO: 64024 - protein, 403 aa, Unknown
  misc_feature (1)..(403): tr|A0A132GXV3|A0A132GXV3_9BACT S-adenosylmethionine:tRN A ribosyltransferase-isomerase OS=bacterium P201 OX=176 8112 GN=queA PE=3 SV=1
MSAVKDISIEAYDYPLPEERIAKYPLAERDASKLLVLKDNEISESRFKHVGDFLPKDALLVFNETKVIRARLQFHKATGSRIEVFCLEPEKDYQVAFSASSPVRWKCLVGNAKRWKEGKLSMELSVKGEKVTLFADRIAHNDQYSEIEFSWTPEHLSFAAVLEAAGEIPLPPYLHRDAEPSDRDRYQTVFARYDGSVAAPTAGLHFTKPLMEDLHKQGFDFDEVTLHVGAGTFRPVATETIGEHAMHSETIIVRKSLIQNLVQRYGKPIIPVGTTSTRTLESLYWIGVMLKEQGDELRPLHVEQWFPYEDHEDISAVDALHAILEYLDKHGLTRLEASTALMIAPSYKMRVITGLITNFHQPKSTLLLLVSALIGERWKDCYRFALDHGFRFLSYGDSCLFLP

SEQ ID NO: 64025 - protein, 365 aa, Unknown
  misc_feature (1)..(365): tr|A0A4Q2RFD3|A0A4Q2RFD3_9BACT S-adenosylmethionine:tRN A ribosyltransferase-isomerase OS=bacterium RmlP001 OX= 2316527 GN=queA PE=3 SV=1
MLVDDFDFELPESAIALRPAAPRDSARLLTVDPADPARFGDRAVRDLPDLLQPGDALVVNDTRVVPARLFGLRRRGDAIARIEVTLHRRDAPDRWRAFIRPAKRLADGERLAFEADGAEVLAATASDKDGGEVSLSFDRSGEALDAAVARVGQMPLPPYIEHRRAGDAADAADYQTLFADRPGAVAAPTAGLHFTPDLVARLAAAGVALHRVTLHVGAGTFLPVKSDTTEGHRMHGEIGAVSPDTAAALTDVRRRGGRVVAVGTTSLRILESAAGADGVVRPFAGETSIFITPGYRFRAVDLLMTNFHLPRSTLFMLVSAFSGLDTMRAAYARAIASGYRFYSYGDACLLRPTAASAPPTPGPVP

SEQ ID NO: 64026 - protein, 364 aa, Unknown
  misc_feature (1)..(364): tr|A0A4Q2U9U8|A0A4Q2U9U8_9BACT S-adenosylmethionine:tRN A ribosyltransferase-isomerase OS=bacterium RmlP026 OX= 2316528 GN=queA PE=3 SV=1
MLVDAFDFTLPESAIALRPASPRDAARLLAVDPGAPRPLVDRAVRDLPTLLQPGDALVVNDTRVVPARLFGIRRRGGHVARIEVTLHRRDAADRWRAFVRPAKRLADGEALDFEAGGAVALSARASDKDGGEVSLTFDRAGDELDAATALVGRMPLPPYIEHRRAGDDADASDYQTLFAARPGAVAAPTAGLHFTPDLVDALRARGVALHRVTLHVGAGTFLPVKADTTEEHRMHGEIGTVSAETADALNAARRRGGRLVSVGTTSLRILESAAGEDGIIRPFAGETSIFITPGYRFRCVDRLMTNFHLPRSTLFMLVSAFSGLDAMQAAYAHAIGAGYRFYSYGDASLLAPAADSAAPRPDPA

SEQ ID NO: 64027 - protein, 290 aa, Unknown
  misc_feature (1)..(290): tr|A0A1E4EVK2|A0A1E4EVK2_9BACT S-adenosylmethionine:tRN A ribosyltransferase-isomerase OS=bacterium SCN 62-11 O X=1660156 GN=ABS71_17170 PE=3 SV=1
MTPIPVQLRVSHAHQLEQMPFDRLGSVLQPGDLLVVNDSATLPASIDNRLHYSGQLEDGSWLVEPRQRQGLGTIPLSWRADQTIELPELGVRKLTAWPESNRLWRLENAPEPVAYLTRYGQPIRYAHTQRELPLQAYQSFFARVPGSAEMPSAGRPFSWEMVQGLDIASLTLHTGVSSLENHEMPYPEWFQVPEQTWRRVQAARRVIAVGTTVLRALETAATGQFHGWTRHIVTPENFRHSVDGLLTGMHDPTSTHRWMLQALLPAEELSRAYQGTFNAHEFGDMHLILK

SEQ ID NO: 64028 - protein, 135 aa, Unknown
  misc_feature (1)..(135): tr|A0A0S8I0A3|A0A0S8I0A3_9BACT S-adenosylmethionine:tRN A ribosyltransferase-isomerase (Fragment) OS=bacterium SM23_31 OX=1703762 GN=AMJ80_07850 PE=3 SV=1
GLGSFRPVQVEDLTRHRMDSEYFEITKEAADKINKIKQKGGAVVCVGTTSVRSLETAITSDHLVKPYAGWTDKFIFPPYEFKVADRLITNFHLPCSTLLMLVSAFATRDLIFKAYRKAIKEKYRFYSYGDAMIII

SEQ ID NO: 64029 - protein, 350 aa, Unknown
  misc_feature (1)..(350): tr|A0A3R7V294|A0A3R7V294_9BACT S-adenosylmethionine:tRN A ribosyltransferase-isomerase OS=bacterium TMED144 OX= 1986778 GN=queA PE=3 SV=1
MIEKKKKWKLADFDYSLPEKYIAQYPTEKRDKSKLMVIHKESGEIEHKLFSDLPDYLRKNDLVITNNTKVFPARLYASKDRTDAKVEVFLLRELENDLWEVMVRPARKVRIGNKLMFTDNVFCDVIDNTISGGRVVRFEYDGDDIYDIIDKVGISPLPPYIKRKSEPSDKERYQTVFAEHRGAVAAPTAGLHFTKDLIDSIVKKGAKMEHTTLHIGLGTFRPVQVEDLNRHQMDSEYFEVSPKTALSINETKKKRRRVFAVGTSSVRSLETVAVSGFQVSPKRGWTDKFIYPPYDFKMVDAMITNFHQPKSTLLMMVSAFADPDLIMKAYKEAKKNNYRFLSYGDAMLIM

SEQ ID NO: 64030 - protein, 358 aa, Unknown
  misc_feature (1)..(358): tr|A0A1Z8MLG3|A0A1Z8MLG3_9BACT S-adenosylmethionine:tRN A ribosyltransferase-isomerase OS=bacterium TMED15 OX=1 986651 GN=queA PE=3 SV=1
  misc_feature (55)..(55): Xaa can be any naturally occurring amino acid
  misc_feature (62)..(62): Xaa can be any naturally occurring amino acid
  misc_feature (69)..(69): Xaa can be any naturally occurring amino acid
MEKLKETGDLLLDSYDYVLPENQIAQYPLENRDQSRLLVLDRKTRDYHHTTFDQXGHFLPRXSLLVTNXTKVIPARLIGYKARTKGKVEVFLLQQKASRIWEVLMKPGRRIRSKMQIVFENHPDNQSEFQLVGTVVAKTDIGSFVIRFDYDGDFFDCLHRVGQTPLPPYIKRPTSQKDLSRYQCVYAKKQGAVAAPTAGLHFTPSLFGRLESLGIRNTELTLHVGLGTFQPVKANNLLDHKMHTEFFEISPQTADSINQAKKIGQKIVAVGTTSVRSLESSAKDGWIQPQRGETDIFIYPGYQFEVVDALITNFHLPKSTLIMLVSAFADRQFVMDAYRQAITAGYRFYSYGDAMLIL

SEQ ID NO: 64031 - protein, 351 aa, Unknown
  misc_feature (1)..(351): tr|A0A1Z9L7B8|A0A1Z9L7B8_9BACT S-adenosylmethionine:tRN A ribosyltransferase-isomerase OS=bacterium TMED190 OX= 1986655 GN=queA PE=3 SV=1
MLFEKRVKLRLNDFDYKLPKSRIAQEPWPRRDHSKLMVLNKKDQTIEHKKFHNLPDYVKKNDLVILNETKVFPARLFAIKDRTDAKVEVFLLRELENDLWEVLVKPARKVRIGNKLHFTDNVHCDVIDNTVSGGRVVRFEYENEAFYNIIDRIGHAPLPPYIGREDTEKDKERYQTVFASNRGAVAAPTAGLHFTDSVIKKITDKGAKIGKIVLHIGLGTFRPVQVEDLTRHTMDSEYFHVPPETALMINETRERGKNIFAVGTSSVRALETVVVSGFQVTPKRGWTDKFIFPPYDFKMTDAIITNFHQPKSTLLMLLCAFTEREFLFNAYKEALKKDYRFLSYGDAMIIK

SEQ ID NO: 64032 - protein, 352 aa, Unknown
  misc_feature (1)..(352): tr|A0A1Z9M5D5|A0A1Z9M5D5_9BACT S-adenosylmethionine:tRN A ribosyltransferase-isomerase OS=bacterium TMED198 OX= 1986779 GN=queA PE=3 SV=1
MFFGSAEKPPRLSSFDLEVPNARVAQHPSEKRDQCKLMVLHTKDQTIEHTKFSKIVDYYEKGDVLVLNDTKVYPARLFAKKDKSEAKVEVFLLRELSSDLWEAMVRPARKVRIGNKLIFGKGIECDVIDNTISGGRVIRFENNTNNLYDFIEKNGHSPLPPYIKREATAKDKKDYQTVYAANRGSVAAPTAGLHLTKGLINKFDKKGIIVTKITLHIGLGTFRPIMVEDLTRHQMDSEYYEVSAETAEIINIARKKKRNICPVGTSTVRTLETVCVSGFKITAKSGWTDKFIYPPYEFKMCDKLITNFHQPQSTLMMMIAAKAKKDFALKAYEEAIKKKYNFYSYGDAMLII

SEQ ID NO: 64033 - protein, 335 aa, Unknown
  misc_feature (1)..(335): tr|A0A424SBI4|A0A424SBI4_9BACT S-adenosylmethionine:tRN A ribosyltransferase-isomerase OS=bacterium TMED221 OX= 1986656 GN=CBD81_001995 PE=3 SV=1
MHKTPTSDLEYVLDESCIAQYRYKDPSYSKLLIAETNEIVTFEKFLNELEDKSVFVFNKSTIHNVRIETTKSHTGGKIEFFILNILDPNTAEVMIKTSSNLKPSDIIDTPIGTVSILDKSEGIFTVDFKRDVRELIEKLGKVPLPPYINDDSSKYDDYKNEFSEGGFSVATSTAGLHFTLDMISELQNNGHKVFFLNLDINLGTFKQIHTKNIEDYEIHSEFYKVSKNEFNEILNLKDIGYKVVAVGTTVLRTLETVFTSGIYEGKTDLFITPGYKFNIPDFLITNFHAPRSSLLSIVQTIYGSEWKKLYKYAQKNNLKFLSFGDAVLFKIDEQS

SEQ ID NO: 64034 - protein, 350 aa, Unknown
  misc_feature (1)..(350): tr|A0A3R7W8G8|A0A3R7W8G8_9BACT S-adenosylmethionine:tRN A ribosyltransferase-isomerase OS=bacterium TMED46 OX=1 986782 GN=queA PE=3 SV=1
MIDKKKKYKLGDFNYQLPKAFIAQHPESRRDYAKLMVVHRDSGEIEHKKFYNITDYMRKNDLLVLNNTKVFPARLFATKDRTEAKVEVFLLRELSNDLWEVMVRPARKVRIGNKLVFTPKLMCDVIDNTVSGGRVVRFEYDGQDFDNVIDRIGTSPLPPYINRDADSSDKKRYQTVYASQRGAVAAPTAGLHFTDGLIKKVKDKGTKVENVTLHIGLGTFRPVQVEDLNRHQMDSEYFEVSPDTAMAINQARKRHRKIIAVGTSSVRALETIAISGFQVTPKRGWTDKFIYPPYEYKMVDKMITNFHTPQSTLLMMVSAFAGRKLIKKAYLEAKRNKYRFLSYGDAMLII

SEQ ID NO: 64035 - protein, 352 aa, Unknown
  misc_feature (1)..(352): tr|A0A1Z8KUM4|A0A1Z8KUM4_9BACT S-adenosylmethionine:tRN A ribosyltransferase-isomerase OS=bacterium TMED6 OX=19 86783 GN=queA PE=3 SV=1
MFFGSVEKPPRLSSFDLEVPDNLIADKPTKARENSKLMVLNRKDMSIEHKKFKDIVSYFKKGEVLVLNNTKVYPARLYAKKDKSDAQVEVFLLRELANNLWEAMVKPARKVRIGNKLILSDEITCDVIDNTVSGGRVLRFDHDEQSLYNFIDNHGLCPLPPYIKRDPVPSDKKRYQTVYASERGSVAAPTAGMHFSEQLIEDIKKVGVKTANITLHIGLGTFKPILVEDLTRHNMDSEYYYVPPETATLINEAKSKRKKVTVVGTSAVRTLETVVVSGFQITAKSGWTDKFIYPPYDFKMTDKLITNFHQPQSTLMMLVSAFANKDFVMDAYSEAIKKKYRFYSYGDAMLII

SEQ ID NO: 64036 - protein, 353 aa, Unknown
  misc_feature (1)..(353): tr|A0A1Z9AXM2|A0A1Z9AXM2_9BACT S-adenosylmethionine:tRN A ribosyltransferase-isomerase OS=bacterium TMED88 OX=1 986661 GN=queA PE=3 SV=1
MSAPQTPEDWAQYTFDLPDQLIAQQPLMRRDEARLMRVARGNGSVIGSEPSWRVRDLPRILREGDLLVMNQTRVLRARLRGRKITGGAAEALILRPEEQQPGYRALVRTNGRLREGLEFIFEGRGQSLPARITTLHPEDGVTLEFEGGLSPYEVGEAPLPPYIRRSSPDAQDEERYQTVYATTPGAVAAPTAGLHFTPDLLTRLDHAGIDRAHVVLHVGLGTFRPLRPEDLARDRLHQEWFDLPESTATAIDRTRSRGGRVIAVGTTSTRVLETQATGPGQVTPGQGYTDLFLHPGRPPQVVDGLLTNFHLPGSSLLMLVASLIGRDALLEAYRQAIESHYRFYSYGDAMLIL

SEQ ID NO: 64037 - protein, 371 aa, Unknown
  misc_feature (1)..(371): tr|A0A0A1PCU9|A0A0A1PCU9_9BACT S-adenosylmethionine:tRN A ribosyltransferase-isomerase OS=bacterium YEK0313 OX= 1522316 GN=queA PE=3 SV=1
MRVDLFDFELPPERIALRPASPRDSARLMVVPSGDAPCEDRLVRDLPDLLQPGDALVFNDTKVIPAQLEGLRRRGEATAAVSATLHRRLAPDRWLAFVRGAKKLQPGDRVAFGETAEACLLGALDATVVSKDDDGVVFAFDLYGVVLDEAIDRIGHIPLPPYIASKRPEDRADRSDYQTVYARDEGSVAAPTAGLHFTPDLLARLEARGIELHFVTLHVGAGTFLPVKAEDTSGHRMHPEYGEVSAEVAEALNAARARGGRIVAVGTTSLRLMESAAAEDGTIGPFAAETSIFITPGYRFRAVDALMTNFHLPRSTLFMLVSAFAGLERMQAAYARAIASGYRFYSYGDGSLLFRQSASLAEGPPSDVASS

SEQ ID NO: 64038 - protein, 409 aa, Bacteroidaceae bacterium
  misc_feature (1)..(409): tr|A0A5C6HQU0|A0A5C6HQU0_9BACT S-adenosylmethionine:tRN A ribosyltransferase-isomerase OS=Bacteroidaceae bacter ium HV4-6-C5C OX=2600309 GN=queA PE=3 SV=1
MNTDPKHIHISEFNYSLPDERIAKFPLLIRDNSKLLVYSHGEISEDYFFSLPSYFDPGSLLIFNNTKVIQARMHFRKETGALIEVFCLEPIKPNDYALNFQQTRHAAWLCMVGNLKKWKDGVLKRDMTIKGEEVTLTASRGESYGTSHWIDFNWDNPAITFADILEVFGELPIPPYLNRDTQESDKETYQTIYSKIKGSVAAPTAGLHFTSMVLTELREKNIDMEELTLHVGAGTFKPVKSEEIEGHEMHTEYISVARGTIEKLIAHNGKAIAVGTTSVRTLESLYHIGVTLLYNPNATEEELHVKQWQPYETEDKSRNISSVEALEAVIYYLDKHHLEALHTSTQIIIAPGYKYRIVNKMITNFHQPQSTLLLLVSAFVNGDWRRIYDYALDHDFRFLSYGDSSLLIP

SEQ ID NO: 64039 - protein, 353 aa, Bacteroidaceae bacterium
  misc_feature (1)..(353): tr|A0A5C6HH47|A0A5C6HH47_9BACT S-adenosylmethionine:tRN A ribosyltransferase-isomerase OS=Bacteroidaceae bacter ium HV4-6-C5C OX=2600309 GN=queA PE=3 SV=1
MKLSQFKFKLPEEKIALHPAKYRDESRLMVLHRKTGKIEHRMFKDILEYFDNEDVFIFNDTKVFPARLYGNKEKTGARIEVFLLRELNEELRLWDVLVDPARKIRIGNKLYFGDDDSMVAEVIDNTTSRGRTLRFLYDGPHDEFKKALYALGETPLPHSIINRPVEPEDSDRFQSIFARSEGAVTAPTANLHFSRELMKRMEIKGIDFSFITLHAGLGNFRDIDVEDLTKHKTDSEQMVVAEEAVRIVNRAKDLRKQVCAVGTTVMRAIESTVSTDGHLKPYEGWTNKFIFPPYEFTVANAMVSNFHMPLSTLLMIVAAFGGYDQVMEAYHIALKEDYRFGTYGDAMLITDRE

SEQ ID NO: 64040 - protein, 404 aa, Bacteroidales bacterium
  misc_feature (1)..(404): tr|U5Q552|U5Q552_9BACT S-adenosylmethionine:tRNA ribosy ltransferase-isomerase OS=Bacteroidales bacterium CF OX =1400053 GN=queA PE=3 SV=1
MYPEISIKDYTYILPEEKIAKYPLPNREDSKILIFQDNKVLDSKFSNLDELLPNESLMVINNTKVVPARLFFRKESGAHIEIFCLEPHIPYEYNVSFASTESCSWICIIGNSKKWKDGYLYFDSNGHDSLDEYRLKAKLISKIEDKSIVEFSWEGAIPFSELMERCGKVPIPPYLNREAEESDTERYQTLYAQNRGSVAAPTAGLHFSENVLKKIKEKGIDINNVCLHVGAGTFLPVKSEYIRNHNMHYEPFSVSRDLIIKLINRGDKKLISVGTTSTRCLESLYYLGIHCIEEGNPTPVTQWEPYERDYKYTTAEALTALLEWMNKNGRDHIDTKTGIIIVPSFRFRIVDILITNFHQPNSTLLLLIAAFVGDYWKEIYQYALNNDFRFLSYGDSSILFRPSA

SEQ ID NO: 64041 - protein, 350 aa, Bacteroidales bacterium
  misc_feature (1)..(350): tr|A0A4V3WYN3|A0A4V3WYN3_9BACT S-adenosylmethionine:tRN A ribosyltransferase-isomerase OS=Bacteroidales bacteri um OX=2030927 GN=queA PE=3 SV=1
MKLSQFKFKLPENLIAQYPSENRDECRLMVVDSRTGEISHHIFKDILNYFDDGDVMIFNDTKVFPARLYGNKEKTGARIEVFLLRELNVENKFWDVLVEPARKIRIGNKLYFGDDDSMVAEVIDNTTSRGRTLRFLYDGPHDEFKQALYNLGETPLPEYITRKVEDWDADRYQCIFAKNEGAVMAPAAGLHFSRELLKRLEIKGVERGFLTLHSGRGNFKDIDVEDLTKHRMDSEEMFVNEELVEMVNAAKDRNANICAVGTSVLRAVASAVCMNGHLMTYEGWTNKFIFPPYDFTVCNSLVSNFHMPLSTMLMMVSAFGGFDLVMKAYDIAVKEKYHFGAYGDAMLILR

SEQ ID NO: 64042 - protein, 352 aa, Bacteroides acidifaciens
  misc_feature (1)..(352): tr|A0A3L7Z1H5|A0A3L7Z1H5_9BACE S-adenosylmethionine:tRN A ribosyltransferase-isomerase OS=Bacteroides acidifaci ens OX=85831 GN=queA PE=3 SV=1
MKLSQFKFKLPEDKIALHPMKYRDESRLMVLHRKTGKIEHKMFKEVLDYFDDKDVFIFNDTKVFPARLYGNKEKTGARIEVFLLRELNEELRLWDVLVDPARKIRIGNKLYFGPDDSMVAEVIDNTTSRGRTLRFLYDGPHDEFKKALYELGETPLPHSIINRPVEPEDAERFQSIFAKNEGAVTAPTASLHFSRELMKRLEIKGIDFAYITLHAGLGNFRDIDVEDLTKHKMDSEQMFVDEMAVKTVNRAKDNGKNVCAVGTTVMRAIESAVSTDGHLKEFEGWTNKFIFPPYEFTVANSMISNFHMPLSTLLMIVAAFGGYEQVMDAYHVALKEGYRFGTYGDAMLILDK

SEQ ID NO: 64043 - protein, 406 aa, Bacteroides acidifaciens
  misc_feature (1)..(406): tr|A0A3L8ABL3|A0A3L8ABL3_9BACE S-adenosylmethionine:tRN A ribosyltransferase-isomerase OS=Bacteroides acidifaci ens OX=85831 GN=queA PE=3 SV=1
MKEDPRHIHISEYNYPLPDERIAKFPLPTRDQSKLLIYRRGEVSEDVFTSLPEYLPQDSLMIFNNTKVIQARLHFRKETGALIEVFCLEPIQPNDYVLNFQQTAHAAWLCMIGNLKKWKDGRLKREMTVKGFPITLTVTRGECKGTSHWVDFAWDNPEVTFADILEVFGELPIPPYLNRDTEESDKETYQTVYSKIKGSVAAPTAGLHFTPRVLDALQEKGIDLEELTLHVGAGTFKPVKSEEIEGHEMHTEYISVNRSTIKKLIDHDGRAIAVGTTSVRTLESLYHIGVTLAENPYATEEELRVKQWQPYEKYDQIPPVVALQKILGYLDRNGLETLHTSTQIIIAPGYNYKIVKAMVTNFHQPQSTLLLLVSAFVKGNWRTIYDYALAHDFRFLSYGDSSLLIP

SEQ ID NO: 64044 - protein, 406 aa, Bacteroides caccae
  misc_feature (1)..(406): tr|A0A412FVM3|A0A412FVM3_9BACE S-adenosylmethionine:tRN A ribosyltransferase-isomerase OS=Bacteroides caccae OX =47678 GN=DWY26_08255 PE=3 SV=1
MKENPKHIHISEYNYPLPDERIAKFPLPVRDQSKLLVYRHGEVTEDTFTSLPEYLPKGSLMIFNNTKVIQARLHFRKETGALIEVFCLEPIQPNDYVLNFQQTEHAAWLCMIGNLKKWKDGTLKREMTVKGFPITLTATRGECKGTSHWVDFAWNNPEVTFADILEVFGELPIPPYLNRNTEESDKETYQTVYSKIKGSVAAPTAGLHFTPRVLEALQEKGIDLEELTLHVGAGTFKPVKSEEIEGHEMHTEYISVNRNTIKKLIDHDGCAIAVGTTSVRTLESLYHIGVTLADHPDATEQKLHVRQWQPYEKYDQIPPVVALQKILGYLDRNGLEALHTSTQIIIAPGYQYKIVKAMVTNFHQPQSTLLLLVSAFLKGNWRTIYDYALSHDFRFLSYGDSSLLIP

SEQ ID NO: 64045 - protein, 352 aa, Bacteroides caccae
  misc_feature (1)..(352): tr|A0A174GEU0|A0A174GEU0_9BACE S-adenosylmethionine:tRN A ribosyltransferase-isomerase OS=Bacteroides caccae OX =47678 GN=queA_1 PE=3 SV=1
MKLSQFKFKLPEDKIALHPTKYRDESRLMVLHRNTGKIEHRMFKDVLDYFDDKDVFIFNDTKVFPARLYGNKEKTGARIEVFLLRELNEELRLWDVLVDPARKIRIGNKLYFGPDDSMVAEVIDNTTSRGRTLRFLYDGPHDEFKKALYALGETPLPHSIINRPVEPEDAERFQSIFAKKEGAVTAPTASLHFSRELMKRLEIKGIDFAYITLHAGLGNFRDIDVEDLTKHKMDSEQMLVDEAAVKTVNRAKDTGRNVCAVGTTVMRAIESAVSTDGHLKEFEGWTNKFIFPPYEFTVANSMISNFHMPLSTLLMIVAAFGGYEQVMDAYHVALKEGYRFGTYGDAMLILDK

SEQ ID NO: 64046 - protein, 406 aa, Bacteroides caecimuri; identical to SEQ ID NO: 64043
  misc_feature (1)..(406): tr|A0A4S2DFS4|A0A4S2DFS4_9BACE S-adenosylmethionine:tRN A ribosyltransferase-isomerase OS=Bacteroides caecimuri OX=2516958 GN=queA PE=3 SV=1

SEQ ID NO: 64047 - protein, 352 aa, Bacteroides caecimuri
  misc_feature (1)..(352): tr|A0A4S2DGU8|A0A4S2DGU8_9BACE S-adenosylmethionine:tRN A ribosyltransferase-isomerase OS=Bacteroides caecimuri OX=2516958 GN=queA PE=3 SV=1
MKLSQFKFKLPEDKIALHPMKYRDESRLMVLHRKTGKIEHKMFKEVLDYFDDKDVFIFNDTKVFPARLYGNKEKTGARIEVFLLRELNEELRLWDVLVDPARKIRIGNKLYFGPDDSMVAEVIDNTTSRGRTLRFLYDGPHDEFKKALYELGETPLPHSIINRPVEPEDAERFQSIFAKNEGAVTAPTASLHFSRELMKRLEIKGIDFAYITLHAGLGNFRDIDVEDLTKHKMDSEQMFVDEMAVKTVNRAKDNGKNVCAVGTTVMRAIESAVSTDGHLKEFEGWTNKFIFPPYEFTVANAMISNFHMPLSTLLMIVAAFGGYEQVMDAYHVALKEGYRFGTYGDAMLILDK

SEQ ID NO: 64048 - protein, 352 aa, Bacteroides caecimuris; identical to SEQ ID NO: 64047
  misc_feature (1)..(352): tr|A0A1C7H6T8|A0A1C7H6T8_9BACE S-adenosylmethionine:tRN A ribosyltransferase-isomerase OS=Bacteroides caecimuri s OX=1796613 GN=queA PE=3 SV=1

SEQ ID NO: 64049 - protein, 365 aa, Bacteroides caecimuris; identical to SEQ ID NO: 63951
  misc_feature (1)..(365): tr|A0A3A9AZ41|A0A3A9AZ41_9BACE S-adenosylmethionine:tRN A ribosyltransferase-isomerase OS=Bacteroides caecimuri s OX=1796613 GN=queA PE=3 SV=1

SEQ ID NO: 64050 - protein, 352 aa, Bacteroides cellulosilyticus
  misc_feature (1)..(352): tr|R6KIB3|R6KIB3_9BACE S-adenosylmethionine:tRNA ribosy ltransferase-isomerase OS=Bacteroides cellulosilyticus CAG:158 OX=1263038 GN=queA PE=3 SV=1
MKLSQFKFKLPEEKIALHPTKYRDESRLMVLHRKTGEIEHKEFKDVLNYFDDKDVFIFNDTKVFPARLYGNKEKTGARIEVFLLRELNEELRLWDVLVDPARKIRIGNKLYFGDDDSMVAEVIDNTTSRGRTLRFLYDGPHDEFKKALYALGETPLPHSIINRPVEAEDSERFQSIFARNEGAVTAPTASLHFSRELMKRLEIKGIDFAYITLHAGLGNFRDIDVEDLTKHKTDSEQMIVNEEAVGIVNRAKDLNRQVCAVGTTVMRAIESTVSTDGHLKAYEGWTNKFIFPPYDFTVANAMISNFHMPLSTLLMIVAAFGGYDQVMEAYNVALKEGYRFGTYGDAMLITDK

SEQ ID NO: 64051 - protein, 409 aa, Bacteroides cellulosilyticus
  misc_feature (1)..(409): tr|A0A4Q5JEN9|A0A4Q5JEN9_9BACE S-adenosylmethionine:tRN A ribosyltransferase-isomerase OS=Bacteroides cellulosi lyticus OX=246787 GN=queA PE=3 SV=1
MKEDPKHIRISEFNYPLPDERIAKFPLPVRDQSKLLVYRHGEVSEDRFTSLPSYLPTGSLMIFNNTKVIQARLHFRKETGALIEVFCLEPIEPNDYVLNFQQTEHAAWLCMIGNLKKWKEGTLKREMTVKEQPITLTATRGECHGTSHWVDFRWDNPEITFADILEVFGELPIPPYLNRDTQESDKETYQTVYSKIKGSVAAPTAGLHFTPRVLNALKEKGVDLEELTLHVGAGTFKPVKSAEIEGHEMHTEYISVSRGTIENLIVHNGKAIAVGTTSVRTLESLYHIGVTLLKNPNATEEELHVHQWQPYETAEETASITSVKALQAILDYLNRHDMEALHTSTQIIIAPGYDYKIVNTMVTNFHQPQSTLLLLVSAFVKGNWRNIYDFALNHDFRFLSYGDSSLLIP

SEQ ID NO: 64052 - protein, 409 aa, Bacteroides clarus
  misc_feature (1)..(409): tr|A0A1Y3YYG4|A0A1Y3YYG4_9BACE S-adenosylmethionine:tRN A ribosyltransferase-isomerase OS=Bacteroides clarus OX =626929 GN=B5F97_00360 PE=3 SV=1
MKEDPRHIRISEFNYPLPDERIAKFPLPVRDQSKLLLYRHGEVSEDVFTSLPDYLPANSLMIFNNTKVIQARLHFHKKTGALIEVFCLEPIRPNDYALNFQQTEHAAWLCMIGNLKKWKEGTLKREMVVKGKPLTLTAERGACHGTSHWVDFRWNNPEITFADILEVFGELPIPPYLNRETQESDKETYQTVYSKIKGSVAAPTAGLHFTPRVLDALRGKGVEPEELTLHVGAGTFKPVKSEEIEGHEMHTEYISVNRSTLEKLVAHEGKAIAVGTTSVRTLESLYHIGVTLLNNPDATEEDLHVKQWQPYEMTPETAATPAVDALRAIIAYLDRHHMETLHTSTQIIIAPGYEYRIVKAMVTNFHQPQSTLLLLVSAFLHGDWRKIYDYALAHDFRFLSYGDSSLLIP

SEQ ID NO: 64053 - protein, 352 aa, Bacteroides clarus
  misc_feature (1)..(352): tr|A0A1Y4JXC3|A0A1Y4JXC3_9BACE S-adenosylmethionine:tRN A ribosyltransferase-isomerase OS=Bacteroides clarus OX =626929 GN=queA PE=3 SV=1
MKLSQFKFKLPEEKIALHPTRYRDESRLMVLHRKTGEIEHRMFKDILEYFDDKDVFIFNDTKVFPARLYGNKEKTGARIEVFLLRELNEELRLWDVLVDPARKIRIGNKLYFGEDDSMVAEVIDNTTSRGRTLRFLYDGPHDEFKKALYALGETPLPHSIINRPVEPEDSERFQSIFARNEGAVTAPTASLHFSRELMKRMEIKGIDFAYITLHAGLGNFRDIDVEDLTKHKTDSEQMIVTEDAVKVVNRAKDLNRQVCAVGTTVMRAIESTVSTDGHLKEYEGWTNKFIFPPYDFTVANAMVSNFHMPLSTLLMIVAAFGGYEQVMEAYNVALKEDYRFGTYGDAMLITDK

SEQ ID NO: 64054 - protein, 405 aa, Bacteroides coprocola
  misc_feature (1)..(405): tr|A0A412GC95|A0A412GC95_9BACE S-adenosylmethionine:tRN A ribosyltransferase-isomerase OS=Bacteroides coprocola OX=310298 GN=queA PE=3 SV=1
MTETKHIKISDYNYPLPDERIAKFPLPVRDQSKLLVYRHGEVSETVFTSLPDYMEPGMLMVFNNTKVIQARLHFRKETGALIEIFCLEPIQPNDYVLNFQQTHHAAWLCMIGNLKKWKEGPLHKEMTVKGKTITLTATRGECHGTSHWVDFTWDNPEVTFADILEVFGELPIPPYLNRETQESDKETYQTVYSKIKGSVAAPTAGLHFTERVLASLKEKGVDLEEVTLHVGAGTFKPVKSEEIEGHEMHTEYISVNKSTIEKLIAHRGEAVAVGTTSVRTLESLYYIGVTISQNPDASQEELHVKQWQPYESDVTLSTIESLQCILDYMNRHNLDALHTSTQIIIAPGYEYKIVKRMVTNFHQPQSTLLLLVSAFVKGDWHKIYDYALAHDFRFLSYGDSSLLIP

SEQ ID NO: 64055 - protein, 405 aa, Bacteroides coprocola; identical to SEQ ID NO: 64054
  misc_feature (1)..(405): tr|R6CLY3|R6CLY3_9BACE S-adenosylmethionine:tRNA ribosy ltransferase-isomerase OS=Bacteroides coprocola CAG:162 OX=1263040 GN=queA PE=3 SV=1

SEQ ID NO: 64056 - protein, 351 aa, Bacteroides coprophilus
  misc_feature (1)..(351): tr|R6SFR7|R6SFR7_9BACE S-adenosylmethionine:tRNA ribosy ltransferase-isomerase OS=Bacteroides coprophilus CAG:3 33 OX=1263041 GN=queA PE=3 SV=1
MKLSQFKFKLPEEKIALHPAKYRDESRLMVVHKSTGEIEHVMFKDILNYFDDKDVFIFNDTKVFPARLYGNKEKTGARIEVFLLRELNEELRLWDVLVDPARKIRIGNKLYFGDDDSMVAEVIDNTTSRGRTLRFLYDGPHDEFKKALYALGEPPLPPFIHRPAEPEDEERFQTIFAKNEGAVTVPAAGLHFSRELMKRMEIKGIDFAFITMHCGLGNFRDIDVEDLTKHKMDSEQMFVNAEACRIVNEAKDRGNKVCAVGTTVMRTIETAVGTDGHLKEFEGWTNKFIFPPYDFSVANAMVSNFQMPLSTMLMLKCAYGGYELIMDAYNIALKENYRFGTYGDAMLILDK

SEQ ID NO: 64057 - protein, 351 aa, Bacteroides coprophilus; identical to SEQ ID NO: 64056
  misc_feature (1)..(351): tr|S0F478|S0F478_9BACE S-adenosylmethionine:tRNA ribosy ltransferase-isomerase OS=Bacteroides coprophilus DSM 1 8228 = JCM 13818 OX=547042 GN=queA PE=3 SV=1

SEQ ID NO: 64058 - protein, 360 aa, Bacteroides coprosuis
  misc_feature (1)..(360): tr|F3ZQS5|F3ZQS5_9BACE S-adenosylmethionine:tRNA ribosy ltransferase-isomerase OS=Bacteroides coprosuis DSM 180 11 OX=679937 GN=queA PE=3 SV=1
MKLSQFKFNLPKEKIALHPTKFRDDSRLMVLHKKTGEIEHKAFKDILDYFDDKDVFIFNNTKVFPARLYGNKEKTGARIEVFLLRELNAEQRLWDVLVDPARKIRIGNKLYFGEDESMVAEVIDNTTSRGRTLRFLYDGDESDDEETKHRKFKEELYALGETPLPREMIDREVEPEDEERFQSIFAEVEGAVTAPSANLHFSRELMKRMEIKGIEKAFITLHAGLGNFREIDVEDLTKHKVDSEQIIVAEPAVDIVNQAKETRNNICAIGTTVMRAIETTVTTDGLLKEYEGWTNKFIFPPYEFHVANHLVSNFHLPYSTQLMLVAAFGGYDFVMNAYQVAMDEGYRFGTYGDAMLIIDK

SEQ ID NO: 64059 - protein, 405 aa, Bacteroides dorei
  misc_feature (1)..(405): tr|A0A5C6LG30|A0A5C6LG30_9BACE S-adenosylmethionine:tRN A ribosyltransferase-isomerase OS=Bacteroides dorei OX= 357276 GN=queA PE=3 SV=1
MEDTKHIKISEFNYPLPDERIAKFPLATRDQSKLLVYRHGEVSEDIFTSLPHYLESGELMIFNNTKVIQARLHFRKETGALIEVFCLEPVQPNDYVLNFQQTRQCSWLCMIGNLKKWKEGTLSRIVNVKGKQIVLSATRGECKGTSHWIDFSWDDDTITFADLLEVAGELPIPPYLNRETQESDKETYQTVYSKIKGSVAAPTAGLHFTERVLAALDERGIDREELTLHVGAGTFKPVKSEEIEGHEMHTEYISVSKHTIEKLIAHHGEAIAVGTTSVRTLESLYYIGVLISHNPDATQDELHVQQWMPYEDKNDLTPVEALQQILDYLNRHEMEALHSSTQIIIAPGYTYKIVKKMVTNFHQPQSTLLLLVSAFVKGNWRRIYDYALGHDFRFLSYGDSSLLIP

SEQ ID NO: 64060 - protein, 351 aa, Bacteroides dorei
  misc_feature (1)..(351): tr|A0A412ZIX9|A0A412ZIX9_9BACE S-adenosylmethionine:tRN A ribosyltransferase-isomerase OS=Bacteroides dorei OX= 357276 GN=queA PE=3 SV=1
MKLSQFKFKLPEDKIALHPAKYRDESRLMVVHKSTGKIEHKVFKDILDYFDDKDVFIFNDTKVFPARLYGNKEKTGARIEVFLLRELNEELRLWDVLVDPARKIRIGNKLYFGDDDSMVAEVIDNTTSRGRTLRFLYDGSHDEFKKALYALGEAPLPSFIRRPVEEEDAERFQTIFAKNEGAVTAPTAGLHFSRELMKRMEIKGIDFAFVTMHAGLGNFREIDVEDLTKHKMDSEQMYVNADACRIVNNAKDEGKNICAVGTTVMRTIETAVGTDGHLKEFDGWTNKFIFPPYDFSVANSMVTNFHLPLSTLLMLVAAYGGYDLVMEAYHTALKEDYRFGTYGDAMLILDK

SEQ ID NO: 64061 - protein, 409 aa, Bacteroides eggerthii
  misc_feature (1)..(409): tr|A0A414MEE9|A0A414MEE9_9BACE S-adenosylmethionine:tRN A ribosyltransferase-isomerase OS=Bacteroides eggerthii OX=28111 GN=DW701_07335 PE=3 SV=1
MKEDPRHIRISEFNYLLPDERIAKFPLPVRDQSKLLLYRHGEVFEDVFTSLPDYLPADSLMIFNNTKVIQARLHFHKETGALIEVFCLEPIRPNDYALNFQQTEHAAWLCMIGNLKKWKEGVLKREMVVKGKPLTLTAERGACHGTSHWVDFRWNNPEITFADILEVFGELPIPPYLNRETQESDKETYQTVYSKIKGSVAAPTAGLHFTPRVLDALRKKGVELEELTLHVGAGTFKPVKSEEIEGHEMHTEYISVSRNTLEKLIAHEGKAVAVGTTSVRTLESLYHIGVTLLNSPDATEEELHVKQWQPYELTPEMASVSPVDALQAIVAYLNRHNMETLHTSTQIIIAPGYEYKIVKAIVTNFHQPQSTLLLLVSAFLRGDWRKIYDYALAHDFRFLSYGDSSLLIP

SEQ ID NO: 64062 - protein, 352 aa, Bacteroides eggerthii
  misc_feature (1)..(352): tr|A0A380Z878|A0A380Z878_9BACE S-adenosylmethionine:tRN A ribosyltransferase-isomerase OS=Bacteroides eggerthii OX=28111 GN=queA_2 PE=3 SV=1
MKLSQFKFKLPEEKIALHPTRYRDESRLMVLHRKTGEIEHRMFKDILEYFDDKDVFIFNDTKVFPARLYGNKEKTGARIEVFLLRELNEELRLWDVLVDPARKIRIGNKLYFGEDDSMVAEVIDNTTSRGRTLRFLYDGPHDEFKKALYALGETPLPHSIINRPVEPEDSERFQSIFARNEGAVTAPTASLHFSRELMKRMEIKGIDFAYITLHAGLGNFRDIDVEDLTKHKTDSEQMIVTEEAVKIVNRAKDVNRQVCAVGTTVMRAIESTVSTDGHLKEYEGWTNKFIFPPYDFTVANAMVSNFHMPLSTLLMIVAAFGGYEQVMEAYNVALKEDYRFGTYGDAMLITDK

SEQ ID NO: 64063 - protein, 352 aa, Bacteroides faecichinchillae
  misc_feature (1)..(352): tr|A0A1M5DE49|A0A1M5DE49_9BACE S-adenosylmethionine:tRN A ribosyltransferase-isomerase OS=Bacteroides faecichin chillae OX=871325 GN=queA PE=3 SV=1
MKLSQFKFKLPEDKIALHPTKYRDESRLMVLHRRTGEIEHKMFKDVLNYFDDKDVFIFNDTKVFPARLYGNKEKTGARIEVFLLRELNEELRLWDVLVDPARKIRIGNKLYFGEDDSMVAEVIDNTTSRGRTLRFLYDGPHDEFKKALYALGETPLPHSIINRPVEPEDAERFQSIFAKNEGAVTAPTASLHFSRELLKRLEIKGIDFAYITLHAGLGNFRDIDVEDLTKHKMDSEQMLVDEKAVNMVNSAKDNGKSVCAVGTTVMRAIESAVSTDGHLKEFEGWTNKFIFPPYDFTVANSMISNFHMPLSTLLMIVAAFGGYDQVMDAYHVALKEGYRFGTYGDAMLILDK

SEQ ID NO: 64064 - protein, 415 aa, Bacteroides faecichinchillae
  misc_feature (1)..(415): tr|A0A1M4UV57|A0A1M4UV57_9BACE S-adenosylmethionine:tRN A ribosyltransferase-isomerase OS=Bacteroides faecichin chillae OX=871325 GN=queA PE=3 SV=1
MQPFLATKKMKENPKHIRISEYNYPLPDKRIAKFPLPVRDQSKLLVYRHGEVSENTFTSLPDFLPQGSLMIFNNTKVIQARLHFRKETGALIEVFCLEPIEPNDYVLNFQQTEHVAWLCMIGNLKKWKDGALKRKMTVKGFPITLIATRGECKGTSHWINFSWDNPEVTFADILEVFGELPIPPYLNRDTQESDKETYQTVYSKIKGSVAAPTAGLHFTPHVLNALKEKGIELEELTLHVGAGTFKPVKSEEIEGHEMHTEYISVNRDTIKKLIEHNACAIAVGTTSVRTLESLYHIGVTLADNPDATEEELHVKQWQPYEKYNEIPAVVALQKILGYLDRHGMEALHSSTQIIIAPGYNYKIVKAIVTNFHQPQSTLLLLVSAFVKGDWRTIYDYALNHDFRFLSYGDSSLLIP

SEQ ID NO: 64065 - protein, 406 aa, Bacteroides faecis
  misc_feature (1)..(406): tr|A0A1H2QE07|A0A1H2QE07_9BACE S-adenosylmethionine:tRN A ribosyltransferase-isomerase OS=Bacteroides faecis MA J27 OX=1077285 GN=queA PE=3 SV=1
MKEDPRHIHISEYNYPLPDERIAKFPLTVRDQSKLLVYRHGEVTEDVFTSLPDYLPKGSLMVFNNTKVIQARLHFRKETGALIEVFCLEPIQPNDYVLNFQQTEHAAWLCMIGNLKKWKDGALKREMTVKGFTITLTATRGECRGTSHWIDFSWNNPEVTFADILEVFGELPIPPYLNRDTEESDKETYQTVYSKIKGSVAAPTAGLHFTPRVLEALQEKGIDLEELTLHVGAGTFKPVKSEEIEGHEMHTEYISVNRATIKKLIDHDGCAVAVGTTSVRTLESLYHIGVTLAENPDATEEELHVRQWQPYEKYDQIPPVVALQKILGYLDRNGLEALHSSTQIIIAPGYQYKIVKAMVTNFHQPQSTLLLLVSAFVKGNWRTIYDYALSHDFRFLSYGDSSLLIP

SEQ ID NO: 64066 - protein, 406 aa, Bacteroides faecis; identical to SEQ ID NO: 64065
  misc_feature (1)..(406): tr|R6VBF7|R6VBF7_9BACE S-adenosylmethionine:tRNA ribosy ltransferase-isomerase OS=Bacteroides faecis CAG:32 OX= 1263044 GN=queA PE=3 SV=1

SEQ ID NO: 64067 - protein, 406 aa, Bacteroides finegoldii
  misc_feature (1)..(406): tr|C9KSU3|C9KSU3_9BACE S-adenosylmethionine:tRNA ribosy ltransferase-isomerase OS=Bacteroides finegoldii DSM 17 565 OX=483215 GN=queA PE=3 SV=1
MKEDPKHIRISEYNYPLPDERIAKFPLPVRDQSKLLIYRHGEVNEDIFTSLPDYLPKGSLMIFNNTKVIQARLHFRKETGALIEVFCLEPIQPNDYVLNFQQTEHAAWLCMIGNLKKWKDGELKREMTVKGFPITLTATRGECRGTSHWVDFTWNNAEVTFADILEVFGELPIPPYLNRNTEESDKETYQTVYSKIKGSVAAPTAGLHFTPQVLDALQEKGIELEELTLHVGAGTFKPVKSEEIEGHEMHTEYISVNRSTIKKLIDHDGCAVAVGTTSVRTLESLYHIGVTLAENPDATEEELHVRQWQPYEKYDQIPPVVALQKILGYLDRHGMETLHTSTQIIIAPGYDYKIVKAMVTNFHQPQSTLLLLVSAFVKGNWRTIYDYALSHDFRFLSYGDSSLLIP

SEQ ID NO: 64068 - protein, 406 aa, Bacteroides finegoldii
  misc_feature (1)..(406): tr|K5BSS7|K5BSS7_9BACE S-adenosylmethionine:tRNA ribosy ltransferase-isomerase OS=Bacteroides finegoldii CL09T0 3C10 OX=997888 GN=queA PE=3 SV=1
MKEDPKHIRISEYNYPLPDERIAKFPLPVRDQSKLLIYRHGEVNEDIFTSLPDYLPKGSLMIFNNTKVIQARLHFRKETGALIEVFCLEPIQPNDYVLNFQQTEHAAWLCMIGNLKKWKDGELKREMTVKGFPITLTATRGECRGTSHWVDFTWNNAEVTFADILEVFGELPIPPYLNRDTEESDKETYQTVYSKIKGSVAAPTAGLHFTPQVLDALQEKGIELEELTLHVGAGTFKPVKSEEIEGHEMHTEYISVNRSTIKKLIDHDGCAVAVGTTSVRTLESLYHIGVTLAENPDATEEELHVRQWQPYEKYDQIPPVVALQKILGYLDRHGMETLHTSTQIIIAPGYDYKIVKAMVTNFHQPQSTLLLLVSAFVKGNWRTIYDYALSHDFRFLSYGDSSLLIP

SEQ ID NO: 64069 - protein, 352 aa, Bacteroides fluxus
  misc_feature (1)..(352): tr|F3PV14|F3PV14_9BACE S-adenosylmethionine:tRNA ribosy ltransferase-isomerase OS=Bacteroides fluxus YIT 12057 OX=763034 GN=queA PE=3 SV=1
MKLSQFKFKLPEEKIALHPAKYRDESRLLVLHRKTGEIEHRMFKDILDYFDDKDVFVFNDTKVFPARLYGNKEKTGARIEVFLLRELNEELRLWDVLVDPARKIRIGNKLYFGDDDSMVAEVIDNTTSRGRTLRFLYDGPHDEFKKALYALGETPLPHSIVNRPVEPEDSERFQSIFARNEGAVTAPTASLHFSRELMKRMEIKGIDFAYITLHAGLGNFRDIDVEDLTKHKTDSEQMIVNSEAVKIVNHAKDINKQVCAVGTTVMRAIESTVSTDGHLKEYEGWTNKFIFPPYDFTVANAMVSNFHMPLSTLLMIVAAFGGYEQVMEAYNVALKEDYRFGTYGDAMLITDR

SEQ ID NO: 64070 - protein, 409 aa, Bacteroides fluxus
  misc_feature (1)..(409): tr|F3PNA3|F3PNA3_9BACE S-adenosylmethionine:tRNA ribosy ltransferase-isomerase OS=Bacteroides fluxus YIT 12057 OX=763034 GN=queA PE=3 SV=1
MKQDPKHIHISEFNYPLPDKRIAKFPLPLRDQSKLLIYRHGEVSEDVFTSLPGYLSSGSLMIFNNTKVIQARLHFRKETGALIEVFCLEPIQPNDYVLNFQQTEHAAWLCMIGNLKKWKEGVLIREMTVKGKPLTLTAERGECRGTSHWVDFRWNNPEITFADILEVFGELPIPPYLNRETQESDKETYQTVYSKIKGSVAAPTAGLHFTPRVLDALKEKGVDLEELTLHVGAGTFKPVKSEEIEGHEMHTEYISVTRNTLKKLIAHEGKAIAVGTTSVRTLESLYHIGVTLYNTPDATEEELHVRQWQPYEMTGESTAIPATDALQAILRYLDRHGMETLHTSTQIIIAPGYEYRIVKAMVTNFHQPQSTLLLLVSAFVHGDWKKIYDYALGHDFRFLSYGDSSLLIP

SEQ ID NO: 64071 - protein, 407 aa, Bacteroides fragilis
  misc_feature (1)..(407): tr|I9ATJ1|I9ATJ1_BACFG S-adenosylmethionine:tRNA ribosy ltransferase-isomerase OS=Bacteroides fragilis CL05T12C 13 OX=997881 GN=HMPREF1080_03777 PE=3 SV=1
MMKENPKHIRISEYNYPLPDERIAKFPLPVRDQSKLLIYRHGEVSEDVFTSLPEYLPAGSLMIFNNTKVIQARLHFRKETGALIEVFCLEPIQPNDYVLNFQQTEHAAWLCMVGNLKKWKDGPLCREMTVKGFPITLTATRGECRGTSHWIDFRWDNPEVTFADILEVFGELPIPPYLNRDTEESDKETYQTVYSKIKGSVAAPTAGLHFTPRVLDALTEKGIDLEELTLHVGAGTFKPVKSEEIEGHEMHTEYISVSRSIIKKLIDHDACAIAVGTTSVRTLESLYHIGVTLANNPEATEEQLHVKQWQPYETECDVRPVVALQKILGYLDRHGMEALHTSTQIIIAPGYDYKIVKAMVTNFHQPQSTLLLLVSAFVKGNWHTIYDYALGHDFRFLSYGDSSLLIP

SEQ ID NO: 64072 - protein, 352 aa, Bacteroides fragilis
  misc_feature (1)..(352): sp|Q5LJ28|QUEA_BACFN S-adenosylmethionine:tRNA ribosylt ransferase-isomerase OS=Bacteroides fragilis (strain AT CC 25285 / DSM 2151 / JCM 11019 / NCTC 9343) OX=272559 GN=queA PE=3 SV=1
MKLSQFKFKLPEEKIALHPTKYRDESRLMVLHKRTGEIEHKMFKDILNYFDDKDVFVFNDTKVFPARLYGNKEKTGARIEVFLLRELNEELRLWDVLVDPARKIRIGNKLYFGDDDSMVAEVIDNTTSRGRTLRFLYDGPHDEFKKALYALGETPLPHTILNRPVEEEDAERFQSIFAKNEGAVTAPTASLHFSRELMKRMEIKGIDFAYITLHAGLGNFRDIDVEDLTKHKMDSEQMFVTEEAVKIVNRAKDLGKNVCAVGTTVMRAIESTVSTDGHLKEYEGWTNKFIFPPYDFTVANAMVSNFHMPLSTLLMIVAAFGGYDQVMDAYHIALKEGYRFGTYGDAMLILDK

SEQ ID NO: 64073 - protein, 408 aa, Bacteroides graminisolvens
  misc_feature (1)..(408): tr|A0A069D1L3|A0A069D1L3_9BACE S-adenosylmethionine:tRN A ribosyltransferase-isomerase OS=Bacteroides graminiso lvens DSM 19988 = JCM 15093 OX=1121097 GN=queA PE=3 SV= 1
MQENPKHIKISEYNYSLPEERIAKYPLTVRDESKLLIYNRGEITQDHFLSLPNYIDSNDLMIFNNTKVIQARLHFRKETGALIEIFCLEPISPNDYVLNFQQTEHAAWLCMIGNLKKWKEGVLHKTIIVKGTEMMLTATRGANHGTSHWVDFKWNNPGITFADILEEFGELPIPPYLNRETEEKDKETYQTVYSKIKGSVAAPTAGLHFTPRVFEALANKKIECEELTLHVGAGTFKPVKSEEIEGHEMHTEYISVSRTTLKKLIEHHGKAIAVGTTSVRTLESLYHIGVKLYNNPNAQEEELHVQQWQPYNKNSEENISATEALQCIVDYLDKHQMEALHSSTQIIIAPGYNYRIVKAMVTNFHQPQSTLLLLVSAFVKGNWKAIYNYALKNEFRFLSYGDSSLLIP

SEQ ID NO: 64074 - protein, 351 aa, Bacteroides graminisolvens
  misc_feature (1)..(351): tr|A0A351M532|A0A351M532_9BACE S-adenosylmethionine:tRN A ribosyltransferase-isomerase OS=Bacteroides graminiso lvens OX=477666 GN=queA PE=3 SV=1
MKLSQFKFKLPEEKIALYPAKYRDESRLMVLHKTTGEIEHKVFKDILGYFDDKDVFIFNDTKVFPARLYGNKEKTGARIEVFLLRELNEELRLWDVLVDPARKIRIGNKLYFGEDDSMVAEVIDNTTSRGRTLRFLYDGPHEEFKKALYALGETPLPHTIIKRPVEEEDAERFQSIFARKEGAVTAPTANLHFSRELMKRLEIKGIDFAFVTMHAGLGNFRDIDVEDLTKHKMDSEQMQVGEDAVSRVNRAKDEGRRVCAVGTTVMRAVESAVSTDGHLKVFEGWTNKFIFPPYDFTVANSMVSNFHMPLSTLLMIVAAFGGYDQVMEAYHVALKEDYRFGTYGDAMLIID

SEQ ID NO: 64075 - protein, 409 aa, Bacteroides helcogenes
  misc_feature (1)..(409): tr|E6SR65|E6SR65_BACT6 S-adenosylmethionine:tRNA ribosy ltransferase-isomerase OS=Bacteroides helcogenes (strai n ATCC 35417 / DSM 20613 / JCM 6297 / P 36-108) OX=6939 79 GN=queA PE=3 SV=1
MEQNPKHIHISEFNYPLPDERIAKFPLSVRDQSKLLIYRHGNVSEDTFTSLPEYLTAGSLMIFNNTKVIQARLHFRKDTGALIEVFCLEPIEPNDYALNFQQTEHAAWLCMIGNLKKWKEGVLKREMEVKGKMITLTAERGECHGTSHWVDFRWDNPEVTFADILEVFGELPIPPYLNRETQESDKETYQTVYSKIKGSVAAPTAGLHFTPQVLDALRDKGIETEELTLHVGAGTFKPVKSEEIEGHEMHTEYISVSRNTLKRLIAHEGKAIAVGTTSVRTLESLYHIGVTLLNNPDAKETDLHVKQWQPYEIPAEATPILATDALQAIIRYLDRHDMETLHTSTQIIIAPGYEYRIVKAMVTNFHQPQSTLLLLVSAFVHGDWRKVYNYALEHNFRFLSYGDSSLLIP

SEQ ID NO: 64076 - protein, 352 aa, Bacteroides helcogenes
  misc_feature (1)..(352): tr|E6SNV5|E6SNV5_BACT6 S-adenosylmethionine:tRNA ribosy ltransferase-isomerase OS=Bacteroides helcogenes (strai n ATCC 35417 / DSM 20613 / JCM 6297 / P 36-108) OX=6939 79 GN=queA PE=3 SV=1
MKLSQFKFKLPEEKIALHPTKYRDESRLMVLHRKTGEIEHRMFKDILDYFDDKDVFIFNDTKVFPARLYGNKEKTGARIEVFLLRELNEELRLWDVLVDPARKIRIGNKLYFGDDDSMVAEVIDNTTSRGRTLRFLYDGPHDEFKKALYALGETPLPHGIINRPVEAEDAERFQSIFARNEGAVTAPTASLHFSRELMKRMEIKGIDFAYVTLHAGLGNFRDIDVEDLTKHKTDSEQMTVSAEAVKVVNRAKDFNRQVCAVGTTVIRAIESTVSTDGHLKEYVGWTNKFIFPPYDFTVANAMVSNFHMPLSTLLMIVAAFGGYDQVMNAYDIALKEEYRFGTYGDAMLITDR

SEQ ID NO: 64077 - protein, 409 aa, Bacteroides heparinolyticus
  misc_feature (1)..(409): tr|A0A4R2LMQ8|A0A4R2LMQ8_9BACE S-adenosylmethionine:tRN A ribosyltransferase-isomerase OS=Bacteroides heparinol yticus OX=28113 GN=queA PE=3 SV=1
MEQNPKHIHISEFNYVLPDDRIAKFPLPVRDRSKLLIYHHGEISEDTFTSLPDYLPTGSLMIFNNTKVIQARLHFRKETGALIEVFCLEPVQPNDYALNFQQTEHAAWLCMVGNLKKWKEGTLKREMTVKGKTIILTAERGECRGTSHWVDFRWNNPEVTFADILEVFGELPIPPYLNRETQESDKETYQTVYSKIKGSVAAPTAGLHFTPRVLYTLRNKGIETEELTLHVGAGTFKPVKSEEIEGHEMHTEYISVSRGTLEKLIAHGGKAIAVGTTSVRTLESLYHIGITLLNNPEATEEELHVKQWQPYEMSGATASIPATDALQALAAYLERHHMETLHTSTQIIIAPGYEYRIVKAMVTNFHQPQSTLLLLVSAFVHGDWHKIYDYALNHDFRFLSYGDSSLLIP

SEQ ID NO: 64078 - protein, 352 aa, Bacteroides heparinolyticus
  misc_feature (1)..(352): tr|A0A449I287|A0A449I287_9BACE S-adenosylmethionine:tRN A ribosyltransferase-isomerase OS=Bacteroides heparinol yticus OX=28113 GN=queA_2 PE=3 SV=1
MKLSQFKFKLPEEKIALHPTKYRDESRLMVLHRKTGKIEHKTFKDILNYFDDKDVFVFNDTKVFPARLYGNKEKTGARIEVFLLRELNEELRLWDVLVDPARKIRIGNKLYFGEDDSMVAEVIDNTTSRGRTLRFLYDGPHDEFKKALYALGETPLPHSIINRPVEAEDAERFQSIFARNEGAVTAPTASLHFSRELMKRLEIKGIDFAYITLHAGLGNFRDIDVEDLTKHKTDSEQMIVNEEAVKTVNRAKDLNKQVCAVGTTVMRAIESTVSTDGHLKAYEGWTNKFIFPPYDFTVANAMVSNFHMPLSTLLMIVAAFGGYDQVMEAYDVALKEGYRFGTYGDAMLITDR

SEQ ID NO: 64079 - protein, 352 aa, Bacteroides intestinalis
  misc_feature (1)..(352): tr|R7DWM3|R7DWM3_9BACE S-adenosylmethionine:tRNA ribosy ltransferase-isomerase OS=Bacteroides intestinalis CAG: 315 OX=1263048 GN=queA PE=3 SV=1
MKLSQFKFKLPEEKIALHPTKYRDESRLMVLHRKTGEIEHKEFKDVLNYFDDKDVFIFNDTKVFPARLYGNKEKTGARIEVFLLRELNEELRLWDVLVDPARKIRIGNKLYFGDDDSMVAEVIDNTTSRGRTLRFLYDGPHDEFKKALYALGETPLPHSIINRPVEPDDSERFQSIFARNEGAVTAPTASLHFSRELMKRLEIKGIDFAYITLHAGLGNFRDIDVEDLTKHKTDSEQMIVNEEAVNVVNRAKDLNRQVCAVGTTVMRAIESTVSTDGHLKPYEGWTNKFIFPPYDFTVANAMISNFHMPLSTLLMIVAAFGGYDQVMEAYNVALKEGYRFGTYGDAMLITDK

SEQ ID NO: 64080 - protein, 352 aa, Bacteroides intestinalis
  misc_feature (1)..(352): tr|A0A3E4L303|A0A3E4L303_9BACE S-adenosylmethionine:tRN A ribosyltransferase-isomerase OS=Bacteroides intestina lis OX=329854 GN=queA PE=3 SV=1
MKLSQFKFKLPEEKIALHPTKYRDESRLMVLHRKTGEIEHKEFKDVLNYFDDKDVFIFNDTKVFPARLYGNKEKTGARIEVFLLRELNEELRLWDVLVDPARKIRIGNKLYFGDDDSMVAEVIDNTTSRGRTLRFLYDGPHDEFKKALYALGETPLPHSIINRPVEPDDSERFQSIFARNEGAVTAPTASLHFSRELMKRLEIKGIDFAYITLHAGLGNFRDIDVEDLTKHKTDSEQMVVNEEAVSIVNRAKDMNRQVCAVGTTVMRAIESTVSTDGHLKPYEGWTNKFIFPPYDFTVANAMISNFHMPLSTLLMIVAAFGGYDQVMEAYNVALKEGYRFGTYGDAMLITDK

SEQ ID NO: 64081 - protein, 351 aa, Bacteroides luti
  misc_feature (1)..(351): tr|A0A1M4YVT7|A0A1M4YVT7_9BACE S-adenosylmethionine:tRN A ribosyltransferase-isomerase OS=Bacteroides luti OX=1 297750 GN=queA PE=3 SV=1
MKLSQFKFKLPEDKIALHPTRYRDESRLMVLHKKTGEIEHRVFKDILDYFDDKDVFIFNDTKVFPARLYGNKEKTGARIEVFLLRELNEELRLWDVLVDPARKIRIGNKLYFGEDDSMVAEVIDNTTSRGRTLRFLYDGPHEEFKKALYALGETPLPHTIINRPVEADDEERFQSIFAKNEGAVTAPTASLHFSRELMKRMEIKGIDFAFITMHAGLGNFRDIDVEDLTKHKMDSEQMFVSEKAVNIVNKAKDANRNICAVGTTVMRAIESTVSTDGHLKTFEGWTNKFIFPPYEFTVANSMISNFHMPLSTLLMIVAAFGGYDLVMDAYQVALKEGYRFGTYGDAMLIID

SEQ ID NO: 64082 - protein, 405 aa, Bacteroides luti
  misc_feature (1)..(405): tr|A0A1M4XIA2|A0A1M4XIA2_9BACE S-adenosylmethionine:tRN A ribosyltransferase-isomerase OS=Bacteroides luti OX=1 297750 GN=queA PE=3 SV=1
MEETKHIKISEFNYPLPDERIAKFPLPVRDQSKLLVYKHGNVSETIFTSLPELIPAGSLMIFNNTKVIQARLHFRKETGALIEVFCLEPIAPNDYVLSFQQTERCSWLCMIGNLKKWKEGSLTREIVVKGMPVVLKATRGECRGTSHWIYFSWNNKEVTFAEILEVVGELPIPPYLNRETQESDKETYQTVYSKIDGSVAAPTAGLHFTEGVMQDLEKRGVELEELTLHVGAGTFRPVKSEEIADHEMHTEFISVTRKTIERLIAHQGRAVAVGTTSVRTLESLYHMGVTLSRHPDATEKELHVNQWQPYKFLPDLTAVEALEHILAYMNRNGLEVLHSSTQIIIAPGYEYHIVKAIVTNFHQPQSTLLLLVSAFVHGDWKKIYDYALSHDFRFLSYGDSSLLIP

SEQ ID NO: 64083 - protein, 351 aa, Bacteroides massiliensis
  misc_feature (1)..(351): tr|U6R9K4|U6R9K4_9BACE S-adenosylmethionine:tRNA ribosy ltransferase-isomerase OS=Bacteroides massiliensis B846 34 = Timone 84634 = DSM 17679 = JCM 13223 OX=1121098 GN =queA PE=3 SV=1
MKLSQFKFKLPEEKIALHPAKYRDESRLMVVHKSTGQIEHKVFKDILEYFDDKDVFIFNDTKVFPARLYGNKEKTGARIEVFLLRELNEELRLWDVLVDPARKIRIGNKLYFGDDDSMVAEVIDNTTSRGRTLRFLYDGPHDEFKKALYALGEAPLPSFIRRPVEEEDAERFQTIFAKNEGAVTAPTAGLHFSRELMKRMEIKGIDFAYVTMHAGLGNFREIDVEDLTKHKMDSEQMFVDAKACNIVNQAKDENRRVCAVGTTVMRAIETAVGTDGHLKEFEGWTNKFIFPPYDFSVANSMVTNFHMPLSTLLMLVAAYGGYDLVMEAYNTALKEDYRFGTYGDAMLILDK

SEQ ID NO: 64084 - protein, 422 aa, Bacteroides massiliensis
  misc_feature (1)..(422): tr|U6RGY2|U6RGY2_9BACE S-adenosylmethionine:tRNA ribosy ltransferase-isomerase OS=Bacteroides massiliensis B846 34 = Timone 84634 = DSM 17679 = JCM 13223 OX=1121098 GN =queA PE=3 SV=1
MYRANIGTFAQIMKRNQMEDTKHIKISEYNYPLPDERIAKFPLAVRDQSKLLVYRHGEVSEDTFTALPEYLEQGELMIFNNTKVIQARLHFRKETGALIEVFCLEPIQPNDYVLSFQQTKKCSWLCMIGNLKKWKEGALSRMVDVKGKQVTLTATRGECRGTSHWVDFEWNDDSITFADLLEVVGELPIPPYLNRDTQESDKETYQTVYSKIKGSVAAPTAGLHFTERVLQALDAHGIDREELTLHVGAGTFKPVKSEEIEGHEMHTEYISVNKRTIEKLIAHGGHAIAVGTTSVRTLESLYYIGVAISRNPDANQEELHVQQWMPYEEKNGIGTIQALQHILDYLNRHHMETLHTSTQIIIAPGYEYKIVKKMVTNFHQPQSTLLLLVSAFVKGDWRKIYDYALEHDFRFLSYGDSSLLIP

SEQ ID NO: 64085 - protein, 351 aa, Bacteroides nordii
  misc_feature (1)..(351): tr|A0A413VSE0|A0A413VSE0_9BACE S-adenosylmethionine:tRN A ribosyltransferase-isomerase OS=Bacteroides nordii OX =291645 GN=queA PE=3 SV=1
MKLSQFKFKLPEDKIALHPMKYRDESRLMVLHRKTGEIEHKMFKDVLNYFDDKDVFIFNDTKVFPARLYGNKEKTGARIEVFLLRELNEELRLWDVLVDPARKIRIGNKLYFGDDDSMVAEVIDNTTSRGRTLRFLYDGPHDEFKKALYALGETPLPHSIINRPVEEEDAVRFQSIFAKNEGAVTAPTASLHFSRELMKRMEIKGIDFAYITLHAGLGNFRDIDVEDLTKHKMDSEQMFVTGEAVKTVNRAKDLGRNVCAVGTTVMRAIESTVSTDGHLKEYEGWTNKFIFPPYEFTVANAMISNFHMPLSTLLMIVAAFGGYDQVMDAYHVAMKEGYRFGTYGDAMLIID

SEQ ID NO: 64086 - protein, 406 aa, Bacteroides nordii
  misc_feature (1)..(406): tr|A0A413VJV2|A0A413VJV2_9BACE S-adenosylmethionine:tRN A ribosyltransferase-isomerase OS=Bacteroides nordii OX =291645 GN=queA PE=3 SV=1
MKENPKHIRISEYNYPLPDERIAKFPLPVRDHSKLLVYRHGEVTEDVFTSLPEYLTEGSLMVFNNTKVIQARLHFRKETGALIEVFCLEPIQPNDYALNFQQTRHAAWLCMIGNLKKWKEGVLRREMTVKGHTLTLTATRGECHGTSHWIDFSWDNPEVTFADILEVFGELPIPPYLNRETQESDKETYQTVYSKIKGSVAAPTAGLHFTPRVLDALSEKGIDLEELTLHVGAGTFKPVKSEEIEGHEMHTEYISVSRSTIKKLIDHNGCAIAVGTTSVRTLESLYHIGVTLAANPRATEEELHVRQWQPYEKYDEIPSTVALQKILGYLDRNGMEALHTSTQIIIAPGYNYKIVKAMITNFHQPQSTLLLLVSAFVKGNWRTIYDYALDHDFRFLSYGDSSLLIP

SEQ ID NO: 64087 - protein, 352 aa, Bacteroides oleiciplenus
  misc_feature (1)..(352): tr|A0A1Q6G6M2|A0A1Q6G6M2_9BACE S-adenosylmethionine:tRN A ribosyltransferase-isomerase OS=Bacteroides oleiciple nus OX=626931 GN=queA PE=3 SV=1
MKLSQFKFKLPEEKIALHPTKYRDESRLMVLHRKTGEIEHKEFKDVLNYFDDKDVFIFNDTKVFPARLYGNKEKTGARIEVFLLRELNEELRLWDVLVDPARKIRIGNKLYFGDDDSMVAEVIDNTTSRGRTLRFLYDGPHDEFKRALYALGETPLPHSIINRPVEPDDAERFQSIFARNEGAVTAPTASLHFSRELLKRLEIKGIDFAYITLHAGLGNFRDIDVEDLTKHKTDSEQMVVNEEAVSVVNRAKDMNRQVCAVGTTVMRAIESTVSTDGHLKSYEGWTNKFIFPPYDFTVANAMISNFHMPLSTLLMIVAAFGGYDQVMEAYNVALKEGYRFGTYGDAMLITDK

SEQ ID NO: 64088 - protein, 352 aa, Bacteroides oleiciplenus
  misc_feature (1)..(352): tr|A0A3E5B3W9|A0A3E5B3W9_9BACE S-adenosylmethionine:tRN A ribosyltransferase-isomerase OS=Bacteroides oleiciple nus OX=626931 GN=queA PE=3 SV=1
MKLSQFKFKLPEEKIALHPTKYRDESRLMVLHRKTGEIEHKEFKDVLNYFDDKDVFIFNDTKVFPARLYGNKEKTGARIEVFLLRELNEELRLWDVLVDPARKIRIGNKLYFGDDDSMVAEVIDNTTSRGRTLRFLYDGPHDEFKKALYALGETPLPHSIINRPVEPDDSERFQSIFARNEGAVTAPTASLHFSRELLKRLEIKGIDFAYITLHAGLGNFRDIDVEDLTKHKTDSEQMIVNEEAVSIVNRAKDMNRQVCAVGTTVMRAIESTVSTDGHLKSYEGWTNKFIFPPYDFTVANSMISNFHMPLSTLLMIVAAFGGYDQVMEAYNVALKEGYRFGTYGDAMLITDK

SEQ ID NO: 64089 - protein, 352 aa, Bacteroides ovatus
  misc_feature (1)..(352): tr|A7LYJ8|A7LYJ8_BACO1 S-adenosylmethionine:tRNA ribosy ltransferase-isomerase OS=Bacteroides ovatus (strain AT CC 8483 / DSM 1896 / JCM 5824 / NCTC 11153) OX=411476 G N=queA PE=3 SV=1
MKLSQFKFKLPEDKIALHPMKYRDESRLMVLHRNTGKIEHKMFKDVLDYFDDKDVFIFNDTKVFPARLYGNKEKTGARIEVFLLRELNEELRLWDVLVDPARKIRIGNKLYFGPDDSMVAEVIDNTTSRGRTLRFLYDGPHDEFKKALYSLGETPLPHSIINRPVEPEDAERFQSIFAKNEGAVTAPTASLHFSRELMKRLEIKGVDFAYITLHAGLGNFRDIDVEDLTKHKMDSEQMFVNEMAVKTVNRAKDNGRNVCAVGTTVMRAIESAVSTDGHLKEFEGWTNKFIFPPYEFTVANSMISNFHMPLSTLLMIVAAFGGYDQVMDAYHVALKEGYRFGTYGDAMLILDK

SEQ ID NO: 64090 - protein, 406 aa, Bacteroides ovatus
  misc_feature (1)..(406): tr|A0A3E5HWT7|A0A3E5HWT7_BACOV S-adenosylmethionine:tRN A ribosyltransferase-isomerase OS=Bacteroides ovatus OX =28116 GN=DW206_16270 PE=3 SV=1
MKEDPRHIHISEYNYPLPDERIAKFPLPTRDQSKLLIYRRGEVSEDVFTSLPEYLPQGSLMIFNNTKVIQARLHFRKETGALIEVFCLEPIQPNDYVLNFQQTVHAAWLCMIGNLKKWKDGQLKREMTVKGFPITLTATRGECKGTSHWVDFAWNNPEVTFADILEVFGELPIPPYLNRNTEESDKETYQTVYSKIKGSVAAPTAGLHFTPRVLDALQEKGIDLEELTLHVGAGTFKPVKSEEIEGHEMHTEYISVNRSTIKKLIDHDGCAIAVGTTSVRTLESLYHIGVTLAENPYATEEELRVKQWQPYEKYDQIPPVVALQKILGYLDRNGLETLHTSTQIIIAPGYNYKIVKAMVTNFHQPQSTLLLLVSAFVKGNWRTIYDYALAHDFRFLSYGDSSLLIP

SEQ ID NO: 64091 - protein, 344 aa, Bacteroides pectinophilus
  misc_feature (1)..(344): tr|R7B1E9|R7B1E9_9BACE S-adenosylmethionine:tRNA ribosy ltransferase-isomerase OS=Bacteroides pectinophilus CAG :437 OX=1263051 GN=queA PE=3 SV=1
MMELHDFYYDLPQELIAQDPLSDRSASRLMLLDKNTGEIEHKIFKDIIDYLNPGDCLVINDTKVIPARLIGERVGTGATIEVLLLKRKEDMKDVWEVLVKPGKKAKIGTKISFGDGRLVAEVIDIVEEGNRLIQFTYEGIFEEILDELGQMPLPPYITHKLQDKNRYQTVYAKHEGSAAAPTAGLHFTKELLERIQEKGVDIARVTLHVGLGTFRPVKVENIQEHHMHSEYYVVTQEAADKINNAKADGGRVICVGTTSCRTIESASDDDGRVKACSGWTEIFIYPGYKFKVLDALITNFHLPESTLLMLVSALAGREHILAAYKTAVEEKYRFFSFGDAMFIH

SEQ ID NO: 64092 - protein, 405 aa, Bacteroides plebeius
  misc_feature (1)..(405): tr|A0A1Q6GM25|A0A1Q6GM25_9BACE S-adenosylmethionine:tRN A ribosyltransferase-isomerase OS=Bacteroides plebeius OX=310297 GN=queA PE=3 SV=1
MEETKHIKISDYNYPLPDERIAKFPLPVRDQSKLLVYQHGQISETHFTSLPDYLEPGTLMIFNNTKVIQARLHFRKETGALIEIFCLEPIEPNDYVLNFQQTQHAAWLCMIGNLKKWKEGPLHKEMTVKGKPLTLTATRGACHGTSHWIDFTWDNPEVTFADILEFFGELPIPPYLNRETQESDKETYQTVYSKIKGSVAAPTAGLHFTERVLNALKEKGVDLEEVTLHVGAGTFKPVKSEEIEGHEMHTEYISVNRGTIEKLLAHGGEAVAVGTTSVRTLESLYYIGVTLSQHPDASQQELHVQQWQPYETHPELSTTEALQQILDYMDRNQLDALHTSTQIIIAPGYNYHIVKKMVTNFHQPQSTLLLLVSAFVKGNWRPIYDYALAHDFRFLSYGDSSLLIP

SEQ ID NO: 64093 - protein, 351 aa, Bacteroides plebeius
  misc_feature (1)..(351): tr|A0A1Q6GIJ2|A0A1Q6GIJ2_9BACE S-adenosylmethionine:tRN A ribosyltransferase-isomerase OS=Bacteroides plebeius OX=310297 GN=queA PE=3 SV=1
MKLSQFKFKLPEEKIALYPAKYRDESRLMVIHKSTGEIEHVNFKDILNYFDDKDVFIFNDTKVFPARLYGNKEKTGARIEVFLLRELNEELRLWDVLVDPARKIRIGNKLYFGDDDSMVAEVIDNTTSRGRTLRFLYDGPHDEFKKALYALGEPPLPPFIHRPAEPEDEERFQTIYAKNEGAVTVPAAGLHFSRELMKRMEIKGIDFSFITMHAGLGNFRDIDVEDLTKHKMDSEQMFVNAEACRIVNEAKDRGNKVCAIGTTVMRAIETAVGTDGHLKEFEGWTNKFIFPPYDFSVANAMVSNFHMPLSTMLMLVCAYGGYELIMDAYNIALKEDYRFGTYGDAMLILDK

SEQ ID NO: 64094 - protein, 324 aa, Bacteroides pyogenes
  misc_feature (1)..(324): tr|W4PCF8|W4PCF8_9BACE S-adenosylmethionine:tRNA ribosy ltransferase-isomerase OS=Bacteroides pyogenes JCM 6292 OX=1235809 GN=JCM6292_3373 PE=3 SV=1
MVLHRHTGKIEHKLFKEVLDYFDDKDVFIFNDTKVFPARLYGNKEKTGARIEVFLLRELNQDLRLWDVLVDPARKIRIGNKLYFGEDDSMVAEVIDNTTSRGRTLRFLYDGSHEEFKKALYALGETPLPHTIINRPVEPEDAERFQSIFARNEGAVTAPTANLHFSRELMKRLEIKGIDFAYITLHAGLGNFRDIDVEDLTKHKMDSEQMFVNAEAVKTVNRAKDNNRNVCAVGTTVMRAIESAVSTDGHLKEFEGWTNKFIFPPYEFTVANSMISNFHMPLSTLLMIVAAFGGYEQVMGAYDVALKEGYRFGTYGDAMLILDK

SEQ ID NO: 64095 - protein, 352 aa, Bacteroides pyogenes
  misc_feature (1)..(352): tr|A0A5D3EWV8|A0A5D3EWV8_9BACE S-adenosylmethionine:tRN A ribosyltransferase-isomerase OS=Bacteroides pyogenes OX=310300 GN=queA PE=3 SV=1
MKLSQFKFKLPEEKIALHPAKYRDESRLMVLHRHTGKIEHKLFKEVLDYFDDKDVFIFNDTKVFPARLYGNKEKTGARIEVFLLRELNQDLRLWDVLVDPARKIRIGNKLYFGEDDSMVAEVIDNTTSRGRTLRFLYDGSHEEFKKALYALGETPLPHTIINRPVEPEDAERFQSIFARNEGAVTAPTANLHFSRELMKRLEIKGIDFAYITLHAGLGNFRDIDVEDLTKHKMDSEQMFVNAEAVKTVNRAKDNNRNVCAVGTTVMRAIESAVSTDGHLKEFEGWTNKFIFPPYEFTVANSMISNFHMPLSTLLMIVAAFGGYEQVMGAYDVALKEGYRFGTYGDAMLILDK

SEQ ID NO: 64096 - protein, 324 aa, Bacteroides reticulotermitis
  misc_feature (1)..(324): tr|W4UZG2|W4UZG2_9BACE S-adenosylmethionine:tRNA ribosy ltransferase-isomerase OS=Bacteroides reticulotermitis JCM 10512 OX=1445607 GN=JCM10512_4723 PE=3 SV=1
MVLHRRTGEIEHKMFKDVLDYFDDKDVFIFNDTKVFPARLYGNKEKTGARIEVFLLRELNEELRLWDVLVDPARKIRIGNKLYFGEDDSMVAEVIDNTTSRGRTLRFLYDGPHDEFKKALYALGETPLPHSIIHRPVEPEDAERFQSIFAKHEGAVTAPTAGLHFSRELMKRMEIKGIDFAYVTLHAGLGNFRDIDVEDLTKHKMDSEQIAVTREAVQAVNNAKDTGRNVCAVGTTVMRAIESTVSTDGHLKEFAGWTNKFIFPPYEFTVANSLISNFHMPLSTLLMIVAAFGGYDQVMDAYNLALKEDYRFGTYGDAMLILDK

SEQ ID NO: 64097 - protein, 346 aa, Bacteroides reticulotermitis
  misc_feature (1)..(346): tr|W4ULR8|W4ULR8_9BACE S-adenosylmethionine:tRNA ribosy ltransferase-isomerase OS=Bacteroides reticulotermitis JCM 10512 OX=1445607 GN=JCM10512_283 PE=3 SV=1
MIFNNTKVIQARLHFRKETGALIEVFCLEPIQPNDYVLNFQQTQHAAWLCMIGNLKKWKEGALHREMEVKGFSITLTATRGECRGTSHWVDFSWDNPEVTFADILEVFGELPIPPYLNRDTQDSDKETYQTVYSKIKGSVAAPTAGLHFTPRVLEALGEKGIELEELTLHVGAGTFKPVKSEEIEGHEMHTEYISVNRETIRKLIAHDARAIAVGTTSVRTLESLYHIGVTLAENPHATEEELHVRQWQPYEEHDELPPVVALQKILGYLDRHGMEALHTSTQIIIAPGYKYKIVKAMVTNFHQPQSTLLLLVSAFVKGNWRTIYDYALNHDFRFLSYGDSSLLIP

SEQ ID NO: 64098 - protein, 351 aa, Bacteroides salanitronis
  misc_feature (1)..(351): tr|F0R6G7|F0R6G7_BACSH S-adenosylmethionine:tRNA ribosy ltransferase-isomerase OS=Bacteroides salanitronis (str ain DSM 18170 / JCM 13567 / BL78) OX=667015 GN=queA PE= 3 SV=1
MKLSQFKFKLPEERIALHPVKYRDESRLMVVHKSTGEIEHVIFKDILNYFDDQDVFIFNDTKVFPARLYGNKEKTGARIEVFLLRELNEELRLWDVLVDPARKIRIGNKLYFGDDDSMVAEVIDNTTSRGRTLRFLYDGPHDEFKRALYALGEPPLPPFIRRPAEPEDTERFQTIFAKNEGAVTVPAAGLHFSRELMKRMEIKGINFAFITMHCGLGCFRDIDVEDLTKHKMDSEQMFINAEACKIVNTAKDNDHKVCAVGTSVMRAVETATGTDGHLKEYEGWTNKFIFPPYDFVLPDAMVTNFHMPLSTMLMLTCSYGGYELIMDAYQMALKEDYRFGTYGDAMLILNK

SEQ ID NO: 64099 - protein, 406 aa, Bacteroides salanitronis
  misc_feature (1)..(406): tr|F0R4G3|F0R4G3_BACSH S-adenosylmethionine:tRNA ribosy ltransferase-isomerase OS=Bacteroides salanitronis (str ain DSM 18170 / JCM 13567 / BL78) OX=667015 GN=queA PE= 3 SV=1
MEDTKHIHISDYNYNLPDERIAKFPLPVRDQSKLLVYRNGDISETRFTSLPDYVEPGTLMIFNNTKVIQARLHFRKETGALIEIFCLEPIQPNDYALNFQQTEHAAWLCMIGNLKKWKEGTLTRRMTVKGQDITLAATRGEARGTSHWVDFTWDNPGVTFADILEMFGELPIPPYLNRETQESDKETYQTVYSKIKGSVAAPTAGLHFTQRVLDALRAKGADLEEVTLHVGAGTFKPVKSEEIEGHEMHTEYISVSKGSIEKLIAHEGKALAVGTTSVRTLESLYYIGVTLSQHPDAQEADLHVRQWQPYETHPTLSTTEALKHILHYMERHRLDALHTSTQIIIAPGYEYKVVKRMITNFHQPQSTLLLLVSAFVKGDWKRIYDYALSHDFRFLSYGDSSLLINE

SEQ ID NO: 64100 - protein, 406 aa, Bacteroides salyersiae
  misc_feature (1)..(406): tr|I8Y2Y1|I8Y2Y1_9BACE S-adenosylmethionine:tRNA ribosy ltransferase-isomerase OS=Bacteroides salyersiae CL02T1 2C01 OX=997887 GN=HMPREF1071_04141 PE=3 SV=1
MKENPKHIRISEYNYPLPEERIAKFPLPVRDQSKLLVYRQGAVTEDVFTSLPKYLAKDSLMIFNNTKVIQARLHFRKETGALIEVFCLEPVQPNDYALNFQQTEHAAWLCMIGNLKKWKEGPLHRELTVKGHPLTLTATRGECRGTSHWVDFSWNNSEVTFADILEVFGELPIPPYLNRETQESDKETYQTVYSKIKGSVAAPTAGLHFTPRVLDTLRKKGVDLEELTLHVGAGTFKPVKSEEIEGHEMHTEYISVSRSTLRKLIGHNACAIAVGTTSVRTLESLYHIGVTLAANPQATEEELHVRQWQPYEKYDEIPPVVALQKILDYLDYNGMETLHTSTQIIIAPGYDYKIVKAMITNFHQPQSTLLLLVSAFVKGNWRTIYDYALSHDFRFLSYGDSSLLIP

SEQ ID NO: 64101 - protein, 351 aa, Bacteroides salyersiae
  misc_feature (1)..(351): tr|A0A4Q5FQA7|A0A4Q5FQA7_9BACE S-adenosylmethionine:tRN A ribosyltransferase-isomerase OS=Bacteroides salyersia e OX=291644 GN=queA PE=3 SV=1
MKLSQFKFKLPEDKIALHPTKYRDESRLMVLHRKTGKIEHKMFKDILNYFDDKDVFIFNDTKVFPARLYGNKEKTGARIEVFLLRELNEELRLWDVLVDPARKIRIGNKLYFGDDDSMVAEVIDNTTSRGRTLRFLYDGPHDEFKKALYALGETPLPHSIINRPVEEEDAVRFQSIFAKNEGAVTAPTASLHFSRELMKRMEIKGIDFAYITLHAGLGNFRDIDVEDLTKHKMDSEQMFVTEEAVKTVNRAKDLGKNVCAVGTTVMRAIESTVSTDGHLKEFEGWTNKFIFPPYEFTVANAMISNFHMPLSTLLMIVAAFGGYDQVMDAYHVALKEGYRFGTYGDAMLIID

SEQ ID NO: 64102 - protein, 351 aa, Bacteroides sartorii
  misc_feature (1)..(351): tr|R9ICN8|R9ICN8_9BACE S-adenosylmethionine:tRNA ribosy ltransferase-isomerase OS=Bacteroides sartorii OX=67126 7 GN=queA PE=3 SV=1
MKLSQFKFKLPEDKIALYPAKYRDESRLMVVHKSTGKIEHKVFKDILDYFDDKDVFIFNDTKVFPARLYGNKEKTGARIEVFLLRELNEEFHLWDVLVDPARKIRIGNKLYFGEDDSMVAEVIDNTTSRGRTLRFLYEGSHDEFKKALYALGEAPLPSFIRRPVEEEDAERFQTIFAKNEGAVTAPTAGLHFSRELMKRMEIKGIDFAFVTMHAGLGNFREIDVEDLTKHKMDSEQMYVNADACRIVNNAKDEGKNICAVGTTVMRTIETAVGTDGHLKEFDGWTNKFIFPPYDFSVANSMVTNFHLPLSTLLMLVAAYGGYDLVMEAYHTALKEDYRFGTYGDAMLILDK

SEQ ID NO: 64103 - protein, 405 aa, Bacteroides sartorii
  misc_feature (1)..(405): tr|A0A4S2FLS0|A0A4S2FLS0_9BACE S-adenosylmethionine:tRN A ribosyltransferase-isomerase OS=Bacteroides sartorii OX=671267 GN=queA PE=3 SV=1
MEDTKHIKISEFNYPLPDERIAKFPLATRDQSKLLVYRHGEVSEDVFTSLPQYLESGELMIFNNTKVIQARLHFRKETGALIEVFCLEPVQPNDYVLNFQQTRQCGWLCMIGNLKKWKEGTLSRTVDVKGKQIVLSATRGECRGTSHWIDFSWDDDTITFADLLEVVGELPIPPYLNRETQESDKETYQTVYSKIKGSVAAPTAGLHFTERVLAALDERGIDREELTLHVGAGTFRPVKSEEIEGHEMHTEYISVSKSTIEKLIAHNGKAIAVGTTSVRTLESLYYIGVLINHNPDATQDELHVQQWMPYEDKNELTPVEALQQILDYLNRHEMEALHSSTQIIIAPGYTYKIVKKMVTNFHQPQSTLLLLVSAFVKGNWRKIYDYALGHYFRFLSYGDSSLLIP

SEQ ID NO: 64104 - protein, 356 aa, Bacteroides sp.
  misc_feature (1)..(356): tr|A0A1Q6FTV8|A0A1Q6FTV8_9BACE S-adenosylmethionine:tRN A ribosyltransferase-isomerase OS=Bacteroides sp. CAG:1 060_57_27 OX=1896975 GN=queA PE=3 SV=1
MKLSQFNFDLPKDRIATELMPIVDGRIQWRDECRLMVLHKDSGEIEHRKFKDIIEYFSKGDRFVLNDTKVFPAKLLGKKEKTGADIMVFLLRELNREQRLWDVIVDPARKIRIGNKLYFGDDDSMVAEVIDNTTSRGRTLRFLYDGPYEEFKQALFALGKTPVPEWVKESPDEKDTEEFQTIFARNEGAVSAPAAGLHFSRELMNRMILADIEKSFITVHMGIGHFRTVDVEDLSKHKMDGERVIISDEAADEINGTKRAGHKICAVGVTVIRALETYVTTDREIRPLDTWTNKFIFPPYEFSVPDAIVSNFHLPQSTMLMTVAAFGGFDKVMEAYRCALEEGYKFGPYGDAMLII

SEQ ID NO: 64105 - protein, 351 aa, Bacteroides sp.
  misc_feature (1)..(351): tr|R6CMU0|R6CMU0_9BACE S-adenosylmethionine:tRNA ribosy ltransferase-isomerase OS=Bacteroides sp. CAG:530 OX=12 62741 GN=queA PE=3 SV=1
MKLSQFKFKLPEEKIALYPAKYRDESRLMVLHKATGQIEHVMFKDILNYFDDKDIFIFNDTKVFPARLYGNKEKTGARIEVFLLRELNEELRLWDVLVDPARKIRIGNKLYFGDDDSMVAEVIDNTTSRGRTLRFLYDGPHDEFKKALYALGEPPLPPFIHRAAEPIDVERFQTIYAKNEGAVTVPAAGLHFSRELMKRMEIKGVDFSFITMHCGLGGFRDIDVEDLTKHKMDSEQMFVTAEACEKVNKAKAEGHKVCAVGTSVMRAIETAVGADGNLKEFEGWTNKFIFPPYEFSLPDAMISNFHMPLSTMLMLVCSYGGYEFVMDAYQTALKEDYRFGTYGDAMLILEK

SEQ ID NO: 64106 - protein, 352 aa, Bacteroides stercorirosoris
  misc_feature (1)..(352): tr|A0A1M6KL64|A0A1M6KL64_9BACE S-adenosylmethionine:tRN A ribosyltransferase-isomerase OS=Bacteroides stercorir osoris OX=871324 GN=queA PE=3 SV=1
MKLSQFKFKLPEEKIALHPTKYRDESRLMVLHRKTGEIEHKEFKDVLNYFDDKDVFIFNDTKVFPARLYGNKEKTGARIEVFLLRELNEELRLWDVLVDPARKIRIGNKLYFGDDDSMVAEVIDNTTSRGRTLRFLYDGPHDEFKKALYALGETPLPHSIINRPVEPDDAERFQSIFARNEGAVTAPTASLHFSRELLKRLEIKGIDFAYITLHAGLGNFRDIDVEDLTKHKTDSEQMVVNEEAVSVVNRAKDMNRQVCAVGTTVMRAIESTVSTDGHLKSYEGWTNKFIFPPYDFTVANAMISNFHMPLSTLLMIVAAFGGYDQVMEAYNVALKEGYRFGTYGDAMLITDK

SEQ ID NO: 64107 - protein, 409 aa, Bacteroides stercorirosoris
  misc_feature (1)..(409): tr|A0A1M6E2B4|A0A1M6E2B4_9BACE S-adenosylmethionine:tRN A ribosyltransferase-isomerase OS=Bacteroides stercorir osoris OX=871324 GN=queA PE=3 SV=1
MKEDPKHIRISEFNYPLPDERIAKFPLSVRDQSKLLVYRHGEVSEDRFISLPSYLPAGSLMIFNNTKVIQARLHFRKETGALIEVFCLEPIEPNDYVLNFQQTEHAAWLCMIGNLKKWKEGTLKREMVVKSQPITLTATRGECHGTSHWVDFRWNNSEITFADILEVFGELPIPPYLNRETQESDKETYQTVYSKIKGSVAAPTAGLHFTPRVLDALKEKGVELEELTLHVGAGTFKPVKSEKIEGHEMHTEYISVSRGTIEKLIAHNGKAIAVGTTSVRTLESLYHIGVTLLKNPDATEEELHVRQWQPYETAEETASITSTKSLQAILDYLSRHEMEALHTSTQIIIAPGYDYKIVSAMVTNFHQPQSTLLLLVSAFVKGNWRKIYDFALSHDFRFLSYGDSSLLIP

SEQ ID NO: 64108 - protein, 409 aa, Bacteroides stercoris
  misc_feature (1)..(409): tr|A0A413VAN0|A0A413VAN0_BACSE S-adenosylmethionine:tRN A ribosyltransferase-isomerase OS=Bacteroides stercoris OX=46506 GN=queA PE=3 SV=1
MKEDPKHIRISEFNYPLPDERIAKFPLPVRDQSKLLLYRHGEVTEDIFTSLPDYLPANSLMIFNNTKVIQARLHFHKETGALIEVFCLEPVQPNDYALNFQQTEHAAWLCMIGNLKKWKEGVLKREITVKGKPLTLTAERGACHGTSHWVDFRWSNPEITFADILEVFGELPIPPYLNRETQESDKETYQTVYSKIKGSVAAPTAGLHFTPRVLDALREKGVALEELTLHVGAGTFKPVKSEEIEGHEMHTEYISVNRSTLEKLVAHEGKAIAVGTTSVRTLESLYHIGVTLLHNPNATEEDLHVKQWQPYETALETAATPAVDALQAIIAYLDLHHMETLHSSTQIIIAPGYEYRIVKAMVTNFHQPQSTLLLLVSAFLHGDWRKIYDYALAHDFRFLSYGDSSLLIP

SEQ ID NO: 64109 - protein, 409 aa, Bacteroides stercoris
  misc_feature (1)..(409): tr|B0NVW0|B0NVW0_BACSE S-adenosylmethionine:tRNA ribosy ltransferase-isomerase OS=Bacteroides stercoris ATCC 43 183 OX=449673 GN=queA PE=3 SV=1
MKEDPKHIRISEFNYPLPDERIAKFPLPVRDQSKLLLYRHGEVTEDIFTSLPDYLPANSLMIFNNTKVIQARLHFHKETGALIEVFCLEPIQPNDYALNFQQTEHAAWLCMIGNLKKWKEGALKREITVKGKPLTLTAERGACHGTSHWVDFRWNNPEITFADILEVFGELPIPPYLNRETQESDKETYQTVYSKIKGSVAAPTAGLHFTPRVLDALREKGVALEELTLHVGAGTFKPVKSEEIEGHEMHTEYISVNRSTLEKLVAHEGKAIAVGTTSVRTLESLYHIGVTLLHNPNATEEDLHVKQWQPYETALETAATPAVDALQAIIAYLDRHHMETLHSSTQIIIAPGYEYRIVKAMVTNFHQPQSTLLLLVSAFLHGDWRKIYDYALAHDFRFLSYGDSSLLIP

SEQ ID NO: 64110 - protein, 406 aa, Bacteroides thetaiotaomicron
  misc_feature (1)..(406): tr|R9H1C6|R9H1C6_BACT4 S-adenosylmethionine:tRNA ribosy ltransferase-isomerase OS=Bacteroides thetaiotaomicron dnLKV9 OX=1235785 GN=queA PE=3 SV=1
MKEDPKHIHISEYNYPLPDERIAKFPLAVRDQSKLLVYRHGEVSEDVFTSLPDYLPKGSLMVFNNTKVIQARLHFRKETGALIEVFCLEPIQPNDYVLNFQQTEHAAWLCMIGNLKKWKDGALKREMTVKGFPITLTATRGECRGTSHWIDFSWDNPEVTFADILEVFGELPIPPYLNRDTEESDKETYQTVYSKIKGSVAAPTAGLHFTPRVLEALQEKGIDLEELTLHVGAGTFKPVKSEEIEGHEMHTEYISVNRATIKKLIDHDGCAVAVGTTSVRTLESLYHIGVTLAENPDATEEELHVKQWQPYEKYDQIPPVVALQKILGYLDRNGLEALHSSTQIIIAPGYQYKIVKAMVTNFHQPQSTLLLLVSAFVKGNWRTIYDYALAHDFRFLSYGDSSLLIP

SEQ ID NO: 64111 - protein, 406 aa, Bacteroides thetaiotaomicron
  misc_feature (1)..(406): tr|A0A1H7J7E4|A0A1H7J7E4_BACT4 S-adenosylmethionine:tRN A ribosyltransferase-isomerase OS=Bacteroides thetaiota omicron OX=818 GN=queA PE=3 SV=1
MKEDPKHIHISEYNYPLPDERIAKFPLAVRDQSKLLVYRHGEVSEDVFTSLPDYLPKGSLMVFNNTKVIQARLHFRKETGALIEVFCLEPIQPNDYVLNFQQTEHAAWLCMIGNLKKWKDGVLKREMTVKGFPITLTATRGECRGTSHWIDFSWDNPEVTFADILEVFGELPIPPYLNRDTEESDKETYQTVYSKIKGSVAAPTAGLHFTPRVLEALQEKGIDLEELTLHVGAGTFKPVKSEEIEGHEMHTEYISVNRATIKKLIDHDGCAVAVGTTSVRTLESLYHIGVTLAENPDATEEELHVKQWQPYEKYDQIPPVVALQKILGYLDRNGLEALHSSTQIIIAPGYQYKIVKAMVTNFHQPQSTLLLLVSAFVKGNWRTIYDYALAHDFRFLSYGDSSLLIP

SEQ ID NO: 64112 - protein, 352 aa, Bacteroides uniformis
  misc_feature (1)..(352): tr|A7UYZ5|A7UYZ5_BACUC S-adenosylmethionine:tRNA ribosy ltransferase-isomerase OS=Bacteroides uniformis (strain ATCC 8492 / DSM 6597 / CIP 103695 / JCM 5828 / NCTC 13 054 / VPI 0061) OX=411479 GN=queA PE=3 SV=1
MKLSQFKFKLPEEKIALHPTKYRDESRLLVLHRKTGEIEHKMFKDVLDYFDDKDVFIFNDTKVFPARLYGNKEKTGARIEVFLLRELNEELRLWDVLVDPARKIRIGNKLYFGDDDSMVAEVIDNTTSRGRTLRFLYDGPHDEFKKALYALGETPLPHSIINRPVEPDDAERFQSIFARNEGAVTAPTASLHFSRELMKRMEIKGIDFAYITLHAGLGNFRDIDVEDLTKHKTDSEQMIVNEEAVRIVNHAKDLNRQVCAVGTTVMRAIESTVSTDGHLKEYEGWTNKFIFPPYDFTVANAMISNFHMPLSTLLMIVAAFGGYEQVMEAYNVALKEEYRFGTYGDAMLITDR

SEQ ID NO: 64113 - protein, 352 aa, Bacteroides uniformis; identical to SEQ ID NO: 64112
  misc_feature (1)..(352): tr|A0A078RX65|A0A078RX65_BACUN S-adenosylmethionine:tRN A ribosyltransferase-isomerase OS=Bacteroides uniformis str. 3978 T3 ii OX=1339349 GN=queA PE=3 SV=1

SEQ ID NO: 64114 - protein, 351 aa, Bacteroides vulgatus; identical to SEQ ID NO: 64060
  misc_feature (1)..(351): sp|A6KZK0|QUEA_BACV8 S-adenosylmethionine:tRNA ribosylt ransferase-isomerase OS=Bacteroides vulgatus (strain AT CC 8482 / DSM 1447 / JCM 5826 / NBRC 14291 / NCTC 11154 ) OX=435590 GN=queA PE=3 SV=1

SEQ ID NO: 64115 - protein, 351 aa, Bacteroides vulgatus
  misc_feature (1)..(351): tr|A0A415BG75|A0A415BG75_BACVU S-adenosylmethionine:tRN A ribosyltransferase-isomerase OS=Bacteroides vulgatus OX=821 GN=queA PE=3 SV=1
MKLSQFKFKLPEDKIALHPAKYRDESRLMVVHKSTGKIEHKVFKDILDYFDDKDVFIFNDTKVFPARLYGNKEKTGARIEVFLLRELNEELRLWDVLVDPARKIRIGNKLYFGDDDSMVAEVIDNTTSRGRTLRFLYDGSHDEFKKALYALGEAPLPSFIRRPVEEEDTERFQTIFAKNEGAVTAPTAGLHFSRELMKRMEIKGIDFAFVTMHAGLGNFREIDVEDLTKHKMDSEQMYVNADACRIVNNAKDEGKNICAVGTTVMRTIETAVGTDGHLKEFDGWTNKFIFPPYDFSVANSMVTNFHLPLSTLLMLVAAYGGYDLVMEAYHTALKEDYRFGTYGDAMLILDK

SEQ ID NO: 64116 - protein, 406 aa, Bacteroides xylanisolvens
  misc_feature (1)..(406): tr|I9JNN0|I9JNN0_9BACE S-adenosylmethionine:tRNA ribosy ltransferase-isomerase OS=Bacteroides xylanisolvens CL0 3T12C04 OX=997892 GN=HMPREF1074_00156 PE=3 SV=1
MKEDPRHIHISEYSYPLPDERIAKFPLPTRDQSKLLIYRRGEISEDVFTSLPEYLLQGSLMIFNNTKVIQARLHFRKETGALIEVFCLEPIQPNDYVLNFQQTAHAAWLCMIGNLKKWKDGQLKREMTVKGFPITLTATRGECKGTSHWVDFAWDNPEVTFADILEVFGELPIPPYLNRDTEESDKETYQTVYSKIKGSVAAPTAGLHFTPRVLDALQEKGIDLEELTLHVGAGTFKPVKSEEIEGHEMHTEYISVNRSTIKKLIDHDGCAIAVGTTSVRTLESLYHIGVTLAENPYATEEELRVKQWQPYEKYDQIPPVVALQKILGYLDRNGLETLHTSTQIIIAPGYNYKIVKAMVTNFHQPQSTLLLLVSAFVKGNWRTIYDYALAHDFRFLSYGDSSLLIP

SEQ ID NO: 64117 - protein, 352 aa, Bacteroides xylanisolvens; identical to SEQ ID NO: 64089
  misc_feature (1)..(352): tr|D6CZ17|D6CZ17_9BACE S-adenosylmethionine:tRNA ribosy ltransferase-isomerase OS=Bacteroides xylanisolvens XB1 A OX=657309 GN=queA PE=3 SV=1

SEQ ID NO: 64118 - protein, 350 aa, Bacteroides xylanolyticus
  misc_feature (1)..(350): tr|A0A2S6HV24|A0A2S6HV24_9BACE S-adenosylmethionine:tRN A ribosyltransferase-isomerase OS=Bacteroides xylanolyt icus OX=384636 GN=queA PE=3 SV=1
MNVRDFYFDLPQELIAQDPLEDRSASRLLVLDKHTGEIEHRHFKDILDYLKKGDCLVINDTKVIPARLFGVKEGTEAKIEILLLKRRENDIWETLVKPGKKAKVGTVISFGEGLLKGTVIDVVEEGNRLIQFSYEGIFEEILDQLGQMPLPPYITHQLQDKNRYQTVYAKNEGSAAAPTAGLHFTKELLKKIQEKGVEIAHVTLHVGLGTFRPVKVDEIEAHHMHSEFYIVEEEEAKKVNDAKRNGGRIVCVGTTSCRTVESASTEDGILKAGSGWTEIFIYPGYHFKILDCLITNFHLPESTLIMLVSALAGRDHVLHAYEEAVRERYRFFSFGDAMFLTDRKDQGTVN

SEQ ID NO: 64119 - protein, 409 aa, Bacteroides zoogleoformans
  misc_feature (1)..(409): tr|A0A562V030|A0A562V030_9BACE S-adenosylmethionine:tRN A ribosyltransferase-isomerase OS=Bacteroides zoogleofo rmans OX=28119 GN=queA PE=3 SV=1
MEQNPKHIHISEFNYVLPDDRIAKFPLPVRDRSKLLIYHHGKISEDTFTSLPDYLPTGSLMIFNNTKVIQARLHFRKETGALIEVFCLEPVQPNDYALNFQQTEHTAWLCMVGNLKKWKEGTLKREMTVKSRAIVLTAERGECRGTSHWVDFRWNNSEVTFADILEVFGELPIPPYLNRETQESDKETYQTVYSKIKGSVAAPTAGLHFTPHVLEALRTKGIDTEELTLHVGAGTFKPVKSEEIAGHEMHTEYISVSRSTLEKLIMHGGKAIAVGTTSVRTLESLYHIGITLLNNPEATEEELHVRQWQPYEMQDAASAVPAIEALQAVLSYLERHSMDALHTSTQIILAPGYEYQIVKAMITNFHQPQSTLLLLVSAFVQGDWRRIYDYALSHDFRFLSYGDSSLLIP

SEQ ID NO: 64120 - protein, 370 aa, Bacteroides zoogleoformans
  misc_feature (1)..(370): tr|A0A562VJE3|A0A562VJE3_9BACE S-adenosylmethionine:tRN A ribosyltransferase-isomerase OS=Bacteroides zoogleofo rmans OX=28119 GN=queA PE=3 SV=1
MAGVSIGTRSIPTPLYIIYNMKLSQFKFKLPEEKIALHPVKYRDESRLMVLHRKTGEIEHKTFKDILNYFDDKDVFVFNDTKVFPARLYGNKEKTGARIEVFLLRELNEELRLWDVLVDPARKIRIGNKLYFGEDDSMVAEVIDNTTSRGRTLRFLYDGPHDEFKKALYALGETPLPHSIINRPAEPEDAERFQSIFARNEGAVTAPTASLHFSRELMKRLEIKGIDFAYITLHAGLGNFRDIDVEDLTKHKTDSEQMIVNEETVQKVNCAKDLGKQVCAVGTTVMRAIESTVSTDGHLKTYDGWTNKFIFPPYDFTVANAMISNFHMPLSTMLMIVSAFGGYDQVMSAYEVAIKEDYRFGTYGDAMLII

SEQ ID NO: 64121 - protein, 494 aa, Bacteroidetes bacterium
  misc_feature (1)..(494): tr|A0A2M7PRW7|A0A2M7PRW7_9BACT S-adenosylmethionine:tRN A ribosyltransferase-isomerase (Fragment) OS=Bacteroide tes bacterium CG_4_10_14_3_um_filter_42_6 OX=1973920 GN =COZ08_05430 PE=3 SV=1
WKTGLLSKLIKINGEDITLFAEKITDLSDAFLIRFSWQPEEISFHEIINLSGLVPLPPYLNREAQPDDTIRYQTVYAKHDGSVAAPTAGLHFTEEILNQLSAKGIENEKVTLHVGAGTFKPVSSATLAEHEMHVEKIVVPLSALKNLQKKLNQPVIPVGTTSMRTLESLFWLAVKLHQGDESMTVEQWDPYQLKVEEGFTSAKALNTIIDFLEKNQLKALHGQTRLMIAPGYQFRFANGLITNFHQPKSTLLLLVSALIGDSWKMAYNFALEHDFRFLSYGDSCLFLPLASQPKEIPCMSDQQNTEITGIVLSGGKSRRMGKEKGLCHFRGKALITFAIDTLKPLCKTLIISANNKIDQYDLLEYPVISDDIPDTGPIGGLYSCLKQSQSAINLVISCDTPFVTTEVYQELLKYIVDYQAVVPVHEDGLLEPITAVYHRSCLPVILQQIEKGEYKMMDLLARLNTKFVYFDTNMSDSKPSLFHNLNSPEDLLSC

SEQ ID NO: 64122 - protein, 342 aa, Bacteroidetes bacterium
  misc_feature (1)..(342): tr|A0A1F3N4I5|A0A1F3N4I5_9BACT S-adenosylmethionine:tRN A ribosyltransferase-isomerase OS=Bacteroidetes bacteri um RBG_13_42_15 OX=1797355 GN=A2Y71_04670 PE=3 SV=1
MIRARLLFRKKSGAQIEIFCLEPLSPPDYETSFASKSPVEWKCIIGNLKKWKTGVVSLKFRPGDTEYELCAEKICPEGEAWRIRFNWNSTRLSFSEVIETSGHIPLPPYISREDEKEDGSRYQTVYSSVKGSVAAPTAGLHFTQDLLDKLPKKGVKSVNVTLHVGAGTFQQVRARHISDHKMHCEHFSVTKETICELLENHGRIIAVGTTSVRTLESLYWLGVKTADGSISNLNDLQIDQWEPYHNDRGIAVEKALTALSDLMTRHNCQTISGSTKIIIIPGYKFRMITGMITNFHQPRSTLLLLISAWTGSDWHKIYSYALEKKFRFLSYGDSSLLFNSLC

SEQ ID NO: 64123 - protein, 351 aa, Bacteroidetes oral
  misc_feature (1)..(351): tr|D7JH09|D7JH09_9BACT S-adenosylmethionine:tRNA ribosy ltransferase-isomerase OS=Bacteroidetes oral taxon 274 str. F0058 OX=575590 GN=HMPREF0156_01603 PE=3 SV=1
MKLSQFKFDLPEKSIAQYLPKNRDDCKLLVLHKKSEKVEHKKLIDILSYFDDKDLFVFNNTQVFPALMTGIKEKTEAVIEVFLLRELNPLTKLWDVLVDPARKIRVGNKLYFGEDQSLVAEVIDNTTSRGRTLRFLYDGTHEEFKKALFALGRTSLPAYIKRPVEDADTEAYQTVFASEEGAVVAPFTGIHFSRELMKKMQIKGIEAGFITLHCSLSMFRSIDVEDLQKHKLDSEQMEVKPEFAQLFNKKSAEGRKICAIGTSVLLTLETAATVPGKIKEYSGWTNKFIFPPYEFQTVGSLLSTFHLPYSTMLMNQASFAGYDLTMQTYNTAIKKGYKFGCFGDLLLILND

SEQ ID NO: 64124 - protein, 411 aa, Bacteroidetes oral
  misc_feature (1)..(411): tr|D7JD82|D7JD82_9BACT S-adenosylmethionine:tRNA ribosy ltransferase-isomerase OS=Bacteroidetes oral taxon 274 str. F0058 OX=575590 GN=queA PE=3 SV=1
MTYIPHNIDINDYDYPLPSERIARYPLPERDASMLLFFDGKDIEKKGFADLPELLDSKDFLVFNNTKVIHARLRFVKSTGAEIEIFCLEPLLPSDYQLSLSSVNSCVWKVMVGNLRRWKSETLHQTADIDGKRCNIEVRYRNPLNNMAHEVEFAWDNSDITFAQILAHLGELPIPPYLNRKTESADSLTYQTTYSKVLGSVAAPTAGLHFTDRILQRLTSKGIDSTEITLHIGAGTFQPVKTDNIAEHQMHTEVFAVGLSSLELIADNIDSIVAVGTTSVRTLESLYYIGCHIAKNEPSPVFEVSQWEAYENNGCEMSPRKSIETIIEYMRDNKLDFIVAKTQIMIVPGFKFRIVNKLITNFHQPRSTLLLLVSAFVGDDNRRKIYDFALGHNFRFLSYGDSSLLTNNSTQ

SEQ ID NO: 64125 - protein, 405 aa, Bacteroidetes sp.
  misc_feature (1)..(405): tr|A0A3N0ZW60|A0A3N0ZW60_9BACT S-adenosylmethionine:tRN A ribosyltransferase-isomerase OS=Bacteroidetes/Chlorob i group bacterium ChocPot_Mid OX=2382230 GN=queA PE=3 S V=1
MLDINIEEYNFSLPQEKIALFPLSNRAESKLLLVNKNNQSISHHCFQEIPDLLPENSTIFLNNSKVIAARLLMKKSSGGLAEILCVEPINPSNDPQIAMSAKGKCTWKCIVGGKRINIGSILSEDTLFNFRATILEKEGQDAIVEFNWDNEKITFSEVIDKLGKVPLPPYIKRDVEAEDKIRYQTVYAEYDGSVAAPTAGLHFTNEILNLIKEKGIGIYELTLHVGTGTFKPIGSNNILNHRMHSELIIVSKSLLANILKSINDSKYIVATGTTSLRTLETLYWVGAKLINKELNYSEGEFELGQWDAYRMDKEIDVKDSIEMIINFLDKNNLSEIRGRTELFVIPGYNFKIVKGLITNYHLPKSTLILLVAAFLGKELWKKVYSEALNNNYRFLSYGDSSLLLS

SEQ ID NO: 64126 - protein, 407 aa, Bacteroidetes sp.
  misc_feature (1)..(407): tr|A0A3N0ZH75|A0A3N0ZH75_9BACT S-adenosylmethionine:tRN A ribosyltransferase-isomerase OS=Bacteroidetes/Chlorob i group bacterium Naka2016 OX=2382229 GN=queA PE=3 SV=1
MVEFSLNQFDYNLPEEKIAQYPLEKRDESNLLVYHKNRTISHHKFYELPNFIPEGSLLLRNVTKVIPARIFVEKPNGGTVEVLLLSNKKQQANVFEALIKGRKIKPNVRLSKQFSKENLVLYVDVISKNQDCYTVSLDWKEISNNSSSKLTFEEVLDRIAKTPLPPYIKREAEELDRTRYQTIYGWQPGSVAAPTAGFHFTDDVIQNLKSKSIDFADVTLHISLGTFQPIRVENIFAHNMHSEEFLVYYDNIKKIHKFFQTRGKEQLFVAIGTTSVRTLESLYWFAQDVYSNSLKPNLNNALIDQYIWRRVEEKLSIENALDFLLGLMDKEGKKEIIGNTSLYITPDYKIRFFDAIVTNFHQPKSTLLLLVYAFVGEDWKQIYNEALEKNYRFLSYGDSSLLFKTNG

SEQ ID NO: 64127 - protein, 350 aa, Bacteroidia bacterium
  misc_feature (1)..(350): tr|A0A1Q3QE76|A0A1Q3QE76_9BACT S-adenosylmethionine:tRN A ribosyltransferase-isomerase OS=Bacteroidia bacterium 43-41 OX=1895720 GN=queA PE=3 SV=1
MKLSQFKFNLPDELIARYPSKHRDESRLLVVHKDSDKIEHLIFKDILNYFDAHDFFVFNDTKVFPARLFGNKEKTGAKIEVFLLRELNPAQHLWDVLVNPARKIRIGNKLYFGENEELVAEVIDNTTSRGRTLRFLYDGPYDEFKDLLFSIGETPIPEYMERPAVPEDADRYQNIFANNEGAVVVPAAGLHFSRELIKRMEIKNIDYGFLTLHHGLGAYRDIDVEDLTKHKIDSEQMIITQELCDRVNTAKDSGYKICAVGTSVLRAIETTISTDGHIKPREGWTNKFIFPPYDFTLPDALVTNFHLPFSTLLMITTAFGGYERIMDVYQTAIKEKYEFGAYGDAMLIIP

SEQ ID NO: 64128 - protein, 409 aa, Bacteroidia bacterium
  misc_feature (1)..(409): tr|A0A1Q3QE00|A0A1Q3QE00_9BACT S-adenosylmethionine:tRN A ribosyltransferase-isomerase OS=Bacteroidia bacterium 43-41 OX=1895720 GN=BGO33_04895 PE=3 SV=1
MKKCDVEKIRIADYNYTLPDEKIAKYPLQKRDASKLLLFENNKISTVHFSGIAAQIPEDSLMIFNDTRVIHARLIFEKNTGAFIEVFCLSPFAPKDYSINFQQRATCSWCCMIGNAKRWKDDVLQMQVSIEGEEVLLSAKKTVKTGSNVIVEFSWNNPDFTFSELLEVAGKLPIPPYLNRASEAKDDETYQTVYSAVEGSVAAPTAGLHFTPEVMESLRKKGVKPAHVTLHVGAGTFKPVKSETIGNHDMHTEFISVSRETVQALYENENSLIVVGTTSMRTVESLYYVGKKILQQPDIDPAELVVFQWEPYDEENPILPKLALKSIIDYLDKNSLDQLLALTQIMIVPGYEFHYPQAMITNFHQPQSTLLLLIASFIGENWLQVYEYALQNDYRFLSYGDSSLLWRIL

SEQ ID NO: 64129 - protein, 345 aa, Baia soyae
  misc_feature (1)..(345): tr|A0A4R2RNN2|A0A4R2RNN2_9BACL S-adenosylmethionine:tRN A ribosyltransferase-isomerase OS=Baia soyae OX=1544746 GN=queA PE=3 SV=1
MNVADFSFELPKELIAQTPLTDRTASRLMIVNRNSGELTHTQFPEIVSYLEAGDVLVLNDSRVRPARLIGTKADTGAKIELLLLQPMGGDRWEALVKPAKRVKPGSVIQFGNGGELRAVAEESTEVAGGRVFRLEYQVDDIETLFTRLGEMPLPPYIHEQLDDPERYQTVFSRSIGSAAAPTAGLHFTDEILTAIREKGVQVSFVTLHVGLGTFRPVTVENIEEHQMHAEYYEMNEETASTIREAKKAGKRVIAVGTTSIRTLETIAGRFASEVQACSGWTDIFIYPGYEFQVVDGLLTNFHLPQSTLLMLGSAFSSRDILLHAYEVAVQERYRFFSFGDAMLLI

SEQ ID NO: 64130 - protein, 344 aa, Baia soyae
  misc_feature (1)..(344): tr|A0A4R2SCP0|A0A4R2SCP0_9BACL S-adenosylmethionine:tRN A ribosyltransferase-isomerase OS=Baia soyae OX=1544746 GN=EDD57_101129 PE=3 SV=1
MTAPLSFYLPDSLHASLPPERRGIRRDHVKCMVLNRQTGETTHTQFQHIDSYLEKDDLLVLNASRTIPAVFQVDWKRNGTLLQTQVEIRLARRIDSTNWEALIVAAGVNLGDEFIFSSYLQAQVISLSEASIVTLQFSQSGNHLLESFYALGEPIRYEYIDHPWDLDYYQTVYGTVPGSVEMPSAGRAFSWELLLKLQKKGVRIAYIQLHTGLSYLLDDQAYLDPKKHAEEYLVPVSTVQEIKKAKKHGKRVIAVGTTIVRALETSIDGDGELIPQTGWTSLHITANTKLLVVDGLITGFHEPEASHLDLLSSLINPEHLLHAYQEAIEHQYYWHEFGDMNLIL

SEQ ID NO: 64131 - protein, 343 aa, Balnearium lithotrophicum
  misc_feature (1)..(343): tr|A0A521BZA4|A0A521BZA4_9BACT S-adenosylmethionine:tRN A ribosyltransferase-isomerase OS=Balnearium lithotroph icum OX=223788 GN=queA PE=3 SV=1
MKVSEFDYELPKELIAKFPAEPRDSSRLMVLHRKTGEIKHRVFRDIINYLEEGDLLVINDTKVIPARLFGRLDTGGKVELLLIRQIEPDLWEVMARPARKLKEGKRLIFDDELSGVVRGYSGEGKRLVEFELVGDKTFMEKLEEIGHVPLPPYIEREERREDREKYQTVFAKREGAVAAPTAGLHFTKELLEKLKEKGIIIKPVTLHVGPGTFKPVKVENVEEHRMDYETYFVPEETAKAVEETKRKGKRVIAVGTTVVRTLESASDEFGNVKPGEGVTNLFIYPGYKFKVIDALITNFHLPRSTLLMLVSAFAGKEKVLNAYREAVKEGYRFYSYGDAMFIV

SEQ ID NO: 64132 - protein, 341 aa, Balneola sp.
  misc_feature (1)..(341): tr|A0A2E6N2A9|A0A2E6N2A9_9BACT S-adenosylmethionine:tRN A ribosyltransferase-isomerase OS=Balneola sp. OX=20248 24 GN=queA PE=3 SV=1
MSLGLHDFDFELPERLIAQYPVHPRDHAKLLVYDRVTQSIQDCFFYELDNLLNPDTTLVLNNTRVEKCRLLFEDGKMEVFVLETIDPYCVQALVRPGKKFKVGKTISLAPSLRAQVLSISEGGLRTLRLSHTYDDPIFESFKHTPLPPYIVQNEALSEEYQTIYAKYGGSKAAPTAGLHFTPDLMQRIAKSGVAIEELTLHVGMGTFAPVKTERIQEHIMHEENYLLTEKVASRLAKSRHITAVGTTSVRVLESVVAINSVNVSHAFRKFNTGSGSTDIFITPGYRYQAVDALITNFHLPKSTLLMLVAAFVGLEEMHRIYAHAIASEYRFYSFGDAMLLR

SEQ ID NO: 64133 - protein, 351 aa, Balneola sp.
  misc_feature (1)..(351): tr|A0A350PKW8|A0A350PKW8_9BACT S-adenosylmethionine:tRN A ribosyltransferase-isomerase OS=Balneola sp. OX=20248 24 GN=queA PE=3 SV=1
MKLTDFRYELEGLNVPEEPLEKRDDARLMVLNRAEETIEHKKFSDIHEYLNEGDVVIYNNTKVFPARLNGKKEKTEADIEVFLLRELQPENMLWDVLVEPARKIRIGNKLYFGEEDDELMAEVVDNTTSRGRTIRFLFDGGYDELYERLDALGKMPLPPYIEREPVDEDKERYQTVYATERGAVAAPTAGMHFTEDLIKKIEKKGVEMLPITLHIGWGTFRNVEVEDLTKHRMDSENYFLSKETSDKINVALSSKKNKVVAIGTSAVRAIETSVMASGMSKMGTGWTDKFIYPPYQFKITEGLITNFHRPESTLLMLAAAFGGYDFIMKAYEEAKKENYRLFSFGDAMLIL

SEQ ID NO: 64134 - protein, 110 aa, Balneolaceae bacterium
  misc_feature (1)..(110): tr|A0A359E6W0|A0A359E6W0_9BACT S-adenosylmethionine:tRN A ribosyltransferase-isomerase (Fragment) OS=Balneolace ae bacterium OX=2053516 GN=DEG32_11515 PE=3 SV=1
MKLTDFKFETDDLNIPEEPLKKRDSAKLMVLNRAERTIEHTTFDKIHEYLNKDDIMIYNNTKVFPARLNGKKEKTEADIEVFLLRELMPENMLWDVLVEPARKIRIGNKL

SEQ ID NO: 64135 - protein, 351 aa, Balneolaceae bacterium
  misc_feature (1)..(351): tr|A0A3D1G864|A0A3D1G864_9BACT S-adenosylmethionine:tRN A ribosyltransferase-isomerase OS=Balneolaceae bacteriu m OX=2053516 GN=queA PE=3 SV=1
MKLTDFRYEIEGLNIPEAPLAQRDSARLMVLNRAEQTIEHRQFSDIHEYLNEGDVVIYNNTKVFPARLNGKKEKTEADIEVFLLRELQPENMLWDVLVEPARKIRIGNKLYFGEGDDELMAEVVDNTTSRGRTIRFLYDGPNTELYEKLDALGKMPLPPYIEREPVDEDKERYQTVFATERGAVAAPTAGMHFTQELIEKIEAKGVEFLPVTLHIGWGTFRNVEVEDLTKHRMDSENYFISKDTSDKINDALRKKKNKVVAVGTSVVRAIETSVMASGMSKQGTGWTDKFIYPPYQFKITEALITNFHRPESTLLMLGAAFAGYDFLMKAYEEAKEKDYRLFSFGDAMLVI

SEQ ID NO: 64136 - protein, 349 aa, Barnesiella intestinihominis
  misc_feature (1)..(349): tr|K0WUK7|K0WUK7_9BACT S-adenosylmethionine:tRNA ribosy ltransferase-isomerase OS=Barnesiella intestinihominis YIT 11860 OX=742726 GN=queA PE=3 SV=1
MKLSQFKFKLPEEQIAQYPAKNRDESRLMVIDRKTGKIEHRIFKEIIEYFDEKDVFVFNDTKVFPARLYGNKEKTGAKIEVFLLRELNEENRLWDVLVEPARKIRIGNKLYFGDDDSMVAEVIDNTTSRGRTLRFLYDGSHDEFKEALYKLGEMPLPSYIARPVEEMDADRYQNIFARNEGAVVTPAAGLHFSRELLKRMEIKGIDYGFLTLHSGLGNFREIDVEDLTKHKMDSEQMRVTPELVELVNHAKDEGRKVCAVGTSVMRGIESAVSTGGHMKTYDGWTNKFIFPPYDFTVATNLVTNFHMPLSTMLMMVAAFGGYDIVLEAYESALKEGYRFGAYGDAMLIL

SEQ ID NO: 64137 - protein, 405 aa, Barnesiella intestinihominis
  misc_feature (1)..(405): tr|K0XNH6|K0XNH6_9BACT S-adenosylmethionine:tRNA ribosy ltransferase-isomerase OS=Barnesiella intestinihominis YIT 11860 OX=742726 GN=queA PE=3 SV=1
MQKTQNIRIEDFNYPLPDERIAKFPLSKRDDSKLLVYRKGEIEEHRFHELPKVLPADSLLVFNNTRVIQARLHFRKETGALIEVFCLEPLEPHEYSLSFQSTGSCSWLCLVGNLKKWKNGVLTQSVNIDGKTVNFRAERGLPHGNAHEVHFSWDDSDVTFATLLDHAGELPIPPYLNRETEESDKTTYQTVYSKIEGSVAAPTAGLHFTPEVLNKLKEKNIPTLELTLHVGAGTFKPVKSETLEGHEMHTEYISVSRNLIDELSRTDRRVIAVGTTSVRTLESLYYIGKMLEHNPNILPDSLSVGQWQPYDGSEEIDSRQSLRNIVEYLDRRNMDRLVTATQIIIAPGYRYHIVQGMITNFHQPQSTLLLLVSAFVNGRWREIYDYALSHDFRFLSYGDSSLLLP

SEQ ID NO: 64138 - protein, 349 aa, Barnesiella sp.
  misc_feature (1)..(349): tr|A0A1Y3WKY5|A0A1Y3WKY5_9BACT S-adenosylmethionine:tRN A ribosyltransferase-isomerase OS=Barnesiella sp. An55 OX=1965646 GN=queA PE=3 SV=1
MKLSQFKFKLPEAQIAQYPAKNRDESRLMVIDRKTGKIEHRIFKEIIDYFDEKDVFVFNDTKVFPARLYGNKEKTGAKIEVFLLRELNEENRLWDVLVEPARKIRIGNKLYFGDDDSMVAEVIDNTTSRGRTLRFLYDGSHDEFKEALYKLGEMPLPAYITRPVEELDTERYQNIFARHEGAVVTPAAGLHFSRELLKRMEIKGIDYGFLTLHSGLGNFREIDVEDLTKHKMDSEQLIVTPELVELVNHAKDGGHKVCAVGTSVMRGIESAVSTGGHMKTYDGWTNKFIFPPYDFTVATSLVTNFHMPLSTMLMMVAAFGGYEIVLSAYDAALKEGYRFGAYGDAMLIL

SEQ ID NO: 64139 - protein, 405 aa, Barnesiella sp.
  misc_feature (1)..(405): tr|A0A4Y9IWQ7|A0A4Y9IWQ7_9BACT S-adenosylmethionine:tRN A ribosyltransferase-isomerase OS=Barnesiella sp. WM24 OX=2558278 GN=queA PE=3 SV=1
MIDKVSDILIEDYDYPLPDERIARHPLAERDRCKLLVRRPDGTLETRVFCELPELLPPGSLLIYNNTRVINARLRFRKPGGGALIEIFCLEPVMPADYAVNFASDHKCSWLCFVGNSKRWKDGSLSMELDIDGVTVTLTATRESREGNASVVMFEWDNSGITFSQIISAAGEIPIPPYLNRDTEPSDSSDYQTVFSHIDGSVAAPTAGLHFTDDVLRRVDEAGMSRRELTLHVGAGTFQPVKSDSIGDHDMHSEFIAVRRELIAELADTSRPVIAVGTTSVRTLESLYHIGCLIAAGEWQGEVPQWYPYGDGHPRLSRQEALSAIVGYLDAKGSPALLASTRIIIAPGYGFKVVDGMVTNFHQPKSTLLLLVSAFIGGGWREMYDYALAGDYRFLSYGDASLLLR

SEQ ID NO: 64140 - protein, 405 aa, Barnesiella viscericola
  misc_feature (1)..(405): tr|W0ETF9|W0ETF9_9BACT S-adenosylmethionine:tRNA ribosy ltransferase-isomerase OS=Barnesiella viscericola DSM 1 8177 OX=880074 GN=queA PE=3 SV=1
MIKTQNIRIEDFNYPLPDERIAKFPLARRDQSKLLVYRQGQIEEHHFYDLPDVLPADSLLVFNNTRVIQARLHFRKETGALIEVFCLEPLDPHEYALSFQSTRSCSWLCLIGNAKKWKSGPLTQEVEIDGKTVRFTAERGVPHGNACEVRFSWDNPEVTFAALLDHAGELPIPPYLNRETEESDKTTYQTVYSKIEGSVAAPTAGLHFTPEVLAALRDKGIPELELTLHVGAGTFKPVKSETLEGHEMHTEYISVNRDLIDTLARTDRRVVAVGTTSVRTLESLYYIGKMLATNPDAEPHDLVVSQWQPYDGSPDIDPREALAHIVDYLDRHGMTRLVTATQIIIAPGYRYHIVQGMITNFHQPQSTLLLLVSAFVDGRWREIYDYALAHGFRFLSYGDSSLLLP

SEQ ID NO: 64141 - protein, 349 aa, Barnesiella viscericola
  misc_feature (1)..(349): tr|W0EU31|W0EU31_9BACT S-adenosylmethionine:tRNA ribosy ltransferase-isomerase OS=Barnesiella viscericola DSM 1 8177 OX=880074 GN=queA PE=3 SV=1
MKLSQFKFKLPEAQIAQYPAKNRDESRLMVIDRKTGNIEHRIFKEIIDYFNEKDVFVFNDTKVFPARLYGNKEKTGAKIEVFLLRELNEENRLWDVLVEPARKIRIGNKLYFGDDDSMVAEVIDNTTSRGRTLRFLYDGSHDEFKEALYKLGEMPLPSYITRPVEELDAERYQNIFARHEGAVVTPAAGLHFSRELLKRMEIKGIDYGFLTLHSGLGNFREIDVEDLTKHKMDSEQLLVTPELVNLVNHAKDEGRQVCAVGTSVMRGIESAVSTGGHMKTYDGWTNKFIFPPYDFTVATSLVTNFHMPLSTMLMMVAAFGGYEIVLSAYDTALKEGYRFGAYGDAMLIL

SEQ ID NO: 64142 - protein, 364 aa, Barrientosiimonas humi
  misc_feature (1)..(364): tr|A0A542XGE7|A0A542XGE7_9MICO S-adenosylmethionine:tRN A ribosyltransferase-isomerase OS=Barrientosiimonas hum i OX=999931 GN=FB554_3057 PE=3 SV=1
MTTPAAHAATPLPAAGHAPGAGLAATGPPEQRGLRRDEVRLLVASGDGVTHTRFTRIADHLQPGDLVVVNNSATVAGQLDAVSDRRGAVVVHLATPLDDGAWVVELRSAPDAERPVLDAEAGERLRIADVTLTLVSGYPQDGSSPTGSGNRLWRAEVDGDLASRAERSGRPIAYGYLDRRYPLSTYQNVFSTVPGSAEMPSAGRPFTGGVLADLVGRGVATATVTLHTGVSSQEAGEGPQPERFEVPEVTARMVNATRAGGGRVVAVGTTVTRALESAVTPGGRVEATRGWTERLVTPSDPPRVVTGLVTGWHDPEASHLLLVEAVAGAELTERAYAAATSGGYLWHEFGDSALLLPSLVLPPP

SEQ ID NO: 64143 - protein, 358 aa, Bartonella apis
  misc_feature (1)..(358): tr|A0A1R0F6S8|A0A1R0F6S8_9RHIZ S-adenosylmethionine:tRN A ribosyltransferase-isomerase OS=Bartonella apis OX=16 86310 GN=queA PE=3 SV=1
MQVDLFDFELPEKQIALRPAVPRESARLLHVGKGGSLEDLHVRDLPSLLRKGDALVFNDTKVIKAQLQGERRRDAAIAHIGATLHKRVSPNEWLAFVRPAKRLKIGETIVFNKKDRSLADDDKLVAMVREKGENGEMLLEFDKSGAELDREIALIGHMPLPPYIALKRGEDKRDETDYQTVYAREEGAVAAPTAGLHFTKDLMQQIKDRGVEEYFVTLHVGAGTFLPVKVDDTKDHKMHSEIGHIDQQTADALMAVKKRGNRVIAVGTTAMRLLESAADEKGQLDAWAGSTDIFITPGYHFRFVDCLMTNFHLPRSTLFMLVSAFSGLDEMKHAYHHAIETGYRFYSYGDTSFLERKD

SEQ ID NO: 64144 - protein, 358 aa, Bartonella apis
  misc_feature (1)..(358): tr|A0A1U9MC25|A0A1U9MC25_9RHIZ S-adenosylmethionine:tRN A ribosyltransferase-isomerase OS=Bartonella apis OX=16 86310 GN=queA PE=3 SV=1
MQVDLFDFELPEKQIALRPAVPRESARLLHVGKGGCLEDLHVRDLPSLLKKGDALVFNDTKVIKAQLQGERRRGAAIAHIGATLHKRVSPNEWLAFVRPAKRLKIGETIVFNKQDRSLGDDNKLVATVREKGENGEMLLEFDKSGAELDREIALIGHMPLPPYIALKRGEDKRDETDYQTVYAREEGAVAAPTAGLHFTKDLMQQIKDRGVEEYFVTLHVGAGTFLPVKVDDTKDHKMHSEIGHIDQQTADALMAVKKRGNRVIAVGTTAMRLLESAADENGQLDAWAGSTDIFITPGYHFRFVDCLMTNFHLPRSTLFMLVSAFSGLDEMKHAYQHAIETGYRFYSYGDTSFLERKD

SEQ ID NO: 64145 - protein, 355 aa, Bartonella tamiae
  misc_feature (1)..(355): tr|J0ZKR7|J0ZKR7_9RHIZ S-adenosylmethionine:tRNA ribosy ltransferase-isomerase OS=Bartonella tamiae Th239 OX=10 94558 GN=queA PE=3 SV=1
MNVDLFDFELPEDCIALRPFVPRERGKLLHVAQDGSLKDFYVRDLIMLLREGDALVFNDTRVIKAQLMGLRQRNGTIAKIGVTLHMRVTENKWWAFARPAKRLKLGDEIIFSSSTPLGNTNLIAHVLEKGDEGDVLLEFETAGHNLHQLIAQIGHMPLPPYIALKRGEDLQDEKDYQTIYAKEEGAVAAPTAGLHFTQSLMDDLTKHGIEKHFVTLHVGAGTFLPVKVENTDDHKMHSEMGHIDTKTAAALMSVKKRGNRIVAVGTTALRLLESATDEKGQIQAWSGATNIFITPGYQWRCVDCLMTNFHLPKSTLFMLVSAFSGMKKMREAYNHAIKNGYRFYSYGDTSFLERN

SEQ ID NO: 64146 - protein, 351 aa, Basilea psittacipulmonis
  misc_feature (1)..(351): tr|A0A077DCB4|A0A077DCB4_9BURK S-adenosylmethionine:tRN A ribosyltransferase-isomerase OS=Basilea psittacipulmo nis DSM 24701 OX=1072685 GN=queA PE=3 SV=1
MSINPQLKLSDFDYPLPEALIAQHPASERKGSRLLWIDSKRECHDQQFSDLLKLLKPHDLLVFNNTKVIKARLFGQKESGGKVECLVERILTENRVLAHLKASKAPKTGTQLIFESEIKALVLGRQDSLFELQFPDQVLGLLDRYGHLPLPPYITHQADAHDDQRYQTVYAQKLGAVAAPTAGLHFDTEMIQALSSRGIQHTFVTLHVGAGTFQPVRVNDIKDHVMHSEWYEVSKEAQDAVLTCRQNGGRVIAVGTTSVRALESAATQGGVIEGKRCPIAHCDDTRLFITPGYEFKVIDGLITNFHLPQSTLLMLVSALMGIDTMKQAYAHAIEKQYRFFSYGDAMFIEPK

SEQ ID NO: 64147 - protein, 342 aa, Bathymodiolus azoricus
  misc_feature (1)..(342): tr|A0A1H6KMZ3|A0A1H6KMZ3_9GAMM S-adenosylmethionine:tRN A ribosyltransferase-isomerase OS=Bathymodiolus azoricu s thioautotrophic gill symbiont OX=235205 GN=queA PE=3 SV=1
MQLSDFDFDLPKSLIAQHPSKNRTDSRLLIGQSNLIDAQFHQIGDFIQSGDLLVMNNTKVIPARLFGHKDSGGKVEIMIERLLNDKQVLAMIRASRAPQIGSKITLENSEKATVLNKQDGFYTLEFATDSLLALLDNVGHIPLPPYIERTDDEQDLSRYQTVYAKHDGAVAAPTAGLHFDDALLNALKDKGINSAFVTLHVGAGTFQPVKTDNIKDHTMHSEYYEISQDTVDKIHQTKKSGGRVIAIGTTAVRSLESAAKSGTLEATREETDIFIYPGYEFKVVDMMVTNFHLPKSSLLMLVSAFIGRERMMEIYQHAIEQQYRFFSYGDAMLLTAKNSNGK

SEQ ID NO: 64148 - protein, 337 aa, Bathymodiolus brooksi
  misc_feature (1)..(337): tr|A0A482YJN6|A0A482YJN6_9BACT S-adenosylmethionine:tRN A ribosyltransferase-isomerase OS=Bathymodiolus brooksi thiotrophic gill symbiont OX=1052209 GN=queA PE=3 SV=1
MQLKAFDFNLPTELIAQNPPKNRTDSRLLIGQSSIIDAQFNQIADFIQSGDLLVMNNTKVIPARLFGAKATGGKVEIMIERLLDENQALAMIRASRAPQMGSKITLENGETATVLNKQGSFYTLEFATDSLLTLLENVGHIPLPPYIERTDNQQDLDRYQTVYAQKDGAVAAPTAGLHFDDKLLTKLKNKGINHAFVTLHVGAGTFVPVKTDNIKDHTMHSEIFEINQSTVDKINQTKANGGRIIAIGTTTVRVLESSLKNGKLIAQQGETNIFIYPGYQFQIIDSLITNFHLPKSSLLMLVSALIGHTKMMEIYQHAIKERYRFFSYGDAMLLERV

SEQ ID NO: 64149 - protein, 337 aa, Bathymodiolus heckerae
  misc_feature (1)..(337): tr|A0A482Z2U8|A0A482Z2U8_9BACT S-adenosylmethionine:tRN A ribosyltransferase-isomerase OS=Bathymodiolus heckera e thiotrophic gill symbiont OX=1052212 GN=queA PE=3 SV= 1
MLLSDFDFDLPKRLIAQNPPQNRTDSRLLVANKPIVDAHFHQIMDFIKPGDLLVMNNTKVIPARLFGHKASGGKVEIMIERLLNEKQVLAMIRASRAPKIGSCITLENGDIAQVISKENGFYTLDFVTDSLLDLLNKVGHIPLPPYIERSDEEDDLERYQTVFAQREGAVAAPTAGLHFDDELIDQLKKQGVDHVFVTLHVGAGTFQPVKAETISEHKMHSEYYEVDQVTVDKINQIKANNGRVIAIGTTAIRSIESAAKSGELKAVKEETDIFIYPGYEFKVIDMLITNFHLPKSSLLMLVAAFIGQQRMMDIYQHAIDNEYRFFSYGDVMLLDRI

SEQ ID NO: 64150 - protein, 337 aa, Bathymodiolus heckerae
  misc_feature (1)..(337): tr|A0A483A9J7|A0A483A9J7_9BACT S-adenosylmethionine:tRN A ribosyltransferase-isomerase OS=Bathymodiolus heckera e thiotrophic gill symbiont OX=1052212 GN=queA PE=3 SV= 1
MQLKDFDFDLPKPLIAQLPPKNRTDSRLLVAQSRIIDTKFNNIADFLQSGDLLVMNNTKVIPARLFGHKDSGGKVEIMIERLLDESQVLAMIRASRAPQIDSKITLENGETATILNKKDGFYTLEFATNSLLALLEDIGHIPLPPYIERADDEQDLDRYQTVYAQRDGAVAAPTAGLHFDNELLTSLQNQGINSAFVTLHVGAGTFQPVKTDNITDHIMHSECYDISQTTIDKINQTKANGGRIIAIGTTTVRVLESSIKNGKLIAQQSETDIFIYPSYQFQIVDGLITNFHLPKSSLLMLVSAFIGRERMMEIYQHAIKERYRFFSYGDAMLLDRI

SEQ ID NO: 64151 - protein, 341 aa, Bathymodiolus platifrons
  misc_feature (1)..(341): tr|A0A1Z5H879|A0A1Z5H879_9GAMM S-adenosylmethionine:tRN A ribosyltransferase-isomerase OS=Bathymodiolus platifr ons methanotrophic gill symbiont OX=113268 GN=queA PE=3 SV=1
MKKSDFYYELPDELIAQQPLAERSASRLLCLDKNSDGIEDRHFTDLLALLNKDDLLVLNNTKVIPARLFGHKQSGGKVEILIERVLNEREVLAHMRSSKSPKAGALIRLDAGFQCLVLGRVDDLFHLQFQGELALADILEHIGHMPLPPYIERADNINDQTRYQTVFAQKSGAVAAPTAGLHFDDAMMDKIRAKGGGIAFVTLHVASGTFRPVKVENLAEHVMHKEYFEVPQETVAAVQQTKSQGGRVIAIGTTAMRSLESASRTGELHACQGDTDLFITPGYQFKTVDAMLTNFHLPESTLLMLVSAFSGYERIKKVYQHAIAQKYRFFSYGDAMFIQRE

SEQ ID NO: 64152 - protein, 340 aa, Bathymodiolus thermophilus
  misc_feature (1)..(340): tr|A0A1J5UHJ0|A0A1J5UHJ0_9GAMM S-adenosylmethionine:tRN A ribosyltransferase-isomerase OS=Bathymodiolus thermop hilus thioautotrophic gill symbiont OX=2360 GN=queA PE= 3 SV=1
MQLKAFDFNLPSELIAQNPPKNRTDSRLLVGQSSIIDAQFNQIADFLQSGDLLVMNNTKVIPARLFGVKATGGKVEIMIERLLDENQALAMIRASRAPQINSKITLENGETATILNKQGSFYTLEFSTDSLLTLLDNVGHIPLPPYIERTDNQQDLDRYQTVYAQKDGAVAAPTAGLHFDDKLLTKLKNKGIDHAFVTLHVGAGTFVPVKTDNIEDHTMHSEIFEINPATVDKINQTKANGGRIIAIGTTTVRVLESSIKNGKLIAQQGETDIFIYPGYQFQIVDSLITNFHLPKSSLLMLVSAFIGYTQMMAIYQHAIKERYRFFSYGDAMLLNKQNKQ

SEQ ID NO: 64153 - protein, 360 aa, Bauldia litoralis
  misc_feature (1)..(360): tr|A0A1G6B4Y2|A0A1G6B4Y2_9RHIZ S-adenosylmethionine:tRN A ribosyltransferase-isomerase OS=Bauldia litoralis OX= 665467 GN=queA PE=3 SV=1
MRVDLFDFELPETSIALRPANPRDAARLLVVKPGVALDDRHVSDLPDLLRPGDVLVVNDTKVIPAELRGERIRGEHVTPVSVTLYERSGPARWRAFARPARRLSPGDRLRFGATVDNACLAAGLDATVEEKGEGGDVLIRFDLSGPVLDEAVHAIGHMPLPPYIAAKRGEDASDRADYQTIYAREEGAVAAPTAGLHFTDGLFERLSAAGIGLQRVTLHVGPGTFLPVKAEDTADHRMHAEWGTVSADVADALNRARAAGGRIVAVGTTSLRLLESAATDDGLVAPFSDETSIFITPGYRFKAVDILMTNFHLPRSTLFMLVSAFSGRETMVAAYRHAIDSGYRFYSYGDASLLFPEIRP

SEQ ID NO: 64154 - protein, 353 aa, Baumannia cicadellinicola
  misc_feature (1)..(353): sp|Q1LSP1|QUEA_BAUCH S-adenosylmethionine:tRNA ribosylt ransferase-isomerase OS=Baumannia cicadellinicola subsp . Homalodisca coagulata OX=374463 GN=queA PE=3 SV=1
MHVADFSFNLPKNLIARYPLPERSTCRLLSLDGHSGAIKHNVFTDILDQLSLGDLLVFNNTRVIPARLFGRKISGGKVEVLVERVLDNQRVLAHIRASKTPKIDTLLLLGDNENIRAIIVARHQIWFELLFDDQRDILTILNDAGHIPLPYYLDRPDYSLDRELYQTVYSQHPGAIAAPTAGLHFDQQLLSALRVKGVEMVFITLHVGTGTFQPIKVKKIEHHHMYSEYTEVPHTVVDAVIACKSRGNRVVAVGTTSVRSLESAIVSVSNSKHTMLAPFCGETSIFIYPGYRFRVIDALITNFHLPQSTPIMLVSAFAGYQHTFNAYREAVNLAYRFLSYGDAMFITNNNSVF

SEQ ID NO: 64155 - protein, 345 aa, Bavariicoccus seileri
  misc_feature (1)..(345): tr|A0A3D4S309|A0A3D4S309_9ENTE S-adenosylmethionine:tRN A ribosyltransferase-isomerase OS=Bavariicoccus seileri OX=549685 GN=queA PE=3 SV=1
MPLTVNDFDFNLPENLIAQVPLKDRSASRLLHLNVTDHTMTDESFKDIVSILKSGDVLVMNNTKVLPARLFGTKEDTGGHLEVLLLHQENDDVWETLVKPAKRAKVGTVISFGDGQLTGEVIEVLEHGGRRVKFSYQGVFLEILDQLGEMPLPPYIKEKLRDKNRYQTVYAKEEGSAAAPTAGLHFTTEILEALKAKGVKLCYVTLHVGLGTFRPVSAVNISDHHMHSEYYHIDQQTCDVINSARSENRRIVAVGTTSIRTLESVTKDRTTPLEPMSGWTSIFISPGFQFKAVDAFITNFHLPKSTLVMLVAAYAGRSFILEAYDHAIKEKYRFFSFGDAMFLEK

SEQ ID NO: 64156 - protein, 346 aa, Bdellovibrio bacteriovorus
  misc_feature (1)..(346): tr|Q6MKY9|Q6MKY9_BDEBA S-adenosylmethionine:tRNA ribosy ltransferase-isomerase OS=Bdellovibrio bacteriovorus (s train ATCC 15356 / DSM 50701 / NCIB 9529 / HD100) OX=26 4462 GN=queA PE=3 SV=1
MKLTDLDFSYPEELIATSPVRPSRVMWVEGELEPQEISLQDLLSRIPAGDVLVVNNTRVLKRRVFSGDVEILFLKQINATDWEVLFPSKKFKIGSVLELPLGVQMTLQQKGRPQTVRLSQEVSEDYFQKVAELPLPPYIQKAREQRHTVDADESWYQTAWNKNPGSFAAPTASLHFSAEDIEGLKSRGVKVLEVTLHVGLGTFLPVTAEDLNDHDMHEEYVEISAATWSAVQKAKAEGRKIWSLGTTTSRSLESAAQGLLGAMSETGFSGFTKLLIQPGYQYKVVDCLMTNFHQPQSTLVALVAGFSSLNRVKACYQWAIERKFRLFSYGDLTVWVAAAKSAVHEG

SEQ ID NO: 64157 - protein, 339 aa, Bdellovibrio bacteriovorus
  misc_feature (1)..(339): tr|A0A150WDK1|A0A150WDK1_BDEBC S-adenosylmethionine:tRN A ribosyltransferase-isomerase OS=Bdellovibrio bacterio vorus OX=959 GN=AZI85_08770 PE=3 SV=1
MKLADLDFSFPEELIATSPQRPSRVMWVEGGVPQEITLQELMARIPAGDVLVVNNTRVLKRRVFAGDVEILFLKQTSAMDWEVLFPSKKYKVGASLELPLGVTMTLVEKGRPQKVRLNQEVSEDYFQKVAELPLPPYIQKAREQRHTVDADESWYQTAWAKTPGSFAAPTASLHFSAQDMEALKAKGVALCEVTLHVGLGTFLPVTAEDLNDHDMHEEYVEVSAATWAVVNNARKNGHKIWSLGTTTTRSLESVGNGLLQGNPEEGFRGFTKLLIQPGYQFRVVNRLLTNFHQPQSTLLALVAGFSSLETVKACYHWAIERKFRLFSYGDLSCWTETKQ

SEQ ID NO: 64158 - protein, 335 aa, Bdellovibrio exovorus
  misc_feature (1)..(335): tr|M4VAY9|M4VAY9_9PROT S-adenosylmethionine:tRNA ribosy ltransferase-isomerase OS=Bdellovibrio exovorus JSS OX= 1184267 GN=A11Q_1424 PE=3 SV=1
MKLADLQFDFPEELIATSPVRPTRVMWVEPSQVPVEITIPELLQKIPAGDVLVVNNTKVLKRRVFSEENIEILFLDRVEQKANSNLWKVLFPSKKYKIGDELKLPQGFTMKLVEKGRPQIVEVFPAISDLDFATIAELPLPPYIQKARQERHNVEADESWYQTAWASQAGSMAAPTASLHFNRQDLQSLASRGVHVIELTLHVGLGTFLPVTAEDLSQHQMHSEQYEISEDSWLKIQKAKQESSKVWALGTTTTRVLESVSRTGVLAGSTDILLQEGSEFQIVDRLLTNFHQPESTLLALVAGFSSLDRVKESYKWAIQHKFRLFSYGDLSVWLK

SEQ ID NO: 64159 - protein, 336 aa, Bdellovibrio sp.
  misc_feature (1)..(336): tr|A0A514XHU5|A0A514XHU5_9PROT S-adenosylmethionine:tRN A ribosyltransferase-isomerase OS=Bdellovibrio sp. ZAP7 OX=2231053 GN=queA PE=3 SV=1
MKITDLVFTYPEELVATSPQRPSRVMWVENNQPREISLVELLGKMSAGDVLVVNNTRVLKRRVFSGDVEILFLKQNSELEWEVLFPSKKYKIGQSLELPLGVTMTLKEKGRPQTVTLNQAVTEDYFQKVAELPLPPYIQKARNERHTVDADESWYQTAWAKEPGSFAAPTASLHFSKSDMDQLRAQGVQIVEVTLHVGLGTFLPVTAEDLNDHDMHEEYVEISAQSWQAIQAAREAGNLIWSLGTTTTRSLESAAGGLLQGSATEGFRGFTKLLIQPGYKFKVVQRLLTNFHQPESTLLALVSGFSSLETVKTCYLWAIERKFRLFSYGDLTVWVD

SEQ ID NO: 64160 - protein, 343 aa, Bdellovibrio sp.
  misc_feature (1)..(343): tr|A0A317JK83|A0A317JK83_9PROT S-adenosylmethionine:tRN A ribosyltransferase-isomerase OS=Bdellovibrio sp. OX=2 8201 GN=C5B49_02900 PE=3 SV=1
MQRRELCFDFPESLIATEPRRPSRVMWVEGPAASPIELDLETLKSQLHPGDVVVVNDTRVVKRRVFTHEGLEILFLREIEPRQWQVLFPSRELKVGAQIFLPGGVKLTLLRKGRPQLVLVNADLQESYFERFGELPLPPYIQKARGERHHRGNDGSKDGKLEEKWYQTAWNAKPGSLAAPTASLHWTRQDLEDLRRRDVGVEQLTLHVGLGTFLPVTADRLQDHAMHEEWVEIPAATWERTRQCRGRVWALGTTVARALESAARGQLSKDQQGFFGGTNLFLYPGQEWLLVKGLLTNFHQPESTLLALVASFCDLPTVKAAYQWAIKNRFRLFSYGDLTAWKR

SEQ ID NO: 64161 - protein, 373 aa, Bdellovibrionaceae bacterium
  misc_feature (1)..(373): tr|A0A2E8I5N9|A0A2E8I5N9_9PROT S-adenosylmethionine:tRN A ribosyltransferase-isomerase OS=Bdellovibrionaceae ba cterium OX=2026715 GN=queA PE=3 SV=1
MKSKIHLQLSDFIYDLPEHAIAQEPLEKRDSAKLLVKHADGKISHKTIKELASCIPSHALLIVNETKVIPSRLFGYTDQGGRIEIMLLEQDAADQNQWYIIGKPMKKFKTGFKINFDKSCIGSIVEGPTSHGDQPAVAKIKFTADIPFDQWLSMNGYIPLPPYIKREHAKTASSSPDRERYQTVYAAEEYPGSAAAPTAGLHFTQEVFESLQERNIDIAKVTLHVGAGTFLPVKSENIDLHKMHCERYLINRQEWSKIKSAQSKNRPIIAVGTTTFRCIESFQLMLNQSGDSSEKHLDQWQQTDLFIRPKFASDIYQPLTINGIMTNFHQPGSTLLMLISSLLGYGTTQSIYKSAIEKKYRFLSYGDSSLLFL

SEQ ID NO: 64162 - protein, 402 aa, Bdellovibrionaceae bacterium
  misc_feature (1)..(402): tr|A0A2E3UVW6|A0A2E3UVW6_9PROT S-adenosylmethionine:tRN A ribosyltransferase-isomerase OS=Bdellovibrionaceae ba cterium OX=2026715 GN=queA PE=3 SV=1
MITNFIKKNSKFMSLIKMEEVNKGKQLNLNDFSFHVPDDQVAHFPAKKRDSSKLLFYKGKSEIKNFDFKSLPDILPQGTLLIFNNTKVFPCRLQAQKDTGAQLEVFLLSLPNEKNPNCQAIVKPIKRIKTGTKLYFQEGVIAEVGDFNNNGSIPTVSLKFFSPPGVSDFHCWIDRFGQTPLPPYIKRQTDDSKNAEIDKKRYQTVYARCEGSTAAPTAGLHFTKDLLEELERSGIKSSCVTLHVGLGTFAPVRNNDIKTHKMHKEFYFIPSETFEAIKENIRSKNPIVAVGTTSLRAVESLFYHDCKSFENLSSYVDAWNETDLFIYPKTKNDFFSPRVLDGLITNFHQPQSTLYMLISALLGFDEAKRVYDYAVKNKFRFFSYGDSSLLWFKKKEMDDLKS

SEQ ID NO: 64163 - protein, 362 aa, Bdellovibrionales bacterium
  misc_feature (1)..(362): tr|A0A1F3SGM1|A0A1F3SGM1_9PROT S-adenosylmethionine:tRN A ribosyltransferase-isomerase OS=Bdellovibrionales bac terium GWA2_49_15 OX=1797384 GN=queA PE=3 SV=1
MNDFLLKSYAYPLPQDLVADRPLAERDQSRLLVYDASLGQSTHTFFHKLSQHLPPQCLLVFNNTKVFPCRLQGKKRSGGKAELFVLSLRPNEEGLYECLIGSNARKDPGDQFIFGTNSGTNSGTRSELLVTIVKRSENETFLVNFDGPDITALLQREGQVPIPPYIRRGVSDGRDREDYQTVYARNLGATAAPTAGLHFTGPGMQALLEHGHEQAFVTLHVGPGTFRPVSAENILEHKMHSENFFIEQQSWRKIVQARATGRPIVAVGTTSLRALESAHGIKDFQADQVYPTKIFLYPGRPIHSIDGLITNFHLPESTLLMLVSALVGREKILALYNQAIEQRYRFFSYGDAMFITGIQHAK

SEQ ID NO: 64164 - protein, 339 aa, Bdellovibrionales bacterium
  misc_feature (1)..(339): tr|A0A1F3SYC4|A0A1F3SYC4_9PROT S-adenosylmethionine:tRN A ribosyltransferase-isomerase OS=Bdellovibrionales bac terium RBG_16_40_8 OX=1797388 GN=A2Z20_04760 PE=3 SV=1
MLTADFYYNFPEHLVATKPHENFRTMWLGANDSLPSEIAKNELLLRLNPGDVLAINDTRVLRRRVTALNGLEILFLKQISANNWEVLCPASKLRNGEEFCLPNDINARLEARGLPQKLWVSKPFDENYFVKHGELALPPYIQKARGNRKNYPEEEKWYQTAWAEKLGSQAAPTASLHFTNSDLDFLRGRGVQIAPLTLHVGMGTFLPIKSKSLEEHHMHNESTQVPLSTIKIISHAKSKNKKVWALGTTVTRALESWGHGLLREDANRDFIGDTELFIRPGFRFEVVDGLFTNFHQPCSTLLALVSAFAGRDRVISSYEWAISQNFRLFSYGDLTAWTR

SEQ ID NO: 64165 - protein, 345 aa, Beggiatoa alba
  misc_feature (1)..(345): tr|I3CGV7|I3CGV7_9GAMM S-adenosylmethionine:tRNA ribosy ltransferase-isomerase OS=Beggiatoa alba B18LD OX=39549 3 GN=queA PE=3 SV=1
MMMRRSDFNYELPPELIAQYPSPTRTGSRLLFVDTRKQQLTNHTFKEFPQFLDEKDLLIFNNTKVIPARLFGQKTTGGRVEILVERVLDQHRFLGQMRASKPPKPETAIQLEGGITVIVIGKIDNFFELRFEDERPVYEILEAIGHIPLPPYIDRQDDNIDQSRYQTVYAQNLGAVAAPTAGLHFDQTLLDEISAKGIQQTFVTLHVGAGTFSPIRVDDLSQHVMHSEWVSVSESVCEQIRATRARGGRVVAIGTTAVRALETASQSGEIQPYEGETRLFITPSYVFKSVDALLTNFHLPESTLLMLVSAFAGTEFTLQAYRYAVQEKYRFFSYGDAMWINHRAG

SEQ ID NO: 64166 - protein, 345 aa, Beggiatoa leptomitoformis
  misc_feature (1)..(345): tr|A0A2N9YJR1|A0A2N9YJR1_9GAMM S-adenosylmethionine:tRN A ribosyltransferase-isomerase OS=Beggiatoa leptomitofo rmis OX=288004 GN=queA PE=3 SV=1
MRRSDFYYDLPPHLIAQKPSLTRTSSRLLHIDTQTQRLTNHIFKDFPHCLEPNDLLVFNNTKVIPARLFGQKATGGRVEILVERILDDHRILGQMRASKPPKPNTPILLEGGITVVVLGKIDNFFELRFADERSVYDILQAIGHIPLPPYIVRDDDNIDQERYQTVYAQNLGAVAAPTAGLHFDKQLLAEISAKGIQQTFVTLHVGAGTFSPIREEDLSLHVMHSEWVSVSTEVCEQIRATRARGGRVIAIGTTAVRALETASQSGEIQPYQGETRLFITPGYVFKSVDALLTNFHLPESTLLMLVSAFAGTDLTLQAYRYAVQQQYRFFSYGDAMWINHKVTTI

SEQ ID NO: 64167 - protein, 95 aa, Beggiatoa sp.
  misc_feature (1)..(95): tr|A7C647|A7C647_9GAMM S-adenosylmethionine:tRNA ribosy ltransferase-isomerase OS=Beggiatoa sp. PS OX=422289 GN =BGP_5753 PE=3 SV=1
MRALETASTSGVIKPYEGETRLFITPGYHFQTVDALLTNFHLPESTLLMLVCAFAGQAQVLDAYRHAVAQHYRFFSYGDAMFVENGNREWVMGNG

SEQ ID NO: 64168 - protein, 356 aa, Beggiatoa sp.
  misc_feature (1)..(356): tr|A0A1W9WD32|A0A1W9WD32_9GAMM S-adenosylmethionine:tRN A ribosyltransferase-isomerase OS=Beggiatoa sp. 4572_84 OX=1972449 GN=queA PE=3 SV=1
MQRTDFFYDLPKHLIAQHPLDSRTGSRLLYIDPHTGQFQDRHFVDFPSLLAPGDLLVFNDTRVIPARLFGHKASGGKVEVLVERVLDDNRVLAQLRTSKAPKPNTRLYFEGDVNVTVVQRVENFFELQFDDSRPVYDILQAIGHIPLPPYIQRTDTQLDSAHYQTVYARQPGAVAAPTAGLHFDEAMLEQIDAMGVERAFITLHVGAGTFASVRVDDIRQHTMHTERLHVCAQVCEQVAATRARGGRVIAIGTTTVRALETAWAEGVIKPYDGETRLFITPGYRFRSVDALLTNFHLPESTLLMLVCAFAGQSQVLAAYRHAVAQQYRFFSYGDAMFVTDTAVQSGKRRPNWSTKL

SEQ ID NO: 64169 - protein, 367 aa, Beijerinckia indica
  misc_feature (1)..(367): sp|B2IHG4|QUEA_BEII9 S-adenosylmethionine:tRNA ribosylt ransferase-isomerase OS=Beijerinckia indica subsp. indi ca (strain ATCC 9039 / DSM 1715 / NCIB 8712) OX=395963 GN=queA PE=3 SV=1
MRVDLFDFDLPPERIALRPVEPRDASRLLVVRPDSGDMTDHGMRELPDFLRAGDVLVVNDTRVIPARLHGFRSRGESRAKIEATLHKREGEALWRAFVKPAKKLRVGETICFARQEPGTEVESLEAEVLEKGAEGEVVLGFNRAGAALDAALDLLGEMPLPPYIAGKRAPDSQDSLDYQTLFANRSGAVAAPTASLHFTPRLIAAIEARGVTICKVTLHVGAGTFLPVKAEDTDAHRMHAEWGEVSAEVAAFLNKVHAAGGRIIAAGTTSLRLLESAVDEDGLIQPFQGETSIFMTPGFRFRAVDILLTNFHLPRSTLFMLVCAFAGLETMRRAYAHAIAASYRFYSYGDACLLFRATRNTSTGAAL

SEQ ID NO: 64170 - protein, 367 aa, Beijerinckia sp.
  misc_feature (1)..(367): tr|A0A1H4QQY6|A0A1H4QQY6_9RHIZ S-adenosylmethionine:tRN A ribosyltransferase-isomerase OS=Beijerinckia sp. 28-Y EA-48 OX=1882748 GN=queA PE=3 SV=1
MRVDLFDFDLPEDRIALRPAEPRDSARMLVVEPDAPLRDHIVGDLPTFLRPGDVVVVNDTKVIPARLSGVRVRGEAVARIEATLHKREGDSRWRAFVRPAKKLNVGERIRFGDSSESMACLLASLDAEVIEKGEGGEALLEFALTGAALDDAIVNLGSMPLPPYIASKRGEDTHDASDYQTLFARESGAVAAPTAGLHFTPELVASLEARGVAIHKVTLHVGAGTFLPMKVDNTDEHRMHAEFGVISPEVADALNRARRAGGRLLAIGTTSLRILETAVDEQGVIHPIAKDTSIFITPGYRFRAIDMLLTNFHLPRSTLFMLVSAFGGLTAMKAAYAHAIAKDYRFYSYGDCCLLTRAADPTKTMDS

SEQ ID NO: 64171 - protein, 353 aa, Beijerinckiaceae bacterium
  misc_feature (1)..(353): tr|A0A5E4NYY6|A0A5E4NYY6_9RHIZ S-adenosylmethionine:tRN A ribosyltransferase-isomerase OS=Beijerinckiaceae bact erium RH AL1 OX=2572036 GN=queA PE=3 SV=1
MRVDLFDFTLPPDRIALRPAEPRESARLLDIAPDAPLADRRIADLPTLLRPGDVLVVNDTRVIPARLSGLRRRAGTEARIEATLIRRTAPDTWRAFLKPAKKVADGEAIAFGRDDDALDAVCLEHVGEGEVALRFSCAGAAIDDALARHGTMPLPPYIAGKRAVDAQDDADYQTIFAREPGAVAAPTASLHFTPALLDAIRARSVEIATLTLHVGAGTFLPVKAEDTDDHHMHAEWGTIDAATAALLNEARAKGGRLVAAGTTSLRLLESAAREDGTLQPFHGETSIFIAPGYRFRAVDCLLTNFHLPRSTLFMLVAAFAGLERMQAAYAHAIAAHYRFYSYGDACFLHRAPA

SEQ ID NO: 64172 - protein, 358 aa, Beijerinckiaceae bacterium
  misc_feature (1)..(358): tr|A0A522GHG3|A0A522GHG3_9RHIZ S-adenosylmethionine:tRN A ribosyltransferase-isomerase OS=Beijerinckiaceae bact erium OX=1978229 GN=queA PE=3 SV=1
MRVDLFDFDLPPERIALRPVVPRDASRMLVVDPRATQPLEDRKIRDLPSLLQPGDVLVVNDTRVIPARLEAMRKRGDHSAKIEILLHRRETENVWRAFARPAKKLKPGDTVHFIKSGAEPIEAEVCGEHSDGEVRLAFALSGTALDQAIETLGEMPLPPYIAGKRATDARDSEDYQTLFAKRSGAVAAPTASLHFTPELVEAIRARGVAIAPVTLHVGAGTFLPVKATDTNAHRMHAEWGMLSEEAAAAMNTARVNGGRIVSAGTTPLRLIETAAQANGMIQPFSGETDIFITPGYRFKGVDLLLTNFHLPKSTLFMLVSAFSGLETMRAAYRHAIDESYRFYSYGDACLLHRASTQP

SEQ ID NO: 64173 - protein, 349 aa, Belliella baltica
  misc_feature (1)..(349): tr|I3Z0E3|I3Z0E3_BELBD S-adenosylmethionine:tRNA ribosy ltransferase-isomerase OS=Belliella baltica (strain DSM 15883 / CIP 108006 / LMG 21964 / BA134) OX=866536 GN=q ueA PE=3 SV=1
MKLSDFKFEVPKKLIALHPADNRDESRLMVVHRKTGEIEHRLFKDITDYFGEGDVFVMNNTKVFPARLYGNKEKTGAKIEVFLLRELNQELKLWDVLVDPARKIRVGNKLYFGDSDLVAEVIDNTTSRGRTIRFLFDGSEEEFYKTIDTLGETPILKEFIDRKVEPEDRERYQTIFAEHVGAVAAPTAGLHFTPHLLRRLELKGVEVSPITLHVGLGTFRQVDVEDLTKHKMDSENYDIPQKTVDLVNESLDNKKRVVAVGTTVLKTIESSVTANNRLKVSSGWTDKFIIPPYDFKIANTLITNFHLPESTLLMTASAFGGYDLIMKAYKEAIKEKYRFFSYGDAMLIL

SEQ ID NO: 64174 - protein, 408 aa, Belliella baltica
  misc_feature (1)..(408): tr|I3Z8Q6|I3Z8Q6_BELBD S-adenosylmethionine:tRNA ribosy ltransferase-isomerase OS=Belliella baltica (strain DSM 15883 / CIP 108006 / LMG 21964 / BA134) OX=866536 GN=q ueA PE=3 SV=1
MNLSTAIAELKLSDYEYTLPEEKIAKFPLEKRDASKLLHFKDGKIEHLQFAQLPDLVPVGSLMVFNNTKVIPARLIFQRSTGAKIEIFLLKPIAPTTVINEVMIKTETVSWECMIGNLKKWKTDEILSGEVIYQNKIIKLNASLIDQENRIVKFTWDAEVPFVSIVEASGEVPLPPYLNRKPTEEDRPRYQTVYSKNEGAVAAPTAGLHFTDKVLQKLAANKVKEEFLTLHVGAGTFQPIKTETITAHNMHSEQVVVSISTIQNITEHTQQLIAVGTTSMRSLESLYWFGVKLLREEGHEFLIPKLYPYQDFDQLPTRKESFETILTFMKKNNLSEITGSTEIFIMPGYNFKVCDGLVTNFHQPGSTLILLIAAFTKKYWKQIYKEALENDYRFLSYGDSSLLWCEKG

SEQ ID NO: 64175 - protein, 405 aa, Belliella buryatensis
  misc_feature (1)..(405): tr|A0A239CZR5|A0A239CZR5_9BACT S-adenosylmethionine:tRN A ribosyltransferase-isomerase OS=Belliella buryatensis OX=1500549 GN=queA PE=3 SV=1
MSSNTLDQLKLSDYEYTLPEEKIAKFPLEKRDASKLLQYKNGLINHLAFSQLPDLIPSGSLMVFNNTKVIPARLIFQRETGAKVEIFLLKPLLPTTVINEVMINTVSVTWETMIGNQKKWKDGEVLSGEVIYQGTRIQLKAHLEDRARRIVKFTWTGNAPFVSIVEASGEVPLPPYLNRKATEVDKPRYQTVYSKKEGAVAAPTAGLHFTEEVLGKLSRNEVKEAFLTLHVGAGTFQPIKAEKITDHAMHSEQVVVSKSTITSLANHNDKLIAVGTTSMRSLESLYWYGVKLINEGHVPFLIPKLYPYEFHMPLPSRQESFAAILKMMILENLDEITGSTEIFIMPGYDFKVCDGLVTNFHQPGSTLILLVAAFTNGNWKEIYKQALEMEYRFLSYGDSSLLWKS

SEQ ID NO: 64176 - protein, 349 aa, Belliella buryatensis
  misc_feature (1)..(349): tr|A0A239GA39|A0A239GA39_9BACT S-adenosylmethionine:tRN A ribosyltransferase-isomerase OS=Belliella buryatensis OX=1500549 GN=queA PE=3 SV=1
MKLSDFKFEVPRKLISLYPAENRDESRLMVVHKKTGEIEHRMFKEITDYFGEGDVFVMNNTKVFPARLYGNKEKTGAKIEVFLLRELNQELRLWDVLVDPARKIRVGNKLYFGDSDLVAEVIDNTTSRGRTIRFLFDGTDEEFYKTIDTLGETPLLKEFIDRKIEPEDRERYQTIFAQHVGAVAAPTAGLHFTPHLLKRLELKGVEVSPITLHVGLGTFRQVDVEDLTKHKMDSENYDIPQRTVDLVNDALDNKKRVVAVGTTTLKTVESSVTANNRLKVSDGWTDKFIIPPYDFKIANALITNFHLPESTLLMTASAFGGYDLIMKAYQEAIKEKYRFFSYGDAMLII

SEQ ID NO: 64177 - protein, 405 aa, Belliella pelovolcani
  misc_feature (1)..(405): tr|A0A1N7MQ65|A0A1N7MQ65_9BACT S-adenosylmethionine:tRN A ribosyltransferase-isomerase OS=Belliella pelovolcani OX=529505 GN=queA PE=3 SV=1
MSSNTLDQLKLSDYEYTLPEEKIAKFPLEKRDASKLLHYKDGLINHLAFSQLPDLIPSGSLMVFNNTKVIPARLIFQRETGAKVEIFLLKPLLPTTVINEVMINTESVTWETMIGNQKKWKDGEILSGEVIYQGTRIQLKAHLEDRTNRIVKFTWTGNAPFVSIVEASGEVPLPPYLNRKATEEDKPRYQTVYSKKEGAVAAPTAGLHFTEEVLAKLADKNVKEEFLTLHVGAGTFQPIKAEKITEHAMHSEQVVVTKSTIATLSNHSEKLIAVGTTSMRSLESLYWYGVKLIQEGHVPFLIPKLYPYQSHNMLPSRQESFAAILKMMESEHLEEITGSTEIFIMPSYDFKVCDGLVTNFHQPGSTLILLVAAFTNGGWKEIYDQALKMEYRFLSYGDSSLLWRS

SEQ ID NO: 64178 - protein, 349 aa, Belliella pelovolcani
  misc_feature (1)..(349): tr|A0A1N7PQ72|A0A1N7PQ72_9BACT S-adenosylmethionine:tRN A ribosyltransferase-isomerase OS=Belliella pelovolcani OX=529505 GN=queA PE=3 SV=1
MKLSDFKFEVPKKLISLYPAENRDESRLMVVHKKTGEIEHRMFKEITDYFGDGDVFVMNNTKVFPARLYGNKEKTGAKIEVFLLRELNQELRLWDVLVDPARKIRVGNKLYFGDSDLVAEVIDNTTSRGRTIRFLFDGTDEEFYKTIDTLGETPLLKEYIDRKIEPEDRERYQTIFAEHVGAVAAPTAGLHFTPHLLKRLELKGVEVSPITLHVGLGTFRQVDVEDLTKHKMDSENYDIPQRTVDLVNEALDNKKRVVAVGTTTLKTIESSVTANNRLKVSNGWTDKFIIPPYDFKIANALITNFHLPESTLLMTASAFGGYDLVMKAYQEAIKEKYRFFSYGDAMLII

SEQ ID NO: 64179 - protein, 339 aa, Bellilinea caldifistulae
  misc_feature (1)..(339): tr|A0A0P6XPX8|A0A0P6XPX8_9CHLR S-adenosylmethionine:tRN A ribosyltransferase-isomerase OS=Bellilinea caldifistu lae OX=360411 GN=queA PE=3 SV=1
MRTSDFDYYLPPERIAQHPIEPRHNARLLVYDRKTGKMDHRIFYDLPEYLNAGDVLVINQTRVIPARIFGFKPSGGKVEILLLKRESDLVWEALVGGKKIREGTILQLVEGPLAVVEQVLDGARRLIRFETEIEPYLEKQGQMPLPPYIHEKLEDPERYQTVFARQPGSAAAPTAGLHFTPELIQLLEQKGILFGRVTLHVGLDTFAPVTEEDPRQHAIHSEWCELDEETASLINSARAKGGRIIAVGTTSVRTLESAGVNAQSGQVVAPFHGSTRLYILPGFTFKAVDAMITNFHLPRSTLLMLVSAFAGREQILRVYEEAIRREYRFYSFGDAMLIL

SEQ ID NO: 64180 - protein, 348 aa, Belnapia rosea
  misc_feature (1)..(348): tr|A0A1G6KLG3|A0A1G6KLG3_9PROT S-adenosylmethionine:tRN A ribosyltransferase-isomerase OS=Belnapia rosea OX=938 405 GN=queA PE=3 SV=1
MRTEDFDFDLPERLIAQAPARPRDAARLLVVGRDGAGDRGMRDLPGLLRPGDIMVVNDTRVIPARLRGQRGDAAVEIMLNRAEGGGLWEALVRNARRLRPGDTVAIEGAPALAPRVVERREGGMVLLDFGPDQAALAMALEAAGEVPLPPYIARPEGPRPEDREDYQTIFAARPGAVAAPTASLHFTPALLAAIAARGVGQAVVTLHVGAGTFLPMRAEDPREHKLHPEWGEVTEQAAAAINAARAAGGRVVAIGTTALRLLETAAQADGRIAPFRGLTDIFLLPGHRFRGADLLLTNFHLPRSTLFMLVSAFAGTARMRAAYAHAIAEGYRFYSYGDGSLLSREDAA

SEQ ID NO: 64181 - protein, 345 aa, Bergeriella denitrificans
  misc_feature (1)..(345): tr|A0A378UDJ6|A0A378UDJ6_BERDE S-adenosylmethionine:tRN A ribosyltransferase-isomerase OS=Bergeriella denitrifi cans OX=494 GN=queA PE=3 SV=1
MIMDISDFDFTLPDALIAQHPPEERGSSRLLTALPDAPLQDGTFADIANLIASGDVLVFNNTKVMKARLFGQKASGGKIEALIERVSDPHTALAHIRSSKSPKPGTELIFDGGIRAIMTERAGELFCLQFQDSRNVYELLEQYGKLPLPPYIERAADDSDDSRYQTVYAKHQGAVAAPTAGLHFTDGLLAALRAKGVHTVEVTLHVGAGTFQPVRVDNIAEHKMHSEWFDVPPETVALIEAAHARGNKVWAVGTTSMRALESAARSGRLQAGQGDTDIFITPGYRFRVADRLITNFHLPKSTLLMLVSAFSGMEHIRRVYRHAVEQQYRFFSYGDAMVLGRQETE

SEQ ID NO: 64182 - protein, 349 aa, Bergeyella zoohelcum
  misc_feature (1)..(349): tr|A0A380ZVH0|A0A380ZVH0_9FLAO S-adenosylmethionine:tRN A ribosyltransferase-isomerase OS=Bergeyella zoohelcum OX=1015 GN=queA PE=3 SV=1
MKTSDFNFHLPDELLAEHPSEHRDEARLMVLNRKNETIEHRLFKDVIDYFDDGDLFVFNNTKVFPARLYGNKEKTGAKIEVFLLRELDAETRVWDVLVDPARKIRIGNKLFFTEDESLVAEVIDNTTSRGRTLRFLFDGSYEEFRAKLKELGETPLPKYIKRAVEPEDAERYQTIYAKVEGAVAAPTAGLHFSKHLMKRLEIKGIDFAEVTLHVGLGTFNPIEVEDLSKHKMESEEAIIDLVNAEKINAASEAGKRICAVGTTTMRALETSVSSNRKISAYSGWTNKFIYPPHEFGVANAMITNFHTPKSTLIMMIAAFAGKDFVMHAYEEAIKEKYKFYSYGDAMLIL

SEQ ID NO: 64183 - protein, 349 aa, Bergeyella zoohelcum; identical to SEQ ID NO: 64182
  misc_feature (1)..(349): tr|K1LRH6|K1LRH6_9FLAO S-adenosylmethionine:tRNA ribosy ltransferase-isomerase OS=Bergeyella zoohelcum ATCC 437 67 OX=883096 GN=queA PE=3 SV=1

SEQ ID NO: 64184 - protein, 353 aa, Bermanella marisrubri
  misc_feature (1)..(353): tr|Q1MY63|Q1MY63_9GAMM S-adenosylmethionine:tRNA ribosy ltransferase-isomerase OS=Bermanella marisrubri OX=2079 49 GN=queA PE=3 SV=1
MKTSDFHFELPQELIAQYPPKERTSSRLLCVNSESGRADIQHKVFKDILAEVQPGDLMVFNNTRVIPARLFGEKESGGKLEVLIERMTGTDTALVHMKSSRSPKPGSTITLEGLKVSVEGRQDALFELKFHLAPDQDLVHWLEQVGHMPLPPYMEREDEDSDRERYQTVYNEKPGAVAAPTAGLHFDDALLNALKDKGVGIAFVTLHVGAGTFQPVKVDDVNEHKMHSEYLEVSEETCEAIRKTKALGKKVIAVGTTSVRSLETASQSGEIQPYQGDTEIFIYPGYQFKTVDRLLTNFHLPESTLIMLVSAFVGRGPILNAYDEAVREQYRFFSYGDAMLLDKNPNAEALWEK

SEQ ID NO: 64185 - protein, 355 aa, Bermanella sp.
  misc_feature (1)..(355): tr|A0A1Y5DML0|A0A1Y5DML0_9GAMM S-adenosylmethionine:tRN A ribosyltransferase-isomerase OS=Bermanella sp. 47_143 3_sub80_T6 OX=1856278 GN=queA PE=3 SV=1
MKTSDFTFELPDELIARYPLEARSSSRLLCLRDSQLEHKKFTDLLELVEPGDLMVFNNTRVIPARLFGQKQSGGKLEALIERVTGDNTALSHIRCSRSPKVGTTIILEGMEVEISGRQDALFELTFKLSPGQNLVNWLEEVGHMPLPPYMDREDELSDRERYQTVYNKTPGAVAAPTAGLHFDSELMAALTNKGVNFAYVTLHVGAGTFQPVKVDDVLNHEMHSEYLEVEQDTVDAINATRANGKRVVAVGTTSVRSLESASMVTEQNPKGELQPFMGDTQIFIYPGYEFKNVDALVTNFHLPESTLIMLVSAFAGRGPVLNAYTEAVKNDYRFFSYGDAMFLTRNLAAKDLWEQ

SEQ ID NO: 64186 - protein, 355 aa, Bermanella sp.
  misc_feature (1)..(355): tr|A0A2D4RZF7|A0A2D4RZF7_9GAMM S-adenosylmethionine:tRN A ribosyltransferase-isomerase OS=Bermanella sp. OX=202 4825 GN=queA PE=3 SV=1
MKTSDFTFDLPDELIARYPQEVRSSSRLLCLQDSELSHQQFTDLLDLVEPGDLMVFNNTRVIPARLFGQKESGGKLEALIERVTSDTTALSHIKCSRAPKADTIILLEGLEVEVTGRQDALFELRFKLPEGTTLVDWLEQVGHMPLPPYMEREDELSDRERYQTVYNEKPGAVAAPTAGLHFDDAFLGALKDKGVNMAFVTLHVGAGTFQPVKVDDVHSHKMHSEWLEVGQETCDAIEQTKAAGKRVIAVGTTSVRSLESASHTPEALAAGKILPYTGETEIFIFPGFEFKTVDALVTNFHLPESTLIMLVSAFAGRGPVLNAYHEAVSNHYRFFSYGDAMFLTKNLAAKDLWDQ

SEQ ID NO: 64187 - protein, 419 aa, Bernardetia litoralis
  misc_feature (1)..(419): tr|I4AHY5|I4AHY5_BERLS S-adenosylmethionine:tRNA ribosy ltransferase-isomerase OS=Bernardetia litoralis (strain ATCC 23117 / DSM 6794 / NBRC 15988 / NCIMB 1366 / Sio- 4) OX=880071 GN=queA PE=3 SV=1
MEKINLEDYTYNLPNERIAQNPLEKRDTSKFLVYKKGAISHHHFTEITDFLNEDYTLYFNNTKVIPARLLFEKKATQRGQNGKGATIEIFLLHPILPTADVSEAMLTTGKCTWKCVVGNLKRWKEGLILERELEIDNQTILIQAKIADRKELLIELEWKNINSDKNNTEIPFVDIVGKLGVMPLPPYIKRNAEKKDAATYQTIYSKAAGAVAAPTAGLHFTETVLQNLAKKNIQTNELTLHVGAGTFQPVKKENAGDVVTHTMHCEQIVVTKENIKSIIDSKKVASVGTTSMRTLESLYWYGTKILLKQDTAFFVEKLEPYSYDAHSKLPSKKESFEAILKYMDDSNQDKLTGETEIFILPSYTFHVCDALVTNFHMPETTLILLVAAFIGNDWKKIYQTALDNDYRFLSYGDSSLLFL

SEQ ID NO: 64188 - protein, 320 aa, Bernardetia litoralis
  misc_feature (1)..(320): tr|I4AQK3|I4AQK3_BERLS S-adenosylmethionine:tRNA ribosy ltransferase-isomerase OS=Bernardetia litoralis (strain ATCC 23117 / DSM 6794 / NBRC 15988 / NCIMB 1366 / Sio- 4) OX=880071 GN=Fleli_3935 PE=3 SV=1
MVVHRDTGVIEHKMFKDVLNYFGEGDKMVVNDTMVFPARLYGYKEKTNAKIEVFLLRELNPTSHLWDVLVDPARKIRVGNKLFFGEGELVAEVIDNTTSRGRTIRFLYDGEPEEFYKTLEELGETPLPREIGREAEESDKERYQTIFASQKGAVAAPTAGLHFTPQLQKKLQLQGTSFHPITLHLGLGMFRQVEVEDLTKHKMDSENFDVPQGTVTAVNEAIDAKKRICAVGTTSLRALESSVSANEHLKPNGGWTDKFIFPPYEFKICNALISNFHYPQSTLLMMNCAFGGYDLVMEAYELAIKEKYRFFSYGDAMLII

SEQ ID NO: 64189 - protein, 366 aa, Unknown
  misc_feature (1)..(366): tr|A0A0N1ARB3|A0A0N1ARB3_9PROT S-adenosylmethionine:tRN A ribosyltransferase-isomerase OS=beta proteobacterium AAP51 OX=1523421 GN=queA PE=3 SV=1
MSPSAPPSPASPPAPSPAYTLHDFDFVLPPELIAQHPAAERSASRLLDGRQPGQPPLDRVFRELPGLLQAGDLLVFNDTRVIKARLLGEKPTGGAVEALVERILPDTGTHEVWAHLRASKSPKAGSVVRFADAFDAEVLGRAGPEEALFHLRFPADPLQLLERHGHVPLPPYITHDDTAEDAARYQTVFAAHPGAVAAPTAALHFDDAVLAELAARGVQRAAITLHVGAGTFQPVRVENIAEHRMHSEWFEVNEATVAAINATKAAGGRVLAVGTTTLRALESAARAGGGALQPYRGDTDIFITPGFDFRVVDLMLTNFHLPKSTLMMLVSAFAGHAHIQALYRHAVESRYRFFSYGDSMLLQLAR

SEQ ID NO: 64190 - protein, 348 aa, Unknown
  misc_feature (1)..(348): tr|M1SXU5|M1SXU5_9PROT S-adenosylmethionine:tRNA ribosy ltransferase-isomerase OS=beta proteobacterium CB OX=54 3913 GN=queA PE=3 SV=1
MQLSDFNYDLPPQLIAQHPLANRTDSRLLEVKAEGGDIAQLIDRKFPDILNLIKPGDLLVFNDTKVIPARLHGKKETGGNVELLIERISGDQQAWVQIRASKVPKTGSIVHVHNKAGETFPVEMLGYDGRFYEVRFPENVFSLLERFGELPLPPYIEHQPDQEDANRYQTVVAKNPGAVAAPTAGLHFDEAILKKLNELGVKQAVVTLHVGAGTFTPVREEDLSKHKMHYEWFSVPAETIEAIKATHKAGSRVIAVGTTSLRALESQAQTQQTSGETNLFITPGYTFKTVDCLLTNFHLPKSTLLMLVSAFAGVDNIRNAYQHAIQNEYRFFSYGDAMFLSRPNQTSS

SEQ ID NO: 64191 - protein, 329 aa, Betaproteobacteria bacterium
  misc_feature (1)..(329): tr|A0A1F4CQA9|A0A1F4CQA9_9PROT S-adenosylmethionine:tRN A ribosyltransferase-isomerase OS=Betaproteobacteria ba cterium RIFCSPLOWO2_12_FULL_68_19 OX=1797504 GN=queA PE =3 SV=1
MRVSEFDYELPAELIAQHPAAQRSASRLLHLDAASGSLQDLKFDDLSNFLDQRDVLVLNDTRVVKARLAGRKASGGKIELFVERALGSREALALIRASHPPSAGTKLEIDAVRVRVLAREGELYRVRFSQDIEAVLERHGAVPLPPYIRHAPRREDAERYQTVYAAVPGAVAAPTAGLHFDRGMLKAIEARGTRLAKITLHVGFGTFQPVRVDEVEAHRMQREHYAIPDETVKLIQARRVLAVGTTSLRALETFALTGEREGETELFVYPGFQFQVVERLLTNFHLPKSTLLMLACAFAGRDNIFKAYRHAIERRYRFFSYGDAMLIER

SEQ ID NO: 64192 - protein, 328 aa, Betaproteobacteria bacterium
  misc_feature (1)..(328): tr|A0A536Y168|A0A536Y168_9PROT S-adenosylmethionine:tRN A ribosyltransferase-isomerase OS=Betaproteobacteria ba cterium OX=1891241 GN=queA PE=3 SV=1
MRVSEFDYELPAELIAQHPAPQRSASRLLHLEPGGRLHDLAFNDLPQLVDERDTLVLNDTRVIKARLFGRKPSGGQVEVLVERIVAPRIALALMRAGHAPKAGTEVLIGDVQASVESREGELYRVRFSEDVERVLERHGSVPLPPYITHPPGGEDLERYQTVYAARPGAVAAPTAGLHFDEQMLDRLRSRGARIAMLTLHVGFGTFQPVRTDSVEAHRMHRERYSVPDETLQAIAGRRVLAVGTTSLRALEAAAATGETSGETDLFIYPGYEFQVVDRLLTNFHLPKSTLLMLACAFAGRDHILRAYQHAVEQRYRFFSYGDAMLIER

SEQ ID NO: 64193 - protein, 350 aa, Bhargavaea beijingensis
  misc_feature (1)..(350): tr|A0A1G7CK77|A0A1G7CK77_9BACL S-adenosylmethionine:tRN A ribosyltransferase-isomerase OS=Bhargavaea beijingens is OX=426756 GN=queA PE=3 SV=1
MNVEDFDFHLPEELIAQTPLKDRTASRLLVVDRRTGSFEDRKFSDILEYFEPGDCLVLNDTKVLPARLMGIKEETGATIEVLLLTDKGEDEWETLVKPAKRVKPGTVVTFGDGLLKAECTGVGDHGGRTFKFSYEGIFYEVLDRLGEMPLPPYIHEKLDDRDRYQTVFAKERGSAAAPTAGLHFTEELLERIRERGVEIVFITLHVGLGTFRPVSVDTIESHEMHSEYYSVSEEAASAIRKTKEAGGRVIAVGTTSTRTLETIASENNGNIVAAGGWTSIFIYPGYEYKAIDGLITNFHLPKSTLIMLVSAFSSREIILNAYRHAVDGRYRFFSFGDAMFLKPPKKGRIK

SEQ ID NO: 64194 - protein, 350 aa, Bhargavaea cecembensis
  misc_feature (1)..(350): tr|A0A163GC58|A0A163GC58_9BACL S-adenosylmethionine:tRN A ribosyltransferase-isomerase OS=Bhargavaea cecembensi s OX=394098 GN=queA PE=3 SV=1
MNVEDFDFHLPEELIAQTPLKERTASRLLVVDRETGNFEDRKFSDILGYFEPGDCLVLNDTKVLPARLLGTKEETGATIEVLLLTDKGGDEWETLVKPAKRVKPGTVVTFGDGLLKAECTGLGDHGGRTFKFTYEGIFYEVLDRLGEMPLPPYIHEKLDDRDRYQTVFAKERGSAAAPTAGLHFTEELLGKIRDKGVEIVFITLHVGLGTFRPVSVDTIESHEMHSEYYSVSEEAAAAIRKTKEAGGRVIAVGTTSTRTLETIATEHGGEIVAAGGWTSIFIYPGYEYKAIDGLITNFHLPKSTLIMLVSAFSSRDIILNAYRHAVDERYRFFSFGDAMFLKPPKKGRSE

SEQ ID NO: 64195 - protein, 351 aa, Bhargavaea cecembensis
  misc_feature (1)..(351): tr|M7NW15|M7NW15_9BACL S-adenosylmethionine:tRNA ribosy ltransferase-isomerase OS=Bhargavaea cecembensis DSE10 OX=1235279 GN=queA PE=3 SV=1
MMNVEDFDFHLPEDLIAQTPLKERTASRLLVVDRETGGLEDRKFSDILGYFEPGDCLVLNDTKVLPARLLGTKEETGATIEVLLLTDKGGDEWETLVKPAKRVKPGTVVTFGDGLLKAECTGVGDHGGRTFKFSYEGIFYEVLDRLGEMPLPPYIHEKLDDRDRYQTVFAKERGSAAAPTAGLHFTEELLAEIREKGVEIVFITLHVGLGTFRPVSVDTIENHEMHSEYYSVSEEAAATIRKTKEAGGRVIAVGTTSTRTLETIASEHGGEVVAAGGWTSIFIFPGYEYKAIDGLITNFHLPKSTLIMLVSAFSSREIILNAYRHAVDGRYRFFSFGDAMFLKPPKKGRSK

SEQ ID NO: 64196 - protein, 350 aa, Bhargavaea ginsengi
  misc_feature (1)..(350): tr|A0A1H6X4R0|A0A1H6X4R0_9BACL S-adenosylmethionine:tRN A ribosyltransferase-isomerase OS=Bhargavaea ginsengi O X=426757 GN=queA PE=3 SV=1
MNVEDFDFHLPEELIAQTPLKDRTASRLLVVDRETGSMDDRNFSDILEYFELGDCLVLNDTKVLPARLMGTKEETGATIEVLLLTDKGGDEWETLVKPAKRVKPGTVVTFGDGLLKAECTGVGDHGGRTFKFSYEGIFYEVLDRLGEMPLPPYIHEKLDDRDRYQTVFAKERGSAAAPTAGLHFTEELLDRIREKGVKIVFITLHVGLGTFRPVSVDTIESHEMHSEYYSVSEESAAAIRKTKETGGRVIAVGTTSTRTLETIASENGGEIVAAGGWTSIFIYPGYEYKAIDGLITNFHLPKSTLIMLVSAFSSREIILNAYRHAVDGRYRFFSFGDAMFLMPPKKGRNE

SEQ ID NO: 64197 - protein, 362 aa, Bibersteinia trehalosi
  misc_feature (1)..(362): tr|A0A426FJ11|A0A426FJ11_BIBTR S-adenosylmethionine:tRN A ribosyltransferase-isomerase OS=Bibersteinia trehalos i OX=47735 GN=queA PE=3 SV=1
MLVSDFHFDLPDNLIARYPTQERTASRLLYLNGETGEYQDQQFADLLQHIQQGDLLIFNNTRVIPARLYGKKASGGKLEVLVERVLDEHRCLAHIRASKAPKEGSEIILGEDKLGEGNGLHAVMTARHDALFELHFNANVPLFDLLQQAGHMPLPPYIDRPDEDTDQERYQTVYSKVLGAVAAPTAGLHFDNAMLEKLREKGVNTAFVTLHVGAGTFQPVRVEKLADHKMHSEYAEVSQEVVDLILKTKAAGKRVICVGTTSVRSIESAAQAAEKEGKLIAPFYSDTAIFIHPGKKFRIVDALVTNFHLPESTLIMLVSAFAGYKNCMNAYAHAVKAQYRFFSYGDAMFITQNPHAEKDIPA

SEQ ID NO: 64198 - protein, 374 aa, Bibersteinia trehalosi
  misc_feature (1)..(374): tr|A0A4V7I9F3|A0A4V7I9F3_BIBTR S-adenosylmethionine:tRN A ribosyltransferase-isomerase OS=Bibersteinia trehalos i USDA-ARS-USMARC-188 OX=1263829 GN=queA PE=3 SV=1
MFFLYFFTKELIVLVSDFHFDLPDNLIARYPTQERTASRLLYLNGETGEYQDQQFADLLQHIQQGDLLIFNNTRVIPARLYGKKASGGKLEVLVERVLDEHRCLAHIRASKAPKEGSEIILGEDKLGEGNGLHAVMTARHDALFELHFNANAPLFDLLQQAGHMPLPPYIDRPDEDTDQERYQTVYSKVLGAVAAPTAGLHFDNAMLEKLREKGVNTAFVTLHVGAGTFQPVRVEKLADHKMHSEYAEVSQEVVDLILKTKAAGKRVICVGTTSVRSIESAAQAAEKEGKLIAPFYSDTAIFIHPGKKFRIVDALVTNFHLPESTLIMLVSAFAGYKNCMNAYAHAVKAQYRFFSYGDAMFITQNPHAEKDIPA

SEQ ID NO: 64199 - protein, 365 aa, Bilophila sp.
  misc_feature (1)..(365): tr|G1V2L5|G1V2L5_9DELT S-adenosylmethionine:tRNA ribosy ltransferase-isomerase OS=Bilophila sp. 4_1_30 OX=69398 8 GN=queA PE=3 SV=1
MYSIQQSEADFLLSSYRYELPPERIAQHPGERGASRLLVLDRETGKRIHSHFSHLLEYLPKGTLLIANNSRVVPARMIGQRPSGGKMEFLLLTPMPLLEQHGEGDGWHCAEADGLIKPAKNARIGDHLVFGDDLRVEVLAKGEFGRHRVRLHWTGDIRALFESRGHLPLPPYIKREDTKDDRGTYQTVYARDDKAGSVAAPTAGLHFTPELRAQMASAGVEWAEVTLHVGYGTFSPVRCEDIREHVMHEEFVEVPQATVDAIGKAKAEGRPVIAVGTTSARTLEGVAGAHGGELTAHQGWINCFIWPGYRFHVLDGLITNFHLPESTLLMFVSALTGRERMLETYTEAVKMEYRFFSYGDAMLIR

SEQ ID NO: 64200 - protein, 365 aa, Bilophila wadsworthia
  misc_feature (1)..(365): tr|E5Y7Z7|E5Y7Z7_BILWA S-adenosylmethionine:tRNA ribosy ltransferase-isomerase OS=Bilophila wadsworthia 3_1_6 O X=563192 GN=queA PE=3 SV=1
MYSIQQSEADFLLSSYRYELPPERIAQHPGERGASRLLVLDRETGKRIHSHFSHLLEYLPKGTLLIANNSRVVPARMIGQRPSGGKMEFLLLTPMPLLEQHGEGDGWHCAEADGLIKPAKNARIGDYLVFGDDLRVEVLAKGEFGRHRVRLHWTGDIRALFESRGHLPLPPYIKREDTKDDRGTYQTVYARDDKAGSVAAPTAGLHFTPELRAQMASAGVEWAEVTLHVGYGTFSPVRCEDIREHVMHEEFVEVPQATVDAIGKAKAEGRPVIAVGTTSARTLEGVAGAHGGELTAHQGWINCFIWPGYRFHVLDGLITNFHLPESTLLMLVSALTGRERMLETYTEAVKMEYRFFSYGDAMLIR

SEQ ID NO: 64201 - protein, 357 aa, Biostraticola sp.
  misc_feature (1)..(357): tr|A0A4U2UJW6|A0A4U2UJW6_9ENTR S-adenosylmethionine:tRN A ribosyltransferase-isomerase OS=Biostraticola sp. BGM RC 2031 OX=2575567 GN=queA PE=3 SV=1
MRVADFSFDLPEQLIARYPRTQRSACRLLGLDGPTGALSHGVFTDLLDQLAAGDLLVFNNTRVIPARLYGRKASGGKIEVLVDRILDDHRVLALVRASKAPKPGAVLLLGDDESLSATMLARHDQLFELGFDDPRDVLTLLNAAGHMPLPPYIDRPDDAADRELYQTVYGERPGAVAAPTAGLHFDQPLLDALRDKGIEMAFVTLHVGAGTFKPVRVDNVEEHVMHSEYAEVPQSVVDAVLACKQRGNRVVAVGTTSVRSLESAARAAGDQGISPFFGDTDIFIFPGYRFRIVDALITNFHLPESTLIMLVSAFAGYGHTMAAYREAVAREYRFFSYGDAMYITRNDRAGEDQVGRP

SEQ ID NO: 64202 - protein, 357 aa, Biostraticola tofi
  misc_feature (1)..(357): tr|A0A4R3YPR2|A0A4R3YPR2_9ENTR S-adenosylmethionine:tRN A ribosyltransferase-isomerase OS=Biostraticola tofi OX =466109 GN=queA PE=3 SV=1
MRVADFSFDLPEELIAHYPQPERSACRLLSLDGPSGEISHNVFTDLLDKLAPGDLLVFNNTRVIPARLFGRKVSGGKIEVLVERVLDSHRVLAHVRASKAPKAGAELLLGDREDISATMLARHDALFELRINDERDVLTVLNDVGHIPLPPYIDRPDEASDRELYQTVYSERPGAVAAPTAGLHFDQPLLDALRAKGVEMAFVTLHVGAGTFQPVRVDAIEDHVMHAEYAEVPAQVTQAVLACKQRGNRVIAVGTTSVRSLESAAQAATDSLIAPFFGDTSIFIYPGYRFRIIDALVTNFHLPESTLIMLVSAFAGYHHTMKAYQTAVAEQYRFFSYGDAMFITRNNQADKDRIGDA

SEQ ID NO: 64203 - protein, 231 aa, Bisgaard taxon
  misc_feature (1)..(231): tr|A0A3A1YML6|A0A3A1YML6_9PAST S-adenosylmethionine:tRN A ribosyltransferase-isomerase OS=Bisgaard taxon 44 str . EEAB3T1 OX=2028574 GN=CKF59_00375 PE=3 SV=1
MVQFSINQYINSLDQDLASTQEIKLRRQNLVYRDLLDKISLKRIKELNQEAQIKELIAPREICHTINSLNLDTFSQLTLELDNHLTLITELWQFLQNLTQIDTSKFSATNQETLALIRHLTAEENNKNYSFTNHYINTSCELGTQIPLLPYTGNTEIFIHPGHKVHLVDYIITNFHLPKSTLIMLVAGFVGFKYCLSAYEHAIAHKYRFYSYGDSCFIPNLKQPQDLELLF

SEQ ID NO: 64204 - protein, 363 aa, Bisgaardia hudsonensis
  misc_feature (1)..(363): tr|A0A4R2N3E5|A0A4R2N3E5_9PAST S-adenosylmethionine:tRN A ribosyltransferase-isomerase OS=Bisgaardia hudsonensi s OX=109472 GN=queA PE=3 SV=1
MLLSDFYFNLPDELIARYPTPNRRASRLLQLNGENGEISHRTFSDVVDLINEGDLVIFNNTRVIPARMFGRKASGGKIEVLVERVLTDTRFLAHIRSSKAPKEKAELFLGEDKLGENNGVKMIMVARHDNLFELEIAEKTTPLLDVLQKIGHMPLPPYIDRPDEEADQERYQTVYNKVPGAVAAPTAGLHFDDELLEQLKNKGVNFAFVTLHVGAGTFQPVRVKNIENHKMHAEYVEVSQNVVDAILATKAKGKRVIAVGTTSVRSIESAALETENKGNGNLIEPYFSDTSIFIYPGKKFRIIDCLITNFHLPESTLIMLVSAFAGYSHTMNAYKSAVENHYRFFSYGDAMFITKNDNVKGLE

SEQ ID NO: 64205 - protein, 349 aa, Bizionia algoritergicola
  misc_feature (1)..(349): tr|A0A5D0R3Q9|A0A5D0R3Q9_9FLAO S-adenosylmethionine:tRN A ribosyltransferase-isomerase OS=Bizionia algoritergic ola OX=291187 GN=queA PE=3 SV=1
MKLSHFNFELPEELLAEYPSENRDESRLMVLNRKDQTIEHKMFKDIIDYFEEDDVMILNDTKVFPARLYGNKEKTGARIEVFLLRELNEEQRLWDVLVDPARKIRIGNKLYFGEGESLVAEVIDNTTSRGRTLRFLYDGSYRDFRVKLTELGETPLPKYIKREVEPEDEERYQTIFAKNEGAVAAPTAGLHFSRHLLKRLEIKGVKFADVTLHVGLGTFNPVEVEDLSKHKMDSEEIIIKKPTTEIINKAIKEKRRICAVGTTAMRSVESAVSSSGTLNEFDGWSNKFIFPPYDFSIANCMITNFHTPKSTLLMMASAFAGHEFIKKAYDEAVKEKYKFYSYGDAMLII

SEQ ID NO: 64206 - protein, 349 aa, Bizionia argentinensis
  misc_feature (1)..(349): tr|G2EDJ4|G2EDJ4_9FLAO S-adenosylmethionine:tRNA ribosy ltransferase-isomerase OS=Bizionia argentinensis JUB59 OX=1046627 GN=queA PE=3 SV=1
MKLSHFHFELPEELLAEYPSENRDESRLMVLNRKEQTIEHKMFKDIIDYFDEDDVMILNDTKVFPARLYGNKEKTGARIEVFLLRELNEEQRLWDVLVDPARKIRIGNKLYFGEGESLVAEVIDNTTSRGRTLRFLYDGSYRDFRVKLTELGETPLPKYIKREVEPEDQERYQTIFAKNEGAVAAPTAGLHFSKHLLKRLEIKGVKFADVTLHVGLGTFNPVEVEDLSKHKMDSEEIIIKKPTTDIINNAIKNKRRICAVGTTAMRSVESAVSSSGTLNEFDGWSNKFIFPPYDFSIANCMITNFHTPKSTLLMMASAFAGHEFIKKAYDEAVKEKYKFYSYGDAMLII

SEQ ID NO: 64207 - protein, 349 aa, Bizionia echini
  misc_feature (1)..(349): tr|A0A1I4ZXG5|A0A1I4ZXG5_9FLAO S-adenosylmethionine:tRN A ribosyltransferase-isomerase OS=Bizionia echini OX=64 9333 GN=queA PE=3 SV=1
MKLSHFNFELPEELLAEYPSENRDESRLMVLNRKDQTIEHKMFKDVIDYFDEDDVMILNDTKVFPARLYGNKEKTGARIEVFLLRELNEEQRLWDVLVDPARKIRIGNKLYFGEGESLVAEVIDNTTSRGRTLRFLYDGSYRDFRAKLNELGETPLPKYIKRDVEPEDQERYQTIFAKNEGAVAAPTAGLHFSKHLLKRLEIKGVKFAEVTLHVGLGTFNPVEVEDLSKHKMDSEEIIIKKPAVDTINTALKNKKRVCAVGTTAMRSVESSVSSSGTLNEFDGWSNKFIFPPYDFSIANCMITNFHTPKSTLLMMASAFAGHDFIKRAYEEAVKEKYKFYSYGDAMLII

SEQ ID NO: 64208 - protein, 349 aa, Bizionia myxarmorum
  misc_feature (1)..(349): tr|A0A5D0R9R6|A0A5D0R9R6_9FLAO S-adenosylmethionine:tRN A ribosyltransferase-isomerase OS=Bizionia myxarmorum O X=291186 GN=queA PE=3 SV=1
MKLSHFNFELPEELLAEYPSENRDESRLMVLNRKDQTIEHKMFKDIIDYFDEDDVMILNDTKVFPARLYGNKEKTGARIEVFLLRELNEEQRLWDVLVDPARKIRIGNKLYFGEGESLVAEVIDNTTSRGRTLRFLYDGSYRDFRVKLTELGETPLPKYIKREVEPEDEERYQTIFAKNEGAVAAPTAGLHFSKHLLKRLEIKGVKFAEVTLHVGLGTFNPVEVEDLSKHKMDSEEIIIKKPTTEIINNAIKNKRRICAVGTTAMRSVESAVSSSGTLNEFDGWSNKFIFPPYDFSIANCMITNFHTPKSTLLMMASAFAGHEFIKKAYDEAVKEKYKFYSYGDAMLII

SEQ ID NO: 64209 - protein, 349 aa, Bizionia paragorgiae
  misc_feature (1)..(349): tr|A0A1H4CV01|A0A1H4CV01_9FLAO S-adenosylmethionine:tRN A ribosyltransferase-isomerase OS=Bizionia paragorgiae OX=283786 GN=queA PE=3 SV=1
MKLSHFGFELPEELLAEYPSENRDESRLMVLNRKEQTIEHKMFKDIIDYFDEEDVMILNDTKVFPARLFGNKEKTGARIEVFLLRELNEEQRLWDVLVDPARKIRIGNKLYFGEDESLVAEVIDNTTSRGRTLRFLYDGSYEEFRKKLHELGETPLPKYIKREVEPEDEERYQTIFAKTEGAVAAPTAGLHFSKHLLKRLEIKGVDFAEVTLHVGLGTFNPVEVEDLSKHKMDSEEVFIGPQTVERINRALKERKRICAVGTTAMRAVESSVSSSGTLNEINGWTNKFIFPPYDFSIANCMITNFHTPKSTLLMMASAFAGHDFIKKAYEEAVKEKYKFYSYGDAMLII

SEQ ID NO: 64210 - protein, 349 aa, Bizionia saleffrena
  misc_feature (1)..(349): tr|A0A5D0R911|A0A5D0R911_9FLAO S-adenosylmethionine:tRN A ribosyltransferase-isomerase OS=Bizionia saleffrena O X=291189 GN=queA PE=3 SV=1
MKLSHFGFELPEELLAEYPSENRDESRLMVLNRKEQTIEHKMFKDIIDYFDEEDVMILNDTKVFPARLFGNKEKTGARIEVFLLRELNEEQRLWDVLVDPARKIRIGNKLYFGEDESLVAEVIDNTTSRGRTLRFLYDGSYEEFRKKLHELGETPLPKYIKRDVEPQDEERYQTIFAKTEGAVAAPTAGLHFSKHLLKRLEIKGVDFAEVTLHVGLGTFNPVEVEDLSKHKMDSEEVFIGPETVERINRALKERKRICAVGTTAMRAVESAVSSSATLNEINGWTNKFIFPPYEFSIANCMITNFHTPKSTLLMMASAFGGYDFVKKAYEEAVKEKYNFYSYGDAMLII

SEQ ID NO: 64211 - protein, 68 aa, Blastocatellia bacterium
  misc_feature (1)..(68): tr|A0A3B9LN76|A0A3B9LN76_9BACT S-adenosylmethionine:tRN A ribosyltransferase-isomerase (Fragment) OS=Blastocate llia bacterium OX=2052146 GN=DCK99_01235 PE=3 SV=1
MHLSDFDYDLPEELIAQQPLERRDASRMLVLDRAEQTWQDSKFERLSDYVRAADVIVINNTRVFPARL

SEQ ID NO: 64212 - protein, 270 aa, Blastocatellia bacterium
  misc_feature (1)..(270): tr|A0A3B9LN27|A0A3B9LN27_9BACT S-adenosylmethionine:tRN A ribosyltransferase-isomerase (Fragment) OS=Blastocate llia bacterium OX=2052146 GN=DCK99_01230 PE=3 SV=1
GGRVEVLLIRELESSTWEALVRPAHRLRQGARLRFGNSNLRAEVAECADKRFRHLKFAGDMPLDEVMNELGQTPLPPYIKRPSGTTVQDDERYQTVYAREKGAIAAPTAGLHFTAPAIQSLLAREAKVVEITLHVGYGTFEPVRVDNIEQHHVASESFNISDDAARVINATRAEGGRVIAVGTTTTRALESAVNIEGRTEPGRRATELTIKPGFQFRVVDALLTNFHLPRSSLLLLVCAFAGRDFTLNAYRHAVAARFRFYSYGDCMLVF

SEQ ID NO: 64213 - protein, 359 aa, Blastochloris sp.
  misc_feature (1)..(359): tr|A0A348G0W8|A0A348G0W8_9RHIZ S-adenosylmethionine:tRN A ribosyltransferase-isomerase OS=Blastochloris sp. GI OX=2233851 GN=queA PE=3 SV=1
MRLSDFDYDLPEGRIALRPAEPRDSARLLVVRPGAGLEDRVVRDLPDLLKPGDALVFNDTRVIPAELVGLRVRGEAAATVHFNLHKRIAEDRWLAFARPAKRLKVGERVRFGPASESIACELAAFDAEVAAKGEGGEVELRFALSGVALDEAIARHGHVPLPPYIAARRADDARDRADYQTVFARFDGSVAAPTAGLHFTPDLLGRLAAKGISQHFVTLHVGAGTFLPVKTEDVRAHRMHAEWGEVSAATVEALDAARAGGGRVVAVGTTSARLLETAARDGALKPFAGETDIFITPGYRFRAVDVLMSNFHLPKSTLFMLVSAFSGLETMRAAYAHAIQSGYRFYSYGDASLLFPDRA

SEQ ID NO: 64214 - protein, 359 aa, Blastochloris viridis
  misc_feature (1)..(359): tr|A0A182D4Q4|A0A182D4Q4_BLAVI S-adenosylmethionine:tRN A ribosyltransferase-isomerase OS=Blastochloris viridis OX=1079 GN=queA PE=3 SV=1
MQLAEFDYDLPEGRIALRPAEPRDAARLLVVRPGSGLEDRAVRDLTELLRPGDALVFNDTKVIPAELVGVRVRSEAVATVHFNLHKRIAPDRWLAFARPAKRLKIGDHVRFGTVSEAIVCEMAGLDAEVATKGDGGEVELRFAFSGVALDEAIARHGHVPLPPYIASKRSEDARDRADYQTVFARHDGSVAAPTAGLHFTPELLARLDARGISQHFVTLHVGAGTFLPVKTEDVHAHRMHAEWGEVSAATAEALAATRARGGRIIAVGTTSARLLETAARSGTLQPFAGETDIFITPGYRFRAVDALMSNFHLPKSTLFMLVSAFSGLATMRAAYAHAIDTGYRFYSYGDASLLFPARA

SEQ ID NO: 64215 - protein, 343 aa, Blastochloris viridis
  misc_feature (1)..(343): tr|A0A0S4Q1G8|A0A0S4Q1G8_BLAVI S-adenosylmethionine:tRN A ribosyltransferase-isomerase OS=Blastochloris viridis OX=1079 GN=queA PE=3 SV=1
MRPAEPRDAARLLVVRPGSGLEDRAVRDLTELLRPGDALVFNDTKVIPAELVGVRVRSEAVATVHFNLHKRIAPDRWLAFARPAKRLKIGDHVRFGTVSEAIVCEMAGLDAEVATKGDGGEVELRFAFSGVALDEAIARHGHVPLPPYIASKRSEDARDRADYQTVFARHDGSVAAPTAGLHFTPELLARLDARGISQHFVTLHVGAGTFLPVKTEDVHAHRMHAEWGEVSAATAEALAATRARGGRIIAVGTTSARLLETAARSGTLQPFAGETDIFITPGYRFRAVDALMSNFHLPKSTLFMLVSAFSGLATMRAAYAHAIDTGYRFYSYGDASLLFPARA

SEQ ID NO: 64216 - protein, 342 aa, Blastococcus endophyticus
  misc_feature (1)..(342): tr|A0A1H8WBD7|A0A1H8WBD7_9ACTN S-adenosylmethionine:tRN A ribosyltransferase-isomerase OS=Blastococcus endophyt icus OX=673521 GN=SAMN05660991_04249 PE=3 SV=1
MTARFALPPDAEATAPPERRGLARDGVRLMTVRPGGVTSAVFRDLPDLLSPGDLLVVNTSATLPARLDVRRRDGVLVPLHVSPPLDDGDWVVELRRPDNDGPDLGVEPGSTVDLPGGGTLRLLAGHPHPGRGSRLWRARPEPPAEVRTVLTGHGRPITYGYLRGRVTLADAQNVYATEPGSAENASAGRPFTDRLLVRLMARGVPVVPLVLHAGVSSPEVHEPPLPERFAVPEVTARLVTATRRAGGRVVAVGTTVTRALESATGEDGATRPAAGWTDLVLGPERPARVVTGLLTGLHAPEASHLRLLEAVAGADLVDRGYAAAVAERYLWHEYGDSMLFLP

SEQ ID NO: 64217 - protein, 342 aa, Blastococcus sp.
  misc_feature (1)..(342): tr|A0A366ZU29|A0A366ZU29_9ACTN S-adenosylmethionine:tRN A ribosyltransferase-isomerase OS=Blastococcus sp. TF02 A-26 OX=2250577 GN=DQ240_21795 PE=3 SV=1
MTATFAVPPGSEATAPPERRGLTRDGVRLMTVRPDGVTHSTFRDLPDLLTPGDLLVVNTSATLPARLDVRRRDGVLVPLHVSTTLDDGDWVVELRRPDNDGPDLGAEPGCTVQLPDGRALRLVSGHPHPGRGSRLWRARAEPPVPARTVLALHGRPITYGYLRGPVRLADAQNVYATHPGSAENASAGRPFTDRLLVRLMARGVPVVPVVLHAGVSSPELHEPPAPERFAVPEVTARLVTATRAGGGRVVAVGTTVTRALESATGGDGVTRPVVGWTGLVLGPERPARAVTGLVTGLHAPEASHLRLLEAVAGPELVARGYEEAVAEHYLWHEYGDSMLLLP

SEQ ID NO: 64218 - protein, 342 aa, Blastococcus sp.
  misc_feature (1)..(342): tr|A0A4Y9QEC8|A0A4Y9QEC8_9ACTN S-adenosylmethionine:tRN A ribosyltransferase-isomerase OS=Blastococcus sp. CT_G ayMR16 OX=2559607 GN=E4P38_03540 PE=3 SV=1
MTATFALPADAEATAPPEWHGLGRDEVRLMAVRPGRTTSVLFRDLPELLEPGDLVVVNTSGTLPGRLPARRADGVLVPLHWSTALDDGEWVVELRRPDNSGPDLGVEPGTVLELPGGVTMTLLAGHPDPSRPSRLWRATTTPAVPATAYLLEHGTPIGYGYLRGDFPLAAFQTVYAGEPGSAEMASAGRPFTEEVLVALMTRGVPVVPLTLHTGVSSPELHEPPSPERFAVPEVTARLVNSTRRAGGRVVAVGTTVTRALESATDDDGVTRAAHGWTDLVLGPDRPARAVTGLITGLHEPEASHLQLLEAVAGTELVTAAYDRAVAEHYLWHEFGDSMVFLP

SEQ ID NO: 64219 - protein, 343 aa, Blastomonas fulva
  misc_feature (1)..(343): tr|A0A222WWM7|A0A222WWM7_9SPHN S-adenosylmethionine:tRN A ribosyltransferase-isomerase OS=Blastomonas fulva OX= 1550728 GN=queA PE=3 SV=1
MRVDDFDFELPPERIALRPVRPRDAAKMLCVYGSAMRDAQVRDLPGLLNPGDCLVFNDTRVIPAQLEGVKLGGQARIGATLHKRIDLRRWQAFVRNSRRLRLGDVIDFGADVFATVEARGADGSITLAFEGTEPVELLLERAGTMPLPPYIAAKRDIDEADREDYQTRFAREDGAVAAPTASLHFTDELMAALAAAGIEHAMLTLHVGAGTFLPVKADDTNDHQMHAEWGRIDAATADRLNAVRARGNRVIAVGTTVLRLIESAAREDGVIAPFEGDTAIFITPGYRFRGIDGLMTNFHLPRSTLFMLVSALMGLDVMRAAYAHAIAHDYRFYSYGDSSLLLP

SEQ ID NO: 64220 - protein, 343 aa, Blastomonas natatoria
  misc_feature (1)..(343): tr|A0A2V3VCB5|A0A2V3VCB5_9SPHN S-adenosylmethionine:tRN A ribosyltransferase-isomerase OS=Blastomonas natatoria OX=34015 GN=queA PE=3 SV=1
MRVDEFDFELPQERIALRPVRPRDAARMLHVLGSTMADATVRDLPRLLNPGDCLVFNDTRVIPAQLEGVKLGGQARVGATLHKRIDLRRWQAFVRNAKRLREGDVVHFGAGVLADVEARGEDGSVTFAFQGDEPVEILLERAGTMPLPPYIASKREIDEADREDYQTRFAEKDGAVAAPTASLHFTDRLMADLAEAGIEHAMLTLHVGAGTFLPVKADDTNDHQMHAEWGRIDAETADRLNAIRGRGNRVVAVGTTVLRLIESAAGQDNIIRPFEGDTSIFITPGYRFKGIDGLMTNFHLPRSTLFMLVSALMGIDVMKAAYAHAIASEYRFYSYGDSSLLLP

SEQ ID NO: 64221 - protein, 209 aa, Blastomonas sp.
  misc_feature (1)..(209): tr|W9BXN8|W9BXN8_9SPHN S-adenosylmethionine:tRNA ribosy ltransferase-isomerase (Fragment) OS=Blastomonas sp. CA CIA14H2 OX=1419876 GN=Q27BB25_09995 PE=3 SV=1
MRVDEFDFDLPQERIALRPVRPRDAARMLHVQGRAMADATVRDLPRLLSPGDCLVFNDTRVIPAQLEGVKLGGEARIGATLHKRIDLRRWQAFVRNAKRLREGDVVHFGAGVMADVESKADDGSIVFAFQGDEPVELLLERAGTMPLPPYIASKRAIDEADREDYQTRFAQKDGAVAAPTASLHFTDRLMAELGEAGIEHAMLTLHVGA

SEQ ID NO: 64222 - protein, 348 aa, Blastomonas sp.
  misc_feature (1)..(348): tr|A0A2D6H149|A0A2D6H149_9SPHN S-adenosylmethionine:tRN A ribosyltransferase-isomerase OS=Blastomonas sp. OX=19 09299 GN=queA PE=3 SV=1
MRVDEFDFDLPQERIALRPVRPRDAAKMLHVQGSSMTDATVRDLPRLLNPGDCLVFNDTRVIPAQLEGVKLGSQARIGATLHKRIDLRRWQAFVRNAKRLREGDVVHFGAGVMAGVESKAEDGSIVFAFQGDEPVEILLERAGTMPLPPYIASKREIDEADREDYQTRFAQKDGAVAAPTASLHFTDRLMAELGEAGIEHAMLTLHVGAGTFLPVKADDTNDHQMHAEWGRIDAETADRLNAIRARGNRVIAVGTTVLRLIESAAGDDNIIRPFEGDTSIFITPGYRFKGIDGLMTNFHLPRSTLFMLVSALMGLDVMKAVYAHAIANEYRFYSYGDSSLLLPGDTIS

SEQ ID NO: 64223 - protein, 348 aa, Blastopirellula cremea
  misc_feature (1)..(348): tr|A0A368KVG9|A0A368KVG9_9PLAN S-adenosylmethionine:tRN A ribosyltransferase-isomerase OS=Blastopirellula creme a OX=1031537 GN=queA PE=3 SV=1
MTNIDQYDYHLPSDLIAQQPLEKRSDSRLLVVNRQTQEISHQHIRDLPELLGAGDCLVLNNTKVVPARLMGRRSMTGGRWQGLFIETDANGNWLILAKTRGKIQPGERVVLENREALEDVELELLANLGGGQWAVKPLSEESPFDILERVGRVPLPNYIRGGEMMPEDWKQYQTVFAENPGAVAAPTAGLHFTHELLNKMAAQGVERQFVTLHVGMGTFRPIGVDDIEQHDMHYEYGEITQETVDKLAAVKAKGGRVVSVGTTATRVLETAAADGTLKPWSGKTNLFIRPPYEFKAVDVLLTNFHLPKSTLLILVRTFGGDELIRQAYREAINEEYRFYSYGDAMLIL

SEQ ID NO: 64224 - protein, 348 aa, Blastopirellula marina
  misc_feature (1)..(348): tr|A3ZW50|A3ZW50_9PLAN S-adenosylmethionine:tRNA ribosy ltransferase-isomerase OS=Blastopirellula marina DSM 36 45 OX=314230 GN=queA PE=3 SV=1
MTSIEQYDYRLPKELIAQEPLEKRADARLLVVDRKSGQIEHRYIRDLPEILQPTDHLVLNNTKVVPARLVGRRTLTGGRWQGLYLESDINGHWLVLAKTRGKIAAGEMVTLENRETKEDISLRLVASLGVGMWAVEPESSESTLEILERVGRVPLPHYIREGEMMPDDWKRYQTVFAEQPGAVAAPTAGLHFSTELLKKLTNNDLLVDYVTLHVGIGTFRPVSVDQLDEHVMHKEWGEIREEAVERILETKAAGGRNIAVGTTVARVMETAARSGELQPWRGQTDLFIRPPFEFHAVDALLTNFHLPKSTLLILVRTFGGEELMREAYAEAIREEYRFYSYGDAMLIL

SEQ ID NO: 64225 - protein, 348 aa, Blastopirellula marina
  misc_feature (1)..(348): tr|A0A2S8G126|A0A2S8G126_9PLAN S-adenosylmethionine:tRN A ribosyltransferase-isomerase OS=Blastopirellula marin a OX=124 GN=queA PE=3 SV=1
MTNIDQYDYHLPSDLIAQQPLEKRTDSRLLVVNRQTQEISHQHIRDLPELLGAGDCLVLNNTKVVPARLMGRRSMTGGRWQGLFIETDANGNWLILAKTRGKIQPGERVVLENREAREDIELELLANLGGGQWAVKPLSEESPFDILERVGRVPLPHYIRGGEMMPEDWKQYQTVFAENPGAVAAPTAGLHFTHELLNKMAAKGVERQFVTLHVGMGTFRPIGVDDIEQHEMHYEFGEITQETVDKLAAVKASGGRLVSVGTTATRVLETAAADGELKPWSGKTNLFIRPPYEFKAVDVLLTNFHLPKSTLLILVRTFGGDDLIRRAYREAIKEEYRFYSYGDAMLIL

SEQ ID NO: 64226 - protein, 348 aa, Blastopirellula sp.
  misc_feature (1)..(348): tr|A0A2G2KHH1|A0A2G2KHH1_9PLAN S-adenosylmethionine:tRN A ribosyltransferase-isomerase OS=Blastopirellula sp. O X=2024826 GN=queA PE=3 SV=1
MTRIDTYDYTLPKELIAQQPLKKRPDARLLVVNRTAQSIEHRHIRDLPEILRPTDHLISNDTRVVPARIVGKRTDTGGRWQGLYLESDSDGNWKILSKTRGKLTPGETVTLQDREANNDVKLKLLIKLDNGMWIAKPESMEGPLDILERVGRIPLPHYIRDGEMLPDDWVDYQTVFARQPGAVAAPTAGLHFTKTLLAELEALGIQRDSVTLHVGIGTFKPVAVETLEEHNMHTEWGDLSESVANKIQATKAAGGRIISVGTTSARVLETAAKDGSIAAWQGDTNLFIRPGFEFHAIDGLLTNFHLPKSTLLVLVRTFGGDDLIKEAYQEAIREEYRFFSYGDAMLIL

SEQ ID NO: 64227 - protein, 348 aa, Blastopirellula sp.
  misc_feature (1)..(348): tr|A0A2E0B3L8|A0A2E0B3L8_9PLAN S-adenosylmethionine:tRN A ribosyltransferase-isomerase OS=Blastopirellula sp. O X=2024826 GN=queA PE=3 SV=1
MSEIDQYDFDLPRELIAQFPLACRSDARLLVVDRANGTLEHAHIRDLPGYLSPADCLVVNDTRVVPARLLGHRTSTGGRWTGLYLDHDDQGVWRILSKTRGKLQAGESITLEDRHARPGITLTLLAPLEGGMWAARPEASGTAEEILEDMGRVPIPPYIRGGQMVDADVTSYQTVYADRAGAVAAPTAGLHFTPELLQTIGDAGTSISRITLHVGVGTFRPVTADRLDEHDMHFEWGQVDQQTVATISEKQQQGGRVVAVGTTVVRVLETAAASGALQPWEGETNLFIKPGYAFRAVDGLLTNFHLPKSTLLVLVRTFGGDELIQRAYAVAVEEGYRFYSYGDAMLII

SEQ ID NO: 64228 - protein, 347 aa, Blattabacterium cuenoti
  misc_feature (1)..(347): tr|M5ADN2|M5ADN2_9FLAO S-adenosylmethionine:tRNA ribosy ltransferase-isomerase OS=Blattabacterium cuenoti BPAA OX=1229512 GN=queA PE=3 SV=1
MKTSDFDFESPTNLLAKFPSQERDESKLMVIHRKNQKIEHKIFKNLHEYFEEGDILILNNTKVFPARLFGNKEKTEAKIEVFLLRELDPKDRTWDVLVDPARKVRVGNKLSFGSELTGEVIDNTTSRGRILQLNFNGSHEGLINKIKELGKTPLPKYINRQPEKNDEKRYQTVYAKKEGSVAAPTAGLHFSKHLLKKLEIKGIHLVEVTLHLGLGSFLPVDVEDISKHKMDSEKCFINENTCKIVNFAIQRKKRICAVGTSSMRAIESSVSSSKKLNPFYGWTNKFIFPPYNFNIANSMITNFHMPKSTLLMMTTAFTGFDLIMKAYQIAIEKEYRFYSYGDAMLIL

SEQ ID NO: 64229 - protein, 347 aa, Blattabacterium cuenoti
  misc_feature (1)..(347): tr|A0A224AK86|A0A224AK86_9FLAO S-adenosylmethionine:tRN A ribosyltransferase-isomerase OS=Blattabacterium cueno ti STAT OX=1457030 GN=queA PE=3 SV=1
MKTSDFDFKYPINLLAKFPTQERDESKLMIIHRKNKKIEHKFFKNLHEYFEEGDTLILNNTKVFPARLFGNKEKTEAKIEVFLLRELDPKDRTWDVLVDPARKVRVGNKLNFGNELTGEVIDNTTSRGRILQLNFNGSHKKLIKKIKELGKTPLPKYINRKPEKNDKIRYQTIYAKEEGSVAAPTAGLHFSKHLLKKLEIKGINLVEVTLHLGLGSFLPVDVEDISKHKMDSEKCFINENTCKIVNFAIQRKKKICAVGTSSMRAIESSVSSKKKLNPFYGWTNKFIFPPYNFNIANSMITNFHMPKSTLLMMTAAFANFDLIKKAYQIAIEKKYRFYSYGDAMLIL

SEQ ID NO: 64230 - protein, 347 aa, Blattabacterium punctulatus
  misc_feature (1)..(347): tr|A0A2U9QA15|A0A2U9QA15_9FLAO S-adenosylmethionine:tRN A ribosyltransferase-isomerase OS=Blattabacterium punct ulatus OX=164514 GN=queA PE=3 SV=1
MRTSDFNFEFPLNLLSYQPTQERDESRLMIIHRKNKNIEHKLFKDLYQYFEEGDTIILNNTKVFPARLFGNKEKTEAKIEVFLLRELDIIDRTWDVLVDPARKVRVGNKLNFGSGLTGEVIDNTTSRGRILQLHFNGSHEELIKKIKELGKTPLPKYIKRLPEKNDEKRYQTIYAKIEGSVSAPTAGFHFSKHLLKILEIKGINLVEITLHLGLGSFLPVEVEDISKHKMDSEKCFIEKNVCSIINKTMKQKKRVCVVGTSSMRAIESSVSSSKYLNPFSGWTNKFIFPPYNFSIANSMITNFHMPKSTLLMMTAAFSGYELIMKAYKIAIKKKYRFYSYGDAMLIL

SEQ ID NO: 64231 - protein, 347 aa, Blattabacterium punctulatus
  misc_feature (1)..(347): tr|A0A2U9QBC4|A0A2U9QBC4_9FLAO S-adenosylmethionine:tRN A ribosyltransferase-isomerase OS=Blattabacterium punct ulatus OX=164514 GN=queA PE=3 SV=1
MRTSDFNFEFPLNLLSYQPTQERDESRLMIIHRKNKNIEHKLFKDLYQYFEEGDTMIFNNTKVFPAKLFGNKEKTEAKIEVFLLRELDIIDRTWDVLVDPARKVRVGNKLNFGSGLTGEVIDNTTSRGRILQLHFNGSHEELIKKIKELGKTPLPKYIKRLPEKSDEKRYQTIYAKIEGSVSAPTAGFHFSKHLLKILEIKGINLVEITLHLGLGSFLPVEVEDISKHKMDSEKCFIEKNVCSIINKTIKQKKRVCVIGTSSMRAIESSVSSSKYLNPFSGWTNKFIFPPYNFSIANSMITNFHMPKSTLLMMTAAFSGYELIMKAYKIAIKEKYRFYSYGDAMLIL

SEQ ID NO: 64232 - protein, 347 aa, Blattabacterium sp.
  misc_feature (1)..(347): tr|D0J9D4|D0J9D4_BLASP S-adenosylmethionine:tRNA ribosy ltransferase-isomerase OS=Blattabacterium sp. subsp. Pe riplaneta americana (strain BPLAN) OX=600809 GN=queA PE =3 SV=1
MRTSDFDFGLPLDLLANQPTEERDESRLMIINRKSNGIKHEIFKDLHQYFEEGDTIIFNNTKVFPARLFGNKEKTEAKIEVFLLRELDPIDRTWDVLVDPARKVRVGNKLNFGYGLTGEVIDNTTSRGRILQLHFSGTHKELIKKIKELGKTPLPKYIKRLPDKNDEERYQTIYAKEEGSVAAPTAGLHFSKHLLKKLEIKGINLVEITLHLGLGSFLPVEVEDISKHKMDSEKCFIKKETCDIVNKSIQQKKRICAVGTSSMRAIESSVSPNKYLNPFYGWTNKFIFPPYNFSIANSMITNFHMPKSTLLMMTVAFTGYDLLMKAYKIATKEKYRFYSYGDSMLIL

SEQ ID NO: 64233 - protein, 347 aa, Blattabacterium sp.
  misc_feature (1)..(347): tr|G7SQ08|G7SQ08_9FLAO S-adenosylmethionine:tRNA ribosy ltransferase-isomerase OS=Blattabacterium sp. (Mastoter mes darwiniensis) str. MADAR OX=1074889 GN=queA PE=3 SV =1
MRTSDFNFSFPSDFIAYYPTKERDESRLMVIHRKKNSIEHRLFKDLYEYFENGDTIILNNTKVFPARLFGNKEKTEAKIEVFLLRELDPIDRIWDVLVDPARKVRVGNKLNFGNGLTGEVIDNTTSRGRILQLHFCGSHEGLIKKIKELGKTPLPKYIQRSPEKSDEQRYQTIYAKKEGSVAAPTAGLHFSKHLLKKLEIKGINLVEITLHLGLGSFLPVEVEDISKHKMDSEKCFITKDVCNIVNQTIKQKKRICAVGTSSMRAIESSVSSSKNLNHFSGWTNKFIFPPYNFNIANSMITNFHMPKSTLLMMTVAFAGYDLIMKAYQIAIEKKYRFYSYGDAMLIL

SEQ ID NO: 64234 - protein, 341 aa, Blautia coccoides
  misc_feature (1)..(341): tr|A0A4V2S7X4|A0A4V2S7X4_9FIRM S-adenosylmethionine:tRN A ribosyltransferase-isomerase OS=Blautia coccoides OX= 1532 GN=queA PE=3 SV=1
MKTSDFYYDLPEELIAQDPLADRSASRLLHLDRETGEIQHTDFKHITRYLNPGDCLVINDTKVIPARLYGSKVGTDAGIEILLLKRKGDNVWETLVKPGKKAKPGTVISFGDGLLTGEVIDVVEEGNRLIRFHYEGIFEEILDKLGEMPLPPYITHKLEDKNRYQTVYAKNEGSAAAPTAGLHFTEELLEEIRQMGVNIAHVTLHVGLGTFRPVKVDDVEKHHMHSEFYVVEEDQAKLINDTKKNGGRIISVGTTSCRTLESAADEDGNLQAKSGWTEIFIYPGYQFKIIDGLITNFHLPESTLLMLVSALAGKENIMKAYEEAVRERYRFFSFGDAMLIQ

SEQ ID NO: 64235 - protein, 355 aa, Blautia hansenii
  misc_feature (1)..(355): tr|C9L6D0|C9L6D0_BLAHA S-adenosylmethionine:tRNA ribosy ltransferase-isomerase OS=Blautia hansenii DSM 20583 OX =537007 GN=queA PE=3 SV=1
MRQPPFVREQKGETMRTADFYYDLPEELIAQDPLLDRSSSRLMHLDKQTGEICHTDFKHIIDYLNPEDCLVINDTRVIPARLYGSKVGTDAGIEILLLKRRENNIWETLVKPGKKAKPGTKISFGDGLLIGEVLDIVEEGNRLIQFQYEGIFEEILDKLGEMPLPPYITHKLQDKERYQTVYAKNEGSAAAPTAGLHFTKELLKEIEEKGVKIAHVTLHVGLGTFRPVKVDDVESHHMHSEFYVVEEEQAKIINETKAKGGRVISVGTTSCRTLESATDENGILQAKSGWTDIFIYPGYQFKMIDALITNFHLPESTLLMLVSALAGKEKIMNAYEEAVKERYRFFSFGDAMIIE

SEQ ID NO: 64236 - protein, 341 aa, Blautia hydrogenotrophica
  misc_feature (1)..(341): tr|C0CLS5|C0CLS5_BLAHS S-adenosylmethionine:tRNA ribosy ltransferase-isomerase OS=Blautia hydrogenotrophica (st rain DSM 10507 / JCM 14656 / S5a33) OX=476272 GN=queA P E=3 SV=1
MKTSDFYYELPQELIAQDPLEDRSSSRLLHLDRRTGEISHGTFQDILTYLKPGDCLVINDTKVIPARLFGRKEDTGAVIELLLLKRRENDVWETLVKPGKKAKVGTKLIFGDGILCGEILDVVEEGNRLIQFQYEGIFEEILDQLGEMPLPPYITHKLKDKNRYQTVYAKHEGSAAAPTAGLHFTPELLQRVKEMGVKIAHVTLHVGLGTFRPVKVEDVAEHHMHSEFYVVEQEQAALVNETKRNGGRVICVGTTSCRTLESATDEEGKLQAGSGWTEIFIYPGYQFKIMDGLITNFHLPESTLLMLVSAFAGKEKIMAAYKEAVRERYRFFSFGDAMFIV

SEQ ID NO: 64237 - protein, 341 aa, Blautia hydrogenotrophica; identical to SEQ ID NO: 64236
  misc_feature (1)..(341): tr|A0A173RE20|A0A173RE20_9FIRM S-adenosylmethionine:tRN A ribosyltransferase-isomerase OS=Blautia hydrogenotrop hica OX=53443 GN=queA PE=3 SV=1

SEQ ID NO: 64238 - protein, 341 aa, Blautia luti
  misc_feature (1)..(341): tr|A0A564W7G9|A0A564W7G9_9FIRM S-adenosylmethionine:tRN A ribosyltransferase-isomerase OS=Blautia luti OX=89014 GN=queA PE=3 SV=1
MKTSDFYYDLPQELIAQDPLEDRSSSRLMHLSLKDGSIEHRHFTDILDYLHKGDCLVINDTKVIPARLYGHKEETGALIEILLLKRRENDIWECLVKPGKKARPGAKITFGDGILKGEILDIVDEGNRLIQFHYEGIFEEILDQLGEMPLPPYITHKLKDKNRYQTVYAKNEGSAAAPTAGLHFTPELLEKVKEKGVNIAHVTLHVGLGTFRPVKVDDVEKHHMHSEFYIVEEDQAKLINDTKKNGGRVISVGTTSCRTLESAAGEDGIVKAGSGWTEIFIYPGYKFKAIDGLITNFHLPESTLLMLVSALAGKEHIMAAYEEAVKERYRFFSFGDAMMIE

SEQ ID NO: 64239 - protein, 341 aa, Blautia obeum
  misc_feature (1)..(341): tr|A5ZPU9|A5ZPU9_9FIRM S-adenosylmethionine:tRNA ribosy ltransferase-isomerase OS=Blautia obeum ATCC 29174 OX=4 11459 GN=queA PE=3 SV=1
MKTSDFYYDLPKELIAQDPLEDRSSSRLLHLSMQDGSFEHRHFTDILDYLHKGDCLVINDTKVIPARLYGHKEETGAVIEILLLKRRENDIWECLVKPGKKARPGAKITFGDGILKGEIIDVVDEGNRLIQFHYDGIFEEILDQLGEMPLPPYITHKLKDKNRYQTVYAKNDGSAAAPTAGLHFTRELLKQVEDMGVKIAHVTLHVGLGTFRPVKVDDVEQHHMHSEFYMVEEDQAKLINDTKKNGGRVISVGTTSCRTLESATDENGILQAGSGWTEIFIYPGYHFKMIDGLITNFHLPESTLLMLVSALAGKEHIMAAYEEAVKERYRFFSFGDAMLII

SEQ ID NO: 64240 - protein, 341 aa, Blautia obeum
  misc_feature (1)..(341): tr|A0A414J382|A0A414J382_9FIRM S-adenosylmethionine:tRN A ribosyltransferase-isomerase OS=Blautia obeum OX=4052 0 GN=queA PE=3 SV=1
MKTSDFYYDLPKELIAQDPLEDRSSSRLLHLSMEDGSFEHRHFTDILDYLKEGDCLVINDTRVIPARLYGHKEETGALIEILLLKRKENDIWECLVKPGKKARPGAKITFGDGILTGEIIDIVDEGNRLIQFHYDGIFEEILDQLGEMPLPPYITHKLKDKNRYQTVYAKNDGSAAAPTAGLHFTKELMKQVEEKGVKIAHVTLHVGLGTFRPVKVDNVESHHMHSEFYMVEEDQAKLINDTKKNGGRVISVGTTSCRTLESATDENGILHAGSGWTEIFIYPGYKFKMIDGLITNFHLPESTLLMLVSALAGKEYIMAAYEEAVKERYRFFSFGDAMLIL

SEQ ID NO: 64241 - protein, 341 aa, Blautia producta
  misc_feature (1)..(341): tr|A0A4P6LZB0|A0A4P6LZB0_9FIRM S-adenosylmethionine:tRN A ribosyltransferase-isomerase OS=Blautia producta OX=3 3035 GN=queA PE=3 SV=1
MKTSDFYYNLPEELIAQDPLADRSASRLLHLDRETGEIQHTDFKHITRYLNPGDCLVINDTKVIPARLYGSKVGTDAGIEILLLKRKGDNVWETLVKPGKKAKPGTVISFGDGLLTGEVIDVVEEGNRLIRFHYEGIFEEILDKLGEMPLPPYITHKLEDKNRYQTVYAKNEGSAAAPTAGLHFTEELLEEIRQMGVKIAHVTLHVGLGTFRPVKVDDVEKHHMHSEFYVVEEDQAKLINDTKKNGGRIISVGTTSCRTLESAADEDGNLQAKSGWTEIFIYPGYQFKIIDGLITNFHLPESTLLMLVSALAGKENIMKAYEEAVRERYRFFSFGDAMLIV

SEQ ID NO: 64242 - protein, 341 aa, Blautia producta
  misc_feature (1)..(341): tr|A0A2S4GQY0|A0A2S4GQY0_9FIRM S-adenosylmethionine:tRN A ribosyltransferase-isomerase OS=Blautia producta OX=3 3035 GN=queA PE=3 SV=1
MKTSDFYYDLPEELIAQDPLADRSASRLLHLDRETGEIEHTDFKHITRYLNPGDCLVINDTKVIPARLYGSKVGTDAGIEILLLKRKGDNVWETLVKPGKKAKPGTVIRFGDGLLTGEVIDVVEEGNRLIKFSYEGIFEEILDKLGEMPLPPYITHKLEDKNRYQTVYAKKEGSAAAPTAGLHFTEELLEEIRQMGVNIAHVTLHVGLGTFRPVKVDDVEKHHMHSEFYVVEEDQAELINETRKNGGRIISVGTTSCRTLESAADENGNLQAKSGWTEIFIYPGYQFKIIDGLITNFHLPESTLLMLVSALAGKENIMRAYEEAVEERYRFFSFGDAMFIG

SEQ ID NO: 64243 - protein, 341 aa, Blautia sp.
  misc_feature (1)..(341): tr|A0A417CIF8|A0A417CIF8_9FIRM S-adenosylmethionine:tRN A ribosyltransferase-isomerase OS=Blautia sp. AM42-2 OX =2292976 GN=queA PE=3 SV=1
MKTSDFYYDLPKELIAQDPLEDRSASRLMHLNKETGEYEHGHFRDILKYLKPGDCLVINDTKVIPARLYGSKVGTDAAIEILLLKRRENDIWETLVKPGKKCKVGTVISFGDGILTGEVVDIVDEGNRLIQFHYDGIFEEILDQLGEMPLPPYITHKLQDKNRYQTVYAKHEGSAAAPTAGLHFTKELLQQVQDAGVKIAHVTLHVGLGTFRPVKVEDVTQHHMHSEFYVVEEDQAKLINDTKAAGGRVIAVGTTSCRTLESATGEDGILKAGSGWTEIFIYPGYRFKMIDGLITNFHLPESTLVMLVSALAGKEHIMAAYEEAVREKYRFFSFGDAMMIE

SEQ ID NO: 64244 - protein, 341 aa, Blautia sp.
  misc_feature (1)..(341): tr|A0A1Y4F8P1|A0A1Y4F8P1_9FIRM S-adenosylmethionine:tRN A ribosyltransferase-isomerase OS=Blautia sp. An249 OX= 1965603 GN=queA PE=3 SV=1
MKTSDFYYDLPQELIAQDPLEDRSSSRLLHLDRNSGKIDHGVFSDILSYLNPGDCLVINDTKVIPARLYGHKEDTGALIEILLLKRRENNIWETLVKPGKKARPGAKIVFGNGILKGEVLDIVEEGNRLIQFTYEGIFEEILDQLGEMPLPPYITHKLKDKNRYQTVYAKHEGSAAAPTAGLHFTKELLEKVEAMGVKIAHVTLHVGLGTFRPVKVEDVEKHHMHSELYIVEEDQAEMINETKKAGGRIICVGTTSCRTLESAAQKDGYLKAGSGWTDIFIYPGYQFKIMDGLITNFHLPESTLLMLVSAFADKEKIMHAYEEAVKERYRFFSFGDAMFIG

SEQ ID NO: 64245 - protein, 341 aa, Blautia wexlerae
  misc_feature (1)..(341): tr|A0A174DWL6|A0A174DWL6_9FIRM S-adenosylmethionine:tRN A ribosyltransferase-isomerase OS=Blautia wexlerae OX=4 18240 GN=queA PE=3 SV=1
MKTSDFYYDLPQELIAQDPLEDRSSSRLMHLSLKDGSIEHRHFTDVLDYMEEGDCLVINDTKVIPARLYGHKEGTGALIEILLLKRRENDIWECLVKPGKKARPGAKITFGNGILKGEIIDVVDEGNRLIQFHYEGIFEEILDQLGEMPLPPYITHKLKDKNRYQTVYAKNEGSAAAPTAGLHFTKELLEKVKEKGVNIAHVTLHVGLGTFRPVKVDDVESHHMHSEFYIVEEDQAKLINDTKKAGKRVIAVGTTSCRTLESATGEDGILKSGSGWTEIFIYPGYHFKMIDALITNFHLPESTLVMLVSALAGKENIMHAYETAVQEKYRFFSFGDAMIII

SEQ ID NO: 64246 - protein, 341 aa, Blautia wexlerae
  misc_feature (1)..(341): tr|A0A564WY41|A0A564WY41_9FIRM S-adenosylmethionine:tRN A ribosyltransferase-isomerase OS=Blautia wexlerae OX=4 18240 GN=queA PE=3 SV=1
MKTSDFYYDLPQELIAQDPLEDRSSSRLMHLSLKDGSIEHRHFTDVLDYMEEGDCLVINDTKVIPARLYGHKEETGALIEILLLKRRENDIWECLVKPGKKARPGAKITFGNGILKGEIIDVVDEGNRLIQFHYEGIFEEILDQLGEMPLPPYITHKLKDKNRYQTVYAKNEGSAAAPTAGLHFTKELLEKVKEKGVNIAHVTLHVGLGTFRPVKVDDVESHHMHSEFYIVEEDQAKLINDTKKAGKRVIAVGTTSCRTLESATGEDGILKSGSGWTEIFIYPGYHFKMIDALITNFHLPESTLVMLVSALAGKENIMHAYEVAVQEKYRFFSFGDAMIII

SEQ ID NO: 64247 - protein, 353 aa, Blochmannia floridanus
  misc_feature (1)..(353): sp|Q7VQB2|QUEA_BLOFL S-adenosylmethionine:tRNA ribosylt ransferase-isomerase OS=Blochmannia floridanus OX=20390 7 GN=queA PE=3 SV=1
MRTSDFKFQLPKKLISRYPNLKRSECRLLVFDRLTTKITHHFFSDLPEILNPGDLLIFNDTRVIPARLYGYSVTGKKVEILIERILNDYQAVAHIYSSELVQLGEKFILGSNLNIYIYVIKIYYSYKLFKIYFDNINYNNVLSLLNDIGHIPIPPYFHRLDEIIDYELYQTVYGSKLGSIAAPTAGLHFDTLLINRLLNLGIEISFITLHIGSATFQPVRVTLIEHHVMHDEYIEVSQSTIESILRCKERKNRVIAVGTTVVKALETAAMNTKSLSIIESFSGYSRIFIFPGYRFKIVDSLITNFHLPESTLIMLVAAFAGYRNILRVYNAAIDLNYKFLSYGDSMFITCRSE

SEQ ID NO: 64248 - protein, 356 aa, Unknown
  misc_feature (1)..(356): tr|A0A1U9VKX9|A0A1U9VKX9_9RALS S-adenosylmethionine:tRN A ribosyltransferase-isomerase OS=blood disease bacteri um A2-HR MARDI OX=1944648 GN=queA PE=3 SV=1
MSAPPFMLTLSDFDFDLPPELIAQTALPDRTASRLLAVRRDAQGPHFDDRQFADLVDYLRPGDLLIFNDTRVIKARFFGHKASGGKIEVLVERLLDEYTVLAQIRSSKSPVAGSTLRLADAFDVTVGPRHEPFFTLRFPQPALELIEQYGRLPLPPYIEHTPDSFDETRYQTVYARNPGAVAAPTAGLHFDDALFARLDAMGVRRGFLTLHVGAGTFSPVRVENIAEHRMHSEWYAISPALAEAIRATRAAGGRIIAVGTTSMRALESAARPDGTLTAGSGETDIFITPGYRFRLVDALVTNFHLPKSTLLMLVSAFAGLETIRAAYRHAIAQRYRFFSYGDAMFLTRAEPDTQSA

SEQ ID NO: 64249 - protein, 350 aa, Unknown
  misc_feature (1)..(350): tr|G2ZRD3|G2ZRD3_9RALS S-adenosylmethionine:tRNA ribosy ltransferase-isomerase OS=blood disease bacterium R229 OX=741978 GN=queA PE=3 SV=1
MLTLSDFDFDLPPELIAQTALPDRTASRLLAVRRDAQGPHFDDRQFADLVDYLRPGDLLIFNDTRVIKARFFGHKASGGKIEVLVERLLDEYTVLAQIRSSKSPVAGSTLRLADAFDVTVGPRHEPFFTLRFPQPALELIEQYGRLPLPPYIEHTPDSFDETRYQTVYARNPGAVAAPTAGLHFDDALFARLDAMGVRRGFLTLHVGAGTFSPVRVENIAEHRMHSEWYAISPALAEAIRATRAAGGRIIAVGTTSMRALESAARPDGTLTAGSGETDIFITPGYRFRLVDALVTNFHLPKSTLLMLVSAFAGLETIRAAYRHAIAQRYRFFSYGDAMFLTRAEPDTQSA

SEQ ID NO: 64250 - protein, 354 aa, Bombella intestini
  misc_feature (1)..(354): tr|A0A1S8GQG3|A0A1S8GQG3_9PROT S-adenosylmethionine:tRN A ribosyltransferase-isomerase OS=Bombella intestini OX =1539051 GN=queA PE=3 SV=1
MTDDLALFDFTLPRDHIATEPARPRDMAQLLHVVPPALAGTDEASLSLHRIRNLPDLLKDGDLLIANDTEVIRAKMEARRGEAKIGITLDRILPEGQWHALARNARKLRPGDQLRFEDDPVTAEVLTNEGDGAVTIRFSVEGDEFDAFLERRAALALPPYIARPHGPTEADNSDYRTIFSRFRGAVAAPTAGLHFTEDLLKALASKGIRKQTLTLHVGAGTFLPVRSTIAEHKMHAEWGHIDEETARLINETRANGGRVVAVGTTSLRLLESAADEKGIVHPWTGETSIFIKPGYRFRAVDALLTNFHLPRSTLFMLVCAFAGTQTMRHAYHHAIAEGLRFYSYGDACLLERAP

SEQ ID NO: 64251 - protein, 373 aa, Bordetella ansorpii
  misc_feature (1)..(373): tr|A0A157S5N0|A0A157S5N0_9BORD S-adenosylmethionine:tRN A ribosyltransferase-isomerase OS=Bordetella ansorpii O X=288768 GN=queA PE=3 SV=1
MPRHSFSAVPRVSAPLTLSDFDYELPPELIAQHPAAQRGGSRLLHLDAASQLHDRQFPDLAHLLRAGDLLVFNDTRVIKARLAGHKAGSGGKVEVLVERLVEPTRALAHVRASKSPGPGTVLRLADAFDAEVLGREGELFDLRFPAPVLDLLDAHGATPLPPYITHAAEETDDSRYQTVYAREPGAVAAPTAGLHFDEPMLQKLAGLGIERAFVTLHVGAGTFQPVRVENLAEHVMHAEWYTVPQATADAVAATRARGGRVVAVGTTSVRALESAAARTDAAAGAAPGAARPGRDRPLEASQGDTRLFITPGYRYRAVDALLTNFHLPQSTLLMLISALAGMDPIRRAYAHAVAQRYRFFSYGDAMFIETPRP

SEQ ID NO: 64252 - protein, 358 aa, Bordetella ansorpii
  misc_feature (1)..(358): tr|A0A157LJV7|A0A157LJV7_9BORD S-adenosylmethionine:tRN A ribosyltransferase-isomerase OS=Bordetella ansorpii O X=288768 GN=queA PE=3 SV=1
MSAPLTLSDFDYELPPELIAQHPAAQRGGSRLLHLDAASQLHDRQFPDLADLLRAGDLLVFNDTRVIKARLAGHKAGSGGKVEVLVERLVEPTRALAHVRASKSPGPGTVLRLADAFDVEVLGREGELFDLRFPAPALDLLDAHGATPLPPYITHAAEETDDSRYQTVYAREPGAVAAPTAGLHFDDPMLQKLAGLGIERAFVTLHVGAGTFQPVRVENLSEHVMHAEWYTVPQATADAVAATRARGGRVVAVGTTSVRALESAAAKTETAASAARPGRDRPIEAAQGDTRLFITPGYRYRAVDALLTNFHLPQSTLLMLISALAGMDPIRRAYAHAVAQRYRFFSYGDAMFIETPRP

SEQ ID NO: 64253 - protein, 346 aa, Bordetella avium
  misc_feature (1)..(346): tr|Q2KWB8|Q2KWB8_BORA1 S-adenosylmethionine:tRNA ribosy ltransferase-isomerase (Fragment) OS=Bordetella avium ( strain 197N) OX=360910 GN=queA PE=3 SV=1
VPTFTLSDFDYDLPPELIAQTPAAQRGGSRLLHLDAGSQLHDRQFADLLALLRPNDLLVFNDTRVIKARLTGQKATGGKVEVLVERITEPDRALAHVRASKSPGPGMRLELAGGAVRAEVLGRQGELFDLRFAGPVLDLLEAHGATPLPPYITHSAESEDNERYQTVYAREPGAVAAPTAGLHFDQDMLARIEALGVARAFVTLHVGAGTFQPVRVEKIDEHIMHAEWYTVPEATVQAIARARAAGGRVIAVGTTSVRALESAAAAGDGPLAAAQGDTRLFITPGYRYRVVDALITNFHLPQSTLLMLVSALAGIEPIRRAYAHAVAGRYRFFSYGDAMFIESPQP

SEQ ID NO: 64254 - protein, 352 aa, Bordetella bronchialis
  misc_feature (1)..(352): tr|A0A193FQ61|A0A193FQ61_9BORD S-adenosylmethionine:tRN A ribosyltransferase-isomerase OS=Bordetella bronchiali s OX=463025 GN=queA PE=3 SV=1
MSLSQPSSHRVSDFDYELPPELIAQHPSAERGGSRLLHLDAQGGLHDRRFPDIATLLRPGDLLVFNDTRVIKARLTGHKASGGKVEVLVERITAPRRALAHVRASKSPGPGTVLRLADAFEVQVEGRAGELFDISFPDDVLALLDAHGATPLPPYIAHAADAQDETRYQTVYAREPGAVAAPTAGLHFDQAMLDRLGAAGVERAFVTLHVGAGTFQPVRVENVADHVMHAEWYTVPQATADAIAQAKARGSRVVAVGTTSARALESAAGQHLPLCATQGDTRLFITPGYRFQVLDALVTNFHLPQSTLLMMVSALAGMEPIRRAYAHAVAQRYRFFSYGDAMFIEAAAGLAP

SEQ ID NO: 64255 - protein, 347 aa, Bordetella bronchiseptica
  misc_feature (1)..(347): sp|Q7WMM7|QUEA_BORBR S-adenosylmethionine:tRNA ribosylt ransferase-isomerase OS=Bordetella bronchiseptica (stra in ATCC BAA-588 / NCTC 13252 / RB50) OX=257310 GN=queA PE=3 SV=2
MPTPLTLADFDYHLPPELIAQSPAAERGGSRLLHLDAASRLHDRRFPDLAGLLRPHDLLVFNDTRVIKARLTGQKATGGKVEVLVERITAPDRALVHVRASKSPGPGMRLRLAEAFEAEVLGREGELFDLRFPAPVLDLLDAHGATPLPPYITHAADATDERRYQTVYAREPGAVAAPTAGLHFDQPMLEQLAAQGVQRAFVTLHVGAGTFQPVRVQNLAEHIMHAEWYTVPEATVAAIARARAHGGRIVAVGTTSVRALESAAAQAQDGPLAAAQGDTRLFITPGYRYRIVDALLTNFHLPQSTLLMLVSALAGVAPIRRAYAHAVAERYRFFSYGDAMFIETPAP

SEQ ID NO: 64256 - protein, 347 aa, Bordetella bronchiseptica
  misc_feature (1)..(347): tr|A0A4U9RGU8|A0A4U9RGU8_BORBO S-adenosylmethionine:tRN A ribosyltransferase-isomerase OS=Bordetella bronchisep tica OX=518 GN=queA PE=3 SV=1
MPTPLTLADFDYHLPPELIAQSPAAERGGSRLLHLDAASRLHDRRFPDLAGLLRPHDLLVFNDTRVIKARLTGRKATGGKVEVLVERITAPDRALAHVRASKSPGPGMRLRLAEAFEAEVLGREGELFDLRFPAPVLDLLDAHGATPLPPYITHAADAADERRYQTVYAREPGAVAAPTAGLHFDQPMLEQLAAQGVQRAFVTLHVGAGTFQPVRVQNLAEHIMHAEWYTVPEATVAAIARARAHGGRIVAVGTTSVRALESAAAQAQDGPLAAAQGDTRLFITPGYRYRIVDALLTNFHLPQSTLLMLVSALAGVEPIRRAYAHAVAGRYRFFSYGDAMFIETPAP

SEQ ID NO: 64257 - protein, 354 aa, Bordetella flabilis
  misc_feature (1)..(354): tr|A0A193GMJ7|A0A193GMJ7_9BORD S-adenosylmethionine:tRN A ribosyltransferase-isomerase OS=Bordetella flabilis O X=463014 GN=queA PE=3 SV=1
MASRVRVSTSHPSYSLSDFDYELPPELIAQHPSAERGGSRLLHLDAHGGLHDRHFGDIAALLRPGDLLVFNDTRVIKARLAGRKASGGKIEVLVERIVGPRQALAHVRASKSPGPGTVLHLADAFDAVVAGREGELFDLRFPDDVLKLLDAHGATPLPPYITHAADAEDEARYQTVYAREPGAVAAPTAGLHFDLPMLDRLQAAGVARAFVTLHVGAGTFQPVRVENIADHVMHAEWYTVPQATVDAIAGARAAGGRVIAVGTTSARALESAAAQRMPLQASQGDTRLFITPGYRFQVLDGLITNFHLPQSTLLMMVSALAGMDPIRRAYAHAVAQRYRFFSYGDAMLIEAAAA

SEQ ID NO: 64258 - protein, 362 aa, Bordetella genomosp.
  misc_feature (1)..(362): tr|A0A261S239|A0A261S239_9BORD S-adenosylmethionine:tRN A ribosyltransferase-isomerase OS=Bordetella genomosp. 10 OX=1416804 GN=queA PE=3 SV=1
MSSPLTVADFDYALPPELIAQHPSPERGGSRLLHLDAQGRLHDRVFADLAGLLRPNDLLVFNDTRVIKARLTGHKASGGKVEVLVERIVEADRALAHVRASKSPGPGTVLRLADRFEATVLGREGALFDLRFPGDVLELLQAHGATPLPPYITHAAGAEDDERYQTVYARAPGAVAAPTAGLHFDDAMMRRLDEAGVARAFVTLHVGAGTFKPVQVEKLSDHVMHAEWYTVPQATADAVARARAAGGRVIAVGTTSARALESAAAQALPLRATQGDTQLFITPGYRFQVLDGLVTNFHLPQSTLLMMISALAGMEPIRRAYAHAVAERYRFFSYGDAMLIESPLAPASLASSHPAASGPAAV

SEQ ID NO: 64259 - protein, 354 aa, Bordetella genomosp.
  misc_feature (1)..(354): tr|A0A261RWP5|A0A261RWP5_9BORD S-adenosylmethionine:tRN A ribosyltransferase-isomerase OS=Bordetella genomosp. 1 OX=1395607 GN=queA PE=3 SV=1
MSQTYTVADFDYVLPDELIAQTPAAERGGSRLLHLDRASQLHDRQFPDLAGLLRPHDLLVFNDTRVIKARLTGQKATGGKVEVLVERITDTDRALAHVRASKSPGAGMTLRLADDAFEAEVLGRQGELFELRFPAPVLDLLDAHGATPLPPYITHAADQEDDTRYQTVYAREPGAVAAPTAGLHFDEPMLARLAAQGVERAFVTLHVGAGTFQPVRVDNLSDHIMHSEWYTVPPETVAAIERARQAGGRVIAVGTTSVRALESAAAHSAGQGTAGPAGLGAASGDTRLFITPGYTYRVVDALLTNFHLPQSTLLMLVSALAGMDPIRRAYAHAVAQRYRFFSYGDAMFIETPQP

SEQ ID NO: 64260 - protein, 347 aa, Bordetella hinzii
  misc_feature (1)..(347): tr|A0A0H4WVU7|A0A0H4WVU7_9BORD S-adenosylmethionine:tRN A ribosyltransferase-isomerase OS=Bordetella hinzii OX= 103855 GN=queA PE=3 SV=1
MSTFTLSDFDYDLPPELIAQTPAAERAGSRLLHLDGQGRLHDRHFPDLLALLRPHDLLVFNDTRVIKARLAGQKATGGKVEVLVERITEPTRALAHVRASKSPGRGMRLALAGGAVTAEVLGRQGELFDLRFAGPVLDLLEAHGATPLPPYITHAAEHEDEERYQTVYAREPGAVAAPTAGLHFDQAMLERLAAGGVQRAFVTLHVGAGTFQPVRVQNLAEHVMHAEWYTVPEATVQAIHAARQAGGRVIAVGTTSVRALESAAAQAAGGPLAACQGDTRLFITPGYRYRVVDALVTNFHLPQSTLLMLVSALAGIDPIRRAYAHAVASRYRFFSYGDAMFIESAQP

SEQ ID NO: 64261 - protein, 369 aa, Bordetella holmesii
  misc_feature (1)..(369): tr|A0A158M2B8|A0A158M2B8_9BORD S-adenosylmethionine:tRN A ribosyltransferase-isomerase OS=Bordetella holmesii C DC-H585-BH OX=1331206 GN=queA PE=3 SV=1
MRTAYLHCADPFFPVLSGRDDTVSTFTVSDFDYNLPAELIAQTPAAERGGSRLLHLDGQGRLHDRQFCDLLSLLRPHDLLIFNDTRVIKARLAGQKATGGKVEVLVERITEPTRALAHVRASKSPGPGMRLELAGGAITADVLGRAGELFDLRFAAPVLDLLEAHGATPLPPYITHAAEQEDDARYQTVYAREPGAVAAPTAGLHFDQAMLQRLADQDVQRAFVTLHVGAGTFQPVRVQKLEDHIMHSEWYTVPEATVAAVARARQAGGRVIAVGTTSVRALESAAAQSADGELRAAQGDTRLFITPGSRFRVVDALVTNFHLPQSTLLMLVSALAGIEPIRRAYAHAVAGRYRFFSYGDAMFIESAQP

SEQ ID NO: 64262 - protein, 347 aa, Bordetella parapertussis
  misc_feature (1)..(347): sp|Q7WB60|QUEA_BORPA S-adenosylmethionine:tRNA ribosylt ransferase-isomerase OS=Bordetella parapertussis (strai n 12822 / ATCC BAA-587 / NCTC 13253) OX=257311 GN=queA PE=3 SV=2
MPTPLTLADFDYHLPPELIAQSPAAERGGSRLLHLDAASRLHDRRFPDLAGLLRPHDLLVFNDTRVIKARLTGQKATGGKVEVLVERITAPDRALAHVRASKSPGPGMRLRLAEAFEAEVLGREGELFDLRFPAPVLDLLDAHGATPLPPYITHAADATDERRYQTVYAREPGAVAAPTAGLHFDQPMLEQLAAQGVQRAFVTLHVGAGTFQPVRVQNLAEHIMHAEWYTVPEATVAAIARARAHGGRIVAVGTTSVRALESAAAQAQDGPLAAAQGDTRLFITPGYRYRIVDALLTNFHLPQSTLLMLVSALAGVAPIRRAYAHAVAERYRFFSYGDAMFIETPAP

SEQ ID NO: 64263 - protein, 357 aa, Bordetella parapertussis
  misc_feature (1)..(357): tr|K0MLW3|K0MLW3_BORPB S-adenosylmethionine:tRNA ribosy ltransferase-isomerase OS=Bordetella parapertussis (str ain Bpp5) OX=1208660 GN=queA PE=3 SV=1
MAAAFHRTYRVPTPLTLADFDYHLPPELIAQSPAAERGGSRLLHLDAASRLHDRRFPDLAGLLRPHDLLVFNDTRVIKARLTGQKATGGKVEVLVERITAPDRALAHVRASKSPGPGMRLRLAEAFEAEVLGREGELFDLRFPAPVLDLLDAHGATPLPPYITHAADATDERRYQTVYAREPGAVAAPTAGLHFDQPMLEQLAAQGVQRAFVTLHVGAGTFQPVRVQNLAEHIMHAEWYTVPEATVAAIARARAHGGRIVAVGTTSVRALESAAAQAQDGPLAAAQGDTRLFITPGYRYRIVDALLTNFHLPQSTLLMLVSALAGVAPIRRAYAHAVAERYRFFSYGDAMFIETPAP

SEQ ID NO: 64264 - protein, 347 aa, Bordetella pertussis
  misc_feature (1)..(347): sp|Q7VZ81|QUEA_BORPE S-adenosylmethionine:tRNA ribosylt ransferase-isomerase OS=Bordetella pertussis (strain To hama I / ATCC BAA-589 / NCTC 13251) OX=257313 GN=queA P E=3 SV=1
MPTPLTLADFDYHLPPELIAQSPAAERGGSRLLHLDAASRLHDRRFPDLAGLLRPHDLLVFNDTRVIKARLTGQKATGGKVEVLVERITAPDRALAHVRASKSPGPGMRLRLAEAFEAEVLGREGELFDLRFPAPVLDLLDAHGATPLPPYITHAADATDERRYQTVYAREPGAVAAPTAGLHFDQPMLEQLAAQGVQRAFVTLHVGAGTFQPVRVQNLAEHIMHAEWYTVPEATVAAIARARAHGGRIVAVGTTSVRALESAAAQAQDGPLAAAQGDTRLFITPGYRYRAVDALLTNFHLPQSTLLMLVSALAGVEPIRRAYAHAVAERYRFFSYGDAMFIETPAP

SEQ ID NO: 64265 - protein, 347 aa, Bordetella pertussis; identical to SEQ ID NO: 64264
  misc_feature (1)..(347): tr|A0A0T7CQY3|A0A0T7CQY3_BORP1 S-adenosylmethionine:tRN A ribosyltransferase-isomerase OS=Bordetella pertussis (strain ATCC 9797 / DSM 5571 / NCTC 10739 / 18323) OX=5 68706 GN=queA PE=3 SV=1

SEQ ID NO: 64266 - protein, 353 aa, Bordetella petrii
  misc_feature (1)..(353): tr|A9HZW7|A9HZW7_BORPD S-adenosylmethionine:tRNA ribosy ltransferase-isomerase OS=Bordetella petrii (strain ATC C BAA-461 / DSM 12804 / CCUG 43448) OX=340100 GN=queA P E=3 SV=1
MSSPSFTLSDFDYALPPELIAQTPAAQRGGSRLLHLDGAGAPHDRRFPDLAGLLRAGDLLVFNDTRVIKARLTGHKASGGKVEVLVERITEPDRALAHVRASKSPGPGTTLRLADAFDATVLGRAGELFDLRFPAPVLDLLDAHGATPLPPYITHAADATDEARYQTVYAREPGAVAAPTAGLHFDEAMLERLAALGVERAFVTLHVGAGTFQPVRVDNLADHVMHAEWYTVGQPVIDAIARARTRGGRVIAVGTTSVRALESAAAQNPHGPQAPLAPLQGDTRLFITPGYRYRVVDALVTNFHLPQSTLLMLVSALAGMEPIRRAYAHAVAQRYRFFSYGDAMFIESPASHS

SEQ ID NO: 64267 - protein, 402 aa, Bordetella pseudohinzii
  misc_feature (1)..(402): tr|A0A0M7I7Y2|A0A0M7I7Y2_9BORD S-adenosylmethionine:tRN A ribosyltransferase-isomerase OS=Bordetella pseudohinz ii OX=1331258 GN=queA PE=3 SV=1
MDEDESIHKAGAGRRAVTSGRGREAARPAGVYNSGLRADCAASFSSPVLSGRDNTVSTFTLSDFDYDLPPELIAQTPAAERAGSRLLHLDGQGKLHDRQFPDLLALLRPHDLLVFNDTRVIKARLAGQKATGGKVEVLVERITEPTRALAHVRASKSPGPGMRLELAGGAVTAEVLGRQGELFDLRFAGPVLDLLEAHGATPLPPYITHAAEHEDEQRYQTVYAREPGAVAAPTAGLHFDQAMLERLAAGGVQRAFVTLHVGAGTFQPVRVQNLDEHIMHAEWYTVPETTVQAIAAARRAGGRVIAVGTTSVRALESAAAQSADGPLAACQGDTRLFITPGYRYRVVDALVTNFHLPQSTLLMLVSALAGIDPIRRAYAHAVAGRYRFFSYGDAMFIESAQP

SEQ ID NO: 64268 - protein, 366 aa, Bordetella sp.
  misc_feature (1)..(366): tr|A0A2R4XIV2|A0A2R4XIV2_9BORD S-adenosylmethionine:tRN A ribosyltransferase-isomerase OS=Bordetella sp. HZ20 O X=2163011 GN=queA PE=3 SV=1
MTTAPSTTLTLDDFNYELPQDLIAQFPAASRTDSRLLHLAADGSLVDRAFTDIMQLIRPGDLLVFNDTRVIKARLHASKRTGGRVEVLIERIISPHEALAHVRASKSPKPGTWLEFDSTVQKAGEPGSKAEVTAREEDLFLLRFEQPVLEVLDEIGHVPLPPYITHQDDDQDASRYQTVYARHPGAVAAPTAGLHFDQTLLDELARRGIKQAFVTLHIGAGTFQPVRESDLSRHKMHSEWYTIDQACADLIQETRRQGSRVIAVGTTSVRALESSAVANLGRVSAHSDQTRLFITPGFEWKVVDAMITNFHLPKSTLLMLVASFCGLQSMRDAYAHAVAQRYRFFSYGDAMFIEKPTIQEGFCHAV

SEQ ID NO: 64269 - protein, 350 aa, Bordetella sp.
  misc_feature (1)..(350): tr|A0A3T0NHP4|A0A3T0NHP4_9BORD S-adenosylmethionine:tRN A ribosyltransferase-isomerase OS=Bordetella sp. J329 O X=1977852 GN=queA PE=3 SV=1
MSTLLLLSDYDYTLPPELIAQTPAARRDASRLLRLDPQAQLHDMHFSQLPALLRPADLLVFNDTRVIKARLFGIKHSGGKIEVLVERILSGTEVLAHIRSSKSPKPGSGIRLADAFDAEVLGRDGALFHLRFPADALSLLDQHGSTPLPPYIEHSPDAEDDSRYQTVYAREPGAVAAPTAGLHFDEAMLDRLAAQGVARAFVTLHVGAGTFQPVRAERLEDHVMHAERYTVPAATLEAIAQARAAGGRVIAVGTTSVRALESAAAQLAGKAPPPGQAMTGDTRLFITPGYRFHYIDALITNFHLPQSTLLMLVSALAGVEPIKRAYAHAVAERYRFFSYGDAMFIESPAA

SEQ ID NO: 64270 - protein, 382 aa, Bordetella trematum
  misc_feature (1)..(382): tr|A0A157SIR5|A0A157SIR5_9BORD S-adenosylmethionine:tRN A ribosyltransferase-isomerase OS=Bordetella trematum O X=123899 GN=queA PE=3 SV=1
MAALCSSGVYNTGLSRRLATATLSNPCNGLGPQLPVSTLSLSDFDYVLPPELIAQAPAAERGGSRLLHLDAGGALHDRRFPDLAGLLRPHDLLVFNDTRVIKARLTGQKATGGKVEVLVERITEPTRALAHVRASKSPGRGMRLELAGGAIVAEVLGREGELFDLRFPGPVLALLDAHGATPLPPYITHAAQAEDDQRYQTVYAREPGAVAAPTAGLHFDEPMLERLAAQGVARAFVTLHVGAGTFQPVRVENLAEHVMHAEWYTVPEATVQAIAAARAAGGRVIAVGTTSVRALESAAAQAGGGPLAPAQGDTRLFITPGYRYQAVDALITNFHLPQSTLLMLVSALAGVEPIRRAYAHAVAGRYRFFSYGDAMFIETPQP

SEQ ID NO: 64271 - protein, 346 aa, Borrelia afzelii
  misc_feature (1)..(346): sp|Q0SPE3|QUEA_BORAP S-adenosylmethionine:tRNA ribosylt ransferase-isomerase OS=Borrelia afzelii (strain PKo) O X=390236 GN=queA PE=3 SV=1
MKTKEFHFNLPYSLIAQYPSEKRGSSRLMVLDPKLQKIYHENSVNNILKYINSDTFIVFNNSKVRKSRMYAESEMGSNVEFLILDRIGTDLFTALISKSKKQIVGNVYKFPEGLMGKILSKNSSEIVLKFNDDVREDYFEKHGFVPIPPYIKRDYDKIDEDRYQTIYSKYVGSAASATAGLHFSRDLFSAFEKNNIEYDFITLHVGLGTFLPVRSKKVEEHNMHFETFLIKDCVANRLENAKFLGKKVLSIGTTTLRALESSYDNKLKKFKTGQQSTNLFIYPGKNYCFKFVDMLFTNFHTPQSTLLMLVSAFAGKDFVFSSYEEGINKGYKFFSYGDAMLVLNHI

SEQ ID NO: 64272 - protein, 348 aa, Borrelia anserina
  misc_feature (1)..(348): tr|W5SM97|W5SM97_BORAN S-adenosylmethionine:tRNA ribosy ltransferase-isomerase OS=Borrelia anserina BA2 OX=1313 293 GN=queA PE=3 SV=1
MGRMNTKEFYFNLPYNLIAQYPSKKRGLSRLMVLDSGNQRIYHNDSINDILKYIDSNTFLIFNDSRVRKSRIYAKTEYGGSVEFLILDKLAGDTFTSLISKAKKQSIGRVYTFPQGLLAQIISKLGNEFVLKFNKCVDESYFEQYGLIPLPPYIKRNYDREDENRYRTIYSKYIGSSASATAGLHFSEELFYKLDENNIEYDFITLHVGLGTFLPVRTKTIEEHKMHFESFSIKNSVALRLEEAKALGKKILAIGTTTLRALESAYDKHKGFVRGEQKTDLFIYPGKGYKFKFVDMLFTNFHTPESTLLMLVSSFGGKDFVFNAYREAVKMNYKFFSYGDATLFLNHI

SEQ ID NO: 64273 - protein, 343 aa, Borrelia burgdorferi
  misc_feature (1)..(343): sp|O51053|QUEA_BORBU S-adenosylmethionine:tRNA ribosylt ransferase-isomerase OS=Borrelia burgdorferi (strain AT CC 35210 / B31 / CIP 102532 / DSM 4680) OX=224326 GN=qu eA PE=3 SV=2
MKTKEFHFNLSHSLIEQYPSEKRGSSRLIVLDPQLQKIYHKNSVNNILKYINSNIFNNSKARKSRIYAESEMSSNVEFLILDRIDTNLFTALVSKSKKQIIGNFYKFPEGLMDEILSKNSSEVVLKFNNNVGEDYFEKHCFVPLPSYIKRDYDKIDEDRYQTIYSKYVGSTASATAGLHFSRDLFSAFENNNIEYDFITLHVGAGTFLPVRSKKVEEHNMHFETFLIKDFVAVRLQNAKLLGKRILSIVTTTLRALESSYDNNLKKFKTGQQSTNLFIYPGKNYCFKFVDMLFTNFHTPQSTLLMLVSSFAGKDFVFSFYEEAINKGYKFFSYGDAMLILNNI

SEQ ID NO: 64274 - protein, 343 aa, Borrelia burgdorferi
  misc_feature (1)..(343): tr|A0A0H3C457|A0A0H3C457_BORBZ S-adenosylmethionine:tRN A ribosyltransferase-isomerase OS=Borrelia burgdorferi (strain ZS7) OX=445985 GN=queA PE=3 SV=1
MKTKEFHFNLPHSLIEQYPSEKRGSSRLIVLDPQLQKIYHKNSVNNILKYINSNIFNNSKARKSRIYAESEMSSNVEFLILDRIGTNLFTALVSKSKKQIIGNFYKFPEGLMGEILSKNSSEVVLKFNNDVGEDYFEKHCFVPLPSYIKRDYDKIDEDRYQTIYSKYVGSAASATAGLHFSIDLFSVFENNNIEYDFITLHVGLGTFLPVRSKKVEEHNMHFETFLIKDFVAVRLQNAKLLGKKILSIVTTTLRALESSYDNNLKKFKTGQQSTNLFIYPGKNYCFKFVDMLFTNFHTPQSTLLMLVSSFAGKDFVFSFYEEAINKGYKFFSYGDAMLILNHI

SEQ ID NO: 64275 - protein, 345 aa, Borrelia coriaceae
  misc_feature (1)..(345): tr|W5STA3|W5STA3_9SPIR S-adenosylmethionine:tRNA ribosy ltransferase-isomerase OS=Borrelia coriaceae Co53 OX=13 13292 GN=queA PE=3 SV=1
MDTKEFYFDLPYNLIAQYPSEKRGLSRLMVLDSGNQKIYHNDSINDIFKYINSNTFLVFNDSRVRKSRIYAKTDHGGSVEFLILDRLSGDTFTSMIAKAKRQRVGKVYMFPRNLLAQIISRSGNEFILKFDKCVDEAYFEQYGLIPLPPYIKRSYDIEDEERYRTIYSKYIGSSASATAGLHFSEELFSELDKNNIEYDFITLHVGLGTFLPVRTKTIEEHKMHFENFSIKDSVALRLEEAKALGKNILAIGTTTLRALESAYDKQKGFVRGDQKTNLFIYPGKGYKFKFVDMLFTNFHTPESTLLMLVSSFGGKDFVFNAYREAVKMKYKFFSYGDATLFLNHM

SEQ ID NO: 64276 - protein, 346 aa, Borrelia crocidurae
  misc_feature (1)..(346): tr|I0FBF0|I0FBF0_BORCA S-adenosylmethionine:tRNA ribosy ltransferase-isomerase OS=Borrelia crocidurae (strain A chema) OX=1155096 GN=queA PE=3 SV=1
METKEFYFDLPHHLIAQYPSERRGLAKLMVLDSICQKIYHTDSVNDILKYIGSNTFLVFNDSRVRKSRIYAKTDYDGNVEFLILNRLTGDTFTSLISKAKRQKVGKVYRFPQDLSAQIISKLDNEFTIKFNRYVDESYFEQYGFIPLPPYIKRDYDKENEDRYQTIYSKYIGSSASATAGLHFSEELFSKFAQNDIEYDFITLHVGLGTFLPVRTKTIEKHKMHFESFSIRDSVACRLERAKSLGKKILAVGTTTLRALESAYDKQKGRFTRGEQKTNLFIYPGKNYKFKSVDMLFTNFHTPESTLLMLVSSFGGKDFVFNAYREAVTMNYRFFSYGDATLFLSHI

SEQ ID NO: 64277 - protein, 352 aa, Borrelia crocidurae
  misc_feature (1)..(352): tr|W5SGS6|W5SGS6_9SPIR S-adenosylmethionine:tRNA ribosy ltransferase-isomerase OS=Borrelia crocidurae DOU OX=12 93575 GN=queA PE=3 SV=1
MILVGSMETKEFYFDLPHHLIAQYPSERRGLAKLMVLDSICQKIYHTDSVNDILKYIGSNTFLVFNDSRVRKSRIYAKTDYDGNVEFLILNRLTGDTFTSLISKAKRQKVGKVYRFPQDLSAQIISKLDNEFTIKFNRYVDESYFEQYGFIPLPPYIKRDYDKEDEDRYQTIYSKYIGSSASATAGLHFSEELFSKFAQNDIEYDFITLHVGLGTFLPVRTKTIEKHKMHFESFSIRDSVACRLERAKSLGKKILAVGTTTLRALESAYDKQKGRFTRGEQKTNLFIYPGKNYKFKSVDMLFTNFHTPESTLLMLVSSFGGKDFVFNAYREAVTMNYRFFSYGDATLFLSHI

SEQ ID NO: 64278 - protein, 352 aa, Borrelia duttonii
  misc_feature (1)..(352): tr|B5RLM9|B5RLM9_BORDL S-adenosylmethionine:tRNA ribosy ltransferase-isomerase OS=Borrelia duttonii (strain Ly) OX=412419 GN=queA PE=3 SV=1
MILVGSMETKEFYFDLPHHLIAQYPSERRGLAKLMVLDSICQKIYHTDSVNDILKYIGSNTFLVFNDSRVRKSRIYAKTDYDGNVEFLILNRLTGDTFTSLISKAKRQKVGKVYRFPQDLSAQIISKLDNEFTIKFNRYVDESYFEQYGFIPLPPYIKRDYDKEDEDRYQTIYSKYIGSSASATAGLHFSEELFSKFAQNNIEYDFITLHVGLGTFLPVRTKTIEKHKMHFESFSIRDSVACRLERAKSLGKKILAVGTTTLRALESAYDKQKGRFTRGEQKTNLFIYPGKNYKFKSVDMLFTNFHTPESTLLMLVSSFGGKDFVFNAYREAVTMNYRFFSYGDATLFLSHI

SEQ ID NO: 64279 - protein, 352 aa, Borrelia duttonii
  misc_feature (1)..(352): tr|W6TLB8|W6TLB8_9SPIR S-adenosylmethionine:tRNA ribosy ltransferase-isomerase OS=Borrelia duttonii CR2A OX=143 2657 GN=queA PE=3 SV=1
MILVGSMETKEFYFDLPHHLIAQYPSERRGLAKLMVLDSICQKIYHTDSVNDILKYIGSNTFLVFNDSRVRKSRIYAKTDYDGNVEFLILNRLTGDTFTSLISKAKRQKVGKVYRFPQDLSAQIISKLDNEFTIKFNRYVDESYFEQYGFIPLPPYIKRDYDKEDEDRYQTIYSKYIGSSASATAGLHFSEELFSKFAQNNIEYDFITLHVGLGTFLPVRTKTIENHKMHFESFSIRDSVACRLERAKSLGKKILAVGTTTLRALESAYDKQKGRFTRGEQKTNLFIYPGKNYKFKSVDMLFTNFHTPESTLLMLVSSFGGKDFVFNAYREAVTMNYRFFSYGDATLFLSHI

SEQ ID NO: 64280 - protein, 348 aa, Borrelia hermsii
  misc_feature (1)..(348): tr|A0A0E1C0J7|A0A0E1C0J7_BORHE S-adenosylmethionine:tRN A ribosyltransferase-isomerase OS=Borrelia hermsii MTW OX=1313291 GN=queA PE=3 SV=1
MDRMDTKEFYFDLPYNLIAQYPSEKRGLSRLMVLDSGKQKIYHNDSINDIFKYIDSNTFLVFNDSRVRKSRIYAKTDHGGSVEFLILDRLTGDTFTSLISKSKKQSIGRVYTLPQGLLAQIISKAGNEFTLKFNKCVDESYFEQHGLIPLPPYIKRNYDREDEDRYRTIYSKYIGSSASATAGLHFSEELFSKLDEKNIEYDFITLHVGLGTFLPVRTKTIEEHKMHFESFSIKDSVALRLEEAKALGKKILAVGTTTLRALESAYDKQRGLIRGDQKTNLFIYPGKGYEFKFIDMLFTNFHTPESTLLMLVSSFGGKDFVFTAYREAVKMNYKFFSYGDATLFLNHI

SEQ ID NO: 64281 - protein, 345 aa, Borrelia hermsii
  misc_feature (1)..(345): tr|A0A142JCH4|A0A142JCH4_BORHE S-adenosylmethionine:tRN A ribosyltransferase-isomerase OS=Borrelia hermsii OX=1 40 GN=queA PE=3 SV=1
MDTKEFYFDLPHNLIAQYPSEKRGLSRLMVLDSGKQKIYHNDSINDIFKYIDSNTFLVFNDSRVRKSRIYAKTDHGGSVEVLILDRLTGDTFTSLISKAKKQSIGRVYTLPQGLLAQIISKSGNEFTLKFNKCVDESYFEQHGLIPLPPYIKRNYDREDEDRYRTIYSKYIGSSASATAGLHFSEELFSKLDEKNIEYDFITLHVGLGTFLPVRTKTIEEHKMHFESFSIKDSVALRLEEAKALGKKILAVGTTTLRALESAYYKQRGLIRGDQKTNLFIYPGKGYEFKFIDMLFTNFHTPESTLLMLVSSFGGKDFVFTAYREAVKMNYKFFSYGDATLFLNHI

SEQ ID NO: 64282 - protein, 346 aa, Borrelia mayonii
  misc_feature (1)..(346): tr|A0A1L6VPB6|A0A1L6VPB6_9SPIR S-adenosylmethionine:tRN A ribosyltransferase-isomerase OS=Borrelia mayonii OX=1 674146 GN=queA PE=3 SV=1
MKTKEFHFNLPYSLIAQYPSEKRGSSRLMVLDPKLQKIYHEDSVNNILKYINSDTFIVFNNSKVRKSRIYAESEMGSNVEFLILDRIGANLFTSLISKSKKQIVGNLYKFPEGLIGKILSKNSSEIVLKFDLDVGEDYFEKHGFVPIPPYIKRDYDKIDEDRYQTIYSQYVGSTASATAGLHFSRDLFYAFEKNNIEYDFITLHVGLGTFLPVRSKKVEEHSMHFETFLIKDCVANRLENVKFLGKKILSIGTTTLRALESSYDNKLKKFKTGQQSTNLFIYPGKNYCFKFVDMLFTNFHTPQSTLLMLVSSFAGKDFVFSSYEEAINTGYKFFSYGDAMLVLNHI

SEQ ID NO: 64283 - protein, 345 aa, Borrelia miyamotoi
  misc_feature (1)..(345): tr|A0A2D1YZA6|A0A2D1YZA6_9SPIR S-adenosylmethionine:tRN A ribosyltransferase-isomerase OS=Borrelia miyamotoi OX =47466 GN=queA PE=3 SV=1
MDTKEFYFDLPYNLIAQYPSEKRGLSRLMVLDSGNRKIYHNASISDIFKYIDSNVFLVFNDSRVRKSRIYASTDHGGSVEFLILDRLTKDTFTSLIAKAKRQNIGKVYKFPTDLLGQIISRSDNEFILKFNRCVDESYFERYGLMPLPPYIKRSYDREDEERYQTIYSKCVGSSASATAGLHFSEELFFKLYENNIEYCFITLHVGLGTFLPVRTKTIEEHKMHFETFSIKDSVAVKLEEAKALGKKILAVGTTTLRALESSYDKQKGFVRGDQKTNLFIYPGKGYEFKFVDMLFTNFHTPESTLLMLVSSFGGKDFVFNAYKEAIKMDYKFFSYGDATLFLNHI

SEQ ID NO: 64284 - protein, 345 aa, Borrelia miyamotoi
  misc_feature (1)..(345): tr|A0A1D8TEG3|A0A1D8TEG3_9SPIR S-adenosylmethionine:tRN A ribosyltransferase-isomerase OS=Borrelia miyamotoi OX =47466 GN=queA PE=3 SV=1
MDTKEFYFDLPYKLIAQYPSEKRGLSRLMVLDSGNRKIYHNASISDIFKYIDSNIFLVFNDSRVRKSRIYASTDHGLSVEFLILDRLTEDTFTSLISKAKRQNIGKVYKFPKDLLGQIISRSDNEFILKFNRCVDESYFERYGLIPLPPYIKRSYDREDEERYQTIYSKCVGSSASATAGLHFSKELFFKLYENNIEYCFITLHVGLGTFLPVRTKTIEEHKMHFETFSIKDSVAVKLEEAKALGKKILAVGTTTLRALESSYDKQKGFVRGEQKTNLFIYPGKGYEFKFVDMLFTNLHTPESTLLMLVSSFGGKDFVFNAYKEAIKMDYKFFSYGDATLFLNHI

SEQ ID NO: 64285 - protein, 348 aa, Borrelia parkeri
  misc_feature (1)..(348): tr|W5SRW2|W5SRW2_BORPR S-adenosylmethionine:tRNA ribosy ltransferase-isomerase OS=Borrelia parkeri SLO OX=13132 94 GN=queA PE=3 SV=1
MEKMDTKEFYFNLPCKLIAQYPSEQRGLSRLMVLDSGNQKIYHNDSINDIFKYINSNTFLVFNDSRVRKSRIYAKTEHGGSIEFLILDRLAGDKFTSLISKAKKQNIGTVYMFPQGLLAQIISKTGNEFIIKFNKCVNESYFEQHGLIPLPPYIKRNYDREDEERYRTIYSKYIGSSASATAGLHFSEELFSKLDENNIEYDFITLHVGLGTFLPVRTKTIEEHKMHFESFSIKNSVALRLEEAKALGKKILAIGTTTLRALESAYDKQKGFVRGEQKTNLFIYPGKGYEFKFVDMLFTNFHTPESTLLMLVSSFGGKDFVFSAYREAVKMNYKFFSYGDATLFLNHM

SEQ ID NO: 64286 - protein, 352 aa, Borrelia recurrentis
  misc_feature (1)..(352): tr|B5RQK4|B5RQK4_BORRA S-adenosylmethionine:tRNA ribosy ltransferase-isomerase OS=Borrelia recurrentis (strain A1) OX=412418 GN=queA PE=3 SV=1
MILVGSMETKEFYFDLPHHLIAQYPSERRGLAKLMVLDSICQKIYHTDSVNDILKYIGSNTFLVFNDSRVRKSRIYAKTDYDGNVEFLILNRLTGDTFTSLISKAKRQKVGKVYRFPQDLSAQIISKLDNEFTIKFNRYVDESYFEQYGFIPLPPYIKRDYDKEDEDRYQTIYSKYIGSSASATAGLHFSEELFSKFAQNNIEYDFITLHVGLGTFLPVRTKTIEKHKMHFESFSIRDSVACRLERAKSLGKKILAVGTTTLRALESAYDKQKGRFTRGEQKTNLFIYPGKNYKFKSVDMLFTNFHTPESTLLMLVSSFGGKDFVFDAYREAVTMNYRFFSYGDATLFLSHI

SEQ ID NO: 64287 - protein, 346 aa, Borrelia sp.
  misc_feature (1)..(346): tr|A0A5J6W942|A0A5J6W942_9SPIR tRNA preQ1(34) S-adenosy lmethionine ribosyltransferase-isomerase QueA OS=Borrel ia sp. CA690 OX=1476873 GN=queA PE=4 SV=1
MKTKEFHFNLSNSLIAQYPSEKRGSSRLMVLDPQLQKIYHEHSVNNIFKYINSDIFIVFNDSKVRKSRIYAESEMGSNVEFLILDRIGTNLFTALVSKSKKQIVGNLYKFPEGLMGEILSKNSSEIVLKFNKDVGEDYFEKHGFIPLPPYIKRDYDKIDEDRYQTIYSKYVGSAASATAGLHFSKDLFSAFEKNNIEYDFITLHVGLGTFLPVRSKKVEEHNMHFETFLMKDCVSERLQNAKLLGKKILSIGTTTLRTLESSYDNTLKKFKTGPQSTNLFIYPSKNYCFKFVDMLFTNFHTPQSTLLMLVSSFAGKDFVFSSYEEAINKGYKFFSYGDAMLVLNHI

SEQ ID NO: 64288 - protein, 344 aa, Borrelia turcica
  misc_feature (1)..(344): tr|A0A386PLV4|A0A386PLV4_9SPIR S-adenosylmethionine:tRN A ribosyltransferase-isomerase OS=Borrelia turcica IST7 OX=1104446 GN=queA PE=3 SV=1
MDTKEFYFDLPSNLIAQHPSKKRGLSRLMVLDPSNQKVYHDHSVNDILKYINSNTFLVFNDSRVRKSRIYAKTDNGGSVEFLMLARIADDIFTCLISKARRQNVGRVYKFPQDLLAQVISKTDSEFTLKFNQNVDESYFEQYGLIPLPPYIKRNYEKEDEERYRTIYSKYIGSTASATAGLHFSRELFSLLDKNRIEYDFITLHVGLGTFLPVRTKRIEEHKMHFERFFIKDSVALRLEKAKALGKKILAIGTTTLRALESAYDNSNFMRGEQQTDLFIYPGKNYDFKFVDMLFTNFHTPESTLLMLVSSFGGKDFVFSSYREAVEMNYKFFSYGDATLFLNHV

SEQ ID NO: 64289 - protein, 345 aa, Borrelia turicatae
  misc_feature (1)..(345): tr|A1QYH4|A1QYH4_BORT9 S-adenosylmethionine:tRNA ribosy ltransferase-isomerase OS=Borrelia turicatae (strain 91 E135) OX=314724 GN=queA PE=3 SV=1
MDTKEFYFDLPCKLIAQYPSEKRGLSRLMVLDSGNQKIYHNDSINDIFKYINSNTFLVFNDSRVRKSRIYAKTEHGGSIEFLILDRLAGDEFTSLISKAKKQNIGKVYMFPQGLLAQIISKTDNEFIIKFNKCVSESYFEQHGLIPLPPYIKRNYDRADEERYRTIYSKYIGSSASATAGLHFSEELFSKLDENNIEYDFITLHVGLGTFLPVRTKTIEEHKMHFESFSIKNSVALRLEESKALGKKILAIGTTTLRALESAYDKQKGFVRGEQKTNLFIYPGKGYEFKFVDMLFTNFHTPESTLLMLVSSFGGKDFVFSAYREAVKMNYKFFSYGDATLFLNHM

SEQ ID NO: 64290 - protein, 345 aa, Borrelia turicatae
  misc_feature (1)..(345): tr|A0A172XA58|A0A172XA58_BORTU S-adenosylmethionine:tRN A ribosyltransferase-isomerase OS=Borrelia turicatae OX =142 GN=queA PE=3 SV=1
MDTKEFYFDLPCKLIAQYPSEKRGLSRLMVLDSGNQKIYHNDSINDIFKYINSNTFLVFNDSRVRKSRIYAKTEHGGSIEFLILDRLAGDEFTSLISKAKKQNIGKVYMFPQGLLAQIISKTDNEFIIKFNKCVSESYFEQHGLIPLPPYIKRNYDRADEERYRTIYSKYIGSSASATAGLHFSEELFSKLDENNIEYDFITLHVGLGTFLPVRTKTIEEHKMHFESFSIKNSVALRLEEAKALGKKILAIGTTTLRALESAYDKQKGFVRGEQKTNLFIYPGKGYEFKFVDMLFTNFHTPESTLLMLVSSFGGKDFVFSAYREAVKMNYKFFSYGDATLFLNHM

SEQ ID NO: 64291 - protein, 346 aa, Borreliella bavariensis
  misc_feature (1)..(346): sp|Q662Z1|QUEA_BORBP S-adenosylmethionine:tRNA ribosylt ransferase-isomerase OS=Borreliella bavariensis (strain ATCC BAA-2496 / DSM 23469 / PBi) OX=290434 GN=queA PE= 3 SV=1
MKTKEFHFNLPYSLIAQYPSEKRGSSRLMVLDPKLQKIYHENSVNNILKYINSDTFIIFNNSKVRKSRMYAESELGNNIEFLILDRIGTDLFTALISKSKKQIVGNVYKFPEGLMGEILSKNNSEIVLKFDNNVDEDYFEKHGFVPIPPYIKRDYDKIDEDRYQTVYSKYVGSAASATAGLHFSRDLFSTFEKNNIEYDFITLHVGLGTFLPVRSKKVEEHNMHFETFLIEDCVATRLENAKFLGKKILSIGTTTLRALESSYDNKLKKFKTGQQSTNLFIYPGKNYCFKFVDMLFTNFHTPQSTLLMLVSSFAGKDFVFSSYEEAINKGYKFFSYGDAMLVLNHI

SEQ ID NO: 64292 - protein, 346 aa, Borreliella bissettii
  misc_feature (1)..(346): tr|A0A1L8ZDR3|A0A1L8ZDR3_BORBI S-adenosylmethionine:tRN A ribosyltransferase-isomerase OS=Borreliella bissettii OX=64897 GN=queA PE=3 SV=1
MKTKEFHFNLPYSLIAQYPSEKRGSSRLMVLDPKLQKIYHEDSVSNILKYINSDTFIIFNNSKVRKSRMYAESEMGSNVEVLILDRIDTNSFTALISKSKKQIVGNLYKFPEGLIGEILSKNSSEIVLKFDVDVGEDYFEKHGFVPIPPYIKRDYEKMDEDRYQTVYSKYVGSAASATAGLHFSKDLFSAFEKNNIEYDFITLHVGLGTFLPVRSKKVEEHNMHFETFLIKDCVANRLQNAKFLGKKILSIGTTTLRALESSYDNKLKKFKTGQQSTNLFIYPGKNYCFKFVDMLFTNFHTPQSTLLMLVSSFAGKDFVFSSYEEAINTGYKFFSYGDAMLVLNHI

SEQ ID NO: 64293 - protein, 346 aa, Borreliella bissettii
  misc_feature (1)..(346): tr|G0AKI5|G0AKI5_BORBD S-adenosylmethionine:tRNA ribosy ltransferase-isomerase OS=Borreliella bissettii (strain DN127) OX=521010 GN=queA PE=3 SV=1
MKTKEFHFNLPYSLIAQYPSEKRGSSRLMVLDPKLQKIYHEDSVSNILKYINSDTFIIFNNSKVRKSRMYAESEMGSNVEVLILDRIDTSSFTALISKSKKQIVGNLYKFPEGLIGEILSKNSSEIVLKFDVDVGEDYFEKHGFVPIPPYIKRDYEKMDEDRYQTVYSKYVGSAASATAGLHFSKDLFSAFEKNNIEYDFITLHVGLGTFLPVRSKKVEEHNMHFETFLIKDCVANRLQNAKFLGKKILSIGTTTLRALESSYDNKLKKFKTGQQSTNLFIYPGKNYCFKFVDMLFTNFHTPQSTLLMLVSSFAGKDFVFSSYEEAINTGYKFFSYGDAMLVLNRI

SEQ ID NO: 64294 - protein, 111 aa, Borreliella burgdorferi
  misc_feature (1)..(111): tr|A0A0E1U9Z3|A0A0E1U9Z3_BORBG S-adenosylmethionine:tRN A ribosyltransferase-isomerase OS=Borreliella burgdorfe ri 64b OX=498740 GN=BBU64B_0022 PE=3 SV=1
MKTKEFHFNLPHSLIEQYSSEKRGSSRLIVLDPQLQKIYHKNSVNNILKYINSNIFNNSKARKSRIYAESEMSSNVEFLILDRIGTNLFTALVSKSKKQIIGNFYKFPEGL

SEQ ID NO: 64295 - protein, 232 aa, Borreliella burgdorferi
  misc_feature (1)..(232): tr|A0A0E1UFY8|A0A0E1UFY8_BORBG S-adenosylmethionine:tRN A ribosyltransferase-isomerase OS=Borreliella burgdorfe ri 64b OX=498740 GN=queA PE=3 SV=1
MGEILSKNSSEVVLKFNNDVGEDYFEKHCFVPLPSYIKRDYDKIDEDRYQTIYSKYVGSAASATAGLHFSRDLFSAFENNNIEYDFITLHVGLGTFLPVRSKKVEERNMHFETFLIKDFVAVRLQNAKLLGKRILPIVTTTLRALESSYDNNLKKFKTGQQSTNLFIYPGKNYCFKFFDMLFTNFHIPQSTLLMLVSSFAGKDFVFSSYKEAVNKGYKFFSYGDAMLILNHI

SEQ ID NO: 64296 - protein, 346 aa, Borreliella chilensis
  misc_feature (1)..(346): tr|A0A0A7UUU7|A0A0A7UUU7_9SPIR S-adenosylmethionine:tRN A ribosyltransferase-isomerase OS=Borreliella chilensis OX=1245910 GN=queA PE=3 SV=1
MKTKEFHFNLPYSLIAQYPSEKRGSSRLMVLDPKFQKIYHEDSVNNILKYVNSDTFIIFNNSKVRKSRIYAESEMGSNVEFLILDRIGTDLFTALISKSKKQIVGNVYKFPEGLIGKILSKNSNEIVLRFDDTIGEDYFERHGFVPIPPYIKRDYDKIDEDRYQTVYSKYVGSAASATAGLHFSKDLFSVFEENNIEYDFITLHVGLGTFLPVRSKKVEEHRMHFETFLIKDCVADRLENAKSLGKKILAIGTTTLRALESSYNNKLKKFKTGQQSTNLFIYPGKNYCFNFVDMLFTNFHTPQSTLLMLVSSFAGKDFVFNSYEEAIKRNYKFFSYGDAMLFLNHI

SEQ ID NO: 64297 - protein, 102 aa, Borreliella finlandensis
  misc_feature (1)..(102): tr|C0ANT0|C0ANT0_9SPIR S-adenosylmethionine:tRNA ribosy ltransferase-isomerase OS=Borreliella finlandensis OX=4 98741 GN=BSV1_0024 PE=3 SV=1
MCKILSKSSSEVVLKFNNDVGEDYFEKHGFVPLPPYIKRDYDKIDENRYQTIYSKYVGSAASATAGLHFSRDLFSALLKITILNMILSLFMWGAWDFSSYKI

SEQ ID NO: 64298 - protein, 53 aa, Borreliella finlandensis
  misc_feature (1)..(53): tr|C0ANS8|C0ANS8_9SPIR S-adenosylmethionine:tRNA ribosy ltransferase-isomerase OS=Borreliella finlandensis OX=4 98741 GN=queA PE=3 SV=1
MLFTNFHTPQSTLLMLVSSFAGKDFVFSSYEEAINKGYKFFSYGDAMLILNHI

SEQ ID NO: 64299 - protein, 346 aa, Borreliella garinii
  misc_feature (1)..(346): tr|B7XTB2|B7XTB2_BORGR S-adenosylmethionine:tRNA ribosy ltransferase-isomerase OS=Borreliella garinii PBr OX=49 8743 GN=queA PE=3 SV=1
MKTKEFHFNLPYSLIAQYPSEKRGSSRLMVLDPKLQKIYHENSVNNILKYINSDTFIIFNNSKVRKSRMYAESEMGNNIEFLILDRIGTDLFTALISKSKKQIVGNVYKFPEGLMGEILSKNNSEIVLKFDNNVDEDYFEKHGFVPIPPYIKRDYDKIDEDRYQTVYSKYVGSAASATAGLHFSRDLFSAFEKNNIEYDFITLHVGLGTFLPVRSKKVEEHNMHFETFLIENSVAARLENAKFLGKKILSIGTTTLRALESSYDNKLKKFKTGQQSTNLFIYPGKNYCFKFVDMLFTNFHTPQSTLLMLVSSFAGKDFVFSSYEEAINKGYKFFSYGDAMLVLNHI

SEQ ID NO: 64300 - protein, 346 aa, Borreliella japonica
  misc_feature (1)..(346): tr|A0A1G4PXL2|A0A1G4PXL2_BORJA S-adenosylmethionine:tRN A ribosyltransferase-isomerase OS=Borreliella japonica OX=34095 GN=queA PE=3 SV=1
MKTKEFHFNLPYSLIAQYPSEKRGTSRLMVLDPKLQKNYHENSVNNILKYINSDTFIIFNNSKVRKSRMYAESEMGSNVEFLILDRIGTDLFTALISKSKKQIVGNVYKFPEGLVGEILSKNSSEIVLKFNNDVGEDYFEKYGFIPIPPYIKRDYDKIDEDRYQTVYSKYVGSAASATAGLHFSQDLFSAFKKNNIEYDFITLHVGLGTFLPVRSKKVEEHNMHFETFLIKDCVADRLENAKLLGKKILSIGTTTLRALESAYDNKLKKFKTGQQSTNLFIYPGKNYCFKFVDMLFTNFHTPQSTLLMLVSSFAGKDFVFSSYEEAINKGYKFFSYGDAMLVLNHI

SEQ ID NO: 64301 - protein, 346 aa, Borreliella spielmanii
  misc_feature (1)..(346): tr|B9X931|B9X931_9SPIR S-adenosylmethionine:tRNA ribosy ltransferase-isomerase OS=Borreliella spielmanii A14S O X=498742 GN=queA PE=3 SV=1
MKTKEFHFNLPYSLIAQYPSEKRGSSRLMVLDPKLQEIYHENSVNNILKYINSDTFIVFNNSKVRKSRIYAESELGSDVEFLILDKIDTDLFTALISKSKKQIVGSVYKFPEGLIGKILSKNGSEIVLKFDNDVGEDYFEKHGFVPIPPYIKRDYDKIDEDRYQTIYSKYVGSAASATAGLHFSRDLFTFFEKNNIEYDFITLHVGLGTFLPVRSKKVEEHNMHFETFLIKDCVADRLEKAKFLGKKILSIGTTTLRALESSYDDELKKFKTGQQSTNLFIYPGKNYCFKFVDMLFTNFHTPQSTLLMLVSAFAGKDFVFSSYEEAIKKGYKFFSYGDAMLVLNHI

SEQ ID NO: 64302 - protein, 346 aa, Borreliella valaisiana
  misc_feature (1)..(346): tr|D6RWM2|D6RWM2_BORVA S-adenosylmethionine:tRNA ribosy ltransferase-isomerase OS=Borreliella valaisiana VS116 OX=445987 GN=queA PE=3 SV=1
MKTKEFHFNLPHSLIAQYPSEKRGSSRLMVLDPKLQKIYHENSVNNILKYINSDTFIIFNNSKVRKSRMYAESEIGSNVEFLILDRIGTAMFTALISKSKKQIVDNVYKFPEGLIGKILSKNGSEIVLKFDADVGEDYFEKHGFVPIPPYIKRDYDKIDEDRYQTVYSKYIGSAAAATAGLHFGKDLFSVFEKNNIEYDFVTLHVGLGTFLPVRSKRIEEHKMHFETFLIKDSVADRLENAKFLGKKILSIGTTTLRALESSYDHKLRKFKTGQQSTNLFIYPDQNYCFKFVDMLFTNFHTPQSTLLMLVSSFAGKDFVFNSYKEAVNQSYKFFSYGDAMLVLNHI

SEQ ID NO: 64303 - protein, 364 aa, Bosea lathyri
  misc_feature (1)..(364): tr|A0A1H5VWK5|A0A1H5VWK5_9BRAD S-adenosylmethionine:tRN A ribosyltransferase-isomerase OS=Bosea lathyri OX=1036 778 GN=queA PE=3 SV=1
MDVGLFDFELPEDRIALRPVSPRDAARMLVVRPDAVEPFEDRGIRDLVSLLRPGDALVLNDTRVIPSRLYGRRYRGETSARIEIMLHKREGADLWRAFARPAKKLALGDTITFGDDSEGIACELGRLQAEVVDRSEGGEVELRFAFSGAFLDEAIARFGELPLPPYIAGKRPTDQADEIDYQTVHAREDGAVAAPTAGLHFTPELFAALEAHGVSRHFVTLHVGAGTFLPVKAQDTRDHRMHAEWGSVSPETAAALNAVKAKGGRVIAVGTTSLRLLESATGEDGVIAPFSGDTAIFITPGYRFRAVDVLMTNFHLPRSTLFMLVSAFCGADIMKRAYAHAIAEKYRFYSYGDGSLLFRGAPGG

SEQ ID NO: 64304 - protein, 364 aa, Bosea lupini
  misc_feature (1)..(364): tr|A0A1H7H0E2|A0A1H7H0E2_9BRAD S-adenosylmethionine:tRN A ribosyltransferase-isomerase OS=Bosea lupini OX=10367 79 GN=queA PE=3 SV=1
MDVGLFDFDLPEERIALRPVTPRDAARLLVVRPGSPEPLADRGVRDLVELLQPGDALVLNDTRVIPSRLWGRRTRGEASARIEIMLHKREADNRWRAFARPAKKLNVGETIVFDSDGAGNACELARLQAEVEDKGEGGDIGLRFSLTGPYLDEAIARLGELPLPPYIAGKRATDQADAQDYQTTYAREEGAVAAPTAGLHFTPELFDALRTRGVSSHFVTLHVGAGTFLPVKAEDTDEHRMHAEWGTVGAATADALNAVHAAGGRIVAVGTTSLRLLESATGEDGVVKPFSGDTAIFITPGYRFRAVDLLMTNFHLPRSTLFMLVSAFSGLDVMKRAYAHAIAEGYRFYSYGDGSLLFRADASA

SEQ ID NO: 64305 - protein, 367 aa, Bosea sp.
  misc_feature (1)..(367): tr|A0A0N1BAE7|A0A0N1BAE7_9BRAD S-adenosylmethionine:tRN A ribosyltransferase-isomerase OS=Bosea sp. AAP35 OX=15 23417 GN=queA PE=3 SV=1
MDVGLFDFDLPEDRIALRPASPRDAARLLVVRPDAVKLFEDRGIRDLVSLLEPGDALVLNDTRVIPSRLYGRRARGETSARVEIMLHKREAQDRWLAFARPAKKLALGETIVFENALEGAACELGRLQAEVVAKADGGEVELRFALSGPHLDEAIARLGELPLPPYIAGKRATDAADASDYQTMHARTDGAVAAPTAGLHFTPELVAALEARGVTRHLVTLHVGAGTFLPVKADDTDDHRMHAEWGSVSPPTASALNAVRARGGRIVAVGTTSLRLLESATGEDGVIAPFSGDTAIFITPGYRFRAVDLLLTNFHLPRSTLFMLVSAFCGLDVMKRAYAHAIAGGYRFYSYGDGSLLHRAEPDQSRL

SEQ ID NO: 64306 - protein, 365 aa, Bosea sp.
  misc_feature (1)..(365): tr|A0A1Q3P189|A0A1Q3P189_9BRAD S-adenosylmethionine:tRN A ribosyltransferase-isomerase OS=Bosea sp. 67-29 OX=18 95723 GN=queA PE=3 SV=1
MNVDLFDFDLPEDRIALRPASPRDAARLLVVRPDTPEPFADMGIRDLPALLQPGDALVLNDTRVIPSRLRGRRYRGEDSARVEIMLHKRESEDRWLAFARPAKKLAPGETVVFDSEGASNACELGRLQAEVVARGEGGEVELRFSLTGAWLDEAIARLGELPLPPYIAGKRPADSADASDYQTAYARHEGAVAAPTAGLHFTPELFAALDARGVSRHFVTLHVGAGTFLPVKAEDTKEHRMHAEWGTVSAETAAALNAVRARGGRIVAAGTTSLRLLESATGEDGVVGPFSGDTAIFITPGYRFRAVDVLMTNFHLPRSTLFMLVSAFCGLDVMKRAYAHAIAEQYRFYSYGDGSLLFRASRPQA

SEQ ID NO: 64307 - protein, 361 aa, Bosea thiooxidans
  misc_feature (1)..(361): tr|A0A0Q3I862|A0A0Q3I862_9BRAD S-adenosylmethionine:tRN A ribosyltransferase-isomerase OS=Bosea thiooxidans OX= 53254 GN=queA PE=3 SV=1
MDVGLFDFDLPEERIALRPVSPRDAARLLVVRPDAPEPLEDRGVRDLVSLLQPGDALVLNDTRVIPSRLRGRRYRGEDSARIEIMLHKRESEDRWLAFARPAKKLLLGETVVFDSEGASNACELGRLQAEVIGKSEGGEVELRFSLTSAYLDEAIARLGELPLPPYIAGKRPTDSADATDYQTNFARKDGAVAAPTAGLHFTPELLAALEARGVSRHFVTLHVGAGTFLPVKAEDTDAHRMHAEWGTVSAETAAALNAVKAAGGRIVCVGTTSLRLIESAAAEDGTIRPFSGDTAIFITPGYRFKAVDLLVTNFHLPRSTLFMLVSAFCGLDVMKRAYAHAIAANYRFYSYGDGSLLFRAG

SEQ ID NO: 64308 - protein, 365 aa, Bosea vaviloviae
  misc_feature (1)..(365): tr|A0A0N1N2R7|A0A0N1N2R7_9BRAD S-adenosylmethionine:tRN A ribosyltransferase-isomerase OS=Bosea vaviloviae OX=1 526658 GN=queA PE=3 SV=1
MNIGLFDFDLPEDRIALRPASPRDAARLLVVNPAASEPLQDRGIRDLVALLRPGDALVLNDTRVIPSRLRGRRRRGDSVARVEIMLHKREGADRWRAFARPAKKLALGETIAFGDESEGSACELGRLQAEIVGKGEAGEVELRFTLAGSQLDEAIARLGELPLPPYIAGKRPTDHADASDYQTMHAREDGAVAAPTAGLHFTPDLVAALEAHGVSRHFVTLHVGAGTFLPVKADDTDDHRMHAEWGSVSAQTAAALNAVRQNGGRIVAVGTTSLRLLESATGEDGVIAPFSGDTAIFITPGYRFRAVDLLLTNFHLPRSTLFMLVSAFCGLELMQRAYAHAIAGGYRFYSYGDGSLLHRVSQPSS

SEQ ID NO: 64309 - protein, 361 aa, Bosea vaviloviae
  misc_feature (1)..(361): tr|A0A1D7U553|A0A1D7U553_9BRAD S-adenosylmethionine:tRN A ribosyltransferase-isomerase OS=Bosea vaviloviae OX=1 526658 GN=queA PE=3 SV=1
MDVGLFDFDLPEDRIALRPASPRDTARLLVVRPDAPEPFEDRGIRDLVGLLQPGDALVLNDTRVIPSRLRGRRFRGETSAGIEIMLHKREGADRWLAFARPAKKLTIGEMIVFGEAGASNVCELGRLEAEVQSKGEGGEVELRFALSGPMLDEAIARLGELPLPPYIAGKRPTDQQDASDYQTMHAREDGAVAAPTAGLHFTPDLVAALDAYGVSRHLVTLHVGAGTFLPVKVDDTSEHRMHAEWGSVSAETAAALNAVKAKGGRVVAVGTTSLRLLESATGEDGVIAPFSGDTAIFITPGYRFRAVDLLLTNFHLPRSTLFMLVSAFCGLNIMKRAYAHAIADNYRFYSYGDASLLQRGA

SEQ ID NO: 64310 - protein, 361 aa, Bosea vestrisii
  misc_feature (1)..(361): tr|A0A543NYR8|A0A543NYR8_9BRAD S-adenosylmethionine:tRN A ribosyltransferase-isomerase OS=Bosea vestrisii OX=15 1416 GN=queA PE=3 SV=1
MDVGLFDFDLPEDRIALRPASPRDAARLLVVRPDAAQPFADLGIRDLPSLLQPGDALVLNDTRVIPSRLRGRRYRGEDSARVEIMLHKRESEDRWRAFARPAKKLALGETVMFDADGASNACELGRLQAEVLEKGEGGEVELRFSLTGAYLDEAIARLGELPLPPYIAGKRPADHADASDYQTSYARHEGAVAAPTAGLHFTPELFSGLEARGVSRHFVTLHVGAGTFLPVKADDTDEHRMHAEWGTVSAETAAALNAVKARGGRIVAAGTTSLRLLESATGEDGAIRPFSGDTAIFITPGYRFRAVDVLMTNFHLPRSTLFMLVSAFCGLDVMKRAYAHAIAEQYRFYSYGDGSLLFRAG

SEQ ID NO: 64311 - protein, 351 aa, Boseongicola aestuarii
  misc_feature (1)..(351): tr|A0A238IWD1|A0A238IWD1_9RHOB S-adenosylmethionine:tRN A ribosyltransferase-isomerase OS=Boseongicola aestuari i OX=1470561 GN=queA PE=3 SV=1
MKLSDFDFDLPEGLIATRPARPRSASRLLVARADAIDEAHAIDLPSFLNPGDRLVLNDTKVIPARLSGVRTRSGEAGVTEARIEATLLDPLPDGNWMALLKPLRKVRDGEVIRFSDALSAEVVGRAEGTAALKFNLTGDDFDAALNASGAMPLPPYIEALRKSDDQDRVDYQTIWAKRTGAVAAPTASLHFDAALMEALASRGIEVSYVTLHVGAGTFLPVKVDDIADHKMHSERGSINAKAASEINATRAHGGRIVPVGTTAMRLIETAAGEDGTLSAWEGATDIFITPGYRFKIADGLMTNFHLPKSTLMMLVSAFMGSDRIRSIYAYAISREFRFFSYGDASLLLPKG

SEQ ID NO: 64312 - protein, 351 aa, Boseongicola sp.
  misc_feature (1)..(351): tr|A0A4P7JGN2|A0A4P7JGN2_9RHOB S-adenosylmethionine:tRN A ribosyltransferase-isomerase OS=Boseongicola sp. CCM3 2 OX=2552942 GN=queA PE=3 SV=1
MKLSDFDFDLPEHLIATRPARPRSSARLLLAEGAKTQDRTVSDLPGILRPGDRLVLNDTRVIPARLTGLRLRDTGEEVVKARVEVTLLEPQANGSWSALAKPLRKLAIGETVVFSGDLSAEVTGLQGGLRLRFNLTGPDFDAALNAAGAMPLPPYIAGKRPADARDHEDYQTIWARRSGAVAAPTASLHFDEPLLAGLRAKGVTMSFVTLHVGAGTFLPVTVEDVTTHRMHAEWGEISAEAAADITATRAAGGRIIPVGTTALRLIETAAGADGQLAAWQGDTDIFIYPGYRFKIADALMTNFHLPKSTLMMLVSALMGAGRIREIYAHAIDHEYRFFSYGDASLLIPSQM

SEQ ID NO: 64313 - protein, 356 aa, Boseongicola sp.
  misc_feature (1)..(356): tr|A0A5D0RLU9|A0A5D0RLU9_9RHOB S-adenosylmethionine:tRN A ribosyltransferase-isomerase OS=Boseongicola sp. HY14 OX=2603819 GN=queA PE=3 SV=1
MSDDLPEGARLSDYDFDLPDELIATRPARPRSSARLLVATPGRTADRIVTDLPEILSPGDRLVLNDTRVIPARLRGKRHRGEAVAGIEVTLLEPAPEGRWRALIKPLRKVAEGERIVFSDRLSATLIGRDDGQALIAFNLTGADFDAALAEAGQMPLPPYIEAKRRADERDRVDYQTIWAETPGAVAAPTASLHFDADLLAALRARGVTMTHVTLHVGAGTFLPVKTDDLSGHKMHAEWGEVTQTAADEINATKAAGHRVIPVGTTALRLIESAATGRGRIAPWRGPTDIFIRPGFTFQIADALMTNFHLPKSTLMMLVSALMGLERMRAVYAHAIEQRYRFFSYGDASLLLPKGD

SEQ ID NO: 64314 - protein, 345 aa, Bowmanella sp.
  misc_feature (1)..(345): tr|A0A4Q9XIY2|A0A4Q9XIY2_9ALTE S-adenosylmethionine:tRN A ribosyltransferase-isomerase OS=Bowmanella sp. JS7-9 OX=1605368 GN=queA PE=3 SV=1
MKRSDFSFDLPDELIARYPTEKRSASRLLHLDGKSGTTQHLHFPDIVNLLEPGDLLVFNNTRVIPARLLGQKASGGKVEVLVERLLDERRVLAHVRASKAPKPGTKLILENSVEVTMLARHDALFELEFTSGDVLADLQAHGHMPLPPYIDRPDEQSDQERYQTVYSEKPGAVAAPTAGLHFDDEIFAALEAKGVNKAFVTLHVGAGTFQPVRADNILEHKMHSEYAEVPQEVVDAILATKAAGKRVVAVGTTSVRSLESAAQAAKHAGTGLAPFFADTDIFIYPGYEFQLVDAMLTNFHLPESTLIMLISAFAGRDNVMHAYQQAIAQRYRFFSYGDAMFINRA

SEQ ID NO: 64315 - protein, 353 aa, Brachymonas denitrificans
  misc_feature (1)..(353): tr|A0A1H8KEI3|A0A1H8KEI3_9BURK S-adenosylmethionine:tRN A ribosyltransferase-isomerase OS=Brachymonas denitrifi cans DSM 15123 OX=1121117 GN=queA PE=3 SV=1
MSSASSSFTLSDFDFHLPPELIAQHPAAERTGSRLLDGTGNTPQDRQFRDLPSLLRAGDLMVFNDTQVVKARLFGHKPSGGRLELLVERVLHEPGLPNTVAAHMKVSKKPQPGTVLQMDGGFTATLLGRWPHEDGPIYRLQFSEDPYTLMAQHGHVPLPPYITHVDSAEDERRYQTVFARSPGAVAAPTAALHFDEAMLATLDAAGVQHANVTLHVGAGTFQPVKTENIAEHVMHFERYEVPQATADAIAACRARGGRVLAVGTTSVRALESWATRGEARGDTDIFITPGYQFRTVDMLLTNFHLPKSTLMMLVSAFAGYGHVMALYQHAIARHYRFFSYGDAMLLQRQTVSS

SEQ ID NO: 64316 - protein, 352 aa, Brachyspira aalborgi
  misc_feature (1)..(352): tr|A0A5C8F5E9|A0A5C8F5E9_9SPIR S-adenosylmethionine:tRN A ribosyltransferase-isomerase OS=Brachyspira aalborgi OX=29522 GN=queA PE=3 SV=1
MIDYLNKETYNFYLPEKLIATNPNHKRDNCKLMTMNIKTGEIEHKIFYNIIDYLKKDDILILNDSKVIPARIYAKKKTGGIVEILLLQKKDSDESYWECLIKGKNIKEKDILYLDYDNIKAIIEKDNISTKLIKFSKPLNNDILENIGNIPLPPYIIQNRKKRGEKEYTENDKEFYQNIFAKNEGSVASPTSGLHFTKELLDKIKNKGIKICYITLHVGFSTFNPLKEDNIKNHIMHKEKFLIEKETADIIKESKINKKRIVACGTTVARVLESEFDKGDFKRLKGETDIFIYPPYKFKCVDALITNFHTPHSTLLAMVSAFAGYDNIMKSYKNAIENNYRFFSYGDAMFMY

SEQ ID NO: 64317 - protein, 352 aa, Brachyspira aalborgi
  misc_feature (1)..(352): tr|A0A5C8EXX2|A0A5C8EXX2_9SPIR S-adenosylmethionine:tRN A ribosyltransferase-isomerase OS=Brachyspira aalborgi OX=29522 GN=queA PE=3 SV=1
MTDYLNKETYNFYLPENLIATNPNYDRDKCKLMTMNIKTGEIEHKIFYNIIDYLKKDDILILNDSKVIPARIYAKKKTGGIVEILLLQKKDSDESYWECLIKGKNIKEKDILFLNYDSIEAIIEKDNISTKLIKFSKPLNNEILNNIGNIPLPPYIIQNRKKRGESEYNDKDKEFYQNIFAKNEGSVASPTSGLHFTKELLDKIKNKGIKICYITLHVGFSTFNPLKEDNIKNHIMHKEKFLIEKETADIIKESKINKKRIVACGTTVARVLESEFDKVDFKRLKGETDIFIYPPYKFKCIDALITNFHTPHSTLLAMVSAFAGYDNIMKSYKNAIENNYKFFSYGDAMFMY

SEQ ID NO: 64318 - protein, 352 aa, Brachyspira catarrhinii
  misc_feature (1)..(352): tr|A0A4U7NB57|A0A4U7NB57_9SPIR S-adenosylmethionine:tRN A ribosyltransferase-isomerase OS=Brachyspira catarrhin ii OX=2528966 GN=queA PE=3 SV=1
MIDYLNKETYNFYLPENLIATNPNYDRDKCKLMTMNIKTGEIEHKFFYDIINYLKKDDILVLNDSKVIPARIYAKKKTGGIVEILLLQKINFSESYWECLIKGKNIKENDILFLDYDNIEAIIEKDNISTKSIKFSKPLDTNILNNIGNIPLPPYIIQNRKKRGESEYNDRDKEFYQNIYAKNEGSIASPTSGLHFTSELLSKIKNIGIEICYITLHVGFSTFNPLKEYNIKNHKMHEEKFVIEKETADLIKETKKNGRRIVACGTTVARVLESEFDNGDFKRLKGATNIFIYPPYEFKCIDALITNFHTPHSTLLAMVSAFAGYENIMKAYKNAIENNYRFFSYGDAMFMY

SEQ ID NO: 64319 - protein, 359 aa, Brachyspira hampsonii
  misc_feature (1)..(359): tr|A0A2U4F033|A0A2U4F033_9SPIR S-adenosylmethionine:tRN A ribosyltransferase-isomerase OS=Brachyspira hampsonii 30446 OX=1289135 GN=queA PE=3 SV=1
MTDYFNKETYNFYLPENLIATNPNYERDHCKLMTLNKNTGKLEHKIFADIINYLNKDDVLVLNDSKVIPARIYAKKNTGGNSEILLLNKVNNDDSIWECIIRGKNIKEKDILYLNYSHLENAGGIEALIEKDNISTKIIKFSKSLTSDILDAIGKIPLPPYIIQSRKRKGEEEYNSHDKEFYQNVYAKNEGSIASPTSGLHFTKELLEKIKSIGVTVCYVTLHVGFSTFNPLKEDDLRNHIMHEEKFIIPKESYDIIINAKKEGRRVVSCGTTVARVLESEYDNYDFKRMEGSTNIFIYPPYKFKCVDALITNFHTPHSTLLAMVSAFAGYDNIMNAYKTAVENNYRFFSYGDAMFMFE

SEQ ID NO: 64320 - protein, 359 aa, Brachyspira hampsonii
  misc_feature (1)..(359): tr|A0A1E5NKN6|A0A1E5NKN6_9SPIR S-adenosylmethionine:tRN A ribosyltransferase-isomerase OS=Brachyspira hampsonii OX=1287055 GN=queA PE=3 SV=1
MTDYFNKETYNFYLPENLIATNPNYERDHCKLMTLNKNTGKLEHKIFADIINYLNKDDVLVLNDSKVIPARIYAKKNTGGNSEILLLNKVNNDESTWECLIKGKNIKEADTLYLDYSHLDNVGNIEALIEKDNISTKLIKFSKPLTSDILDAIGKIPLPPYIIQSRKRKGEEEYNSNDKEFYQNVYAKNEGSIASPTSGLHFTKELLEKIKSIGVTVCYVTLHVGFSTFNPLKEDDLRNHIMHEEKFIIPKESYDIIINAKKDGRRVVSCGTTVARVLESEYDNYDFKRMEGSTNIFIYPPYKFKCVDALITNFHTPHSTLIAMVSAFAGYDNIMNAYKTAVENNYRFFSYGDAMFMFE

SEQ ID NO: 64321 - protein, 358 aa, Brachyspira hyodysenteriae
  misc_feature (1)..(358): tr|A0A3B6VQH1|A0A3B6VQH1_BRAHO S-adenosylmethionine:tRN A ribosyltransferase-isomerase OS=Brachyspira hyodysent eriae ATCC 27164 OX=1266923 GN=queA PE=3 SV=1
MIDYLNKETYNFYLPENLIATTPNYERDHCKLMILNKSTGEIEHKIFSDIINYLNKDDILVLNDSKVIPARIYAKKNTGGNVEILLLNKFNDDDSTWECLIKGKNIKEKDILYLDYSNLENVGNIEAVLEKDNISTKLIKFSKPLTSEILDAIGKVPLPPYIIQSRKKKGEEEYNDKDKEFYQNVYAKNEGSIASPTSGLHFTKELLEKIKSMGITVCYVTLHVGFSTFNPLKEDDLRNHVMHEEKFIIPKESYDIIINAKKEGRRVVSCGTTVARVLESEYDNYDFKRMEGSTDIFIYPPYKFKCVDALITNFHTPHSTLLAMVSAFAGYDNIMNSYKLAIENNYRFFSYGDAMFMY

SEQ ID NO: 64322 - protein, 358 aa, Brachyspira hyodysenteriae
  misc_feature (1)..(358): tr|A0A3B6VDK9|A0A3B6VDK9_BRAHW S-adenosylmethionine:tRN A ribosyltransferase-isomerase OS=Brachyspira hyodysent eriae (strain ATCC 49526 / WA1) OX=565034 GN=queA PE=3 SV=1
MIDYLNKETYNFYLPENLIATTPNYERDHCKLMILNKSTGEIEHKIFSDIINYLNKEDILVLNDSKVIPARIYAKKNTGGNVEILLLNKFNNDESTWECLIKGKNIKEKDILYLDYSNLENVGNIEAVLEKDNISTKLIKFSKPLTSEILDAIGKVPLPPYIIQSRKKKGEEEYNDKDKEFYQNVYAKNEGSIASPTSGLHFTKELLEKIKSMGITVCYVTLHVGFSTFNPLKEDDLRNHVMHEEKFIIPKESYDIIINAKKDGRRVVSCGTTVARVLESEYDNYDFKRMEGSTDIFIYPPYKFKCVDALITNFHTPHSTLLAMVSAFAGYDNIMNAYKTAVENNYRFFSYGDAMFMY

SEQ ID NO: 64323 - protein, 358 aa, Brachyspira intermedia
  misc_feature (1)..(358): tr|G0EKE9|G0EKE9_BRAIP S-adenosylmethionine:tRNA ribosy ltransferase-isomerase OS=Brachyspira intermedia (strai n ATCC 51140 / PWS/A) OX=1045858 GN=queA PE=3 SV=1
MIDYLNKETYNFYLPENLIATTPNYERDHCKLMILNKDTGKLEHKIFSDIINYLNKDDVLVLNDSKVIPARIYAKKNTGGNVEILLLNKFNDDESTWECLIKGKNIKEKDILYLNYSHLENVGDIEALIEKDNISTKIIKFSKPLTSDILDSIGKVPLPPYIIQSRKKKGEEEYNDKDKEFYQNVYAKNEGSIASPTSGLHFTKELLEKIKSMGITVCYVTLHVGFSTFNPLKEDDLRNHVMHEEKFIIPKESYDIIINAKKEGRRVVSCGTTVARVLESEYDNYDFKRMEGSTDIFIYPPYKFKCVDALITNFHTPHSTLLAMVSAFAGYDNIMNAYKTAVENNYRFFSYGDAMFMY

SEQ ID NO: 64324 - protein, 358 aa, Brachyspira murdochii
  misc_feature (1)..(358): tr|D5U856|D5U856_BRAM5 S-adenosylmethionine:tRNA ribosy ltransferase-isomerase OS=Brachyspira murdochii (strain ATCC 51284 / DSM 12563 / 56-150) OX=526224 GN=queA PE= 3 SV=1
MTDYLNKETYNFYLPENLIATEPNYERDHCRLMTLNKNTGELEHKIFADIINYLNKDDVLVLNDSKVIPARIYAKKSTGGNAEILLLNKVNNDESTWECLIKGKNIKEADTLYLDYAHLDNVGNIEALIEKDNISTKLIKFSKPLTNDILDTIGKIPLPPYIIQSRKRKGEEEYNSNDKEFYQNVYAKNEGSIASPTSGLHFTNELLDKIKSIGVTVCYVTLHVGFSTFNPLKEDDLRNHIMHEEKFIIPKDSYDIIINAKKEGRRIVSCGTTVARVLESEYDNYDFKRLEGSTNIFIYPPYKFKCVDALITNFHTPHSTLLAMVSAFAGYDNIMNAYKTAVDNNYRFFSYGDAMFIY

SEQ ID NO: 64325 - protein, 358 aa, Brachyspira pilosicoli
  misc_feature (1)..(358): tr|A0A381ACN3|A0A381ACN3_BRAPL S-adenosylmethionine:tRN A ribosyltransferase-isomerase OS=Brachyspira pilosicol i OX=52584 GN=queA PE=3 SV=1
MIDYLNRETYNFYLPENLIATTPNYERDHCKLMTINKNTGEVEHKIFSDIINYLNKDDILVLNDSKVIPARIYAKKNTGGNAEILLLNKFNNSEDLWECLIKGKNIKENDILYLDYSHIENIGIIEASIIKDNISTKLIKFSKPLTSNILDTIGKIPLPPYIIQSRKKKGEEEYNDKDKEFYQNVYAKNEGSIASPTSGLHFTKELLEKIKSLGITICYVTLHVGFSTFNPIKEEDLKKHVMHEEKFSIPKETASIIINAKKDGRRIVSCGTTVARVLESEYNDFNFNRLEGSTNIFIYPPYKFKCVDALITNFHTPHSTLLAMVSSFAGYDNIMNAYKIAVENNYHFFSYGDATFLY

SEQ ID NO: 64326 - protein, 358 aa, Brachyspira pilosicoli
  misc_feature (1)..(358): tr|A0A3B6VQQ0|A0A3B6VQQ0_BRAPL S-adenosylmethionine:tRN A ribosyltransferase-isomerase OS=Brachyspira pilosicol i P43/6/78 OX=1042417 GN=queA PE=3 SV=1
MIDYLNRETYNFYLPENLIATTPNYERDHCKLMTINKNTGEVEHKIFSDIINYLNKDDILVLNDSKVIPARIYAKKNTGGNAEILLLNKFNNSEDLWECLIKGKNIKENDILYLDYSHIENIGIIEASIIKDNISTKLIKFSKPLTSNILDTIGKIPLPPYIIQSRKKKGEEEYNDKDKEFYQNVYAKNEGSIASPTSGLHFTKELLEKIKSLGITICYVTLHVGFSTFNPIKEEDLKKHVMHEEKFSIPKETANIIINAKKDGKRIVSCGTTVARVLESEYNDFNFNRLEGSTNIFIYPPYKFKCVDALITNFHTPHSTLLAMVSAFAGYDNIMNAYKIAVENNYHFFSYGDATFLY

SEQ ID NO: 64327 - protein, 347 aa, Brachyspira sp.
  misc_feature (1)..(347): tr|R5HKL4|R5HKL4_9SPIR S-adenosylmethionine:tRNA ribosy ltransferase-isomerase OS=Brachyspira sp. CAG:484 OX=12 62759 GN=queA PE=3 SV=1
MKLSDYDYNLPEELIAQLPAEKRENSRMLVLNRDKHSILHKHFYDIVDLIEPDSMLVLNNTKVLPARLYGMKETGAKIEIFLLKQLENDEWEVLIKPSKRVKNGTIVRISSELSVEVIKRLEDDGEWLVKLIYEGNILEVLHRNGNIPLPPYIERKMQNEDIKKLDFERYQTVYAKDEGSVAAPTAGLHFTEEILKKLKDKGVDIVYVTLNVGLGTFRPVKCENILEHKMHSETFEITQEAAGAINTAKANGKTIIAVGTTTVRTLETAYSKFGELKACHDHSELFIYPPYEFKVVDKLITNFHLPKSTLLMLVSALAGKDFIFEAYNEAIKNNYRFYSYGDCMFIN

SEQ ID NO: 64328 - protein, 358 aa, Brachyspira sp.
  misc_feature (1)..(358): tr|A0A2A4IQS4|A0A2A4IQS4_9SPIR S-adenosylmethionine:tRN A ribosyltransferase-isomerase OS=Brachyspira sp. G79 O X=1358104 GN=queA PE=3 SV=1
MIDYLNKETYNFYLPENLIATEPNYERDHCRLMTLNKNTGKLEHKIFADIINYLNKDDVLVLNDSKVIPARIYAKKSTGGNAEILLLNRANDDESTWECLIKGKNIKESDTLYLDYAHLDNVGNIEALIEKDNISTKLIKFSKPLTNDILDTIGKIPLPPYIIQSRKRKGEEEYNSNDKEFYQNVYAKNEGSIASPTSGLHFTNELLDKIKSIGVTVCYVTLHVGFSTFNPLKEDNLLNHVMHEEKFIIPKDSCNIIINAKKNGRRIVSCGTTVSRVLESEYDNYDFKRVEGSTNIFIYPPYKFKCVDALITNFHTPHSTLLAMVSAFAGYDNIMNAYKTAVDNNYRFFSYGDAMFMY

SEQ ID NO: 64329 - protein, 358 aa, Brachyspira suanatina
  misc_feature (1)..(358): tr|A0A0G4K594|A0A0G4K594_9SPIR S-adenosylmethionine:tRN A ribosyltransferase-isomerase OS=Brachyspira suanatina OX=381802 GN=queA PE=3 SV=1
MIDYLNKETYNFYLPENLIATTPNYERDHCKLMILNKFTGEIEHKIFSDIINYLNKDDILVLNDSKVIPARIYAKKNTGGNVEILLLNKFNNDETTWECLIKGKNIKEKDILYLNYSHLENVGDIEALIEKDNISTKIIKFSKPLTSEILDAIGKVPLPPYIIQSRKKKGEEEYNDKDKEFYQNVYAKNEGSIASPTSGLHFTKELLEKIKSMGITVCYVTLHVGFSTFNPLKEDDLRNHVMHEEKFIIPKESYDIIINAKKDGRRVVSCGTTVARVLESEYDNYYFKRMEGSTDIFIYPPYKFKCVDALITNFHTPHSTLLAMVSAFAGYDNIMNAYKTAVENNYRFFSYGDAMFMY

SEQ ID NO: 64330 - protein, 388 aa, Bradymonadaceae bacterium
  misc_feature (1)..(388): tr|A0A3D8MZ78|A0A3D8MZ78_9DELT S-adenosylmethionine:tRN A ribosyltransferase-isomerase OS=Bradymonadaceae bacte rium TMQ3 OX=2283320 GN=queA PE=3 SV=1
MSIDVKKLCAPPDIWNRPAGDVSLGDVEAYDYALPPELIAETPAAHREHARLLVYERDGEALTHTRFDTIVDHLRPGDLLIFNDTQVVPARMEAFKETGGRVELLALEVEQPAGEHRWSSPADGGLLHLRCMTRSSKPLREGTTLTVKSGDDAHPVELLEVSPGRALVAIAWPGSALAFLERFGRIPLPPYIEQRRRESQEAVAVDDRVRYQTVLASEPGAVAAPTAGLHFSRALLEELEQRGVERATLTLTVGPGTFKPVTTETLDDHPMHAEAYRIPEGLKAKVEACKARGGRVIAVGTTSARALEAEARREEPLLPGWRQTSIFLRPGDPLKMCDGLVTNFHLPRSTLLALVTAFVGYPAIRRIYNEAVAGAYRFYSYGDSSLLL

SEQ ID NO: 64331 - protein, 387 aa, Bradymonadales bacterium
  misc_feature (1)..(387): tr|A0A5C6XJD0|A0A5C6XJD0_9DELT S-adenosylmethionine:tRN A ribosyltransferase-isomerase OS=Bradymonadales bacter ium TMQ4 OX=2600176 GN=queA PE=3 SV=1
MSIDAKKERVTLDVWARHEDDVALDDVEAYDYALPPELIAETPAERREHSRLLVYERAGERLTHTRFDAIVDHLRPGDLLIFNDTRVVPARLEAFKETGGRVELLALEVEQPGGEHRWSEPAAGQLQMRCMTRSSKPLRTGMTLTVRAGDDAFPVELLEVAPGRALVAVDSSGSALAFLERFGRIPLPPYIEQRRRESEVDVAIDDSVRYQTVLASEPGAVAAPTAGLHFSEVLLEGLEARGVERATLTLTVGPGTFKPVTSDTLDEHPMHAEAYRIPEGLKAKVEGCKARGGRVIAVGTTSARALEAEARREEPLLPGWRQTDIFLRPGDSLRLCDGLITNFHLPRSTLLALVTAFVGYPAVRRIYNEAVAGGYRFYSYGDSSLLL

SEQ ID NO: 64332 - protein, 387 aa, Bradymonadales bacterium
  misc_feature (1)..(387): tr|A0A5B8YD86|A0A5B8YD86_9DELT S-adenosylmethionine:tRN A ribosyltransferase-isomerase OS=Bradymonadales bacter ium YN101 OX=2292766 GN=queA PE=3 SV=1
MSSNDTGTQKGAEADRDAQARDLDAVDAYDYELPEELIAAHPADRRGESRLLVARRDSAQIEHVQFSDLPDYLEPSDLLVFNNTRVIPARIMAKKETGGAVEMLVLDIIEPGGEDRWTEEAGGTVVFRCMTRSSRALRPGMELTADAGDAGPFVVREWEAGKAEVEVDWDGAPVDLLEEVGQMPLPPYILKRRKTLGEAEEATADDRKRYQTVYAAKPGAVAAPTAGLHFSEELLERLEERGIRRAFVTLQVGIGTFRPVSADRLSEHEMHSEEYEISAELARAIEETREAGGRIIAVGTTSMRALEAEARRDKPFEPGVRRTDIFLHPGVDFEVCDGLVTNFHLPRSTLLALVAGLAGYDFMRQIYAEAIEERYRFYSYGDGMLIL

SEQ ID NO: 64333 - protein, 410 aa, Bradymonas sediminis
  misc_feature (1)..(410): tr|A0A2Z4FR20|A0A2Z4FR20_9DELT S-adenosylmethionine:tRN A ribosyltransferase-isomerase OS=Bradymonas sediminis OX=1548548 GN=queA PE=3 SV=1
MSPKDQDLNAPKTHGDADYSARSAQESVDLDRVDAYDYELPEELIAAHPSARRSGSRLLVATRDGSSLAHRNFGDLLAYLKPGDLLVFNNTRVIPARVMTHKSSGGAVELLILDVVDPVDSELDTPSADADARSSERWTRPAGAGGKVAFRCMTRSSRRLRPGMELSADQAALPPFVVREYAAGHALVEVAWEDSAVALLEQAGQMPLPPYIVKRRKDMGEAETATAADQKRYQTVYAAKPGAVAAPTAGLHFSDALFEELDALGVQRAFVTLQVGAGTFKPISAERLSEHEMHSEEYEISAELAEAIARTRAAGGRVIAVGTTSARALEAEARRQTPFEPGLRRTDIFLFPGEPFKVCDALITNFHLPRSTLLALVAAFAGYDFMCEIYRSAVAEKYRFYSYGDSVFIR

SEQ ID NO: 64334 - protein, 387 aa, Bradymonas sp.; identical to SEQ ID NO: 64332
  misc_feature (1)..(387): tr|A0A4Y6Q1V1|A0A4Y6Q1V1_9DELT S-adenosylmethionine:tRN A ribosyltransferase-isomerase OS=Bradymonas sp. YN101 OX=2589075 GN=queA PE=3 SV=1

SEQ ID NO: 64335 - protein, 373 aa, Bradyrhizobiaceae bacterium
  misc_feature (1)..(373): tr|F7QMR9|F7QMR9_9BRAD S-adenosylmethionine:tRNA ribosy ltransferase-isomerase OS=Bradyrhizobiaceae bacterium S G-6C OX=709797 GN=queA PE=3 SV=1
MDGRAYVPAIDILSIMRTDLFDFELPEANIALRPVSPRDAARMLVVKPDQPLIDAIVSDLPRFLQPGDQLVVNDTKVIPAQLTGRRIGRETEPKIEATLIKRFDGSRWQALVKPAKKLAQGDVIRFGNEGRVCLLGNLDAQVEHKGENGEVTLSFSFHGPILDQAIADVGAPPLPPYIASRRTPDERDNADYQTMFAVSEGAVAAPTAGLHFTPGLEAALRARGVGLHRVTLHVGAGTFLPVKADDTAEHKMHAEWGTVSVETATALNEARAKGARIVAVGTTSLRLLESAAADDGTIKPFTAETAIFITPGYRFRAVDILMTNFHLPRSTLFMLVSAFSGLETMQQAYAHAIGSGYRFYSYGDASLLFRRST

SEQ ID NO: 64336 - protein, 357 aa, Bradyrhizobiaceae bacterium
  misc_feature (1)..(357): tr|A0A3S0FFI3|A0A3S0FFI3_9BRAD S-adenosylmethionine:tRN A ribosyltransferase-isomerase OS=Bradyrhizobiaceae bac terium OX=2072420 GN=queA PE=3 SV=1
MRTDLFDFDLPAERIALRPASPRDSARMLVVENGALRDQTIADLPQWLKAGDQLVVNDTKVIAAQLKGRRIGRETEPRIEATLIKRLDGSRWQALVKPAKKLTAGDRIRFGNEGKVCLLGHLDAEVEAKGTEGEVTLSFSFHGPALDQAIADLGSPPLPPYIASKRTPDDQDLADYQTMFAANEGAVAAPTAGLHFTPALEQALRVRGVGIVRVTLHVGAGTFLPVKVDDTEAHKMHAEWGTISAETAERLNNARKNGGRIIAVGTTSLRLLESAAREDGTIEPFAAETAIFITPGYRFRAVDILMTNFHLPKSTLFMLVSAFSGLETMKRAYAHAIASGYRFYSYGDACLLFRALP

SEQ ID NO: 64337 - protein, 357 aa, Bradyrhizobium arachidis
  misc_feature (1)..(357): tr|A0A1I7IT73|A0A1I7IT73_9BRAD S-adenosylmethionine:tRN A ribosyltransferase-isomerase OS=Bradyrhizobium arachi dis OX=858423 GN=queA PE=3 SV=1
MRTDLFDFDLPAERIALRPASPRDSAKMLVVEGGALRDQSIADLPQWLKAGDQLVVNDTKVIAAQLKGRRIGRETEPKIEATLIKRLDGSRWQALVKPAKKLVAGDRIRFGNEGKICLLGHLDAEVEAKGSEGEVTLSFSFHGPALDQAIADLGSPPLPPYIASKRTPDDQDLADYQTMFAANEGAVAAPTAGLHFTAALEQALHARGVGINRVTLHVGAGTFLPVKVDDTDGHKMHAEWGTISAETAERLNTARKNGGRIVAVGTTSLRLLESAASEDGTIQPFTAETSIFITPGYRFRAVDVLMTNFHLPKSTLFMLVSAFAGLETMKQAYAHAVANEYRFYSYGDACLLFRADG

SEQ ID NO: 64338 - protein, 355 aa, Bradyrhizobium betae
  misc_feature (1)..(355): tr|A0A4Q1V348|A0A4Q1V348_9BRAD S-adenosylmethionine:tRN A ribosyltransferase-isomerase OS=Bradyrhizobium betae OX=244734 GN=queA PE=3 SV=1
MRTDLFDFDLPPERIALRPASPRDSAKMLVVENGALRDEVISDLPQWLKPGDQLVVNDTKVIAAQLKGRRIGRETEPKIEATLIKRLDGSRWQALVKPAKKLTAGDRIRFGNEGKVCLLGHLDAEVEAKGAEGEVTLSFSFHGPALDQAIADLGSPPLPPYIASKRTPDDQDLADYQTMFAANEGAVAAPTAGLHFTPALEQALRARGVGINRITLHVGAGTFLPVKVDDTEGHKMHAEWGTISAETAERLNTARKNGGRIVAVGTTSLRLLESAAAEDGTVQPFAAETSIFITPGYRFRAVDIMMTNFHLPKSTLFMLVSAFAGLETMQRAYAHAIASGYRFYSYGDACLLFRA

SEQ ID NO: 64339 - protein, 358 aa, Bradyrhizobium canariense
  misc_feature (1)..(358): tr|A0A1H1Q2K0|A0A1H1Q2K0_9BRAD S-adenosylmethionine:tRN A ribosyltransferase-isomerase OS=Bradyrhizobium canari ense OX=255045 GN=queA PE=3 SV=1
MRTDLFDFELPPDSIALRPASPRDSARMLIVQPEAVLRDRSVADLPQWLEPGDQLVVNDTKVIAAQLAGRRIGRDTEPKIEATLIKRLDGSRWQALVKPAKKLAQGDVVRFGNEGRVCLLGHLDAEVEHKGDSGEITLSFSFHGPTLDQAIADLGSPPLPPYIASKRTPDERDAADYQTMFAAKEGAVAAPTAGLHFTPALEMALRDRGIGLHRITLHVGAGTFLPVKVEDTAGHKMHAEWGVITGDTAAALNEARAGGGRIVAVGTTSLRLLESATAEDGTIEPFADDTSIFITPGYRFRAVDILLTNFHLPRSTLFMLVSAFSGLDTMKRAYAHAIASGYRFYSYGDACLLFRAHE

SEQ ID NO: 64340 - protein, 357 aa, Bradyrhizobium canariense
  misc_feature (1)..(357): tr|A0A1X3G9X2|A0A1X3G9X2_9BRAD S-adenosylmethionine:tRN A ribosyltransferase-isomerase OS=Bradyrhizobium canari ense OX=255045 GN=queA PE=3 SV=1
MRTDLFDFDLPAERIALRPASPRDSAKMLVVDHGTLRDQVVADLPQWLKPGDQLVVNDTKVIAAQLKGRRIGRENEPKIEATLIKRLDGSRWQALVKPAKKLIAGDRIRFGNEGKVCLLGHLDAEVEAKGGEGEVTLSFSFHGPTLDQAIADLGSPPLPPYIASKRTPDDQDLADYQTMFAVNEGAVAAPTAGLHFTPALEQAMHARGVGINRVTLHVGAGTFLPVKVDDTEGHKMHAEWGTLSAETAERLNTARKNGGRIIAVGTTSLRLLESAASEDGTIEPFAAETSIFITPGYRFRAVDVLLTNFHLPKSTLFMLVSAFSGLEAMQQAYAHAIATGYRFYSYGDACLLFPARE

SEQ ID NO: 64341 - protein, 357 aa, Bradyrhizobium centrolobii
  misc_feature (1)..(357): tr|A0A176Y9G7|A0A176Y9G7_9BRAD S-adenosylmethionine:tRN A ribosyltransferase-isomerase OS=Bradyrhizobium centro lobii OX=1505087 GN=queA PE=3 SV=1
MRTDLFDFDLPPERIALRPASPRDSAKMLVVENGVLRDQFISDLPQWLKPGDQLVVNDTKVIAAQLRGRRIGRETEPKIDATLIKRLDGSRWQALVKPAKKLVAGDRIRFGNEGKVCLLGHLDAEVEAKGVEGEVTLSFSFHGPTLDQAISDLGSPPLPPYIASKRTPDDQDAADYQTMFAANEGAVAAPTAGLHFTPALEQALHDCGIGINRVTLHVGAGTFLPVKVEDTEGHRMHAEWGTISAETADALNAAQNAGGRIIAVGTTSLRLLESAADEDGTIEPFAADTSIFITPGYRFRAVDVLLTNFHLPRSTLFMLVSAFAGLETMKQAYAHAIAEGYRFYSYGDACLLFRAGE

SEQ ID NO: 64342 - protein, 365 aa, Bradyrhizobium daqingense
  misc_feature (1)..(365): tr|A0A562KWJ4|A0A562KWJ4_9BRAD S-adenosylmethionine:tRN A ribosyltransferase-isomerase OS=Bradyrhizobium daqing ense OX=993502 GN=queA PE=3 SV=1
MLCGAKPDMRTDLFDFDLPPERIALRPASPRDSAKMLVVENGVLRDQVISALPQWLRPGDQLVVNDTKVIAAQLKGRRIGRETEPRIEATLIKRLDGSRWKALVKPAKKLTAGDRIRFGNEGKVCLLGHLDAEVEAKGSEGEVTLSFSFHGPTLDQAIADLGSPPLPPYIASKRTPDDQDLADYQTMFAANEGAVAAPTAGLHFTPALERALQERGVGVNRVTLHVGAGTFLPVKVDDTEGHRMHAEWGTISAETTERLNTARKNGGRIVAIGTTSLRLLESAASEDGTIQPFAAETSIFITPGYRFRAVDILMTNFHLPKSTLFMLVSAFSGLETMKQAYAHAIANGYRFYSYGDACLLFRSEP

SEQ ID NO: 64343 - protein, 366 aa, Bradyrhizobium diazoefficiens
  misc_feature (1)..(366): sp|Q89L59|QUEA_BRADU S-adenosylmethionine:tRNA ribosylt ransferase-isomerase OS=Bradyrhizobium diazoefficiens ( strain JCM 10833 / IAM 13628 / NBRC 14792 / USDA 110) O X=224911 GN=queA PE=3 SV=1
MRTDLFDFDLPAERIALRPASPRDSAKMLVVEGGALRDRTISELPQWLKRGDQLVVNDTKVIAAQLKGRRIGRETEPKIEATLIKRLDGSRWQALVKPAKKLIAGDRIRFGNEGKVCLLGHLDAEVEAKGSEGEVTLSFSFHGPALDQAIADLGSPPLPPYIASKRTPDDQDFADYQTMFAANEGAVAAPTAGLHFTPALEQALRERGVGLNRVTLHVGAGTFLPVKVEDTAGHKMHAEWGTISAETAERLNIARHNGGRIIAVGTTSLRLLESAASEDGTIQPFAAETSIFITPGYRFRAVDILLTNFHLPKSTLFMLVSAFSGLETMRRAYAHAIAQGYRFYSYGDACLLFRAGGTEVHDPSPP

SEQ ID NO: 64344 - protein, 366 aa, Bradyrhizobium diazoefficiens; identical to SEQ ID NO: 64343
  misc_feature (1)..(366): tr|A0A2A6MRS1|A0A2A6MRS1_9BRAD S-adenosylmethionine:tRN A ribosyltransferase-isomerase OS=Bradyrhizobium diazoe fficiens OX=1355477 GN=queA PE=3 SV=1

SEQ ID NO: 64345 - protein, 358 aa, Bradyrhizobium elkanii
  misc_feature (1)..(358): tr|A0A4Q4K515|A0A4Q4K515_BRAEL S-adenosylmethionine:tRN A ribosyltransferase-isomerase OS=Bradyrhizobium elkani i OX=29448 GN=queA PE=3 SV=1
MRTDLFDFELPPESIALRPASPRDSARMLVVHPDGVLRDATIADLPHWLEAGDQIVVNDTKVIAAQLRGRRIGRDTEPKIEATLIKRLDGSRWQALVKPAKKLSPGDTIRFGNEGRVCLLGNLDAEVEAKGQEGEVTLSFSFHGPVLDQAIADVGATPLPPYIASKRTPDEKDVSDYQTMFATNEGAVAAPTAGLHFTPALEAALKSRGVELHRLTLHVGAGTFLPVKTEETSEHKMHAEWGCITAETASALNAARARGGRIVAIGTTSLRLLESAASADGTIEPFAAETSIFITPGYRFRAVDILLTNFHLPRSTLFMLVSAFSGLETMQRAYAHAIRDGYRFYSYGDACLLFRARG

SEQ ID NO: 64346 - protein, 358 aa, Bradyrhizobium elkanii
  misc_feature (1)..(358): tr|A0A0D1P0T8|A0A0D1P0T8_BRAEL S-adenosylmethionine:tRN A ribosyltransferase-isomerase OS=Bradyrhizobium elkani i OX=29448 GN=queA PE=3 SV=1
MRTDLFDFELPPDSIALRPASPRDSARLLVVHPDGVLRDATIADLPHWLEPGDQIVVNDTKVIAAQLKGRRIGRETEPKIEATLIKRLDGSRWQALVKPAKKLGPGDTIRFGNEGKVCLLGHLDATVEAKGQEGEVTLSFSFHGPALDQAIADVGATPLPPYIASKRTPDDQDVSDYQTMFAANEGAVAAPTAGLHFTPALEAALRARGVALHRLTLHVGAGTFLPVKTEETSEHRMHAEWGCISAETASALNAARANGGRIVAIGTTSMRLLESATTPDGEVQPFAAETSIFITPGYRFRAVDILLTNFHLPRSTLFMLVSAFSGLETMQGAYAHAIKSGYRFYSYGDACLLFRAKS

SEQ ID NO: 64347 - protein, 356 aa, Bradyrhizobium erythrophlei
  misc_feature (1)..(356): tr|A0A1N6KA56|A0A1N6KA56_9BRAD S-adenosylmethionine:tRN A ribosyltransferase-isomerase OS=Bradyrhizobium erythr ophlei OX=1437360 GN=queA PE=3 SV=1
MRTDIFDFELPPESIALRPASPRDSARMLVVQGDGVLRDRTVAELPQWLEPGDQLVVNDTKVISAQLKGRRIGRDTEPKIEATLIKRLDGSRWQALVKPAKKLVPGDVVRFGNEGKVCLLGHLDAEVEAKGEDGEITLSFSFHGPTLDQAIADLGAPPLPPYIASKRTPDDQDAADYQTMFAANEGAVAAPTAGLHFTPALEAALRGRGVELHRLTLHVGAGTFLPVKVEETSEHKMHAEWGCISLETAAALNAARAKGGRIVAVGTTSLRLLESATAEDGTIQPFGGETSIFITPGYRFRAVDILLTNFHLPRSTLFMLVSAFAGLETMKHAYAHAIARGYRFYSYGDATLLFRR

SEQ ID NO: 64348 - protein, 358 aa, Bradyrhizobium erythrophlei
  misc_feature (1)..(358): tr|A0A1M7UTI7|A0A1M7UTI7_9BRAD S-adenosylmethionine:tRN A ribosyltransferase-isomerase OS=Bradyrhizobium erythr ophlei OX=1437360 GN=queA PE=3 SV=1
MRTDLFDFELPAERIALRPAQPRDAARLLVVEASGSLHDRVVSDLPQWLKAGDQIVVNDTKVISAQLRGRRIGRETEPKIEATLIKRLDASRWQALVKPAKKLAAGDLVRFGNEGKVCLLGHLDAEVEEKGEEGEVTLSFSFHGPALDSAIADLGSPPLPPYIASKRTPDEQDAADYQTMFATNEGAVAAPTAGLHFTPALETALRERGVGIVRLTLHVGAGTFLPVKVDDTAEHKMHSEWGTISPEAAEALNAARAKGGRIVAVGTTSMRLLESAATEDGTVRPFADETAIFITPGYRFRAVDMLLTNFHLPRSTLFMLVSAFSGLKTMKRAYAHAIDNGYRFYSYGDACLLFRGDN

SEQ ID NO: 64349 - protein, 357 aa, Bradyrhizobium genosp.
  misc_feature (1)..(357): tr|A0A4Q7FLP0|A0A4Q7FLP0_9BRAD S-adenosylmethionine:tRN A ribosyltransferase-isomerase OS=Bradyrhizobium genosp . SA-3 OX=508868 GN=queA PE=3 SV=1
MRTDLFDFDLPPERIALRPASPRDSAKMLVVENGALRDQTISDLPQWLKPGDQVVVNDTKVIAAQLRGRRIGRETEPKIEATLIKRLDGSRWQALVKPAKKLTAGDRIRFGNEGKVCLLGHLDAEVEAKGSEGEVTLSFSFHGPALDQAITDLGSPPLPPYIASKRTPDDQDLADYQTMFAANEGAVAAPTAGLHFTPALEQALRDRGVGINRLTLHVGAGTFLPVKVDDTEGHKMHPEWGTISAETAEQLNAARKSGGRIIAVGTTSLRLLESAAAEDGSIQPFAAETSIFITPGYRFRAVDILLTNFHLPKSTLFMLVSAFSGLETMKQAYAHAIAAGYRFYSYGDACLLFRAGP

SEQ ID NO: 64350 - protein, 357 aa, Bradyrhizobium guangdongense
  misc_feature (1)..(357): tr|A0A410V7V4|A0A410V7V4_9BRAD S-adenosylmethionine:tRN A ribosyltransferase-isomerase OS=Bradyrhizobium guangd ongense OX=1325090 GN=queA PE=3 SV=1
MRTDLFDFDLPPERIALRPASPRDSAKMLVVEGGALRDQTVADLPQWLQPRDQLVVNDTKVIAAQLKGRRIGRETEPKIEATLIKRLDGSRWQALVKPAKKLVAGDRIRFGNEGKVCLLGHLDAEVEAKGGEGEVTLSFSFHGPALDQAIADLGSPPLPPYIASKRTPDDQDFADYQTMFAANEGAVAAPTAGLHFTPALEQALQARGVGIVRVTLHVGAGTFLPVKVEDTDGHKMHAEWGTISAETAEQLNTARKNGGRIVAVGTTSLRLLESAANEDGIIQPFAAETSIFITPGYRFRAVDVLMTNFHLPKSTLFMLVSAFAGLDTMKQAYAHAIANEYRFYSYGDACLLFRAGG

SEQ ID NO: 64351 - protein, 357 aa, Bradyrhizobium guangzhouense
  misc_feature (1)..(357): tr|A0A4V1KZT1|A0A4V1KZT1_9BRAD S-adenosylmethionine:tRN A ribosyltransferase-isomerase OS=Bradyrhizobium guangz houense OX=1325095 GN=queA PE=3 SV=1
MRTDLFDFDLPPERIALRPASPRDSAKMLVVQNGALRDQTIADLPQWLKPGDQLVVNDTKVIAAQLKGRRIGRETEPKIEATLIKRLDGSRWQALVKPAKKLVPGDRIRFGNEGKVCLLGHLDAEVEAKGMEGEVTLSFSFHGPALDQAIADLGSPPLPPYIASKRTPDDQDLADYQTMFAANEGAVAAPTAGLHFTPALEQRLRARGVGIVRVTLHVGAGTFLPVKVEDTDAHKMHAEWGTISAGMAEQLNTARKSGGRIVAVGTTSLRLLESAASEDGSIQPFAAETSIFITPGYRFRAVDILMTNFHLPKSTLFMLVSAFAGLGTMKQAYAHAIANEYRFYSYGDACLLFRAVP

SEQ ID NO: 64352 - protein, 355 aa, Bradyrhizobium huanghuaihaiense
  misc_feature (1)..(355): tr|A0A562RI75|A0A562RI75_9BRAD S-adenosylmethionine:tRN A ribosyltransferase-isomerase OS=Bradyrhizobium huangh uaihaiense OX=990078 GN=queA PE=3 SV=1
MRTDLFDFDLPAERIALRPASPRDSAKMLVVENGALRDQVIADLPQWLRRGDQLVVNDTKVIAAQLKGRRIGRETEPKIEATLIKRLDGSRWQALVKPAKKLTAGDRIRFGNEGKVCLLGHLDAEVEAKGVEGEVTLSFSFHGPALDQAIADLGNPPLPPYIASKRTPDDQDLADYQTMFAANEGAVAAPTAGLHFTPALEQALRAREVGINRVTLHVGAGTFLPVKVDDTEGHKMHAEWGTIPAEVAERLNSAKRNGGRIVAVGTTSLRLLESAASEDGTIQPFAAETSIFITPGYRFRAVDILMTNFHLPKSTLFMLVSAFSGLETMKQAYAHAIASGYRFYSYGDACLLFRS

SEQ ID NO: 64353 - protein, 365 aa, Bradyrhizobium icense
  misc_feature (1)..(365): tr|A0A533J621|A0A533J621_9BRAD S-adenosylmethionine:tRN A ribosyltransferase-isomerase OS=Bradyrhizobium icense OX=1274631 GN=queA PE=3 SV=1
MRTDLFDFDLPAERIALRPASPRDSAKMLVVQGDGVLRDRHVSELPQWLEPGDQIVVNDTKVISAQLRGRRIGRETEPKIEATLIKRLDGSRWQALVKPAKKLAPGDRIRFGNEGKVCLLGHLDAEVEAKGGEGEVTLSFSFHGPALDQAISDLGSPPLPPYIASKRTPDEQDAADYQTMFAANEGAVAAPTAGLHFTPALETALRQRGVGINRLTLHVGAGTFLPVKVDDTAEHRMHAEWGTVSAETARKLNEARTKGGRIVAVGTTSLRLLESAAHDDGTIQPFSGETSIFITPGYRFRAVDILLTNFHLPRSTLFMLVSAFSGLDAMKQAYAHAITSGYRFYSYGDACLLFRKREPHGIELT

SEQ ID NO: 64354 - protein, 358 aa, Bradyrhizobium icense
  misc_feature (1)..(358): tr|A0A1B1UH24|A0A1B1UH24_9BRAD S-adenosylmethionine:tRN A ribosyltransferase-isomerase OS=Bradyrhizobium icense OX=1274631 GN=queA PE=3 SV=1
MRTDLFDFELPATRIALRPASPRDAARMLVVQPDGVLRDRTVAELPQWLEPGDQLVVNDTKVISAQLKGRRIGRETEPKIEATLIKRLDGSRWRALVRPAKKLAPGDIVRFGNEGKVCLLGHLDAEVEAKGDEGEITLSFSFHGPALDQAIADLGTPPLPPYIASKRTPDDRDAADYQTMFAANEGAVAAPTAGLHFTPELETALRRHGVELHRITLHVGAGTFLPVKVEETSAHNMHAEWGSISADTAAALNAARANGGRIVAVGTTSLRLLESATAEDGTVQPFDGETSIFITPGYRFRAVDILMTNFHLPRSTLFMLVSAFSGLDTMKRAYAHAIAAGYRFYSYGDACLLFRAPD

SEQ ID NO: 64355 - protein, 357 aa, Bradyrhizobium japonicum
  misc_feature (1)..(357): tr|A0A4Y3YS50|A0A4Y3YS50_BRAJP S-adenosylmethionine:tRN A ribosyltransferase-isomerase OS=Bradyrhizobium japoni cum OX=375 GN=queA PE=3 SV=1
MRTDLFDFELPPERIALRPASPRDSAKMLVVEGGALRDQLISELPQWLKPGDQLVVNDTKVIAAQLKGRRIGRETEPKIEATLIKRLDGSRWQALVKPAKKLTAGDRIRFGNEGKVCLLGHLDAEVEAKGTDGEVTLSFSFHGPALDQAIEDLGSPPLPPYIASKRTPDDQDLADYQTMFAANEGAVAAPTAGLHFTPALEQALRDRGVGINHITLHVGAGTFLPVKVDDTEGHKMHAEWGTISAETAERLNTARQNGGRIIAVGTTSLRLLESAASEDGTIQPFAAETSIFITPGYRFRAVDILLTNFHLPKSTLFMLVSAFSGLEAMQQAYAHAIAKGYRFYSYGDACLLFRAEP

SEQ ID NO: 64356 - protein, 357 aa, Bradyrhizobium japonicum
  misc_feature (1)..(357): tr|A0A1L3FEU5|A0A1L3FEU5_BRAJP S-adenosylmethionine:tRN A ribosyltransferase-isomerase OS=Bradyrhizobium japoni cum OX=375 GN=queA PE=3 SV=1
MRTDLFDFDLPAERIALRPASPRDSAKMLVVEGGALRDQLISELPQWLKAGDQLVVNDTKVIAAQLKGRRIGRETEPKIEATLIKRLDGSRWQALVKPAKKLVAGDRIRFGNEGKVCLLGHLDAEVEAKGTDGEVTLSFSFHGPALDQAIEDLGSPPLPPYIASKRTPDDQDLADYQTMFAANEGAVAAPTAGLHFTPALEQALRDRGVGINRVTLHVGAGTFLPVKVDDTEGHKMHAEWGTISAETAERLNTARQNGGRIIAVGTTSLRLLESAAGEDGTIQPFAAETSIFITPGYRFRAVDILLTNFHLPKSTLFMLVSAFSGLEAMQKAYAHAIAEGYRFYSYGDACLLFRARD

SEQ ID NO: 64357 - protein, 358 aa, Bradyrhizobium jicamae
  misc_feature (1)..(358): tr|A0A0R3KJH1|A0A0R3KJH1_9BRAD S-adenosylmethionine:tRN A ribosyltransferase-isomerase OS=Bradyrhizobium jicama e OX=280332 GN=queA PE=3 SV=1
MRTDLFDFELPPTSIALRPASPRDAARMLVVQQGGVLHDRTVAELPQWLKAGDQLVVNDTKVISAQLKGRRIGRETEPKIEATLIKRLDGSRWQALVKPAKKLAPGDTVRFGNEGKVCLLGHLDAEVEAKGEEGEITLSFSFHGPTLDQAIADLGTPPLPPYIASKRTPDDRDAADYQTMFAANEGAVAAPTAGLHFTPALEAALRGGGVELHRLTLHVGAGTFLPVKVEETSEHKMHAEWGSISAATAASLNAARARGGRIIAVGTTSLRLLESATREDGIVQPFDGETSIFITPGYRFRAVDILMTNFHLPRSTLFMLVSAFSGLDTMKQAYAHAIAAGYRFYSYGDACLLFRATD

SEQ ID NO: 64358 - protein, 358 aa, Bradyrhizobium lablabi
  misc_feature (1)..(358): tr|A0A2H9VCF0|A0A2H9VCF0_9BRAD S-adenosylmethionine:tRN A ribosyltransferase-isomerase OS=Bradyrhizobium lablab i OX=722472 GN=queA PE=3 SV=1
MRTDLFDFELPPENIALRPASPRDSARMLVVQGDGVLCDRVVTDLPQWLEPGDQLVVNDTQVIAAQLKGRRIGRDTEPKIEATLIKRLDGSRWQALVKPAKKLAAGDVVRFGNEGKVCLLGHLDAEVEAKGMEGEVTLSFSFHGPALDQAISDLGSPPLPPYIASRRAPDDQDAADYQTMFAANEGAVAAPTAGLHFTPALEAALRNHGVGLHRLTLHVGAGTFLPVKVDDTANHRMHAEWGFVSAETAGALNEARANGGRIVAVGTTSLRLLESAAAEDGTIQPFTGETSIFITPGYRFRAVDILLTNFHLPRSTLFMLVSAFAGLETMKRAYAHAIKTGYRFYSYGDACLLFRARD

SEQ ID NO: 64359 - protein, 358 aa, Bradyrhizobium lablabi
  misc_feature (1)..(358): tr|A0A0R3MMZ3|A0A0R3MMZ3_9BRAD S-adenosylmethionine:tRN A ribosyltransferase-isomerase OS=Bradyrhizobium lablab i OX=722472 GN=queA PE=3 SV=1
MRTDLFDFELPPTSIALRPASPRDAARMLVVQSDGIMHDRTVAELPQWLQPGDQLVVNDTKVISAQLKGRRIGRETEPKIEATLIKRLDGSRWRALVKPAKKLAPGDIVRFGNEGKVCLLGHLDAEVEAKGEEGEITLSFSFHGPTLDQAIADLGTPPLPPYIASKRTPDDRDAADYQTMFAANEGAVAAPTAGLHFTPELEAALRGRGVELHRLTLHVGAGTFLPVKVEETSEHRMHAEWGSISADTAAALNAARAKGGRIIAVGTTSLRLLESAAREDGTVQAFDGETSIFITPGYRFRAVDILMTNFHLPRSTLFMLVSAFSGLDTMKRAYAHAIAAGYRFYSYGDACLLFRARD

SEQ ID NO: 64360 - protein, 357 aa, Bradyrhizobium liaoningense
  misc_feature (1)..(357): tr|A0A151FJH6|A0A151FJH6_9BRAD S-adenosylmethionine:tRN A ribosyltransferase-isomerase OS=Bradyrhizobium liaoni ngense OX=43992 GN=queA PE=3 SV=1
MRTDLFDFDLPPERIALRPASPRDSAKMLVVKKGALRDQVISDLPQWLAPGDQLVVNDTKVIAAQLKGRRIGRETEPRIEATLIKRLDGSRWQALVKPAKKLMAGDRIRFGNEGKVCLLGHLDAEVEAKGGEGEVTLSFSFHGPALDQAIADLGSPPLPPYIASKRTPDDQDLADYQTMFAANEGAVAAPTAGLHFTPALEQALRARGVGIERVTLHVGAGTFLPVKVDDTEGHKMHAEWGTISTETAQRLNTARKNGGRIVAVGTTSLRLLESAAGEDGTIQPFAAETAIFITPGYRFRAVDVLVTNFHLPKSTLFMLVSAFSGLETMKQAYAHAIANGYRFYSYGDACLLFRAER

SEQ ID NO: 64361 - protein, 360 aa, Bradyrhizobium lupini
  misc_feature (1)..(360): tr|K5D1G0|K5D1G0_RHILU S-adenosylmethionine:tRNA ribosy ltransferase-isomerase OS=Bradyrhizobium lupini HPC(L) OX=1229491 GN=queA PE=3 SV=1
MRVDLFDFDLPEENIALRPANPRDSARLLVVDPNENRMEDHRVFDLPSFLRAGDALVFNDTRVIPAQLEGVRLREGAPETAVSATLHMRADQSRWKAFARPGKRIKQGDRIRFGYERDNACGLAHLEATVEQKGEEGEITLLFDVSGPVLDEAIASVGHIPLPPYIAAKRPEDAQDRTDYQTIYAREKGAVAAPTAGLHFTPDLFAALDKAGIERHFVTLHVGAGTFLPVKADDTDDHKMHFEIGHVSQETADRLNAVKARGGRIVCVGTTSLRLIESAAAEDGIIHPWSDATGIFITPGYRFRAVDMLMTNFHLPKSTLFMLVSAFCGLETMRDAYKHAIETGYRFYSYGDSSLLFRKN

SEQ ID NO: 64362 - protein, 363 aa, Bradyrhizobium macuxiense
  misc_feature (1)..(363): tr|A0A125Q9I0|A0A125Q9I0_9BRAD S-adenosylmethionine:tRN A ribosyltransferase-isomerase OS=Bradyrhizobium macuxi ense OX=1755647 GN=queA PE=3 SV=1
MRTDLFDFELPPERIALRPASPRDSARMLVVYPDGVLRDAGIADLPNWLEAGDQIVVNDTKVIAAQLKGRRIGRETEPKIEATLIKRLDGSRWQALVKPAKKLAVGDIVRFGNEGKVCLLGHLDAEVEAKGQEGEVTLSFSFHGPTLDQAISDVGATPLPPYIASKRTPDDQDSADYQTMFATNEGAVAAPTAGLHFTPALEAALRARGVGLHRLTLHVGAGTFLPVKAEETSEHKMHAEWGRISAETASALNAARADGGRIVAIGTTSLRLLESATTADGTVHPFAAETSIFITPGYRFRAVDILLTNFHLPRSTLFMLVSAFSGLAAMKSAYAHAIKHGYRFYSYGDACLLFRAHEPHADL

SEQ ID NO: 64363 - protein, 358 aa, Bradyrhizobium macuxiense
  misc_feature (1)..(358): tr|A0A560MHK3|A0A560MHK3_9BRAD S-adenosylmethionine:tRN A ribosyltransferase-isomerase OS=Bradyrhizobium macuxi ense OX=1755647 GN=queA PE=3 SV=1
MRTDLFDFELPPESIALRPANPRDSARMLVVHPDGVLRDASVADLPHWLEAGDQIVVNDTKVIAAQLKGRRIGRETEPKIEATLIKRLDGSRWQALVKPAKKLSPGDTIRFGNEGKVCLLGNLDAEVEAKGQEGEVTLSFSFHGPVLDQAIADVGATPLPPYIASKRTPDDRDVSDYQTMFAANEGAVAAPTAGLHFTPALEATLKGRGVALHRLTLHVGAGTFLPVKTEETSEHKMHAEWGCITAETAAALNAARARGRRIVAIGTTSLRLLESATTPDGEVQPFAAETSIFITPGYRFRAVDILLTNFHLPRSTLFMLVSAFSGLETMQGAYAHAVSNGYRFYSYGDACLLFRAKS

SEQ ID NO: 64364 - protein, 357 aa, Bradyrhizobium manausense
  misc_feature (1)..(357): tr|A0A0R3D168|A0A0R3D168_9BRAD S-adenosylmethionine:tRN A ribosyltransferase-isomerase OS=Bradyrhizobium manaus ense OX=989370 GN=queA PE=3 SV=1
MRTDLFDFDLPPERIALRPASPRDSAKMLVVENGALRDQTIADLPHWLKPGDQLVVNDTKVIAAQLKGRRIGRETEPKIEATLIKRLDGSRWQALVKPAKKLTPGDRIRFGNEGKVCLLGHLDAEVEAKGMEGEVTLGFSFHGPALDQAIADLGSPPLPPYIASKRTPDDQDLADYQTMFATNEGAVAAPTAGLHFTPALEQALRERGVGIVRVTLHVGAGTFLPVKVDDTDAHKMHAEWGTISAEIAERLNSARKNGGRIIAVGTTSLRLLESATTEDGTIQPFAAETSIFITPGYRFRAVDILMTNFHLPKSTLFMLVSAFAGLGTMKQAYAHAIANGYRFYSYGDACLLFRAVP

SEQ ID NO: 64365 - protein, 364 aa, Bradyrhizobium nanningense
  misc_feature (1)..(364): tr|A0A4Q0S3R7|A0A4Q0S3R7_9BRAD S-adenosylmethionine:tRN A ribosyltransferase-isomerase OS=Bradyrhizobium nannin gense OX=1325118 GN=queA PE=3 SV=1
MRTDLFDFDLPAERIALRPASPRDSAKMLVVENGALRDQTIADLPSWLKAGDQLVVNDTKVIAAQLKGRRIGRETEPRIEATLIKRLDGSRWQALVKPAKKLVAGDRIRFGNEGKVCLLGHLDAEVEAKGSEGEVTLSFSFHGPALDQAIADLGSPPLPPYIASKRTPDDQDLTDYQTMFAVNEGAVAAPTAGLHFTPVLEHALLARGVGINQVTLHVGAGTFLPVKVDDTEGHKMHAEWGTIPAETAERLNSARKNGGRIIAVGTTSLRLLESAAREDGTIQPFAAETAIFITPGYRFRAVDVLMTNFHLPKSTLFMLVSAFSGLETMKAAYAHAIANGYRFYSYGDACLLFRATSAAPSPSP

SEQ ID NO: 64366 - protein, 357 aa, Bradyrhizobium neotropicale
  misc_feature (1)..(357): tr|A0A176YZC7|A0A176YZC7_9BRAD S-adenosylmethionine:tRN A ribosyltransferase-isomerase OS=Bradyrhizobium neotro picale OX=1497615 GN=queA PE=3 SV=1
MRTDLFDFDLPAERIALRPAQPRDSAKMLVVENGALRDQIISDLPQWLRAGDQLVVNDTKVIAAQLKGRRIGRETEPKIEATLIKRLDGSRWQALVKPAKKLVAGDRIRFGNEGKVCLLGHLDAEVEAKGVEGEVTLSFSFHGPTLDQAIADLGSPPLPPYIASKRMPDDQDLADYQTMFAVNEGAVAAPTAGLHFTPALEQALRDRGVGINRVTLHVGAGTFLPVKVDDTEGHRMHAEWGTISAETADVLNTTRNSGGRIVAVGTTSLRLLESAAAEDGTIEPFAAETAIFITPGYRFRAVDILLTNFHLPRSTLFMLVSAFAGLETMKEAYAHAIGSGYRFYSYGDACLLFRAGA

SEQ ID NO: 64367 - protein, 364 aa, Bradyrhizobium oligotrophicum
  misc_feature (1)..(364): tr|M4Z9A3|M4Z9A3_9BRAD S-adenosylmethionine:tRNA ribosy ltransferase-isomerase OS=Bradyrhizobium oligotrophicum S58 OX=1245469 GN=queA PE=3 SV=1
MRTHLFDFHLPPENIALRPASPREAARMLVVQGDGVLRDRTVADLPDWLEPGDQLVVNDTRVIAAQLSGRRISRDTEAKIEATLIKRLDGSRWQALVRPAKKLAPGDTIRFGNEGKVCLLGHLDATVEAKGEEGEVTLSFVFHGPSLDQAIADLGRPPLPPYIAGKRPADEQDTQDYQTMFAAKEGAVAAPTAGLHFTPALEQRLRERGIGLQRVTLHVGAGTFLPVKVEDTEGHRMHAEWGSLTPETATALNEARARGGRIVAVGTTSLRLLESAALPDGTIAPFEQETSIFITPGYRFRAVDILMTNFHLPRSTLFMLVSAFAGLETMQAAYAHAIRSGYRFYSYGDACLLFRQQDERIVEP

SEQ ID NO: 64368 - protein, 357 aa, Bradyrhizobium ottawaense
  misc_feature (1)..(357): tr|A0A2U8PES4|A0A2U8PES4_9BRAD S-adenosylmethionine:tRN A ribosyltransferase-isomerase OS=Bradyrhizobium ottawa ense OX=931866 GN=queA PE=3 SV=1
MRTDLFDFDLPAERIALRPASPRDSAKMLVVESGALRDQTIADLAQWLKPGDQLVVNDTKVIAAQLKGRRIGRETEPKIEATLIKRLDGSRWQALVKPAKKLTAGDRIRFGNEGKVCLLGHLDAEVEAKGLEGEVTLSFSFHGPALDQAIAELGSPPLPPYIASKRTPDDQDLADYQTMFAVNEGAVAAPTAGLHFTPALEQALRARGVDINQVTLHVGAGTFLPVKVEDTEGHKMHAEWGTISAETAERLNSARKNGGRIIAVGTTSLRLLESAASEDGTIQPFAAETSIFITPGYRFRAVDILMTNFHLPKSTLFMLVSAFSGLETMKAAYAHAIASGYRFYSYGDACLLFRSRG

SEQ ID NO: 64369 - protein, 358 aa, Bradyrhizobium pachyrhizi
  misc_feature (1)..(358): tr|A0A0R3CEI5|A0A0R3CEI5_9BRAD S-adenosylmethionine:tRN A ribosyltransferase-isomerase OS=Bradyrhizobium pachyr hizi OX=280333 GN=queA PE=3 SV=1
MRTDLFDFELPPESIALRPASPRDAARMLVVHPDGVLRDAAIADLPQWLEPGDQIVVNDTKVIAAQLKGRRIGRDTEPKIEATLIKRLDGSRWQALVKPAKKLSPGDTIRFGNEGRVCLLGNLDAEVEAKGQEGEVTLSFSFHGPMLDQAIADVGATPLPPYIASKRTPDEKDVSDYQTMFAANEGAVAAPTAGLHFTPALEAALKSRGVELHRLTLHVGAGTFLPVKTEETSEHKMHAEWGCITAETASALNAARAKGGRIVAIGTTSLRLLESAASADGTIEPFAAETSIFITPGYRFRAVDILLTNFHLPRSTLFMLVSAFSGLETMQGAYAHAIRDGYRFYSYGDACLLFRARG

SEQ ID NO: 64370 - protein, 358 aa, Bradyrhizobium retamae
  misc_feature (1)..(358): tr|A0A0R3MQV5|A0A0R3MQV5_9BRAD S-adenosylmethionine:tRN A ribosyltransferase-isomerase OS=Bradyrhizobium retama e OX=1300035 GN=queA PE=3 SV=1
MRTDLFDFELPATSVALRPASPRDAARMLVVQPDGVLRDRTVAELPQWLEPGDQLVVNDTKVISAQLKGRRIGRETEPKIEATLIKRLDGSRWRALVKPAKKLAPGDIVRFGNEGKVCLLGHLDAEVEARGAEGEVTLSFSFHGPALDQAIADLGTPPLPPYIASKRAPDDRDAADYQTMFAANEGAVAAPTAGLHFTPELETALRRHGVELHRITLHVGAGTFLPVKVEETSEHRMHAEWGSISVDTAAALNAARAQGGRIIAVGTTSLRLLESATREDGTVQPFDGETSIFITPGFRFRAVDILMTNFHLPRSTLFMLVSAFSGLDTMKRAYAHAIAAGYRFYSYGDACLLFRAPD

SEQ ID NO: 64371 - protein, 358 aa, Bradyrhizobium rifense
  misc_feature (1)..(358): tr|A0A5D3K7V7|A0A5D3K7V7_9BRAD S-adenosylmethionine:tRN A ribosyltransferase-isomerase OS=Bradyrhizobium rifens e OX=515499 GN=queA PE=3 SV=1
MRTDLFDFNLPPERIALRPAHPRDSARMLVVANGALRDQIIADLPHWLKDGDQLVVNDTKVISAQLKGRRIGRETEPKIEATLIKRLDGSRWQALVKPAKKLVAGDRIRFGNEGKVCLLGHLEAEVEAKGGEGEVTLSFSFHGPALDQAIADLGSPPLPPYIASKRTPDDQDLADYQTMFAANEGAVAAPTAGLHFTPALEQALGARGVGINRVTLHVGAGTFLPVKVDDTDGHKMHAEWGTISAETAERLNAARKNGGRIIAVGTTSLRLLESAASEDGIIQPFTAETSIFITPGYRFRAVDILMTNFHLPKSTLFMLVSAFAGLDTMKQAYAHAIASGYRFYSYGDACLLFRAPAP

SEQ ID NO: 64372 - protein, 357 aa, Bradyrhizobium sacchari
  misc_feature (1)..(357): tr|A0A560KKG1|A0A560KKG1_9BRAD S-adenosylmethionine:tRN A ribosyltransferase-isomerase OS=Bradyrhizobium saccha ri OX=1399419 GN=queA PE=3 SV=1
MRTDLFDFDLPAERIALRPASPRDSAKMLVVENGALRDQIIADLPQWLRPGDQLVVNDTKVIAAQLKGRRIGRETEPKIEATLIKRLDGSRWQALVKPAKKLVAGDRIRFGNEGKVCLLGHLDAEVEAKGVEGEVTLSFSFHGPALDQAIADLGSPPLPPYIASKRAPDDQDLADYQTMFAANEGAVAAPTAGLHFTPALEQALRARGVGIVSVTLHVGAGTFLPVKVDDTDGHKMHAEWGTIPADVAAKLNTARKNGGRIVAVGTTSLRLLESATSEHGIVQPFAAETSIFITPGYRFRAVDILMTNFHLPKSTLFMLVSAFSGLDTMKQAYAHAIANGYRFYSYGDACLLFRTGP

SEQ ID NO: 64373 - protein, 357 aa, Bradyrhizobium shewense
  misc_feature (1)..(357): tr|A0A1C3XFP9|A0A1C3XFP9_9BRAD S-adenosylmethionine:tRN A ribosyltransferase-isomerase OS=Bradyrhizobium shewen se OX=1761772 GN=queA PE=3 SV=1
MRTDLFDFDLPAERIALRPASPRDSAKMLVVENGALRDQTIADLAQWLKPGDQLVVNDTKVIAAQLKGRRIGRETEPKIEATLIKRLDGSRWQALVKPAKKLTAGDRIRFGNEGKVCLLGHLDAEVEAKGLEGEVTLSFSFHGPTLDQAIADLGSPPLPPYIASKRTPDDQDLADYQTMFAVNEGAVAAPTAGLHFTPALEQALRARGVGINQVTLHVGAGTFLPVKVDDTEGHKMHAEWGTISAETAERLNSARKNGGRIIAVGTTSLRLLESAASEDGTIQPFAAETSIFITPGYRFRAVDILMTNFHLPKSTLFMLVSAFSGLETMKAAYAHAIASGYRFYSYGDACLLFRSRG

SEQ ID NO: 64374 - protein, 364 aa, Bradyrhizobium sp.
  misc_feature (1)..(364): sp|A4YV19|QUEA_BRASO S-adenosylmethionine:tRNA ribosylt ransferase-isomerase OS=Bradyrhizobium sp. (strain ORS 278) OX=114615 GN=queA PE=3 SV=1
MRTDLFDFHLPPENIALRPASPREAARMLVVQGDGVLRDRTIGDLPDWLEPGDQLVVNDTKVIAAQLSGRRISRETEAKIEATLIKRLDGSRWQALVRPAKKLLAGDTIRFGNEGKVCLLGHLDATVEAKGEEGEVTLSFVFHGPALDQAIADLGRPPLPPYIAGKRPADEQDAQDYQTMFAAKEGAVAAPTAGLHFTPALEQRLRARGVGLQRVTLHVGAGTFLPVKVEDTEGHRMHAEWGSLTPETAAALNQAKAEGGRIVAVGTTSMRLLESAALPDGTIAPFEAETSIFITPGYRFRAVDILMTNFHLPRSTLFMLVSAFAGLETMQAAYAHAIESGYRFYSYGDACLLFRQPDERVVEP

SEQ ID NO: 64375 - protein, 358 aa, Bradyrhizobium sp.
  misc_feature (1)..(358): tr|A0A1B9YQL4|A0A1B9YQL4_9BRAD S-adenosylmethionine:tRN A ribosyltransferase-isomerase OS=Bradyrhizobium sp. LM TR 3 OX=189873 GN=queA PE=3 SV=1
MRTDLFDFELPATSVALRPASPRDAARMLVVQPDGVLRDRTVAELTQWLEPGDQLVVNDTKVISAQLKGRRIGRETEPKIEATLIKRLDGSRWQALAKPAKKLAPGDIVRFGNEGKVCLLGHLDAEVEAKGEEGEVTLSFSFHGPALDQAIADLGTPPLPPYIASKRTPDDRDAADYQTMFAANEGAVAAPTAGLHFTPELETALRRHGVELHRITLHVGAGTFLPVKVDETSEHRMHAEWGSISADTAAALNAARAQGGRIIAVGTTSLRLLESATHEDGTVQPFDGETSIFITPGYRFRAVDILMTNFHLPRSTLFMLVSAFSGLDTMKRAYAHAIAAGYRFYSYGDACLLFRAPD

SEQ ID NO: 64376 - protein, 357 aa, Bradyrhizobium stylosanthis
  misc_feature (1)..(357): tr|A0A560DIP3|A0A560DIP3_9BRAD S-adenosylmethionine:tRN A ribosyltransferase-isomerase OS=Bradyrhizobium stylos anthis OX=1803665 GN=queA PE=3 SV=1
MRTDLFDFDLPAERIALRPAHPRDSARMLVVENGALRDQTIADLAQWLKPGDQLVVNDTKVIAAQLKGRRIGRETEPKIEATLIKRLDGSRWQALVKPAKKLVAGDRIRFGNEGKVCLLGHLDAEVEAKGSEGEVTLSFSFHGPALDQAIADLGSPPLPPYIASKRTPDDQDLADYQTMFAANEGAVAAPTAGLHFTPALEQALHARGVGINRITLHVGAGTFLPVKVDDTEGHKMHAEWGTISAETAETLNTARKNGGRIIAVGTTSLRLLESAASEDGTIQPFAAETAIFITPGYRFRAVDILMTNFHLPKSTLFMLVSAFSGLETMQAAYAHAIASGYRFYSYGDACLLFRARD

SEQ ID NO: 64377 - protein, 358 aa, Bradyrhizobium valentinum
  misc_feature (1)..(358): tr|A0A0R3L5T2|A0A0R3L5T2_9BRAD S-adenosylmethionine:tRN A ribosyltransferase-isomerase OS=Bradyrhizobium valent inum OX=1518501 GN=queA PE=3 SV=1
MRTDLFDFELPATSIALRPASPRDAARMLVVQPDGVLRDRSIAELPQWLEPGDQLVVNDTKVISAQLKGRRIGRETEPKIEATLIKRLDGSRWRALVKPAKKLAPGDVVRFGNEGKVCLLGHLDAEVEAKGEEGEITLSFSFHGPALDQAIADLGTPPLPPYIASKRTPDDRDAADYQTMFAAKEGAVAAPTAGLHFTPDLEAALRGRGIELHRLTLHVGAGTFLPVKVGETSEHKMHAEWGAISAGTADALNAARANGGRIVAVGTTSLRLLESATTEDGTIQPFDGETSIFITPGYRFRAVDILMTNFHLPRSTLFMLVSAFSGLETMKRAYAHAIASGYRFYSYGDACLLFRARD

SEQ ID NO: 64378 - protein, 357 aa, Bradyrhizobium vignae
  misc_feature (1)..(357): tr|A0A4Q0R1D3|A0A4Q0R1D3_9BRAD S-adenosylmethionine:tRN A ribosyltransferase-isomerase OS=Bradyrhizobium vignae OX=1549949 GN=queA PE=3 SV=1
MRTDLFDFDLPAERIALRPASPRDSAKMLVVENGALRDQTISDLPQWLKPGDQLVVNDTKVIAAQLKGRRIGRETEPKIEATLIKRVDGSRWQALVKPAKKLVAGDRIRFGNEGKVCLLGHLDADVEAKGAEGEVTLSFSFHGPALDQAIADLGSPPLPPYIASKRTPDDQDFADYQTMFAANEGAVAAPTAGLHFTPALEQALRARDIGINRVTLHVGAGTFLPVKAEDTEGHKMHAEWGTISAEVAERLNSARKNGRRIVAVGTTSLRLLESAASEDGMIQPFAAETSIFITPGYHFRAVDVLMTNFHLPKSTLFMLVSAFSGLETMKQAYAHAIANGYRFYSYGDACLLFPSVP

SEQ ID NO: 64379 - protein, 357 aa, Bradyrhizobium yuanmingense
  misc_feature (1)..(357): tr|A0A0R3C538|A0A0R3C538_9BRAD S-adenosylmethionine:tRN A ribosyltransferase-isomerase OS=Bradyrhizobium yuanmi ngense OX=108015 GN=queA PE=3 SV=1
MRTDLFDFDLPPERIALRPASPRDSARMLVVENGALRDQIISDLPQWLRPGDQLVVNDTKVIAAQLKGRRIGRDTEPKIEATLIKRLDGSRWQALVKPAKKLAPGDRIRFGNDGKVCLLGHLDAEVEAKGTEGEVTLAFSFHGPALDQAIADLGSPPLPPYIASKRTPDDQDLADYQTMFAANEGAVAAPTAGLHFTPALEQALRDRGVGLNRVTLHVGAGTFLPVKVDDTEAHKMHAEWGTISAATAQRLNAARETGGRIVAVGTTSLRLLESAASEDGTIQPFAAETSIFITPGYRFRAIDILMTNFHLPKSTLFMLVSAFSGLETMKQAYAHAIASGYRFYSYGDACLLFRAER

SEQ ID NO: 64380 - protein, 357 aa, Bradyrhizobium yuanmingense
  misc_feature (1)..(357): tr|A0A1C3W5N1|A0A1C3W5N1_9BRAD S-adenosylmethionine:tRN A ribosyltransferase-isomerase OS=Bradyrhizobium yuanmi ngense OX=108015 GN=queA PE=3 SV=1
MRTDLFDFDLPPERIALRPASPRDSARMLVVENGALRDQIISDLPQWLRPGDQLVVNDTKVIAAQLKGRRIGRETEPKIEATLIKRLDGSRWQALVKPAKKLAPGDRIRFGNDGKVCLLGYLDAEVEAKGTEGEVTLAFSFHGPALDQAIADLGSPPLPPYIASKRTPDDQDLADYQTMFAANEGAVAAPTAGLHFTPALEQALRDRGVGLNRVTLHVGAGTFLPVKVDDTEAHKMHAEWGTISAATAERLNAARKTGGRIVAVGTTSLRLLESAAREDGTIQPFAAETSIFITPGYRFRAVDILMTNFHLPKSTLFMLVSAFSGLATMKQAYAHAIASGYRFYSYGDACLLFRAVP

SEQ ID NO: 64381 - protein, 357 aa, Bradyrhizobium zhanjiangense
  misc_feature (1)..(357): tr|A0A4Q0SAI8|A0A4Q0SAI8_9BRAD S-adenosylmethionine:tRN A ribosyltransferase-isomerase OS=Bradyrhizobium zhanji angense OX=1325107 GN=queA PE=3 SV=1
MRTDLFDFDLPPERIALRPASPRDSAKMLVVESGALRDQTISDLPQWLKPGDQLVVNDTKVIAAQLRGRRIGRETEPRIEATLIKRLDGSRWQALVKPAKKLTAGDRIRFGNEGKVCLLGHLDAEVEAKGSEGEVTLSFSFHGPALDQAIADLGSPPLPPYIASKRTPDDQDLADYQTMFAANDGAVAAPTAGLHFTPALERALRDRGVGINRLTLHVGAGTFLPVKVDDTEGHKMHPEWGTISAEVADRLNTARKNGGRIVAVGTTSLRLLESAAAEDGSIQPFAADTSIFITPGYRFRAVDILLTNFHLPRSTLFMLVSAFSGLETMKRAYAHAIATGYRFYSYGDACLLFRAEP

SEQ ID NO: 64382 - protein, 357 aa, Bradyrhizobium zhanjiangense
  misc_feature (1)..(357): tr|A0A4Q0QGF3|A0A4Q0QGF3_9BRAD S-adenosylmethionine:tRN A ribosyltransferase-isomerase OS=Bradyrhizobium zhanji angense OX=1325107 GN=queA PE=3 SV=1
MRTDLFDFDLPPERIALRPASPRDSAKMLVVENGALRDQTISDLPQWLKPGDQLVVNDTKVIAAQLRGRRIGRETEPRIEATLIKRLDGSRWQALVKPAKKLTAGDRIRFGNEGKVCLLGHLDAEVEAKGSEGEVTLSFSFHGPALDQAIADLGSPPLPPYIASKRTPDDQDLADYQTMFAANEGAVAAPTAGLHFTPALERALRDHGVGINRLTLHVGAGTFLPVKVDDTEGHKMHPEWGTISAETAERLNTARKNGGRIVAVGTTSLRLLESAAAEDGSIQPFAADTSIFITPGYRFRAVDILLTNFHLPRSTLFMLVSAFSGLETMKRAYAHAIATGYRFYSYGDACLLFRAEP

SEQ ID NO: 64383 - protein, 355 aa, Brenneria alni
  misc_feature (1)..(355): tr|A0A421DT62|A0A421DT62_9GAMM S-adenosylmethionine:tRN A ribosyltransferase-isomerase OS=Brenneria alni OX=716 56 GN=queA PE=3 SV=1
MRVADFSFELPESLIAHYPQAKRSGCRLLSLDGPTGNLTHGVFTDLLNKLEAGDLLVFNDTRVIPARLFGRKTSGGKLEVLVERVLDEHRVLAHVRASKAPKPGTGLLLGDDDSVRATMVARHDALFELRFDDPRDVLSILNDIGHIPLPPYIDRPDEEADRELYQTVYSQRPGAVAAPTAGLHFDEPMLAALREKGVEMAFVTLHVGAGTFQPVRVETIEDHVMHAEYAEVPQDVVDAVLACKARGNRVVAVGTTSVRSLESAAQASQGALIAPFLGDTRIFIYPGYHYQIIDALVTNFHLPESTLIMLVSAFAGYRHTMSAYRQAVAEQYRFFSYGDAMFITRNPQAEQEKAG

SEQ ID NO: 64384 - protein, 355 aa, Brenneria goodwinii
  misc_feature (1)..(355): tr|A0A250BFD1|A0A250BFD1_9GAMM S-adenosylmethionine:tRN A ribosyltransferase-isomerase OS=Brenneria goodwinii O X=1109412 GN=queA PE=3 SV=1
MRVADFSFELPESLIAHYPQAQRSGCRLLSLDGPTGNLTHGVFTDLLNKLDAGDLLVFNNTRVIPARLFGRKASGGKLEVLVERVLDERRVIAHVRASKAPKPGAELLLGDDDSVRATMVARHDALFELHFDDSRDVLSILNDIGHIPLPPYIDRPDEESDRELYQTVYSRRPGAVAAPTAGLHFDEPMLAALREKGVEMAFVTLHVGAGTFQPVRVETIEDHVMHAEYAEVPQEVVDAVLACKARGNKVVAVGTTSVRSLESAAQASKEALIAPFFGDTRIFIYPGYHYRIIDALVTNFHLPESTLIMLVSAFAGYQHTMSAYRQAVAEQYRFFSYGDAMFITRNPLAEQEQIG

SEQ ID NO: 64385 - protein, 355 aa, Brenneria goodwinii
  misc_feature (1)..(355): tr|A0A0G4JPT8|A0A0G4JPT8_9GAMM S-adenosylmethionine:tRN A ribosyltransferase-isomerase OS=Brenneria goodwinii O X=1109412 GN=queA PE=3 SV=1
MRVADFSFELPESLIAHYPQAQRSGCRLLSLDGPTGNLTHGVFTDLLNKLDAGDLLVFNNTRVIPARLFGRKASGGKLEVLVERVLDERRVLAHVRASKAPKPGAELLLGDDDSVRATMVARHDALFELHFDDSRDVLSILNDIGHIPLPPYIDRPDEESDRELYQTVYSRRPGAVAAPTAGLHFDEPMLAALREKGVEMAFVTLHVGAGTFQPVRVETIEDHVMHAEYAEVPQEVVDAVLACKAHGNKVVAVGTTSVRSLESAAQASKEALIAPFFGDTRIFIYPGYHYRIIDALVTNFHLPESTLIMLVSAFAGYRHTMSAYRQAVAEQYRFFSYGDAMFITRNPLAEQEQIG

SEQ ID NO: 64386 - protein, 355 aa, Brenneria nigrifluens
  misc_feature (1)..(355): tr|A0A2U1UW56|A0A2U1UW56_9GAMM S-adenosylmethionine:tRN A ribosyltransferase-isomerase OS=Brenneria nigrifluens DSM 30175 = ATCC 13028 OX=1121120 GN=queA PE=3 SV=1
MRVADFSFELPESLIAHYPQAQRSGCRLLSLEGPTGKVTHEVFTDLLNKLDAGDLLVFNDTRVIPARLFGRKASGGKLEVLVERVLDERRVLAHVRASKAPKPGTELLLGDDESVRATMAARHDALFELHFDDSRDVLSILNAIGHIPLPPYIDRPDEEADRELYQTVYSQRPGAVAAPTAGLHFDEPMLAALREKGVEMAFVTLHVGAGTFQPVRVESIEDHVMHAEYAEVPQAVVDAVLACKARGNRVVAVGTTSVRSLESAAQASKDALIAPFFGDTRIFIYPGYRYRIIDALVTNFHLPESTLIMLVSAFAGYRHTLSAYRQAVAEQYRFFSYGDAMFITRNPAAEQEQAG

SEQ ID NO: 64387 - protein, 355 aa, Brenneria roseae
  misc_feature (1)..(355): tr|A0A2U1U014|A0A2U1U014_9GAMM S-adenosylmethionine:tRN A ribosyltransferase-isomerase OS=Brenneria roseae subs p. americana OX=1508507 GN=queA PE=3 SV=1
MRVADFSFELPESLIAHYPQAQRSGCRLLSLDGPTGNLTHGIFTDLLNKLDAGDLLVFNNTRVIPARLFGRKASGGRLEVLVERVLDEHRVLAHVRASKAPKPGTELLLGDDESVKATMAVRHDALFELHFDDARDVLTILNDIGHIPLPPYIDRPDEDADRELYQTVYSQRPGAVAAPTAGLHFDEPLLAALREKGVEMVFVTLHVGAGTFQPVRVETIEDHVMHAEYAEVPQDVVDAVLACKARGNRVIAVGTTSVRSLESAAQASEDALIAPFFGDTRIFIYPGYHYQVIDALVTNFHLPESTLIMLVSAFAGYRNTLSAYRQAVEEQYRFFSYGDAMFITRNPMAEQEKIK

SEQ ID NO: 64388 - protein, 355 aa, Brenneria rubrifaciens
  misc_feature (1)..(355): tr|A0A4V1F9K1|A0A4V1F9K1_9GAMM S-adenosylmethionine:tRN A ribosyltransferase-isomerase OS=Brenneria rubrifacien s OX=55213 GN=queA PE=3 SV=1
MRVADFSFELPESLIAHYPQAQRSGCRLLSLDGPTGNLTHGIFTDLLNKLDAGDLLVFNNTRVIPARLFGRKVSGGKLEVLVERVLDAHRVLAHVRASKAPKPGAELLLGDDESVRATMAARHDTLFELHFDDPREVLSILNDIGHIPLPPYIDRPDEDADRECYQTVYSQRPGAVAAPTAGLHFDESLLAALREKGVEMAFVTLHVGAGTFQPVRVETIEDHVMHAEYAEVAQEVVDAVLACKARGNRVVAVGTTSVRALESAAQVSQDALIAPFFGDTRIFIYPGYRYQVIDVLITNFHLPESTLIMLVSAFAGYRHTMSAYQQAVQEQYRFFSYGDAMFITRNPMAEREAVA

SEQ ID NO: 64389 - protein, 356 aa, Brenneria salicis
  misc_feature (1)..(356): tr|A0A366IC94|A0A366IC94_9GAMM S-adenosylmethionine:tRN A ribosyltransferase-isomerase OS=Brenneria salicis ATC C 15712 = DSM 30166 OX=714314 GN=queA PE=3 SV=1
MRVADFSFDLPQSLIARYPQAQRSGCHLLSLDGPTGNLTHGIFTDLLDELDAGDLLVFNNTRVIPARLFGRKASGGKLEVLVERVLDEHRVLAHVRASKAPKPGAALLLGDDESVRATMAARHDALFELHFDDARDVLAILNDIGHIPLPPYIDRPDEESDRELYQTVYSQRPGAVAAPTAGLHFDEPMLAALREKGVQMAFVTLHVGAGTFQPVRVETIEDHVMHAEYAEVPQDVVDAVLACKARGNRVIAVGTTSVRSLESAAQASQDALLAPFFGDTRIFIYPGYRYQVIDALITNFHLPESTLIMLVAAFAGYQHTMSAYRQAVAEQYRFFSYGDAMFITRNPQAEQEQVDS

SEQ ID NO: 64390 - protein, 355 aa, Brenneria sp.
  misc_feature (1)..(355): tr|A0A2U1UAA2|A0A2U1UAA2_9GAMM S-adenosylmethionine:tRN A ribosyltransferase-isomerase OS=Brenneria sp. CFCC 11 842 OX=2173106 GN=queA PE=3 SV=1
MRVADFSFELPESLIAHYPQAQRSGCRLLSLDGPTGKVTHEVFTDLLNKLDAGDLLVFNDTRVIPARLFGRKASGGKLEVLVERVLDERRVLAHVRASKAPKPGTELLLGDDESVRATMAARHDALFELHFDDSRDVLSILNAIGHIPLPPYIDRPDEEADRELYQTVYSQRPGAVAAPTAGLHFDEPMLAALREKGVEMAFVTLHVGAGTFQPVRVESIEDHVMHAEYAEVPQAVVDAVLACKARGNRVVAVGTTSVRSLESAAQASRDAPIAPFFGDTRIFIYPGYRYRIIDALVTNFHLPESTLIMLVSAFAGYRHTLSAYRQAVAEQYRFFSYGDAMFITRNPAAEQEKVG

SEQ ID NO: 64391 - protein, 355 aa, Brenneria sp.
  misc_feature (1)..(355): tr|A0A5J5G0P8|A0A5J5G0P8_9GAMM tRNA preQ1(34) S-adenosy lmethionine ribosyltransferase-isomerase QueA OS=Brenne ria sp. L3-3HA OX=2590031 GN=queA PE=4 SV=1
MRVADFSFELPESLIARYPQPQRSACRLLSLDGPSGALTHGVFTDLLDKLEAGDLLVFNNTRVIPARLFGRKASGGRLEVLVERMLDNRRVLAHVRASKAPKPGAELLLGDDESVRATMAARHDTLFELHFHDERDVLTILNAIGHMPLPPYIDRPDEDADRELYQTVYSQRPGAVAAPTAGLHFDEPLLAALREKGVQMAFVTLHVGAGTFQPVRVETIEDHVMHAEYAEVPQEVVEAVQACKARGNRVIAVGTTSVRSLESAAQACGNGQIEPFFGDTRIFIYPGYHYQVVDALVTNFHLPESTLIMLVSAFAGYRHTMTAYRSAVEQQYRFFSYGDAMFITHNTQAEQERVE

SEQ ID NO: 64392 - protein, 362 aa, Breoghania corrubedonensis
  misc_feature (1)..(362): tr|A0A2T5VB91|A0A2T5VB91_9RHIZ S-adenosylmethionine:tRN A ribosyltransferase-isomerase OS=Breoghania corrubedon ensis OX=665038 GN=queA PE=3 SV=1
MRVDDFDFELPEDRIALRPARPRDSARQLIVHPGGEGELSDDIVANLVNHLRPGDALVFNDTKVIPAQLEGTRERDGAIARVGVTLHMRVAADRWRAFVRPAKKLLVGERVRFGSHEGTMCSAGLLDATVAEKGEGGEIEFAFDLSGPDLDIAIATAGHVPLPPYIASKRGEDEQDRRDYQTVYARHEGAVAAPTGGLHFTDDLLQRLRAHGVEEHFVTLHVGAGTFLPVKVDDIADHRMHSELCEVSAETADTLNAVRARGGRIVAVGTTSLRLLESAADETGIIHPFHAPTDIFITPGYRFRAVDILMTNFHLPRSTLFMLVSAFSGFETMHRAYAHAIANGYRFYSYGDSSLLFPQDTQ

SEQ ID NO: 64393 - protein, 340 aa, Brevefilum fermentans
  misc_feature (1)..(340): tr|A0A1Y6KA24|A0A1Y6KA24_9CHLR S-adenosylmethionine:tRN A ribosyltransferase-isomerase OS=Brevefilum fermentans OX=1986204 GN=queA PE=3 SV=1
MRTAEFDYDLPLDRIAQTPITPRHDSRLMIVDRSTGKIEHRCFWEIDRFLKPGDVVVINETRVIPARIFATKQPGGGKVELLLLERNDARTWTAWVGGKGLIPGRRLTIAGGPEVEIIEVLEGPKRRLRFDEPIEPFFERVGHVPLPPYIHTRLDDLERYQTVYATTPGSAAAPTAGLHFTDPLIKKLLDQGILFARVTLHVGLDTFAPVTEADPREHKIHTEWCLLNQQTADQINAAKAAGGRVVSVGTTSVRTLETAARGRANGQVVAASCGHTDLFILPGFIFNAVDIMITNFHLPKSTLLMLVSAFAGRDLIFKAYQVAIDEGYRFYSFGDAMLIL

SEQ ID NO: 64394 - protein, 342 aa, Brevibacillus agri
  misc_feature (1)..(342): tr|A0A3M8AW02|A0A3M8AW02_9BACL S-adenosylmethionine:tRN A ribosyltransferase-isomerase OS=Brevibacillus agri OX =51101 GN=queA PE=3 SV=1
MDVQQFDFELPEHLIAQHPLKDRTASRLLVLNKQTGAISHQRFTDLIDHLQPGDVLVMNDSRVLPARLIGEKAETGAKIEVLLLKSLGDDRWETLVKPGKRMKPGTEVVFGNGLLRCVCEEATETGGRIVRFLYEGIFYEILDQLGSMPLPPYIHEQLEDSERYQTVYARERGSAAAPTAGLHFTKPYLEQIAAKGVQLAYVTLHVGLGTFRPVSADSVEEHVMHAEYYEIPEETAELVNKAKAEGRRVIAVGTTSCRTLETVGRANGGKLAATSGWTDIFIYPGYTFSILDGLLTNFHLPKSTLVMLVSALAGKEHVMNAYKAAVQEEYRFFSFGDAMLIV

SEQ ID NO: 64395 - protein, 342 aa, Brevibacillus borstelensis
  misc_feature (1)..(342): tr|M8DH34|M8DH34_9BACL S-adenosylmethionine:tRNA ribosy ltransferase-isomerase OS=Brevibacillus borstelensis AK 1 OX=1300222 GN=queA PE=3 SV=1
MDVQQFDFELPERLIAQHPLEDRTASRLLVMNKRTGELAHRQFTQLIDYLNPGDVLVLNDSRVLPARLIGEKADTGAKIEVLLLKSLGEDRWETLVKPGKRVKPGTEVVFGNGQLRCVCEDVTETGGRIVRFHYEGIFYEILDQLGSMPLPPYIHAQLDDQERYQTVYAKERGSAAAPTAGLHFTEAYLKRLEEKGVQIAYITLHVGLGTFRPVTADLVEEHVMHSEYYEIPQKTAEIVNAAKAEGRRVIAVGTTSCRTLETVGQAHDGKLAAESGWTDIFIYPGYRFRIIDGLLTNFHLPKSSLVMLVSALAGRDHIMNAYRAAVKEEYRFFSFGDAMLLI

SEQ ID NO: 64396 - protein, 342 aa, Brevibacillus brevis
  misc_feature (1)..(342): sp|C0ZAN8|QUEA_BREBN S-adenosylmethionine:tRNA ribosylt ransferase-isomerase OS=Brevibacillus brevis (strain 47 / JCM 6285 / NBRC 100599) OX=358681 GN=queA PE=3 SV=1
MDVQQFDFDLPEHLIAQHPLEDRTSSRLLVLEKQTGNIVHQQFTHLIDHLQAGDVLVMNDSRVLPARLIGEKTDTGAKIEILLLKSLGEDRWETLVKPGKRMKPGTEVVFGNGLLRCVCEDVTETGGRIVRFLYEGIFYEILDQLGSMPLPPYIHAQLEDSERYQTVYAKERGSAAAPTAGLHFTKPYLEQIAAKGVQLAYVTLHVGLGTFRPVSADSVEEHVMHAEYYEIPEETVELVNQAKAEGRRVIAVGTTSCRTLETVGRANGGKLVATSGWTDIFIYPGYTFSILDGLLTNFHLPKSTLVMLVSALAGKENVMRAYKRAVEEEYRFFSFGDAMLIL

SEQ ID NO: 64397 - protein, 342 aa, Brevibacillus brevis
  misc_feature (1)..(342): tr|A0A291BHF4|A0A291BHF4_BREBE S-adenosylmethionine:tRN A ribosyltransferase-isomerase OS=Brevibacillus brevis X23 OX=1200792 GN=queA PE=3 SV=1
MDVQQFDFDLPEHLIAQHPLEDRTSSRLLVLEKQTGNIVHQQFTNLIDHLQAGDVLVMNDSRVLPARLIGEKAETGAKIEILLLKSLGDDRWETLVKPGKRMKPGTEVVFGNGLLRCLCEDVTETGGRIVRFLYEGIFYEILDQLGSMPLPPYIHAQLEDSERYQTVYAKERGSAAAPTAGLHFTKPYLEQIAAKGVQLAYVTLHVGLGTFRPVSADSVEEHVMHAEYYEIPEETVKLVNQAKAEGRRVIAVGTTSCRTLETVGRANGGKLVVTSGWTDIFIYPGYTFSILDGLLTNFHLPKSTLVMLVSALAGKENVMRAYKTAVEEEYRFFSFGDAMFIL

SEQ ID NO: 64398 - protein, 342 aa, Brevibacillus choshinensis
  misc_feature (1)..(342): tr|A0A0Q3WNQ7|A0A0Q3WNQ7_BRECH S-adenosylmethionine:tRN A ribosyltransferase-isomerase OS=Brevibacillus choshin ensis OX=54911 GN=queA PE=3 SV=1
MDVQQFDFELPEHLIAQHPLEERTSSRLLALNKATGDIMHQRFTDLIDHLVPGDVLVMNDSRVLPARLIGEKAETGAKIEVLLLKSLGDDRWETLVKPGKRMKPGTEVVFGNGLLSCTCEEATETGGRIVRFHYEGIFYEILDQLGSMPLPPYIHEQLDDQERYQTVYARERGSAAAPTAGLHFTKPYLEQIAAKGVHLAYVTLHVGLGTFRPVAANTIEEHVMHAEYYEISEETAQIVNSAKAEGRRVIAVGTTSCRTLETVGKANGGKLTPSSGWTDIFIYPGYSFTILDGLLTNFHLPKSTLVMLVSALAGKENVMNAYKSAVEEEYRFFSFGDAMLIL

SEQ ID NO: 64399 - protein, 343 aa, Brevibacillus fluminis
  misc_feature (1)..(343): tr|A0A3M8DT13|A0A3M8DT13_9BACL S-adenosylmethionine:tRN A ribosyltransferase-isomerase OS=Brevibacillus flumini s OX=511487 GN=queA PE=3 SV=1
MDVTQFDFDLPERLIAQHPLEDRSASRLLVLHKQTGAVEHRTFTDLIDYLREGDVMVLNDSRVLPARLIGVKTDTGANIEVLLLKSLGDDRWETLVKPGKRVKPGTEISFGDGLLRAVCESSTEMGGRIIRFSYEGIFYELLDRLGSMPLPPYIHEQLEDRERYQTVYSRELGSAAAPTAGLHFTKDYLQRLEQKGVQLAYITLHVGLGTFRPVSADTVEEHVMHAEYYEIPEETARIVNTAKSEGRRVIAVGTTSCRTLETVGKAHGGKLAVESGWTDIFIYPGYQFSIIDGMITNFHLPKSTLVMLISALAGRETILNAYREAVEQEYRFFSFGDAMLINP

SEQ ID NO: 64400 - protein, 342 aa, Brevibacillus formosus
  misc_feature (1)..(342): tr|A0A4Y4I0R0|A0A4Y4I0R0_9BACL S-adenosylmethionine:tRN A ribosyltransferase-isomerase OS=Brevibacillus formosu s OX=54913 GN=queA PE=3 SV=1
MDVQQFDFDLPEHLIAQHPLEDRTSSRLLVLEKQTGNVAHQQFTNLIDHLQAGDVLVMNDSRVLPARLIGEKAETGAKIEILLLKSLGDDRWETLVKPGKRMKQGTEVVFGNGLLRCVCEDVTETGGRIVRFLYEGIFYEILDQLGSMPLPPYIHAQLEDSERYQTVYAKERGSAAAPTAGLHFTKPYLEQIAAKGVQLAYVTLHVGLGTFRPVSADSVEEHVMHAEYYEIPEETVELVNQAKAEGRRVIAVGTTSCRTLETVGRANGGKLVATSGWTDIFIYPGYTFSILDGLLTNFHLPKSTLVMLVSALAGKENVMRAYKTAVKEEYRFFSFGDAMLIL

SEQ ID NO: 64401 - protein, 342 aa, Brevibacillus formosus
  misc_feature (1)..(342): tr|A0A220MD06|A0A220MD06_9BACL S-adenosylmethionine:tRN A ribosyltransferase-isomerase OS=Brevibacillus formosu s OX=54913 GN=queA PE=3 SV=1
MDVQQFDFDLPEHLIAQHPLEDRTSSRLLVLEKQTGNIAHQKFTNLIDHLQAGDVLVMNDSRVLPARLIGEKADTGAKIEILLLKSLGDDRWETLVKPGKRMKQGTEVVFGNGLLRCVCEDVTETGGRIVRFLYEGIFYEILDQLGSMPLPPYIHAQLEDSERYQTVYAKERGSAAAPTAGLHFTKPYLEQIAAKGVQLAYVTLHVGLGTFRPVSADSVEEHVMHAEYYEIPEETVELVNQAKAEGRRVIAVGTTSCRTLETVGRANGGKLVATSGWTDIFIYPGYTFSILDGLLTNFHLPKSTLVMLVSALAGKENVMRAYKTAVEEEYRFFSFGDAMLIL

SEQ ID NO: 64402 - protein, 342 aa, Brevibacillus gelatini
  misc_feature (1)..(342): tr|A0A3M8ATA6|A0A3M8ATA6_9BACL S-adenosylmethionine:tRN A ribosyltransferase-isomerase OS=Brevibacillus gelatin i OX=1655277 GN=queA PE=3 SV=1
MDVQQFDFELPEHLIAQHPLEDRTASRLLVLDKQTGSISHQRFTDLIDHLQPGDVLVMNDSRVLPARLIGEKAGTGAKIEILLLKSLGDDRWETLVKPGKRMKPGTEVVFGNGLLRCVCEEVTETGGRIVRFLYEGIFYEILDQLGSMPLPPYIHAQLEDSERYQTVYARERGSAAAPTAGLHFTKPYLEQIAAKGVQLAYVTLHVGLGTFRPVSADTVEEHVMHAEYYEIPEKTAELVNKAKAEGRRVIAVGTTSCRTLETVGRANGGRLVATAGWTDIFIYPGYTFSILDGLLTNFHLPKSTLVMLVSALAGKEHVMNAYRAAIQEEYRFFSFGDAMLIV

SEQ ID NO: 64403 - protein, 342 aa, Brevibacillus invocatus
  misc_feature (1)..(342): tr|A0A3M8CMJ7|A0A3M8CMJ7_9BACL S-adenosylmethionine:tRN A ribosyltransferase-isomerase OS=Brevibacillus invocat us OX=173959 GN=queA PE=3 SV=1
MDVQQFDFELPEHLIAQHPLEDRTSSRLLVLNKETGEIQHQRFTNLIDHLVPGDVLVLNDSRVLPARLIGEKAETGAKIEVLLLKSLGDDRWETLVKPGKRMKPGTIVTFGNGLLRCVCEEITETGGRIVRFSYEGIFYEILEQLGSMPLPPYIHAQLEDQERYQTVYARERGSAAAPTAGLHFTKEYLEQIAAKGVHLATITLHVGLGTFRPVAADTVEEHVMHAEYYEISQETADLVNAAKTEGRRVIAVGTTSCRTLETVGRDHGGRLAATSGWTDIFIYPGYTFSIIDGMLTNFHLPKSTLVMLVSALAGKEHILHAYNTAVKEEYRFFSFGDAMLIL

SEQ ID NO: 64404 - protein, 342 aa, Brevibacillus laterosporus
  misc_feature (1)..(342): tr|A0A075R161|A0A075R161_BRELA S-adenosylmethionine:tRN A ribosyltransferase-isomerase OS=Brevibacillus lateros porus LMG 15441 OX=1042163 GN=queA PE=3 SV=1
MDVTLFDFDLPEELIAQHPLEDRTGSRLLVLDKQTGEVTHQQFTDLLTYLEAGDVLVVNDSRVLPARLIGLKSETGAKIEILLLKSLGDDRWETLARPGKRFKVGTEIEFGDGMLRCVCEEITPTGGRIVRFSYEGIFYEILDRLGSMPLPPYIHEQLDDRERYQTVYSKEVGSAAAPTAGLHFTQEYLDKLQQKGIKLAYVTLHVGLGTFRPVEADVIEEHVMHAEHYQLTQEMADLINGAKEAGKRVIAVGTTSCRTLETIAKEHGGKLVAQSGWTDIFMYPGYEFAIIDGLLTNFHLPKSTLVMLISALAGRENVLRAYQDAIARKYRFFSFGDAMLIK

SEQ ID NO: 64405 - protein, 342 aa, Brevibacillus laterosporus
  misc_feature (1)..(342): tr|H0UGH3|H0UGH3_BRELA S-adenosylmethionine:tRNA ribosy ltransferase-isomerase OS=Brevibacillus laterosporus GI -9 OX=1118154 GN=queA PE=3 SV=1
MDVTLFDFDLPEELIAQHPLEDRTGSRLLVLDKQTGEVTHQQFTDLLTYLEAGDVLVVNDSRVLPARLIGVKSETGAKIEILLLKSLGDDRWETLARPGKRFKVGTEIEFGDGMLRCVCEEITPTGGRIVRFSYEGIFYEILDRLGSMPLPPYIHEQLDDRERYQTVYSKELGSAAAPTAGLHFTQEYLDKLQQKGIKLAYVTLHVGLGTFRPVEADVIEEHVMHAEHYQLTQEMADLINGAKEAGKRVIAVGTTSCRTLETIAKEHGGKLVAQSGWTDIFMYPGYEFAIIDGLLTNFHLPKSTLVMLISALAGRENVLRAYQDAIARKYRFFSFGDAMLIK

SEQ ID NO: 64406 - protein, 342 aa, Brevibacillus nitrificans
  misc_feature (1)..(342): tr|A0A3M8D8S7|A0A3M8D8S7_9BACL S-adenosylmethionine:tRN A ribosyltransferase-isomerase OS=Brevibacillus nitrifi cans OX=651560 GN=queA PE=3 SV=1
MDVQQFDFELPEHLIAQHPLQERTSSRLLVLNKKTGDILHQRFTDLIEHLVPGDVLVMNDSRVLPARLIGEKTDTGAKIEVLLLKSLGDDRWETLVKPGKRMKPGTQVVFGNGLLRCTCEEVTETGGRIIRFHYDGIFYEILDQLGSMPLPPYIHEQLDDQERYQTVYARERGSAAAPTAGLHFTKPYLEQIAAKGVQLAYVTLHVGLGTFRPVSADSVEEHIMHAEYYEIPEETAEIVNRAKAEGRRVIAVGTTSCRTLETVGKANSGKLTPTSGWTDIFIYPGYTFSILDGLLTNFHLPKSTLVMLVSALAGKENVLRAYQTAVEEEYRFFSFGDAMLIL

SEQ ID NO: 64407 - protein, 345 aa, Brevibacillus panacihumi
  misc_feature (1)..(345): tr|V6LYL9|V6LYL9_9BACL S-adenosylmethionine:tRNA ribosy ltransferase-isomerase OS=Brevibacillus panacihumi W25 OX=1408254 GN=T458_24505 PE=3 SV=1
MKVSELDFELPPKLLARRPREIDGQNRSDSRMLVIQKSQNKIIHDNIRNIGSYLSEGDLIVLNNSKTINAVFQGKNKNVGFVSVALCSQLDKRRWLATLHNTFKDNMANQIFEVGEGLEFKIIGPSNDIYGLFELELIHEEELIFLSEKYGRPIISNYTEKMWSLEYYQNEYATIPGSVELPAAGRHFTKTLLEELKNSGIEIEYITLHTGLSSMTIETEELEEHQMYSESYSISENTARKINETKEKGNKIIAIGTTVTRTLESSVNENGVIQSGSSWTNLYIYPGFEFKVIDGIVTNFHGPRTSRIALAAAMAGQSLIMDAYREAIQKEYLFYEFGDATLIFK

SEQ ID NO: 64408 - protein, 342 aa, Brevibacillus panacihumi
  misc_feature (1)..(342): tr|V6ME93|V6ME93_9BACL S-adenosylmethionine:tRNA ribosy ltransferase-isomerase OS=Brevibacillus panacihumi W25 OX=1408254 GN=queA PE=3 SV=1
MDVQQFDFELPEHLIAQHPLADRTASRLLVLHKETGNILHQRFTNLIDHLVPGDVLVLNDSRVLPARLIGEKEGTGAKIEVLLLKSLGEDRWETLVKPGKRVKPGTVVVFGDGLLRCICEESTDMGGRIVRFSYEGIFYEILERLGTMPLPPYIHEQLEDQERYQTVYARERGSAAAPTAGLHFTKEYLERIAAKGVHITTITLHVGLGTFRPVSADRVEEHVMHAEYYEISQETADVVNAAKEEGRRVIAVGTTSCRTLETVGSAHGGRLAATSGWTDIFIYPGYSFSIIDGMLTNFHLPKSTLVMLVSALAGKENILNAYKSAVEQEYRFFSFGDAMLII

SEQ ID NO: 64409 - protein, 342 aa, Brevibacillus parabrevis
  misc_feature (1)..(342): tr|A0A4Y3PE17|A0A4Y3PE17_BREPA S-adenosylmethionine:tRN A ribosyltransferase-isomerase OS=Brevibacillus parabre vis OX=54914 GN=queA PE=3 SV=1
MDVQQFDFDLPEHLIAQHPLEDRTSSRLLVLDKQTGAIAHRRFTDLIDHLQPGDVLVMNDSRVLPARLIGEKAETGAKIEILLLKSLGDDRWETLVKPGKRMKPGTEVVFGNGLLRCVCEEATETGGRIVRFLYEGIFYEILDQLGSMPLPPYIHAQLEDSERYQTVYARERGSAAAPTAGLHFTKPYLEQIAAKGVQLAYVTLHVGLGTFRPVSADSVEEHVMHAEYYEIPEETVELVNKAKAEGRRVIAVGTTSCRTLETVGRANEGKLVAASGWTDIFIYPGYTFSILDGLLTNFHLPKSTLVMLVSALAGKEHVMNAYKTAVREEYRFFSFGDAMLIV

SEQ ID NO: 64410 - protein, 342 aa, Brevibacillus reuszeri
  misc_feature (1)..(342): tr|A0A0K9Z0D6|A0A0K9Z0D6_9BACL S-adenosylmethionine:tRN A ribosyltransferase-isomerase OS=Brevibacillus reuszer i OX=54915 GN=queA PE=3 SV=1
MDVQQFDFELPEHLIAQHPLEDRTSSRLLVLQKQTGEIMHQHFTDLIDHLQPGDVLVMNDSRVLPARLIGEKSETGAKIEILLLKSLGDDRWETLVKPGKRMKPGTEVVFGNGLLRCVCEEVTETGGRIVRFMYEGIFYEILDQLGSMPLPPYIHAQLEDSERYQTVYARERGSAAAPTAGLHFTKPYLEKIAAKGIQLAYVTLHVGLGTFRPVAADSVEEHVMHAEYYEIPEETAELVNRAKAEGRRVIAVGTTSCRTLETVGRAHGGKLAATSGWTDIFIYPGYTFSILDGLMTNFHLPKSTLVMLVSALAGKDNVMNAYKTAVQEEYRFFSFGDAMLIL

SEQ ID NO: 64411 - protein, 342 aa, Brevibacillus sp.
  misc_feature (1)..(342): tr|A0A553KNV4|A0A553KNV4_9BACL S-adenosylmethionine:tRN A ribosyltransferase-isomerase OS=Brevibacillus sp. LEM MJ03 OX=2595056 GN=queA PE=3 SV=1
MDVQLFDFELPERLIAQHPLKDRTASRLLVLDKRTGEMAHRRFTDLVEYLRPGDVLVLNDSRVLPARLIGEKAGTGAKIEVLLLKSLGGDRWETLVKPGKRVKPGTEVVFGGGLLRCVCEEVTETGGRIVRFQYEGIFYEILDQLGTMPLPPYIHEQLEDQERYQTVYARERGSAAAPTAGLHFTEEYLRRVAEKGVEIAYVTLHVGLGTFRPVTADVVEEHVMHAEYYDIPPETAETVNRAKAEGRRVIAVGTTSCRTLETVGGLHDGRLAAGSGWTDIFIYPGYQFRIIDGLLTNFHLPKSTLVMLVSALAGRENVLRAYRTAVAEEYRFFSFGDAMLIL

SEQ ID NO: 64412 - protein, 342 aa, Brevibacillus sp.
  misc_feature (1)..(342): tr|A0A1I3WQ80|A0A1I3WQ80_9BACL S-adenosylmethionine:tRN A ribosyltransferase-isomerase OS=Brevibacillus sp. OK0 42 OX=1884381 GN=queA PE=3 SV=1
MDVQQFDFELPEHLIAQHPLQERTSSRLLVLNKKTGDILHQRFTDLIEHLVPGDVLVMNDSRVLPARLIGEKTDTGAKIEVLLLKSLGDDRWETLVKPGKRMKIGTEVVFGNGLLRCTCEEVTETGGRIIRFHYDGIFYEILDQLGSMPLPPYIHEQLDDQERYQTVYARERGSAAAPTAGLHFTKPYLEQIAAKGVQLAYVTLHVGLGTFRPVSADSVEEHIMHAEYYEIPEETAEIVNRAKAEGRRVIAVGTTSCRTLETVGKANGGKLTPTSGWTDIFIYPGYTFSILDGLLTNFHLPKSTLVMLVSALAGKENVLRAYKTAVEEEYRFFSFGDAMLIL

SEQ ID NO: 64413 - protein, 297 aa, Brevifollis gellanilyticus
  misc_feature (1)..(297): tr|A0A512MG18|A0A512MG18_9BACT S-adenosylmethionine:tRN A ribosyltransferase-isomerase OS=Brevifollis gellanily ticus OX=748831 GN=BGE01nite_49840 PE=3 SV=1
MLVVHRESGEIEHRSFRELPGYLRADDLLVLNNTRVVPARFFSNDGSREVLRLEPISPLRWRCMVKPGKKFKIGHMVQIGESNGTVREILENGERIIEWDSLVDENVHGHLALPHYMGRDDQPADRERYQTVFAQSAGAIAAPTAGLHFTPQMLSTLPHAFVTLHVGVGTFQPVKVEKLSEHQMHSEVYEVGVETSKRISNAKRVIAVGTTSMRTLETVARDHGKVVPASGSTDIFIYPGFQFRVVGALLTNFHLPKSTLMMLVSAFAGRDLIMKAYTEAIRERYRFYSYGDCMLIV

SEQ ID NO: 64414 - protein, 341 aa, Brevinema andersonii
  misc_feature (1)..(341): tr|A0A1I1D992|A0A1I1D992_9SPIR S-adenosylmethionine:tRN A ribosyltransferase-isomerase OS=Brevinema andersonii OX=34097 GN=queA PE=3 SV=1
MEYFLDFDLPENLIATSPAPERDGDRLMLINHNKLNHYMFTELPLFLNEGDVLVVNNSKVFKARLSIRLVRSDLESEMLLIEAENPYTWTAMLKKARRFKKGDLIIVANCVRAKVMEVLDSGLRRIRFEEPFSAERADQIGLVPLPPYIIEQRKKRSEVLYSFQDEERYQTLFAKYYGSVAAPTASLRFSQKILESLKNKGVQVAELTLHVGLGTFKPMDQLPENFKMHKEKISVPYETIQLCLQAKNKKKRVIAAGTTVCRALEASGNKAFCGETDIFIKPGYQFRMIDGLITNFHLPQSTLLLLVQAFAGIDNIRHAYAEAILQQYRFFSYGDGMLILQ

SEQ ID NO: 64415 - protein, 362 aa, Brevirhabdus pacifica
  misc_feature (1)..(362): tr|A0A1U7DL27|A0A1U7DL27_9RHOB S-adenosylmethionine:tRN A ribosyltransferase-isomerase OS=Brevirhabdus pacifica OX=1267768 GN=queA PE=3 SV=1
MKLSDFDFDLPETLIATRPAVPRTAARLLLAEGPGIEDRQVADLPDILRPGDVLVLNDTKVMPVHLDGARHRDSAQGPVTARIRVNLLEPLPDGRWTALLKPLRKLREGEEIVFAPGFAARFEGVEGDHAILHFDLEGEDFDTALETAGAMPLPPYIAARRAPDAQDMTDYQTVFARQRGAVAAPTASLHFDRALLDRLEAAGVEFVHVTLHVGAGTFLPVKVDDITQHRMHSERGEITAEAAERLNRARAEGRRVIPVGTTALRLIESAANEDGTLAAWQGSTDIFITPGYRFRVTDGLMTNFHLPKSTLMMLVSALMGADTIRNIYRHAIDTGYRFFSYGDSSLLLPETGAGARKVAQRS

SEQ ID NO: 64416 - protein, 362 aa, Brevundimonas abyssalis
  misc_feature (1)..(362): tr|U2ZCC1|U2ZCC1_9CAUL S-adenosylmethionine:tRNA ribosy ltransferase-isomerase OS=Brevundimonas abyssalis TAR-0 01 OX=1391729 GN=queA PE=3 SV=1
MAIAPPMLTADFDFHLPEDLIALRPVSPRDSARLMVVRDGRIEDRIVRDLADLLQPGDASSSTTPGSSRPASTACATATALTVPVEATLHQRTAPDRWTAFMKPGKRLKPDDRVMFGKTADGACLVGRLDARVVDKGEDGLITLAFDLAGPALDDAIREAGVMPLPPYIAAKRPEDDQDRIDYQTLFARHDGSVAAPTAGLHFTPELMAALAARGVSTHAVTLHVGAGTFLPVKADNVADHRMHAETGEVSPESAAALNAVRAAGGRIVCVGTTSLRLLESAADEDGVIRPYSDATAIFITPGYRFRAADVLMTNFHLPRSTLFMLVSAFAGTETMKAAYAHAVDTGYRFYSYGDGSLLFRA

SEQ ID NO: 64417 - protein, 370 aa, Brevundimonas diminuta
  misc_feature (1)..(370): tr|A0A2X1CCM9|A0A2X1CCM9_BREDI S-adenosylmethionine:tRN A ribosyltransferase-isomerase OS=Brevundimonas diminut a OX=293 GN=queA PE=3 SV=1
MSIPRPMRTSDFDFDLPEACIALRPADPRDSARLLVVKGGDLEDRIIRDLPGFLQPGDALVFNDTRVIPARLSGVRHRTRPEGELLSVPVEATLHHRDAPDVWSAFMKPGKRLKVGDRVRFGREEDNACFLGQVDAEITAKGEDGLVTLRFDLTGPVLDDAIREVGVMPLPPYIAAKRAEDDQDLKDYQTVFAEHDGSVAAPTAGLHFTPALLDAIRARGVTTHAVTLHVGAGTFLPVKADDTADHKMHSEWGEVSAETAAALNAVRAAGGRIVCVGTTSLRLLESATREDGVVQPFHGDTAIFITPGYRFRACDVLMTNFHLPKSTLFMLVSAFAGLETMRAAYAHAIDSGYRFYSYGDGSLLFREDAQ

SEQ ID NO: 64418 - protein, 364 aa, Brevundimonas diminuta
  misc_feature (1)..(364): tr|L1QFP7|L1QFP7_BREDI S-adenosylmethionine:tRNA ribosy ltransferase-isomerase OS=Brevundimonas diminuta 470-4 OX=1035191 GN=queA PE=3 SV=1
MRTSDFDFDLPEACIALRPADPRDSARLLVVKGGDLQDKIIHDLPDFLQPGDALVFNDTRVIPARLSGVRHRTGPEGELLSVPVEATLHHRDAPDVWSAFMKPGKRLKVGDRVRFGREEDNACLIGQVDAEITAKGEDGLVTLRFDLAGPVLDDAIREVGVMPLPPYIAAKRAEDDQDLKDYQTVFAEHDGSVAAPTAGLHFTPALLDAIRARGVTTHAVTLHVGAGTFLPVKADDTADHKMHSEWGEVSAETAAVLNAVRAAGGRIVCVGTTSLRLLESATGEDGVVKAFHGDTAIFITPGYRFRACDVLMTNFHLPKSTLFMLVSAFAGLETMKAAYAHAIDSGYRFYSYGDGSLLFREDAQ

SEQ ID NO: 64419 - protein, 361 aa, Brevundimonas intermedia
  misc_feature (1)..(361): tr|A0A4Y9RY75|A0A4Y9RY75_9CAUL S-adenosylmethionine:tRN A ribosyltransferase-isomerase OS=Brevundimonas interme dia OX=74315 GN=queA PE=3 SV=1
MKTADFDFDLPEERIALRPADPRDSARLLVVKGGALEDRVIRDLPDFLRPGDALVFNDTRVIPARLSGVRQRIGAEGETLTVEVEATLHHRDAPDVWSAFMKPGKRIKPGDRIRFGLASEAACDLGRLDATVTAKGDDGLITLTFDLSGPALDDAIRDVGVMPLPPYIAAKRPEDDRDRSDYQTVFAEHDGSVAAPTAGLHFTPALLDAIRAKGVSTHAVTLHVGAGTFLPVKADDLADHKMHSEWGEVSPETAAALNAVHTNGGRIVCVGTTSLRLLESATTEDGEIKPFHGDTAIFITPGYRFRAVDILMTNFHLPKSTLFMLVSAFAGSATMKAAYAHAIADGYRFYSYGDGSLLFRD

SEQ ID NO: 64420 - protein, 363 aa, Brevundimonas naejangsanensis
  misc_feature (1)..(363): tr|A0A494RQP2|A0A494RQP2_9CAUL S-adenosylmethionine:tRN A ribosyltransferase-isomerase OS=Brevundimonas naejang sanensis OX=588932 GN=queA PE=3 SV=1
MRTSDFDFDLPEACIALRPADPRDSARLLVVKDGDLQDRIIRDLPDFLQPGDALVFNDTRVIPARLSGVRHRTGPEGELLSVPVEATLHHRDAPDAWSAFMKPGKRLKIGDRVRFGREEDNACFLGQIDAEITAKGEDGLVTLRFDLAGPALDDVIREVGVMPLPPYIAAKRPEDDRDLKDYQTVFATYDGSVAAPTAGLHFTPALLDAIRARGVATHAVTLHVGAGTFLPVKADDTADHKMHSEWGEVSAETAAALNAVRAAGGRIVCVGTTSLRLLESATTEDGMVQPFHGDTAIFITPGYRFRACDVLMTNFHLPKSTLFMLVSAFAGLETMRAAYAHAIDSGYRFYSYGDGSLLFRKDA

SEQ ID NO: 64421 - protein, 364 aa, Brevundimonas naejangsanensis
  misc_feature (1)..(364): tr|A0A4P7BSU3|A0A4P7BSU3_9CAUL S-adenosylmethionine:tRN A ribosyltransferase-isomerase OS=Brevundimonas naejang sanensis OX=588932 GN=queA PE=3 SV=1
MRTSDFDFDLPEACIALRPADPRDSARLLVVKGGELQDRVIRDLPGFLQPGDALVFNDTRVIPARLSGVRHRTGPEGERLSVPVEATLHHRDAPDVWSAFMKPGKRLKVGDRVRFGREEDNACFLGQVDAEITAKGEDGLVTLRFDLAGPALDDAIREVGVMPLPPYIAAKRAEDDQDLKDYQTVFAEHDGSVAAPTAGLHFTPALLDAIRARGVTTHAVTLHVGAGTFLPVKADDTADHKMHSEWGEVSAETAAALNGVRAAGGRIVCVGTTSLRLLESATSEDGVVQPFHGDTAIFITPGYRFRACDVLMTNFHLPKSTLFMLVSAFAGLETMKAAYAHAIDSGYRFYSYGDGSLLFREDAQ

SEQ ID NO: 64422 - protein, 361 aa, Brevundimonas nasdae
  misc_feature (1)..(361): tr|A0A0B4CS03|A0A0B4CS03_9CAUL S-adenosylmethionine:tRN A ribosyltransferase-isomerase OS=Brevundimonas nasdae OX=172043 GN=queA PE=3 SV=1
MKTADFNFDLPEDRIALRPADPRDSARLLVVKGGALEDRIIRDLPDFLQPGDALVFNDTRVIPARLSGVRQRIGPEGETLTVEVEATLHHRDAPDVWSAFMKPGKRIKPGDRVRFGNASNAACDLGRLDATVTAKGEDGLITLTFDLAGPALDDAIREVGVMPLPPYIAAKRPEDDRDRSDYQTVFAEHDGSVAAPTAGLHFTPALLDAIRAKGVSTHAVTLHVGAGTFLPVKADDLADHRMHSEWGEVSPETAAALNAVHAKGGRIVCVGTTSLRLLESATAEDGEIKPFHGDTAIFITPGYRFRAVDVLMTNFHLPKSTLFMLVSAFAGTATMKAAYAHAVADGYRFYSYGDGSLLFRD

SEQ ID NO: 64423 - protein, 368 aa, Brevundimonas sp.
  misc_feature (1)..(368): tr|A0A4Y9RFY2|A0A4Y9RFY2_9CAUL S-adenosylmethionine:tRN A ribosyltransferase-isomerase OS=Brevundimonas sp. S30 B OX=2561925 GN=queA PE=3 SV=1
MKTSDFDFDLPEDRIALRPVEPRDAARLLVVRDGGLEDRIVRDLPDFLKPGDALVFNDTRVIPARLSGVRQRLGAEGETLTVEVEATLHHRDAPDVWSAFMKPGKRIKAGDRIRFGVVEDGACALGRLDATVEAKGEDGLVALRFDLAGPALDDAIRDLGVMPLPPYIAAKRPEDDRDRSDYQTVFAEHDGSVAAPTAGLHFTPALLEALRARGVSTHAVTLHVGAGTFLPVKADDTADHKMHSEWGEVSQETAAALNAVRAAGGRIVCVGTTSLRLLESATREDGVVQPFHGDTAIFITPGYRFRAVDVLMTNFHLPKSTLFMLVSAFAGLETMRAAYAHAIDKSYRFYSYGDGSLLFRQDAKGHDL

SEQ ID NO: 64424 - protein, 362 aa, Brevundimonas sp.
  misc_feature (1)..(362): tr|A0A0Q7TP17|A0A0Q7TP17_9CAUL S-adenosylmethionine:tRN A ribosyltransferase-isomerase OS=Brevundimonas sp. Roo t1423 OX=1736462 GN=queA PE=3 SV=1
MKTADFDFDLPDDRIALRPAEPRDSARLLIVKDDALEDRIIRDLPGFLEPGDALVFNDTRVIPARLSGVRQRVGPESETLTVAVEATLHHRDAPDVWSAFMKPGKRIKAGDRIRFGAHGDGACELGRLDATVVDKGEDGLVTLRFDLAGPMLDEAIRAVGVMPLPPYIAAKRAEDDRDRSDYQTMFAQLDGSVAAPTAGLHFTPALLAAIRARGVSTHALTLHVGAGTFLPVKADDTADHRMHSEWGEVSAGTAAALNAVRAAGGRIVCVGTTSLRLLESATTEDGEVRPFHGDTAIFITPGYRFRAADVLMTNFHLPKSTLFMLVSAFAGLETMKAAYAHAVQDGYRFYSYGDGSLLFRAR

SEQ ID NO: 64425 - protein, 351 aa, Brevundimonas subvibrioides
  misc_feature (1)..(351): tr|A0A258FLF0|A0A258FLF0_9CAUL S-adenosylmethionine:tRN A ribosyltransferase-isomerase OS=Brevundimonas subvibr ioides OX=74313 GN=queA PE=3 SV=1
MKTADFDFDLPEDRIALRPAEPRDSARLLVVRDGGLSDHAIRDLADFLRPGDALVFNDTRVIPARLSGVRERAGPDGETLTVPVEATLHHRDAPDVWSAFMKPGKRIKPGDRIVFQSLTATVEAKSDDGLIALRFDVSGPALDEAIRAVGVMPLPPYIAAKRPEDDRDRSDYQTVFAQYDGSVAAPTAGLHFTPALLNAIRARGVTTHAVTLHVGAGTFLPVKADDTADHRMHSEWGTVSDETAAALNAVRAAGGRIVCVGTTSLRLLESATTPDGVIQPFHGDTAIFITPGYAFRAANVLMTNFHLPKSTLFMLVSAFAGLDTMKAAYAHAVATGYRFYSYGDGSLLFRH

SEQ ID NO: 64426 - protein, 356 aa, Brevundimonas subvibrioides
  misc_feature (1)..(356): tr|D9QK80|D9QK80_BRESC S-adenosylmethionine:tRNA ribosy ltransferase-isomerase OS=Brevundimonas subvibrioides ( strain ATCC 15264 / DSM 4735 / LMG 14903 / NBRC 16000 / CB 81) OX=633149 GN=queA PE=3 SV=1
MKTADFDFDLPEDRIALRPAEPRDSARLLVVQDGALADHVIRDLPAFLRPGDALVFNDTRVIPARLSGVRQRPNPVVGSPEGETLTVPVEATLHHRDTPDTWSAFMKPGKRIRPDDRIVFDSLSATVIAKSDDGLVTLRFDVSGPALDDAIRAVGVMPLPPYIAAKRPEDDRDRLDYQTVFATHDGSVAAPTAGLHFTPALLDAIRAKGVTTHAVTLHVGAGTFLPVKADDTADHRMHSEWGTVSGETAAALNAVHANGGRIVCVGTTSLRLLESATTPDGVIQPFHGDTAIFITPGYAFRAADVLVTNFHLPKSTLFMLVSAFAGLDTMKTAYAHAVADGYRFYSYGDGSLLFRQ

SEQ ID NO: 64427 - protein, 370 aa, Brevundimonas vancanneytii
  misc_feature (1)..(370): tr|A0A4P1K5P1|A0A4P1K5P1_9CAUL S-adenosylmethionine:tRN A ribosyltransferase-isomerase OS=Brevundimonas vancann eytii OX=1325724 GN=queA PE=3 SV=1
MSIPRSMRTSDFDFDLPEACIALRPADPRDSARLLVVKGRDLQHQIIRDLPGFLQPGDALVFNDTRVIPARLSGVRHRTGPEGELLSVPVEATLHHRDAPDVWSAFMKPGKRLKVGDRVRFGREEDNACFLGQVDAEITAKGEDGLVTLRFDLAGPALDDAIREVGVMPLPPYIAAKRAEDDQDLKDYQTVFAEHDGSVAAPTAGLHFTPALLDAIRARGVTTHAVTLHVGAGTFLPVKADDTADHKMHSEWGEVSAETAAALNAVRAAGGRIVCVGTTSLRLLESATGEDGVVQPFHGDTAIFITPGYRFRACDVLMTNFHLPKSTLFMLVSAFAGLETMRAAYAHAIDSGYRFYSYGDGSLLFREDAQ

SEQ ID NO: 64428 - protein, 361 aa, Brevundimonas vesicularis
  misc_feature (1)..(361): tr|A0A1Z3UD74|A0A1Z3UD74_BREVE S-adenosylmethionine:tRN A ribosyltransferase-isomerase OS=Brevundimonas vesicul aris OX=41276 GN=queA PE=3 SV=1
MKTADFDFDLPEDRIALRPADPRDSARLLVVKGGALEDRIVRDLPDFLQPGDALVFNDTRVIPARLSGVRQRIGAEGETLTVEVEATLHHRDAPDVWSAFMKPGKRIKPGDRIRFGNASDAACDLGRLDATVTAKGEDGLITLTFDLAGPALDDAIRDVGVMPLPPYIAAKRPEDDRDRSDYQTVFAEHDGSVAAPTAGLHFTPALLDAIRAKGVSTHAVTLHVGAGTFLPVKADDPADHKMHSEWGEVSPETAAALNAVHAKGGRVVCVGTTSLRLLESATSEDGEIKPFHGDTAIFITPGYRFRAVDVLMTNFHLPKSTLFMLVSAFAGTATMKAAYAHAVADGYRFYSYGDGSLLFRD

SEQ ID NO: 64429 - protein, 361 aa, Brevundimonas vesicularis
  misc_feature (1)..(361): tr|A0A2X1B4L1|A0A2X1B4L1_BREVE S-adenosylmethionine:tRN A ribosyltransferase-isomerase OS=Brevundimonas vesicul aris OX=41276 GN=queA PE=3 SV=1
MKTADFDFDLPEDRIALRPADPRDSARLLVVKGGALEDRVIRDLPDFLQPGDALVFNDTRVIPARLSGVRQRIGAEGETLTVEVEATLHHRDAPDVWSAFMKPGKRIKPGDRVRFGNASDAACDLGRLDATVTAKGEDGLITLTFDLAGPALDDAIRDVGVMPLPPYIAAKRPEDDRDRSDYQTVFAEHDGSVAAPTAGLHFTPALLDAIRAKGVSTHAVTLHVGAGTFLPVKADDLADHKMHSEWGEVSPETAAALNAVHAKGGRIVCVGTTSLRLLESATAEGGEIKPFHGDTAIFITPGYRFRAVDVLMTNFHLPKSTLFMLVSAFAGTATMKAAYAHAVADGYRFYSYGDGSLLFRD

SEQ ID NO: 64430 - protein, 368 aa, Brevundimonas viscosa
  misc_feature (1)..(368): tr|A0A1I6S190|A0A1I6S190_9CAUL S-adenosylmethionine:tRN A ribosyltransferase-isomerase OS=Brevundimonas viscosa OX=871741 GN=queA PE=3 SV=1
MKTADFDFDLPEDRIALRPVEPRDSARLLVVRPGGGLEDRIVRDLPDFLRPGDALVFNDTRVIPARLSGVRQRPGPEGEVLTVAVEANLHHRDAPDVWSAFMKPGKRIKVGDRIRFGAPSSGVLGDAACELGRLDATVEAKGEDGLVTLRFDLSGPFLDEAIRDVGVMPLPPYIAAKRPEDERDRTDYQTVFAEHDGSVAAPTAGLHFTPALLEAIRRRGVSTHAVTLHVGAGTFLPVKAEDVAGHRMHSEWGEVSAETAAALNAVRAAGGRVVCVGTTSLRLLESATGEDGVVRPFHGDTAIFITPGYRFRAVDVLMTNFHLPKSTLFMLVSAFAGLETMKAAYAHAVQTGYRFYSYGDGSLLFRAA

SEQ ID NO: 64431 - protein, 99 aa, Brochothrix campestris
  misc_feature (1)..(99): tr|W7CXK0|W7CXK0_9LIST S-adenosylmethionine:tRNA ribosy ltransferase-isomerase OS=Brochothrix campestris FSL F6 -1037 OX=1265861 GN=BCAMP_02415 PE=3 SV=1
MVKKIIAVGTTSMRTLESITQKFDGEIKADDGWTDIFISPGFEFKACDALITNFHLPKSTLVMLVSAFSSREHIINAYNHAVEEKYRFFSFGDAMFLQK

SEQ ID NO: 64432 - protein, 263 aa, Brochothrix campestris
  misc_feature (1)..(263): tr|W7D8C9|W7D8C9_9LIST S-adenosylmethionine:tRNA ribosy ltransferase-isomerase OS=Brochothrix campestris FSL F6 -1037 OX=1265861 GN=queA PE=3 SV=1
MKNVKVEDFNYELPEELIAQTPLLDRTASRLLMVNRATGAYRDGHFPDVLDYFEAGDALVLNNTRVLPARLHGIKTESGGHVEVLLLKQLLDDEWETLVKPAKRVRVGTKMSFGEGQLTAVCTEELEHGGRKLKFSYEGIFYEVLEALGEMPLPPYIKEQLADQERYQTVYAEENGSAAAPTAGLHFTTELLDAIRAKGVHVVFITLHVGLGTFRPISVEDTTNHKMHSEFYRMTEDVAATLNEVKANGKKNHRCRYYKYANT

SEQ ID NO: 64433 - protein, 343 aa, Brochothrix thermosphacta
  misc_feature (1)..(343): tr|A0A1D2KIQ1|A0A1D2KIQ1_BROTH S-adenosylmethionine:tRN A ribosyltransferase-isomerase OS=Brochothrix thermosph acta OX=2756 GN=queA PE=3 SV=1
MRVEDFNYELPEELIAQTPLLDRTSSRLLMMNRETGAYRDGVFPDMLEYLSEGDALVLNNTRVLPARLHGIKAETGGHTEVLLLKQLEGDEWETLVKPAKRIRVGTVLSFGDGRLTAVCTGELEHGGRLMTFKYEGIFYEVLEALGEMPLPPYIKEQLEDQERYQTVYAEENGSAAAPTAGLHFTNELLEAIRAKGVHIVFITLHVGLGTFRPISVEDTTNHKMHSEFYRMTEEAAATLNDVRNNGKKIIAVGTTSMRTLESITQKFDGAIKADDGWTDIFISPGFEFKACDALITNFHLPKSTLVMLVSAFSSRDNVINAYEHAVAEKYRFFSFGDAMFLQK

SEQ ID NO: 64434 - protein, 356 aa, Brockia lithotrophica
  misc_feature (1)..(356): tr|A0A2T5G774|A0A2T5G774_9THEO S-adenosylmethionine:tRN A ribosyltransferase-isomerase OS=Brockia lithotrophica OX=933949 GN=queA PE=3 SV=1
MRLSDFDYELPEDLIAQEPLPERDGSRLMVLHRVEGRWEHRRFRDLPDFLRPGDVLVFNDSRVIPARLYGRKAGTGARVELLLVEPRGDPWRWKVLARPARRLRPGTVVEIFPAPSEISERTSPALRATVEDVLDGGLRGVRFDLGAEEEGDFFQLLERVGRVPLPPYVRRELRDPERYQTVYARERGSVAAPTAGLHFTPELLAALADRGVTFAYVTLHVGLGTFRPVTEEDPTRHRMHEEPYRLPPETAEVLDAARREGQRILAVGTTSLRVLETVYRRHGRFVPEEGVTDLFLYPGVPVRSVQGLLTNFHLPRSTLLMLVAAFAGYELTIAAYRAAVQERYRFFSFGDAMFIL

SEQ ID NO: 64435 - protein, 363 aa, Brucella abortus
  misc_feature (1)..(363): tr|D7H3N2|D7H3N2_BRUAO S-adenosylmethionine:tRNA ribosy ltransferase-isomerase OS=Brucella abortus bv. 5 str. B 3196 OX=520453 GN=queA PE=3 SV=1
MRVDLFDFDLPEERIALRPVEPRDHAKLLHVRPGEPFEDRHVYDLPDLLQPGDALVFNDTKVIPAQLEGMRERTGNISQVSATLHMRVGPDRWKAFLRPAKRVKEGDRIRFGHSGTSCFLGTLDATVAEKGDSGEALLVFDLSGAVLDEAIAAVGHIPLPPYIASKRPEDERDRKDYQTVYAREEGAVAAPTAGLHFTPDLLEKIKARGIEEHFVTLHVGAGTFLPVKADDTGDHKMHAEIGHVSQRTASALNAVHERGGRIICVGTTSLRLIESATGEDGVVRPWSGATDIFITPGYRFRAVDLLMTNFHLPRSTLFMLVSAFSGLDTMHAAYNYAIADGYRFYSYGDASLLERIDHDRHSA

SEQ ID NO: 64436 - protein, 363 aa, Brucella abortus; identical to SEQ ID NO: 64435
  misc_feature (1)..(363): sp|B2S5U5|QUEA_BRUA1 S-adenosylmethionine:tRNA ribosylt ransferase-isomerase OS=Brucella abortus (strain S19) O X=430066 GN=queA PE=3 SV=1

SEQ ID NO: 64437 - protein, 363 aa, Brucella canis; identical to SEQ ID NO: 64435
  misc_feature (1)..(363): sp|A9M5A4|QUEA_BRUC2 S-adenosylmethionine:tRNA ribosylt ransferase-isomerase OS=Brucella canis (strain ATCC 233 65 / NCTC 10854) OX=483179 GN=queA PE=3 SV=1

SEQ ID NO: 64438 - protein, 363 aa, Brucella ceti
  misc_feature (1)..(363): tr|C0G6I3|C0G6I3_9RHIZ S-adenosylmethionine:tRNA ribosy ltransferase-isomerase OS=Brucella ceti str. Cudo OX=59 5497 GN=queA PE=3 SV=1
MRVDLFDFDLPEERITLRPVEPRDHAKLLHVRPGEPFEDRHVYDLPDLLQPGDALVFNDTKVIPAQLEGMRERTGNISQVSATLHMRVGPDRWKAFLRPAKRVKEGDRIRFGHSGTSCFLGTLDATVAEKGDSGEALLVFDLSGAVLDEAIAAVGHIPLPPYIASKRPEDERDRKDYQTVYAREEGAVAAPTAGLHFTPDLLEKIKARGIEEHFVTLHVGAGTFLPVKADDTGDHKMHAEIGHVSQRTASALNAVHERGGRIICVGTTSLRLIESATGEDGVVRPWSGATDIFITPGYRFRAVDLLMTNFHLPRSTLFMLVSAFSGLDTMHAAYNYAIADGYRFYSYGDASLLERIDHDRHSA

SEQ ID NO: 64439 - protein, 363 aa, Brucella melitensis; identical to SEQ ID NO: 64435
  misc_feature (1)..(363): sp|P65948|QUEA_BRUME S-adenosylmethionine:tRNA ribosylt ransferase-isomerase OS=Brucella melitensis biotype 1 ( strain 16M / ATCC 23456 / NCTC 10094) OX=224914 GN=queA PE=3 SV=1

SEQ ID NO: 64440 - protein, 363 aa, Brucella melitensis
  misc_feature (1)..(363): sp|C0RJ65|QUEA_BRUMB S-adenosylmethionine:tRNA ribosylt ransferase-isomerase OS=Brucella melitensis biotype 2 ( strain ATCC 23457) OX=546272 GN=queA PE=3 SV=1
MRVDLFDFDLPEERIALRPVEPRDHAKLLHVRPGEPFEDRHVYDLFDLLQPGDALVFNDTKVIPAQLEGMRERTGNISQVSATLHMRVGPDRWKAFLRPAKRVKEGDRIRFGHSGTSCFLGTLDATVAEKGDSGEALLVFDLSGAVLDEAIAAVGHIPLPPYIASKRPEDERDRKDYQTVYAREEGAVAAPTAGLHFTPDLLEKIKARGIEEHFVTLHVGAGTFLPVKADDTGDHKMHAEIGHVSQRTASALNAVHERGGRIICVGTTSLRLIESATGEDGVVRPWSGATDIFITPGYRFRAVDLLMTNFHLPRSTLFMLVSAFSGLDTMHAAYNYAIADGYRFYSYGDASLLERIDHDRHSA

SEQ ID NO: 64441 - protein, 363 aa, Brucella microti; identical to SEQ ID NO: 64435
  misc_feature (1)..(363): tr|C7LC45|C7LC45_BRUMC S-adenosylmethionine:tRNA ribosy ltransferase-isomerase OS=Brucella microti (strain CCM 4915) OX=568815 GN=queA PE=3 SV=1

SEQ ID NO: 64442 - protein, 363 aa, Brucella neotomae; identical to SEQ ID NO: 64435
  misc_feature (1)..(363): tr|A0A381B7K0|A0A381B7K0_BRUNE S-adenosylmethionine:tRN A ribosyltransferase-isomerase OS=Brucella neotomae OX= 29460 GN=queA PE=3 SV=1

SEQ ID NO: 64443 - protein, 363 aa, Brucella ovis; identical to SEQ ID NO: 64435
  misc_feature (1)..(363): tr|N8NCF1|N8NCF1_BRUOV S-adenosylmethionine:tRNA ribosy ltransferase-isomerase OS=Brucella ovis IntaBari-2002-8 2-58 OX=1293916 GN=queA PE=3 SV=1

SEQ ID NO: 64444 - protein, 363 aa, Brucella ovis; identical to SEQ ID NO: 64435
  misc_feature (1)..(363): sp|A5VQL9|QUEA_BRUO2 S-adenosylmethionine:tRNA ribosylt ransferase-isomerase OS=Brucella ovis (strain ATCC 2584 0 / 63/290 / NCTC 10512) OX=444178 GN=queA PE=3 SV=1

SEQ ID NO: 64445 - protein, 363 aa, Brucella pinnipedialis; identical to SEQ ID NO: 64435
  misc_feature (1)..(363): tr|A0A0E1X4W8|A0A0E1X4W8_9RHIZ S-adenosylmethionine:tRN A ribosyltransferase-isomerase OS=Brucella pinnipediali s M292/94/1 OX=520462 GN=queA PE=3 SV=1

SEQ ID NO: 64446 - protein, 363 aa, Brucella sp.; identical to SEQ ID NO: 64435
  misc_feature (1)..(363): tr|D6LPW5|D6LPW5_9RHIZ S-adenosylmethionine:tRNA ribosy ltransferase-isomerase OS=Brucella sp. NVSL 07-0026 OX= 520448 GN=queA PE=3 SV=1

SEQ ID NO: 64447 - protein, 349 aa, Brucella sp.
  misc_feature (1)..(349): tr|A0A1P8S1I7|A0A1P8S1I7_9RHIZ S-adenosylmethionine:tRN A ribosyltransferase-isomerase OS=Brucella sp. 09RB8910 OX=1844051 GN=BKD02_01755 PE=3 SV=1
MNPNFFDFSMENRSLPINPHWIDKDDDRKNCKLITIDKKSNSIEKSSFSKIMDYIHPGDVIVLNNSRILANAMILKNETHVVKFILHGFTPDGIVITPFFADICCNSSYTLCGFPHVSIEIKEKNSDSSWNASISDPQALVKYLSSNGERFDEYVSSRYFYTNRNAYEAVFATEYGSLDIPSAGIHFTNDIIDEIKNKGAIVKFITLHVSTSEMALNRIVNTDNIEDFKINPEYYDVPQETADCINEAVKQGSRIFAIGTTVTRALESAFDHSSNKVVESKGWTTLYINPSYKIRVVDCLLTNLHQPKSSHMVLTAQFAGADLLMQAYKSKEMDSMNFDLFGDCMLVLK

SEQ ID NO: 64448 - protein, 363 aa, Brucella suis; identical to SEQ ID NO: 64435
  misc_feature (1)..(363): tr|A0A4Z0EYV8|A0A4Z0EYV8_BRUSS S-adenosylmethionine:tRN A ribosyltransferase-isomerase OS=Brucella suis OX=2946 1 GN=queA PE=3 SV=1

SEQ ID NO: 64449 - protein, 363 aa, Brucella suis; identical to SEQ ID NO: 64435
  misc_feature (1)..(363): sp|B0CGP2|QUEA_BRUSI S-adenosylmethionine:tRNA ribosylt ransferase-isomerase OS=Brucella suis (strain ATCC 2344 5 / NCTC 10510) OX=470137 GN=queA PE=3 SV=1

SEQ ID NO: 64450 - protein, 356 aa, Brucellaceae bacterium
  misc_feature (1)..(356): tr|A0A3P1UQN3|A0A3P1UQN3_9RHIZ S-adenosylmethionine:tRN A ribosyltransferase-isomerase OS=Brucellaceae bacteriu m VT-16-1752 OX=2487907 GN=queA PE=3 SV=1
MRVDLFDFDLPEERIALRPAEPRDHARLLRVVPGQPFEDRHVYDLPDLLQPGDALVFNDTKVIPAQLEGMRERDGNISQVSATLHMRMGPDRWAAFLRPAKRVKEGDRIRFGHSGSSCFLGTLDATVAEKGEAGEALLVFDLSSAMLDEAIAAVGHIPLPPYIASKRAEDDRDRSDYQTVYAREEGAVAAPTAGLHFTPDLLEKIKAKGIEEHFVTLHVGAGTFLPVKADDTTDHKMHSEIGYVSQKTADALNAVHERGGRVVCVGTTSLRLIESAAGEDGLIRPWSGPTDIFITPGYKFRAVDMLMTNFHLPRSTLFMLVSAFSGLDTMRAAYERAIETGYRFYSYGDGSLLERA

SEQ ID NO: 64451 - protein, 349 aa, Brumimicrobium aurantiacum
  misc_feature (1)..(349): tr|A0A3E1EVI5|A0A3E1EVI5_9FLAO S-adenosylmethionine:tRN A ribosyltransferase-isomerase OS=Brumimicrobium aurant iacum OX=1737063 GN=queA PE=3 SV=1
MKLSEFDFELPEELIAKHPVENRDESRMMVIHRETGEIEHRLFKDVINYFDEGDVMVRNNTKVFPARLYGNKEKTGAKIEVFLLRELNRESLLWDVLVDPARKIRIGNKLYFGEDESLVAEVIDNTTSRGRTLRFLYDGTYEEFKNKIDELGETPLPKYIDREVEPEDAERFQTIYAKEEGAVAAPTAGMHFSKQLLKRLELKGISFSEITLHVGLGTFRPVEVEDLTKHKMDSEQAEITQEAADIVNKAKKNKKRVCAVGTTSMRTIETSVSTDGMLKPYEGWTNKFIFPPYDFSIADSMITNFHTPSSTLLMMVSAFLGHELMLKAYQEAIKEKYRFYSYGDVMLIL

SEQ ID NO: 64452 - protein, 349 aa, Brumimicrobium glaciale
  misc_feature (1)..(349): tr|A0A4Q4KTP3|A0A4Q4KTP3_9FLAO S-adenosylmethionine:tRN A ribosyltransferase-isomerase OS=Brumimicrobium glacia le OX=200475 GN=queA PE=3 SV=1
MKLSEFDFELPEELIAKHPVENRDESRMMVIHRETGEIEHKLFKDVINYFGEGDVMVRNNTKVFPARLYGNKEKTGAKIEVFLLRELNRESLLWDVLVDPARKIRIGNKLYFGDDESLVAEVIDNTTSRGRTLRFLYDGSYEEFKNKIDELGETPLPKYIDREVEPEDAERFQTIYASEEGAVAAPTAGMHFSKQLLKRLELKGIEFAEITLHVGLGTFRAVEVEDLTKHKMDSEQAEVTQENADIVNKAKEKKKRVCAVGTTSMRTIETSVSTDGMLKPYEGWTNKFIFPPYDFSIADSMITNFHMPSSTLLMMVSAFLGHELMLRAYQEAIKEKYRFYSYGDVMLII

SEQ ID NO: 64453 - protein, 349 aa, Brumimicrobium salinarum
  misc_feature (1)..(349): tr|A0A2I0R0Z5|A0A2I0R0Z5_9FLAO S-adenosylmethionine:tRN A ribosyltransferase-isomerase OS=Brumimicrobium salina rum OX=2058658 GN=queA PE=3 SV=1
MKLSEFDFELPEELIAKHPMENRDESRLMVVNRETGEIKHEQFKDIINYFDEGDVMVRNNTKVFPARLYGNKEKTGAKIEVFLLRELNRESLLWDVLVDPARKIRIGNKLYFGEDESLVAEVIDNTTSRGRTLRFLFEGSYDEFKDKIEELGETPLPKYIDREVEPDDAERYQTIFAKEEGAVAAPTAGMHFSKQLLKRLELKGIDFAEITLHVGLGTFREVEVEDLTKHKMDSEQAFITAKAADKVNKAKRNKKRVCAVGTTSMRTIETSVSTDGMLKPYEGWTNKFIFPPYDFSIADSMITNFHTPSSTLLMMVSAFLGHELMLKAYKEAIKEKYRFFSYGDAMLII

SEQ ID NO: 64454 - protein, 349 aa, Brumimicrobium sp.
  misc_feature (1)..(349): tr|A0A2U2XB80|A0A2U2XB80_9FLAO S-adenosylmethionine:tRN A ribosyltransferase-isomerase OS=Brumimicrobium sp. C3 05 OX=2100725 GN=queA PE=3 SV=1
MKLSEFDFELPEELIAKHPAPNRDESRMMVINRETGEIEHKLFKDVINYFDEGDVMVRNNTKVFPARLYGNKEKTGAKIEVFLLRELNRESLLWDVLVDPARKIRIGNKLYFGDDESLVAEVIDNTTSRGRTLRFLFDGSYEEFKNKIDELGETPLLKYIDREVEPEDAERFQTIYAKVEGAVAAPTAGMHFSKQLLKRLELKGVEFAEITLHIGLGTFRPVEVEDLTKHKMDSEQAEITEKNANIVNKAKKNRKRVCAVGTTSMRTIETSVSTDGMLKPYEGWTNKFIFPPYDFSIADSMITNFHEPSSTLLMMVSAFLGHELTMKAYQEAIKEKYRFYSYGDAMLII

SEQ ID NO: 64455 - protein, 355 aa, Bryobacterales bacterium
  misc_feature (1)..(355): tr|A0A359LTW2|A0A359LTW2_9BACT S-adenosylmethionine:tRN A ribosyltransferase-isomerase OS=Bryobacterales bacter ium OX=2026791 GN=queA PE=3 SV=1
MDLAEFDYHLPPERIAQQPLADRAASRMLVLHRREQRWEDRLFRDLRAYLGPGDCLVLNDSKVFPSRLFGHRTGVRAVPIGKNNPKRHEYLSGQVEVFLLRPQSDDARTWTALVRPGRKLRSGERIRFDGGVEAEILEHREFGERLVRFEVEGDLYAWLDTAGHTPLPPYIDRPDTAQDRDRYQTVYAKQAGSAAAPTAGLHFTPEVLEACRGAGSDIACVTLHVGLGTFQPLHTEIVEKVELHAESYRITEENAAKLRAARRLVCVGTTSVRTIETAARGAGFSASSGDTSLYIYPGFAYRAVGAMLTNFHLPKSSLILLVAAFAGREFTLAAYRHAVAAEYRFYSYGDCMLIV

SEQ ID NO: 64456 - protein, 339 aa, Bryobacterales bacterium
  misc_feature (1)..(339): tr|A0A350ULP1|A0A350ULP1_9BACT S-adenosylmethionine:tRN A ribosyltransferase-isomerase OS=Bryobacterales bacter ium OX=2026791 GN=queA PE=3 SV=1
MRLSEFDYHLPDELIAQTPLLDRASSRMLVLHKENGRIEDRHFRDLPEYLGPGDCLALNNTRVFPARLFGRKPGYDRQVEIFLLKPVSPDRMLWSALARPGRHLHAGSRVDFTEQLSCEILESGMRGERVIQFHCAGDFDAELEAAGHVPLPPYIHRPDESGDRERYQTVYAEKRGSVAAPTAGLHFTPEVLEACEERGAGVAKVTLHVGLATFQPLANDEVAANELHEETYEICGANATRLREARRIVAVGTTSVRTIESAALNGGLEPQTGATRLFIYPGFEFKATGAMLTNFHLPKSSLLLLVSAFAGPEYVLNAYRYAVDQRYRFFSYGDCMLIV

SEQ ID NO: 64457 - protein, 375 aa, Bryocella elongata
  misc_feature (1)..(375): tr|A0A1H5W6B7|A0A1H5W6B7_9BACT S-adenosylmethionine:tRN A ribosyltransferase-isomerase OS=Bryocella elongata OX =863522 GN=queA PE=3 SV=1
MLVSDFHFDLPEELIAQQPPAVRGSSRMLAVDRATGALADRQFTDLPSLLQRGDLLVMNDSRVLPARLFATRAGLTTQHNSPAPSGHIEVLLVEHLSNAEGHNEWRALVKPAKKVQPAETLRFDETLSAQVIAAGEFGERTLRFNLAGTAFYEGLDRIGHLPLPPYIHRDKAAPNTSEDRERYQTVFARERGSAAAPTAGLHFTPEVLEALRARGVELATITLHVGLGTFQPVRVDRTEDIRLHAEPYTLSEATACAINRATREGRRIVAVGTTTTRTLEHIARITPAGENVAAHSGSTSLFLSPGLNDRFLLVAGLLTNFHLPQSTLLMLVSAFLGDAHSEESDWGRQAALRAYAHAVAERYRFFSYGDCMLIT

SEQ ID NO: 64458 - protein, 357 aa, Buchnera aphidicola
  misc_feature (1)..(357): sp|P57232|QUEA_BUCAI S-adenosylmethionine:tRNA ribosylt ransferase-isomerase OS=Buchnera aphidicola subsp. Acyr thosiphon pisum (strain APS) OX=107806 GN=queA PE=3 SV= 1
MQLSDFSFDLPKSLISFHPYFIRSTCRLMVMYGHTGMIFHKRFFNIIDEINSGDLIILNNTQVIPARFFGKKESGGKVEVLVEKILGINNILASIKNSKNINIGSKIFFGYKDKIKGSVVDCKNSFFEIFFHDNIDSAIDIINNIGEIPLPPYIKRFRNKLDVDLYQTVYKKKTGSIAAPTAGLHFDLPLLEALHNKGVDIDYITLHIGSGTFQPIRRVQIEEHIMHSESVEVSSSVIQKIKSCKKKGGRIIAVGTSTLRALESAYHSSEWSDSQDFISDTNIFIYPGYKHNIVDALITNFHFPESTLIMLVCSFLGYKNTMNAYNTAIVNKYSFFSYGDAMYITHNKLAPYENFII

SEQ ID NO: 64459 - protein, 357 aa, Buchnera aphidicola
  misc_feature (1)..(357): sp|B8D737|QUEA_BUCAT S-adenosylmethionine:tRNA ribosylt ransferase-isomerase OS=Buchnera aphidicola subsp. Acyr thosiphon pisum (strain Tuc7) OX=561501 GN=queA PE=3 SV =1
MQLSDFSFDLPKSLISFHPYFIRSTCRLMVMYGHTGMIFHKRFFNIIDEINSGDLIILNNTQVIPARFFGKKESGGKVEVLVEKILGINNILASIKNSKNINIGSKIFFGYKDKIKGSVVDCKNSFFEIFFHDNIDSAIDIINNIGEIPLPPYIKRFRNKLDVDLYQTVYKKKTGSIAAPTAGLHFDLPLLEALHNKGVDIDYITLHIGSGTFQPIRRVQIEEHIMHSESVEVSSSVIQKIKSCKKKGGRIIAVGTSTLRALESAYHSSEWSDSKDFISDTNIFIYPGYKHNIVDALITNFHFPESTLIMLVCSFLGYKNTMNAYNTAIVNKYSFFSYGDAMYITHNKLAPYENFII

SEQ ID NO: 64460 - protein, 159 aa, Budvicia aquatica
  misc_feature (1)..(159): tr|A0A484ZXF6|A0A484ZXF6_9GAMM S-adenosylmethionine:tRN A ribosyltransferase-isomerase OS=Budvicia aquatica OX= 82979 GN=queA_1 PE=3 SV=1
MAFVTLHVGAGTFQPVRVDDIKQHIMHSEYVEVPQDVVDAVLACKARGNKVIAVGTTSVRSLESAAQATQNGLLEPFFGDTCIFIYPGYQFKIVDTLITNFHLPESTLIMLVSAFAGYTNTLRAYHRAVEKQYRFFSYGDAMFITRNPEAVNEIPNREL

SEQ ID NO: 64461 - protein, 358 aa, Budvicia aquatica
  misc_feature (1)..(358): tr|A0A2C6DMS8|A0A2C6DMS8_9GAMM S-adenosylmethionine:tRN A ribosyltransferase-isomerase OS=Budvicia aquatica OX= 82979 GN=queA PE=3 SV=1
MRVTDFSFELPESLIARYPQAERSACRLLSLDGMSGSLSDGVFTDVLDKLEPGDLLVFNNTRVIPARLFGCKASGGKVEVLVERVLDDRRVLAHVRASKSPKPGTQLLLGDDESIPATMVARHDALFELHFDDGRDVLTILNAAGHMPLPPYIDRPDEESDRELYQTVYSERPGAVAAPTAGLHFDQPLLDALKAKGIEMAFVTLHVGAGTFQPVRVDDIKQHIMHSEYVEVPQDVVDAVLACKARGNKVIAVGTTSVRSLESAAQATQNGLLEPFFGDTCIFIYPGYQFKIVDTLITNFHLPESTLIMLVSAFAGYTNTLRAYHRAVEKQYRFFSYGDAMFITRNPEAVNEIPNREL

SEQ ID NO: 64462 - protein, 347 aa, Bulleidia extructa
  misc_feature (1)..(347): tr|D2MP02|D2MP02_9FIRM S-adenosylmethionine:tRNA ribosy ltransferase-isomerase OS=Bulleidia extructa W1219 OX=6 79192 GN=queA PE=3 SV=1
MKINWKTSDFDYNLPHELIAQSPLADRSTSRMMWIHKKSQKYEDKHFYDIVDILKPGDVLVRNNTRVIPARLFGIKEETGAHVELLLLKQKEHDVWECLAGNAKVVKVGSIVSFGDGQLKAQCLSIGDKGLREMKMLYEGIFTEILDQLGQVPLPPYIKKKLDDSERYQTVYAKIDGSAAAPTAGLHFTKEVDQQLLAKGITITEVTLHVGLGTFRPMDVENVHDHVMHSEVYEMSQETADILNQAKKLGRRIVAIGTTSVRTLESVWNRFGQFQECRGETTLFIYPGYQWHTCDVMLTNFHLPKSTLLMMISSFMGYELTQEVYHHAVNEKYRFFSFGDCMLIDHD

SEQ ID NO: 64463 - protein, 355 aa, Burkholderia ambifaria
  misc_feature (1)..(355): tr|A0A2S9NN86|A0A2S9NN86_9BURK S-adenosylmethionine:tRN A ribosyltransferase-isomerase OS=Burkholderia ambifari a OX=152480 GN=queA PE=3 SV=1
MFTLSDFDFNLPPELIAQTALPERTASRLLEVDHTVEPARLVDRNFAELPSCIAPGDLLVFNDTRVLKARFFGQKASGGKIEVLIERVTGTHTALAQIRASKSPGAGTTLRLADAFDVTVGERVEPFFTLHFPQPCLTLIEQHGRLPLPPYIEHDADANDETRYQTVYASNPGAVAAPTAGLHFDLPLLEKLDAMGVERATLTLHVGAGTFQPVRVENIAEHRMHSEWYDLPQSLVDKIAATRARGGNVIAVGTTSMRALEAAARSADEAGRPLAATQAETDIFITPGYRFRVVDRLVTNFHLPKSTLLMLVSAFAGVETIRAAYRHAIDQRYRFFSYGDAMLLTRRDTPEAPQA

SEQ ID NO: 64464 - protein, 355 aa, Burkholderia ambifaria
  misc_feature (1)..(355): sp|B1YTH0|QUEA_BURA4 S-adenosylmethionine:tRNA ribosylt ransferase-isomerase OS=Burkholderia ambifaria (strain MC40-6) OX=398577 GN=queA PE=3 SV=1
MFTLSDFDFNLPPELIAQTALPERTASRLLEVDHTVEPARLVDRNFVELPSCIAPGDLLVFNDTRVLKARFFGQKASGGKIEVLIERVTGTHTALAQIRASKSPGAGTTLRLADAFDVTVGERVEPFFTLHFPQPCLTLIEQHGRLPLPPYIEHDADASDETRYQTVYASNPGAVAAPTAGLHFDLPLLERLDAMGVERATLTLHVGAGTFQPVRVENIAEHRMHSEWYDLPQSLVDKIAATRARGGNVIAVGTTSMRALEAAARSADEAGRPLAATQAETDIFITPGYRFRVVDRLVTNFHLPKSTLLMLVSAFAGVETIRAAYRHAIDQRYRFFSYGDAMLLTRRDTPEAPRA

SEQ ID NO: 64465 - protein, 355 aa, Burkholderia anthina
  misc_feature (1)..(355): tr|A0A119RI62|A0A119RI62_9BURK S-adenosylmethionine:tRN A ribosyltransferase-isomerase OS=Burkholderia anthina OX=179879 GN=queA PE=3 SV=1
MFTLSDFDFNLPPELIAQTALPDRTASRLLEVDGTVEPARLVDRHFTELPACIAPGDLLVFNDTKVLKARFFGQKASGGRIEVLIERVTGTHTALAQIRASKSPGAGTTLRLADAFDVTVGERVEPFFTLHFPAPCLDLIEQYGRLPLPPYIEHDPDATDETRYQTVYASNPGAVAAPTAGLHFDQPLLEKLDAMGVERATLTLHVGAGTFQPVRVENIAEHKMHSEWYDLPQSLVDKIAATRARGGNVIAVGTTSMRALEAAARSADEAGRALAATQAETDIFITPGYRFRVVDRLVTNFHLPKSTLLMLVSAFAGVETIRAAYRHAIEERYRFFSYGDAMLLTRRDTPEAPGA

SEQ ID NO: 64466 - protein, 355 aa, Burkholderia catarinensis
  misc_feature (1)..(355): tr|A0A1J9PWW3|A0A1J9PWW3_9BURK S-adenosylmethionine:tRN A ribosyltransferase-isomerase OS=Burkholderia catarine nsis OX=1108140 GN=queA PE=3 SV=1
MFTLSDFDFNLPPELIAQTALPDRTASRLLEVDRTVEPARFVDRRFAELPSCIAPGDLLVFNDTKVLKARFFGQKASGGKIEVLIERVTGTHTALAQIRASKSPGAGTTLRLADAFDVTVGERVEPFFTLHFPEPCLVLIEQYGRLPLPPYIEHDPDATDETRYQTVYASNPGAVAAPTAGLHFDKPLLDKLDAMGVERATLTLHVGAGTFQPVRVDNIAEHKMHSEWYDLPQSLVDRIAATRARGGNVIAVGTTSMRALEAAARAADEAGRPLAATQAETDIFITPGYRFRVVDRLVTNFHLPKSTLLMLVSAFAGVETIRAAYRHAIDERYRFFSYGDAMLLTRRDTPEAPRA

SEQ ID NO: 64467 - protein, 355 aa, Burkholderia cenocepacia
  misc_feature (1)..(355): sp|B4EE24|QUEA_BURCJ S-adenosylmethionine:tRNA ribosylt ransferase-isomerase OS=Burkholderia cenocepacia (strai n ATCC BAA-245 / DSM 16553 / LMG 16656 / NCTC 13227 / J 2315 / CF5610) OX=216591 GN=queA PE=3 SV=1
MFTLSDFDFNLPPELIAQTALPDRTASRLLEVDRSVEPARLVDRHFAELPSCIAPGDLLVFNDTKVLKARFFGQKASGGKIEVLIERVTGTHTALAQIRASKSPGAGTTLRLADAFDVTVGERVEPFFTLHFPAPCLDLIEQYGRLPLPPYIEHDPDATDETRYQTVYASNPGAVAAPTAGLHFDQPLLEQLDALGVERATLTLHVGAGTFQPVRVDNIAEHKMHSEWYDLPQSLVDKIAATRARGGNVIAVGTTSMRALEAAARSADEAGRPLAATQAETDIFITPGYRFRVVDRLVTNFHLPKSTLLMLVSAFAGVETIRAAYRHAIEERYRFFSYGDAMLLTRRDTPEAPGA

SEQ ID NO: 64468 - protein, 355 aa, Burkholderia cenocepacia
  misc_feature (1)..(355): sp|B1JVY9|QUEA_BURCC S-adenosylmethionine:tRNA ribosylt ransferase-isomerase OS=Burkholderia cenocepacia (strai n MC0-3) OX=406425 GN=queA PE=3 SV=1
MFTLSDFDFNLPPELIAQTALPDRTASRLLEVDGSVAPARLVDRHFAELPSCIAPGDLLVFNDTKVLKARFFGQKASGGKIEVLIERVTGTHTALAQIRASKSPGAGTTLRLADAFDVTVGERVEPFFTLHFPAPCLDLIEQHGRLPLPPYIEHDADATDETRYQTVYASNPGAVAAPTAGLHFDQPLLEKLDAMGVERATLTLHVGAGTFQPVRVENIAEHKMHSEWYDLPQSLVDKIAATRARGGNVIAVGTTSMRALEAAARSADEAGRPLAATQAETDIFITPGYRFRVVDRLVTNFHLPKSTLLMLVSAFAGVETIRAAYRHAIEERYRFFSYGDAMLLTRRDTPEAPGA

SEQ ID NO: 64469 - protein, 355 aa, Burkholderia cepacia
  misc_feature (1)..(355): tr|A0A0U3LA53|A0A0U3LA53_BURCE S-adenosylmethionine:tRN A ribosyltransferase-isomerase OS=Burkholderia cepacia JBK9 OX=1395570 GN=queA PE=3 SV=1
MFTLSDFDFNLPPELIAQTALPDRTASRLLEVDRGVEPARLVDRHFTELPSCIAPGDLLVFNDTKVLKARFFGQKASGGKIEVLIERVTGTHTALAQIRASKSPGAGTTLRLADAFDVTVGERVEPFFTLHFPAPCLDLIEQFGRLPLPPYIEHDPDATDETRYQTVYASNPGAVAAPTAGLHFDQPLLDRLDAMGVERATLTLHVGAGTFQPVRVDNIAEHKMHSEWYDLPQSLVDRIAATRARGGNVIAVGTTSMRALEAAARSADEAGRPLAATQAETDIFITPGYRFRVVDRLVTNFHLPKSTLLMLVSAFAGVETIRAAYRHAIDERYRFFSYGDAMLLTRRDTPEAPHA

SEQ ID NO: 64470 - protein, 355 aa, Burkholderia cepacia
  misc_feature (1)..(355): tr|J7J4Q0|J7J4Q0_BURCE S-adenosylmethionine:tRNA ribosy ltransferase-isomerase OS=Burkholderia cepacia GG4 OX=1 009846 GN=queA PE=3 SV=1
MFTLSDFDFNLPPELIAQTALPDRTASRLLEVDRTVEPARLVDRRFAELPSCIAPGDLLVFNDTKVLKARFFGQKASGGKIEVLIERVTGTHTALAQIRASKSPGAGTTLRLADAFDVTVGERVEPFFTLHFPEPCLTLIEQHGRLPLPPYIEHDADANDETRYQTVYASNPGAVAAPTAGLHFDQPLLAQLDAMGVERATLTLHVGAGTFQPVRVENIAEHKMHSEWYDLPQSLVDKIAATRARGGNVIAVGTTSMRALEAAARAADEAGRPLAATQAETDIFITPGYRFRVVDRLVTNFHLPKSTLLMLVSAFAGVETIRAAYQHAIDERYRFFSYGDAMLLTRRDTPEAPRA

SEQ ID NO: 64471 - protein, 355 aa, Burkholderia contaminans
  misc_feature (1)..(355): tr|A0A2S9P4V9|A0A2S9P4V9_9BURK S-adenosylmethionine:tRN A ribosyltransferase-isomerase OS=Burkholderia contamin ans OX=488447 GN=queA PE=3 SV=1
MFTLSDFDFNLPPELIAQTALPDRTASRLLEVDGTVAPARLTDRHFTELPSCIAAGDLLVFNDTKVLKARFFGQKASGGKIEVLIERVTGTHTALAQIRASKSPGAGTTLRLADAFDVTVGERVDPFFTLNFPAPCLDLIEQYGRLPLPPYIEHDPDATDETRYQTVYASNPGAVAAPTAGLHFDQPMLDRLDAMGVERATLTLHVGAGTFQPVRVDNIAEHKMHSEWYDLPQSLVDKIAATRARGGKVIAVGTTSMRALEAAARSADEAGRPLAATQAETDIFITPGYRFRVVDRLVTNFHLPKSTLLMLVSAFAGVETIRAAYRHAIDERYRFFSYGDAMLLTRRDVPEAPGA

SEQ ID NO: 64472 - protein, 355 aa, Burkholderia contaminans
  misc_feature (1)..(355): tr|A0A2S5DYP2|A0A2S5DYP2_9BURK S-adenosylmethionine:tRN A ribosyltransferase-isomerase OS=Burkholderia contamin ans OX=488447 GN=queA PE=3 SV=1
MFTLSDFDFNLPPELIAQTALPDRTASRLLEVDGTVAPARLVDRHFTALPSCIAAGDLLVFNDTKVLKARFFGQKASGGKIEVLIERVTGTHTALAQIRASKSPGAGTTLRLADAFDVTVGERVDPFFTLTFPAPCLDLIEQYGRLPLPPYIEHDPDATDETRYQTVYASNPGAVAAPTAGLHFDQPMLDRLDAMGVERATLTLHVGAGTFQPVRVDNIAEHKMHSEWYDLPQSLVDKIAATRARGGNVIAVGTTSMRALEAAARTADEAGRPLAATQAETDIFITPGYRFRVVDRLVTNFHLPKSTLLMLVSAFAGVETIRAAYRHAIAERYRFFSYGDAMLLTRRDTPEAASA

SEQ ID NO: 64473 - protein, 349 aa, Burkholderia dabaoshanensis
  misc_feature (1)..(349): tr|A0A2N7W1M6|A0A2N7W1M6_9BURK S-adenosylmethionine:tRN A ribosyltransferase-isomerase OS=Burkholderia dabaosha nensis OX=564714 GN=queA PE=3 SV=1
MFTLSDFDFNLPPELIAQTALPERSASRLLEVDTSAAPARLVDRRFAELPECLAPGDLLVFNDTKVLKARFFGQKASGGKIEVLIERLTGARTALAQIRASKSPAPGTVLTLADAFDVTVGERVEPFYTLHFPDECLTLIERYGRLPLPPYIEHDPDAADETRYQTVFARNPGAVAAPTAGLHFDEAVLARLEARGIESATLTLHVGAGTFQPVRVENIAEHKMHSEWYQLPQTLVDKIAATRARAGRVVAVGTTSMRALEAAARDAAAAGRPLAATSAETDIFITPGYRFRIVDRLVTNFHLPKSTLLMLVSAFAGVDAIRDAYRHAIEERYRFFSYGDAMLLTRAES

SEQ ID NO: 64474 - protein, 355 aa, Burkholderia diffusa
  misc_feature (1)..(355): tr|A0A1B4BPR3|A0A1B4BPR3_9BURK S-adenosylmethionine:tRN A ribosyltransferase-isomerase OS=Burkholderia diffusa OX=488732 GN=queA PE=3 SV=1
MFTLSDFDFNLPPELIAQTALPDRTASRLLEVDGAVEPARLVDRRFAELPSCIAPGDLLVFNDTKVLKARFFGQKASGGKIEVLIERVTGTHTALAQIRASKSPGAGTTLRLADAFDVTVGERVEPFFTLHFPQPCLTLIEQHGRLPLPPYIEHDADANDETRYQTVYAANPGAVAAPTAGLHFDQPLLEKLDAMGVERATLTLHVGAGTFQPVRVENIAEHRMHSEWYDLPQSLVDKIAATRARGGNVIAVGTTSMRALEAAARSADEAGRSLAAMQAETDIFITPGYRFRVVDRLVTNFHLPKSTLLMLVSAFAGVETIRAAYRHAIDERYRFFSYGDAMLLTRRDTPEAPRR

SEQ ID NO: 64475 - protein, 355 aa, Burkholderia dolosa
  misc_feature (1)..(355): tr|A0A0D5J4M1|A0A0D5J4M1_9BURK S-adenosylmethionine:tRN A ribosyltransferase-isomerase OS=Burkholderia dolosa A U0158 OX=350701 GN=queA PE=3 SV=1
MFTLSDFDFNLPPELIAQTALPERTASRLLDVDPAVEPARLVDRRFAELPSCIARGDLLVFNDTKVLKARFFGQKASGGKIEVLVERVTGTHTALAQIRASKSPGAGTTLRLADAFDVTVGERVEPFFTLYFPQPCLDLIERYGRLPLPPYIEHDPDATDETRYQTVYASNPGAVAAPTAGLHFDEPLLAKLDAMGVERATLTLHVGAGTFQPVRVENIAEHKMHSEWYDLPQSLVDKIAATRARGGNVIAVGTTSLRALEAAARSADEAGRPLAATQAETDIFITPGYRFRVVDRLITNFHLPKSTLMMLVSAFAGIETIRAAYRHAIERRYRFFSYGDAMLLTRRDTPEAPPA

SEQ ID NO: 64476 - protein, 405 aa, Burkholderia dolosa
  misc_feature (1)..(405): tr|A2WCI8|A2WCI8_9BURK S-adenosylmethionine:tRNA ribosy ltransferase-isomerase OS=Burkholderia dolosa AU0158 OX =350701 GN=queA PE=3 SV=1
MLRKYNSGFHVVRTNDAGQAAHPAIIAARAPHLRVSAVPAAPAGRFEPLRMFTLSDFDFNLPPELIAQTALPERTASRLLDVDPAVEPARLVDRRFAELPSCIARGDLLVFNDTKVLKARFFGQKASGGKIEVLVERVTGTHTALAQIRASKSPGAGTTLRLADAFDVTVGERVEPFFTLYFPQPCLDLIERYGRLPLPPYIEHDPDATDETRYQTVYASNPGAVAAPTAGLHFDEPLLAKLDAMGVERATLTLHVGAGTFQPVRVENIAEHKMHSEWYDLPQSLVDKIAATRARGGNVIAVGTTSLRALEAAARSADEAGRPLAATQAETDIFITPGYRFRVVDRLITNFHLPKSTLMMLVSAFAGIETIRAAYRHAIERRYRFFSYGDAMLLTRRDTPEAPPA

SEQ ID NO: 64477 - protein, 350 aa, Burkholderia gladioli
  misc_feature (1)..(350): tr|F2L964|F2L964_BURGS S-adenosylmethionine:tRNA ribosy ltransferase-isomerase OS=Burkholderia gladioli (strain BSR3) OX=999541 GN=queA PE=3 SV=1
MFKLSDFDFDLPPELIAQTALPERSASRLLEVDGSVAPTRLTDRRFTDLPECIGAGDLLVFNDTKVLKARFFGQKASGGKIEVLVERVIGSRTVLAQVRSSKSPVEGSTLRLAEAFEVTVGERVEPFFTLHFPEDCLALIERHGRLPLPPYIEHDPDATDETRYQTVFASNPGAVAAPTAGLHFDEALLATLRARGVETATLTLHVGAGTFQPVRVDNIAEHKMHSEWYELSDTLVAQIAATRARGGKVVAVGTTSMRALEAAARDAQREGRALAPTRAETDIFITPGYAFRVVDRLVTNFHLPKSTLLMLVSAFAGVETIRDAYRHAIAERYRFFSYGDAMLLTRRDPE

SEQ ID NO: 64478 - protein, 350 aa, Burkholderia gladioli
  misc_feature (1)..(350): tr|A0A095FH11|A0A095FH11_BURGA S-adenosylmethionine:tRN A ribosyltransferase-isomerase OS=Burkholderia gladioli OX=28095 GN=queA PE=3 SV=1
MFKLSDFDFDLPPELIAQTALPERSASRLLEVDGSVAPTRLTDRRFTDLPECIGAGDLLVFNDTKVLKARFFGQKASGGKIEVLVERVIGPRTVLAQIRSSKSPVEGSTLRLAEAFEVTVGERVEPFFTLHFPEDCLALIERHGRLPLPPYIEHDPDATDETRYQTVFASNPGAVAAPTAGLHFDEALLATLRARGVETATLTLHVGAGTFQPVRVDNIAEHKMHSEWYELSDTLVAQIAATRARGGKVVAVGTTSMRALEAAARDAQREGRALAPTRAETDIFITPGYAFRVVDRLVTNFHLPKSTLLMLVSAFAGVGTIRDAYRHAIAERYRFFSYGDAMLLTRRDPE

SEQ ID NO: 64479 - protein, 350 aa, Burkholderia glumae
  misc_feature (1)..(350): tr|A0A2J9HDF8|A0A2J9HDF8_BURGL S-adenosylmethionine:tRN A ribosyltransferase-isomerase OS=Burkholderia glumae O X=337 GN=queA PE=3 SV=1
MFKLSDFDFDLPPELIAQTALPERSASRLLEVGGTAGPARLVDRRFTELPDCLAAGDLLVFNDTKVLKARFFGQKASGGRIEVLIERVTGPRTALAQIRASKSPAAGATLTLADAFEVTVGERVEPFFTLHFPDDCLTLIERHGRLPLPPYIEHDPDATDETRYQTVFASNPGAVAAPTAGLHFDEALLATLRARGVETATLTLHVGAGTFQPVRVDNIADHRMHSEWYELTDALVERIAATRARGGRVIAVGTTSMRALEAAARDAEAAGRPLAATRAETDIFITPGYRFRVVDRLVTNFHLPKSTLLMLVSAFAGIEPIRAAYRHAIAERYRFFSYGDAMLLTRREPD

SEQ ID NO: 64480 - protein, 350 aa, Burkholderia glumae; identical to SEQ ID NO: 64479
  misc_feature (1)..(350): tr|C5AB59|C5AB59_BURGB S-adenosylmethionine:tRNA ribosy ltransferase-isomerase OS=Burkholderia glumae (strain B GR1) OX=626418 GN=queA PE=3 SV=1

SEQ ID NO: 64481 - protein, 350 aa, Burkholderia insecticola
  misc_feature (1)..(350): tr|R4WW25|R4WW25_9BURK S-adenosylmethionine:tRNA ribosy ltransferase-isomerase OS=Burkholderia insecticola OX=7 58793 GN=queA PE=3 SV=1
MFTLSDFDFNLPPELIAQSALAERSASRLLEVDNRATPAALIDRRFSELPDLIGPGDLLVFNDTKVLKARFFGQKASGGRVEVLVERLSGATTALAQIRASKSPVEGSTIRLADAFDVTVGERVEPFYTLHFPAECLTLIEQFGRLPLPPYIEHDADAYDETRYQTVYAANPGAVAAPTAGLHFDDALFARLDARGVERATLTLHVGAGTFQPVRVENIAEHKMHSEWYDLPQSLADRIAAVKARGNRVIAVGTTSMRALEAAARDAAHAGRPLAGSQAETDIFITPGYEFRVVDRLVTNFHLPKSTLLMLVSAFAGMDTIRDAYRHAIEQRYRFFSYGDAMLLTRRDPN

SEQ ID NO: 64482 - protein, 355 aa, Burkholderia lata
  misc_feature (1)..(355): tr|A0A3G3H3N9|A0A3G3H3N9_BURL3 S-adenosylmethionine:tRN A ribosyltransferase-isomerase OS=Burkholderia lata (st rain ATCC 17760 / DSM 23089 / LMG 22485 / NCIMB 9086 / R18194 / 383) OX=482957 GN=queA PE=3 SV=1
MFTLSDFDFNLPPELIAQTALPDRTASRLLEVDGTVAPARLVDRQFTELPSCIAAGDLLVFNDTKVLKARFFGQKASGGKIEVLIERVTGTHTALAQIRASKSPGAGTTLRLADAFDVTVGERVEPFFTLNFPEPCLDLIEQYGRLPLPPYIEHDPDATDETRYQTVYASNPGAVAAPTAGLHFDQPMLDRLDAMGVERATLTLHVGAGTFQPVRVDNIAEHKMHSEWYDLPQSLVDKIAATRARGGNVIAVGTTSMRALEAAARAADEAGRPLAATQAETDIFITPGYRFRVVDRLVTNFHLPKSTLLMLVSAFAGVETIRAAYRHAIEQRYRFFSYGDAMLLTRRDTPEAPRA

SEQ ID NO: 64483 - protein, 355 aa, Burkholderia lata
  misc_feature (1)..(355): sp|Q39JF4|QUEA_BURL3 S-adenosylmethionine:tRNA ribosylt ransferase-isomerase OS=Burkholderia lata (strain ATCC 17760 / DSM 23089 / LMG 22485 / NCIMB 9086 / R18194 / 3 83) OX=482957 GN=queA PE=3 SV=1
MFTLSDFDFNLPPELIAQTALPDRTASRLLEVDGTVAPARLVDRHFTELPSCISAGDLLVFNDTKVLKARFFGQKASGGKIEVLIERVTGTHTALAQIRASKSPGAGTTLRLADAFDVTVGERVDPFFTLNFPEPCLDLIEQYGRLPLPPYIEHDPDATDETRYQTVYASNPGAVAAPTAGLHFDQPMLDRLDAMGVERATLTLHVGAGTFQPVRVDNIAEHKMHSEWYDLPQSLVDKIAATRARGGNVIAVGTTSMRALEAAARAADEAGRPLAATQAETDIFITPGYRFRVVDRLVTNFHLPKSTLLMLVSAFAGVETIRAAYRHAIEQRYRFFSYGDAMLLTRRDTPEAPLA

SEQ ID NO: 64484 - protein, 358 aa, Burkholderia latens
  misc_feature (1)..(358): tr|A0A1B4NPL4|A0A1B4NPL4_9BURK S-adenosylmethionine:tRN A ribosyltransferase-isomerase OS=Burkholderia latens O X=488446 GN=queA PE=3 SV=1
MFTLSDFDFNLPPELIAQTALPDRTASRLLEVDATVEPARLVDRRFTELLSCIAPGDLLVFNDTKVLKARFFGQKASGGKIEVLIERVTGTQTALAQIRASKSPGAGTTLRLADAFDVTVGERVEPFFTLHFPAPCLDLIEQYGRLPLPPYIEHDADANDETRYQTVYASNPGAVAAPTAGLHFDQPLLDKLDAIGVERATLTLHVGAGTFQPVRVENIAEHKMHSEWYDLPQTLVDKIAATRARGGSVIAVGTTSMRALEAAARDADEAGRPLAATQAETDIFITPGYRFRVVDRLVTNFHLPKSTLLMLVSAFAGVETIRAAYRHAIEARYRFFSYGDAMLLTRRDTPEAPEAPRA

SEQ ID NO: 64485 - protein, 360 aa, Burkholderia mallei
  misc_feature (1)..(360): sp|Q62H77|QUEA_BURMA S-adenosylmethionine:tRNA ribosylt ransferase-isomerase OS=Burkholderia mallei (strain ATC C 23344) OX=243160 GN=queA PE=3 SV=1
MLTLSDFDFDLPPELIAQTALPERSASRLLEVDNTNPSAPPRLIDRRFAELPACVAPGDLLVFNDTKVLKARFFGRKASGGKIEVLIERVTGERIALAQIRASKSPPPGTTLTLADAFDVTVGERVEPFFTLHFPDNCLVLIERHGRLPLPPYIEHAPDAADETRYQTVFAANPGAVAAPTAGLHFDDAVLAALEARGVERATLTLHVGAGTFQPVRVENLAEHRMHSESYELTDALVEKIAATRARGGRVIAVGTTSMRALEAAARDAQAAGRPLAATRAETDIFITPGYRFRVVDRLVTNFHLPKSTLLMLVSAFAGIETIRAAYRHAIDARYRFFSYGDAMLLTRRDDAAEATHGGA

SEQ ID NO: 64486 - protein, 360 aa, Burkholderia mallei
  misc_feature (1)..(360): sp|A3MPB4|QUEA_BURM7 S-adenosylmethionine:tRNA ribosylt ransferase-isomerase OS=Burkholderia mallei (strain NCT C 10247) OX=320389 GN=queA PE=3 SV=1
MLTLSDFDFDLPPELIAQTALPERSASRLLEVDNTNPSAPPRLIDRRFAELPACVAPGDLLVFNDTKVLKARFFGRKASGGKIEVLIERVTGERTALAQIRASKSPPPGTTLTLADAFDVTVGERVEPFFTLHFPDNCLVLIERHGRLPLPPYIEHAPDAADETRYQTVFAANPGAVAAPTAGLHFDDAVLAALEARGVERATLTLHVGAGTFQPVRVENLAEHRMHSESYELTDALVEKIAATRARGGRVIAVGTTSMRALEAAARDAQAAGRPLAATRAETDIFITPGYRFRVVDRLVTNFHLPKSTLLMLVSAFAGIETIRAAYRHAIDARYRFFSYGDAMLLTRRDDAAEATHGGA

SEQ ID NO: 64487 - protein, 355 aa, Burkholderia metallica
  misc_feature (1)..(355): tr|A0A1B4HR21|A0A1B4HR21_9BURK S-adenosylmethionine:tRN A ribosyltransferase-isomerase OS=Burkholderia metallic a OX=488729 GN=queA PE=3 SV=1
MFTLSDFDFNLPPELIAQTALPDRTASRLLEVDGTVAPARLVDRRFTELPSCIAAGDLLVFNDTKVLKARFFGQKASGGKVEVLIERVTGTHTALAQIRASKSPGAGTTLRLADAFDVTVGERVEPFFTLNFPEPCLDLIEQYGRLPLPPYIEHDPDATDETRYQTVYASNPGAVAAPTAGLHFDQPMLERLDAMGVERATLTLHVGAGTFQPVRVDNIAEHKMHSEWYDLPQSLVDRIAATRARGGNVIAVGTTSMRALEAAARAADEAGRPLAATQAETDIFITPGYRFRVVDRLITNFHLPKSTLLMLVSAFAGVDTIRAAYRHAIDERYRFFSYGDAMLLTRRDTPEAPRV

SEQ ID NO: 64488 - protein, 355 aa, Burkholderia multivorans
  misc_feature (1)..(355): tr|A0A2S9LVU1|A0A2S9LVU1_9BURK S-adenosylmethionine:tRN A ribosyltransferase-isomerase OS=Burkholderia multivor ans OX=87883 GN=queA PE=3 SV=1
MFTLSDFDFNLPPELIAQTALPDRTASRLLEVDTTAEPARFVDRRFAELPACIARGDLLVFNDTKVLKARFFGQKASGGRIEVLIERVTGSHTALAQIRASKSPGAGTTLRLADAFDVTVGERVEPFFTLHFPQPCLELIEQYGRLPLPPYIEHDPDATDETRYQTVYASNPGAVAAPTAGLHFDEPLLAKLDAMGIERATLTLHVGAGTFQPVRVENIAEHKMHSEWYELPQSLVDKIAATRARGGKVIAVGTTSMRALEAAARDAEAAGRPLAATQAETDIFITPGYRFRVVDRLVTNFHLPKSTLMMLVSAFAGIETIRAAYRHAIEQRYRFFSYGDAMLLTRRDTPEATHA
